United States Patent Application Publication US 2026/0327627 A1, published October 22, 2026 (application 19/571,731).

The application's sequence listing, which the Patent Office published only in electronic form, follows.

SEQUENCE LISTING (14966 sequences)

SEQ ID NO: 1 - DNA, 8853 bp, Homo sapiens
  source 1..8853: mol_type = genomic DNA
agtggcaggagcgccgcgcaccgccagccgcagggggcgtgggatgggggcggccggggaggggggcgcccacactgactagagccaaccgcgcacttcaaaagggtgtcggtgccgcgctcccctcccgcggcccgggaacttcaaagcgggccgtgctgccccggctgcctcgctctgctctggggcctcgcagccccggcgcggccgcctggtggcgatgacccgggcgctctgctcagcgctccgccaggctctcctgctgctcgcagcggccgccgagctctcgccaggactgaagtgtgtatgtcttttgtgtgattcttcaaacttcacctgccaaacagaaggagcatgttgggcatcagtcatgctaaccaatggaaaagagcaggtgatcaaatcctgtgtctcccttccagaactgaatgctcaagtcttctgtcatagttccaacaatgttaccaaaaccgaatgctgcttcacagatttttgcaacaacataacactgcaccttccaacagcatcaccaaatgccccaaaacttggacccatggagctggccatcattattactgtgcctgtttgcctcctgtccatagctgcgatgctgacagtatgggcatgccagggtcgacagtgctcctacaggaagaaaaagagaccaaatgtggaggaaccactctctgagtgcaatctggtaaatgctggaaaaactctgaaagatctgatttatgatgtgaccgcctctggatctggctctggtctacctctgttggttcaaaggacaattgcaaggacgattgtgcttcaggaaatagtaggaaaaggtagatttggtgaggtgtggcatggaagatggtgtggggaagatgtggctgtgaaaatattctcctccagagatgaaagatcttggtttcgtgaggcagaaatttaccagacggtcatgctgcgacatgaaaacatccttggtttcattgctgctgacaacaaagataatggaacttggactcaactttggctggtatctgaatatcatgaacagggctccttatatgactatttgaatagaaatatagtgaccgtggctggaatgatcaagctggcgctctcaattgctagtggtctggcacaccttcatatggagattgttggtacacaaggtaaacctgctattgctcatcgagacataaaatcaaagaatatcttagtgaaaaagtgtgaaacttgtgccatagcggacttagggttggctgtgaagcatgattcaatactgaacactatcgacatacctcagaatcctaaagtgggaaccaagaggtatatggctcctgaaatgcttgatgatacaatgaatgtgaatatctttgagtccttcaaacgagctgacatctattctgttggtctggtttactgggaaatagcccggaggtgttcagtcggaggaattgttgaggagtaccaattgccttattatgacatggtgccttcagatccctcgatagaggaaatgagaaaggttgtttgtgaccagaagtttcgaccaagtatcccaaaccagtggcaaagttgtgaagcactccgagtcatggggagaataatgcgtgagtgttggtatgccaacggagcggcccgcctaactgctcttcgtattaagaagactatatctcaactttgtgtcaaagaagactgcaaagcctaatgatgataattatgttaaaaagaaatctctcatagctttcttttccattttcccctttatgtgaatgtttttgccattttttttttgttctacctcaaagataagacagtacagtatttaagtgcccataaggcagcatgaaaagataactctaaagttaagcatgggcaggagttgacttcatccaatctctatgttatgtttaattttattttgaaagcaacacctcaactcatctttttatttaataaggaagaaatatattacaaaagtataaaataagctctataaaaatgttatagtcattaagtttttattttacttgaaccaagagcacatgaatgaacaggaaaagatgtaaaaacatttttttctgagatgaaaacatattaattaaacatgcaaattagagcatgctatctttaggtgatgcaatctatgtttccccctttttaagttagcaggactttttaaaaataaatattgctctaaactttaatatatcgaacgtgagagtggagctgcttagtggaagatgtaagtgaggtgggtgtcccatgtgcttggtctccccttctgctgttctcctgttcttcataatccactactgcagcagtccctgaaccactaaacttgttcctttcatttacaaaagagatacctgacatcctgagacactgagaaatgtcctgaagtcacacagctaatggcagaactggcactaggtccaaatcttgtgataatgaacaccgtaaggttagctagcttcctactttcccttgaatagtgcttttctccctatgtaatatcttttattatgatatttgtggtttagaaggcatattgagttattttgcagaatcataatggacccgcacaaaatctcagaaccatatctgttgacattttttctcatagaaatatcatggttaccccatttgttaatgagcattaatgttttctgaacacttccaaagattaatcaaacataaatattcattgtctgaaaatgtctttaagatacaattcagaggtccctatttcctttgtacatacacacttagaaagaaaagacagaaaaggaagaggaaggaaggaaatattttgagaatatattgagaagaattaagaaaactcttcaatgaagtgttaacaaccaaaccctacagacggtatcagaaacagcaaatagatattcctctaccctttcacagtgagtgagtgagtacagaagaatgctcatgatagttttgccttcattctactttctgtggacacagagtaatgaatatttaatgggacattaaatatgcccttcaaatctataattttactttggtaaacgagatttaacatgatgtcttttatgctcctaaaacatcttttttcaaactccattccttagaacattcttctactgagatgatccaagaccaaaagtgttctttggtacttgcttataaagtgatagtacatgttagcatataatgtattttgaagagtgaagtaaatgctattgataacagtaaaaaaaaaaaaaaaaactaataacagtaaagaaatgctacttgatttttttttaaactggattgctcagattacctgatcgtggtggaacccttttattaagaggaggggaaactttttactatcccatatttaactgttctataaagcaaagcacagcttgggtaatagcgttctgaaggatatacttctgtattttctcatagagtacaatttagtgattatgcttcatttcactatggaaatatgttactgaatctatcttcattttactgagttgaaataaggaaggcaaaaaactgacagctatggagtttgcgtgtacttccatactcgttaatgctctcatccacttattaaataatcatagagcacccatatcttgcttgccacaatatcgggtacaagagggaatacaaagatagataggtcctgccctcagggattttaaagtctaatttgggaatgggaatagggatgtgagtgtgtgggggaagagattaaattgacagataaaatacgaagtgggatgtcttgagttctgcatgacagtgggtttctaggataggtctgaaaattgctttcatttgcaacacatttagaaagtagctttatttggatattacagacaatctaaatatatcatcagtttttaaaagtgcctatgtgaagtgatttttaaaaagagcctatgtgaaggggtaatcttgcttgttcttgttactaatttctcatagattgtttttctgcatatataagaacgaaattatttatttactatggttgtacgtgcctcaaataaacaagaatgatatttcctgttttatttacttatgttgggtaaatatgcttattgaatttttaagagaggattttttaccatctccatttttcttgtcattatgttttgtagcttatttgagggtgtctaaatataatttcatattttattggttcaactttcactctgaagaaatccgtatgttagtacattttgaggtatttttcttgttcttgtgttgtttaactatgactcctaactgagtagtcttatatttcaattacaaaatacattttttaagaaagggaatagagcagcaaaaatgataaggaaaatgttaaaagttgtaatatttcctttactcttaacaggattatatatagaacatgctcacttacaaaaataggatgatgaagtttagagcataaggcaggcttcttgtatatacttatgctgtcaaatgttatattgtttttaatggagtcccattgtgtaatatttatttcttttacattttgttataagcaaaaaaaaaaaaaattctccttaggttatgttcagagtatcagtgttctttactccttacagatattttggctttggggtataatacaagacttgggaaaacactattatgaattttcagtactgtataaagtggtgatgggatttaaatgcagcatcactttctgaaaataagagaaacattatttgttgtcagtatttcagcatgaacttgttgccttgtaaattttgcctttaagtttgtaattggtacagattctgttgtatgctttcttctatgtctaaaatatttggcatgtcacatctagaattcttaatttatgttctgacttgagagttaagtgaaacatgactgtcgtgcactattttaggcatagcacttgcttttcatctttatactttcaattaactttgcattttaaatttccatgattgtatgaaaatagtaacctggttgcagtatctgaaaaaattaaaattagcttttatttaaaaatgaaaatctacaatagattcattaggttagaagttccagaataatttattattttattacacctactattgtagaattactaataaaacaaaacaaaactactcctattttcctggaattttgccaccatgtgacttattggggcagagaaaactcagggttgtctttgagtctgcacaaaagcaccagggaacctgcttagcaaatcgtctgaaaacagggagctgatgtttgccattatacaaagtttgagtaaacaacttaaaattgcttgttagggcatagtctttgattgaaataagtatgagaatgtatttggctaaataaatgtatttaaaatatacaaattttatttcccactggaaaattaagaaagtagcagtaccaaatgaataaaagctggcagttgatgtcttcaataatcattcctttaaaataaattcacaaacacatcattacaagctacttagaaatgtttagtattcgtatcttaaaatggcaccattgtggttttcaaagatattttaaacatcttttgtgaaacatactatttctgtttgacaatgctttgttctagctctgtgtgctgatacctacatggagtttttctgctattttagtgaaaacagtaattcttttatcttgagagctgcttctaaataacaaaaaagttaattggaatgtaagtttttaaaaaatgttaatattaaatagaatttttataatatgggcatttttcaaaacattttaatgaaaatatatagatatttgactttctttttttcatctagccttgctttatatttcattatttttctcactttttttcttaatattccctcactatctttcaacattatcattagttcctaattttaaaaataactcttatttaacttaaccgtctggaatttagccttctaatgaaagagaatcccttagtactctcagagattatataaagttattccaattttgtgtagatgacgaaaccaaggatcagagattaaatgactactagttactagcagaactcttatgaaagcctggtggtgacacccagcactgttccctgccatatccccaacttttactgattaaaaattaattcgcatgcatctaaacctaccttgaatgcacactaacgtaatgtgccattcaatgatgatgataaaatcccacttttctttgggtttctactaaaataatttactcactcagagtgaggtcaatgagaaaaactaaactaggctaagaaagagttgtagaatggttgttgagctaagtaggcaaccactggggtgctgataaaattaatggataaaatttaggaactgtgagagtatagaatttcttagtgcaagtaatgattagagaagcttcctgacatcccccaccctttctgtaaggactgttctttctctttgtaccttggaatgggggtgaaaggtgatttgatagctgaatttgggactatgtccagtgggatattatctaacttttctctctttctcttttttttcccctcagtttctcattagtttgtctttggcattcatcttcttttagtgcattaaaaaatgtttggcagatctcatcaatcccaagtcactctataattcctgtatttctttagttgtcgtttaacctgtccaaacttctacacaatgaacttcttaacaagattttaagttctctgtataagaggtttcacctcataacttctccagtaatccttcatttggcactatagagtatttgttaatggcagagatgatttttcttttaaaacctaaaaagactagctgttatttgtattctagcttttagctaacatataaagaatgtctacttttgctttaatgctaaattccgcttgagaaatagtaactgggaaagacaatttgaaatatatgccccataatgtgattgttaaatttatttctgctgttccataccattgctttgttttgcttttgacaaactaagccattatgctattagtttggaatataatactacagcaaaattaggtaacaatccctattttaaaattcccctaacaataatagaactgccagcatacttttctctttcagttgtagatgaatacattcgagagaatatgagctgtatttcatcctagattttaatattttcagatgtgactgtatttcctgatcattggtccaagttgtcctaaaagaaatttttctctccagacctaacagttttaactgcaagagtttactgtgggttatgttaatctgaattttaatagggccactaagaatctgagtgccttaggagattacccttatacccactgccatcacatccagtcaggcctgttgtgctctatataaatcttcccagctgaggggcaggtgcgggctaaaatccaactgcaattggctcccagacataattttatattttacagagaagcatcttattggcttatatgtgtttaaagaatggtctggcttatacatcttcagaaaatgagaattaaaaagtcaaaataattcttgacatctacagattgaacaaagaacttagaagaaataatactttatcttttcatcctggcattcctgagagaagagaaattgattgtttatcatgttggtttaatttttcaacccagacaatctgcagcaaggcacatggaccccaattttgatatcgtccatacagttttcattctatgcatggagctaattactgactttgcctgtaaagagaggattgtgtgcctaaattttgtctaacaaatgcaagcgtagaatgacatttactaatatttctatttcttccataggctaaataatagtaactaagtatttttaaggacacagccctttttttctctttatacaaaatgagagtatctgagccaaaatattaaattctagttcttttccgcaatgactagtgtcaagctcatgtactcttctgattctagactggagaagattattcaaacttgatctgtgtttcaggtttttaaatgtcctaaaaacagaaaattagattcagatctcaaaaaaggaattttggattgactttcaaagtactaatactaattatacttttcttttggtagcgtgactcttcttatacctaagaacatattacaaatgtcaaaaccattgcattttgacattgcaaaacatgccttgaactcttgaactactgtgaaaagaatcaccgttgtaaagactttttgtaagctagctgatactcttaagtatgtaaaaagattgtctttcagccgacaggcccaaaggaatgtatataaggaaggaatatgaaaaaataaattaggttttaaaataggaattgggcaataaactgtatcaaaaatatgtagatggattttagtagttgtaatttaaatgtggaaggtgaagagaatttcaaactccaaagagaaatgaatgatattcagatgtttcattaatttctagtctgtgaaaatatgcattttatagtaatatgtatagacttattttatttagaaataatagtgttttagaatttattaaaaactcagtgatagcctttataccaaaatgtttaactttaccaacagcaagtcataaaagtatttattttaaagctttttaatattatcgtgtaactttcatctgtcttcagatgtaaataattatctgcctaaatgttatatttttatgtatgcattttctgaaaatgtattgttttgtaaagtgggaaagataataaatcaagcacttcttgcacttgtttctgtgaagcatatagaactctattttaaataaaggaagatgtgtcgta

SEQ ID NO: 2 - DNA, 8853 bp, Homo sapiens
  source 1..8853: mol_type = genomic DNA
tacgacacatcttcctttatttaaaatagagttctatatgcttcacagaaacaagtgcaagaagtgcttgatttattatctttcccactttacaaaacaatacattttcagaaaatgcatacataaaaatataacatttaggcagataattatttacatctgaagacagatgaaagttacacgataatattaaaaagctttaaaataaatacttttatgacttgctgttggtaaagttaaacattttggtataaaggctatcactgagtttttaataaattctaaaacactattatttctaaataaaataagtctatacatattactataaaatgcatattttcacagactagaaattaatgaaacatctgaatatcattcatttctctttggagtttgaaattctcttcaccttccacatttaaattacaactactaaaatccatctacatatttttgatacagtttattgcccaattcctattttaaaacctaatttattttttcatattccttccttatatacattcctttgggcctgtcggctgaaagacaatctttttacatacttaagagtatcagctagcttacaaaaagtctttacaacggtgattcttttcacagtagttcaagagttcaaggcatgttttgcaatgtcaaaatgcaatggttttgacatttgtaatatgttcttaggtataagaagagtcacgctaccaaaagaaaagtataattagtattagtactttgaaagtcaatccaaaattccttttttgagatctgaatctaattttctgtttttaggacatttaaaaacctgaaacacagatcaagtttgaataatcttctccagtctagaatcagaagagtacatgagcttgacactagtcattgcggaaaagaactagaatttaatattttggctcagatactctcattttgtataaagagaaaaaaagggctgtgtccttaaaaatacttagttactattatttagcctatggaagaaatagaaatattagtaaatgtcattctacgcttgcatttgttagacaaaatttaggcacacaatcctctctttacaggcaaagtcagtaattagctccatgcatagaatgaaaactgtatggacgatatcaaaattggggtccatgtgccttgctgcagattgtctgggttgaaaaattaaaccaacatgataaacaatcaatttctcttctctcaggaatgccaggatgaaaagataaagtattatttcttctaagttctttgttcaatctgtagatgtcaagaattattttgactttttaattctcattttctgaagatgtataagccagaccattctttaaacacatataagccaataagatgcttctctgtaaaatataaaattatgtctgggagccaattgcagttggattttagcccgcacctgcccctcagctgggaagatttatatagagcacaacaggcctgactggatgtgatggcagtgggtataagggtaatctcctaaggcactcagattcttagtggccctattaaaattcagattaacataacccacagtaaactcttgcagttaaaactgttaggtctggagagaaaaatttcttttaggacaacttggaccaatgatcaggaaatacagtcacatctgaaaatattaaaatctaggatgaaatacagctcatattctctcgaatgtattcatctacaactgaaagagaaaagtatgctggcagttctattattgttaggggaattttaaaatagggattgttacctaattttgctgtagtattatattccaaactaatagcataatggcttagtttgtcaaaagcaaaacaaagcaatggtatggaacagcagaaataaatttaacaatcacattatggggcatatatttcaaattgtctttcccagttactatttctcaagcggaatttagcattaaagcaaaagtagacattctttatatgttagctaaaagctagaatacaaataacagctagtctttttaggttttaaaagaaaaatcatctctgccattaacaaatactctatagtgccaaatgaaggattactggagaagttatgaggtgaaacctcttatacagagaacttaaaatcttgttaagaagttcattgtgtagaagtttggacaggttaaacgacaactaaagaaatacaggaattatagagtgacttgggattgatgagatctgccaaacattttttaatgcactaaaagaagatgaatgccaaagacaaactaatgagaaactgaggggaaaaaaaagagaaagagagaaaagttagataatatcccactggacatagtcccaaattcagctatcaaatcacctttcacccccattccaaggtacaaagagaaagaacagtccttacagaaagggtgggggatgtcaggaagcttctctaatcattacttgcactaagaaattctatactctcacagttcctaaattttatccattaattttatcagcaccccagtggttgcctacttagctcaacaaccattctacaactctttcttagcctagtttagtttttctcattgacctcactctgagtgagtaaattattttagtagaaacccaaagaaaagtgggattttatcatcatcattgaatggcacattacgttagtgtgcattcaaggtaggtttagatgcatgcgaattaatttttaatcagtaaaagttggggatatggcagggaacagtgctgggtgtcaccaccaggctttcataagagttctgctagtaactagtagtcatttaatctctgatccttggtttcgtcatctacacaaaattggaataactttatataatctctgagagtactaagggattctctttcattagaaggctaaattccagacggttaagttaaataagagttatttttaaaattaggaactaatgataatgttgaaagatagtgagggaatattaagaaaaaaagtgagaaaaataatgaaatataaagcaaggctagatgaaaaaaagaaagtcaaatatctatatattttcattaaaatgttttgaaaaatgcccatattataaaaattctatttaatattaacattttttaaaaacttacattccaattaacttttttgttatttagaagcagctctcaagataaaagaattactgttttcactaaaatagcagaaaaactccatgtaggtatcagcacacagagctagaacaaagcattgtcaaacagaaatagtatgtttcacaaaagatgtttaaaatatctttgaaaaccacaatggtgccattttaagatacgaatactaaacatttctaagtagcttgtaatgatgtgtttgtgaatttattttaaaggaatgattattgaagacatcaactgccagcttttattcatttggtactgctactttcttaattttccagtgggaaataaaatttgtatattttaaatacatttatttagccaaatacattctcatacttatttcaatcaaagactatgccctaacaagcaattttaagttgtttactcaaactttgtataatggcaaacatcagctccctgttttcagacgatttgctaagcaggttccctggtgcttttgtgcagactcaaagacaaccctgagttttctctgccccaataagtcacatggtggcaaaattccaggaaaataggagtagttttgttttgttttattagtaattctacaatagtaggtgtaataaaataataaattattctggaacttctaacctaatgaatctattgtagattttcatttttaaataaaagctaattttaattttttcagatactgcaaccaggttactattttcatacaatcatggaaatttaaaatgcaaagttaattgaaagtataaagatgaaaagcaagtgctatgcctaaaatagtgcacgacagtcatgtttcacttaactctcaagtcagaacataaattaagaattctagatgtgacatgccaaatattttagacatagaagaaagcatacaacagaatctgtaccaattacaaacttaaaggcaaaatttacaaggcaacaagttcatgctgaaatactgacaacaaataatgtttctcttattttcagaaagtgatgctgcatttaaatcccatcaccactttatacagtactgaaaattcataatagtgttttcccaagtcttgtattataccccaaagccaaaatatctgtaaggagtaaagaacactgatactctgaacataacctaaggagaattttttttttttttgcttataacaaaatgtaaaagaaataaatattacacaatgggactccattaaaaacaatataacatttgacagcataagtatatacaagaagcctgccttatgctctaaacttcatcatcctatttttgtaagtgagcatgttctatatataatcctgttaagagtaaaggaaatattacaacttttaacattttccttatcatttttgctgctctattccctttcttaaaaaatgtattttgtaattgaaatataagactactcagttaggagtcatagttaaacaacacaagaacaagaaaaatacctcaaaatgtactaacatacggatttcttcagagtgaaagttgaaccaataaaatatgaaattatatttagacaccctcaaataagctacaaaacataatgacaagaaaaatggagatggtaaaaaatcctctcttaaaaattcaataagcatatttacccaacataagtaaataaaacaggaaatatcattcttgtttatttgaggcacgtacaaccatagtaaataaataatttcgttcttatatatgcagaaaaacaatctatgagaaattagtaacaagaacaagcaagattaccccttcacataggctctttttaaaaatcacttcacataggcacttttaaaaactgatgatatatttagattgtctgtaatatccaaataaagctactttctaaatgtgttgcaaatgaaagcaattttcagacctatcctagaaacccactgtcatgcagaactcaagacatcccacttcgtattttatctgtcaatttaatctcttcccccacacactcacatccctattcccattcccaaattagactttaaaatccctgagggcaggacctatctatctttgtattccctcttgtacccgatattgtggcaagcaagatatgggtgctctatgattatttaataagtggatgagagcattaacgagtatggaagtacacgcaaactccatagctgtcagttttttgccttccttatttcaactcagtaaaatgaagatagattcagtaacatatttccatagtgaaatgaagcataatcactaaattgtactctatgagaaaatacagaagtatatccttcagaacgctattacccaagctgtgctttgctttatagaacagttaaatatgggatagtaaaaagtttcccctcctcttaataaaagggttccaccacgatcaggtaatctgagcaatccagtttaaaaaaaaatcaagtagcatttctttactgttattagtttttttttttttttttactgttatcaatagcatttacttcactcttcaaaatacattatatgctaacatgtactatcactttataagcaagtaccaaagaacacttttggtcttggatcatctcagtagaagaatgttctaaggaatggagtttgaaaaaagatgttttaggagcataaaagacatcatgttaaatctcgtttaccaaagtaaaattatagatttgaagggcatatttaatgtcccattaaatattcattactctgtgtccacagaaagtagaatgaaggcaaaactatcatgagcattcttctgtactcactcactcactgtgaaagggtagaggaatatctatttgctgtttctgataccgtctgtagggtttggttgttaacacttcattgaagagttttcttaattcttctcaatatattctcaaaatatttccttccttcctcttccttttctgtcttttctttctaagtgtgtatgtacaaaggaaatagggacctctgaattgtatcttaaagacattttcagacaatgaatatttatgtttgattaatctttggaagtgttcagaaaacattaatgctcattaacaaatggggtaaccatgatatttctatgagaaaaaatgtcaacagatatggttctgagattttgtgcgggtccattatgattctgcaaaataactcaatatgccttctaaaccacaaatatcataataaaagatattacatagggagaaaagcactattcaagggaaagtaggaagctagctaaccttacggtgttcattatcacaagatttggacctagtgccagttctgccattagctgtgtgacttcaggacatttctcagtgtctcaggatgtcaggtatctcttttgtaaatgaaaggaacaagtttagtggttcagggactgctgcagtagtggattatgaagaacaggagaacagcagaaggggagaccaagcacatgggacacccacctcacttacatcttccactaagcagctccactctcacgttcgatatattaaagtttagagcaatatttatttttaaaaagtcctgctaacttaaaaagggggaaacatagattgcatcacctaaagatagcatgctctaatttgcatgtttaattaatatgttttcatctcagaaaaaaatgtttttacatcttttcctgttcattcatgtgctcttggttcaagtaaaataaaaacttaatgactataacatttttatagagcttattttatacttttgtaatatatttcttccttattaaataaaaagatgagttgaggtgttgctttcaaaataaaattaaacataacatagagattggatgaagtcaactcctgcccatgcttaactttagagttatcttttcatgctgccttatgggcacttaaatactgtactgtcttatctttgaggtagaacaaaaaaaaaatggcaaaaacattcacataaaggggaaaatggaaaagaaagctatgagagatttctttttaacataattatcatcattaggctttgcagtcttctttgacacaaagttgagatatagtcttcttaatacgaagagcagttaggcgggccgctccgttggcataccaacactcacgcattattctccccatgactcggagtgcttcacaactttgccactggtttgggatacttggtcgaaacttctggtcacaaacaacctttctcatttcctctatcgagggatctgaaggcaccatgtcataataaggcaattggtactcctcaacaattcctccgactgaacacctccgggctatttcccagtaaaccagaccaacagaatagatgtcagctcgtttgaaggactcaaagatattcacattcattgtatcatcaagcatttcaggagccatatacctcttggttcccactttaggattctgaggtatgtcgatagtgttcagtattgaatcatgcttcacagccaaccctaagtccgctatggcacaagtttcacactttttcactaagatattctttgattttatgtctcgatgagcaatagcaggtttaccttgtgtaccaacaatctccatatgaaggtgtgccagaccactagcaattgagagcgccagcttgatcattccagccacggtcactatatttctattcaaatagtcatataaggagccctgttcatgatattcagataccagccaaagttgagtccaagttccattatctttgttgtcagcagcaatgaaaccaaggatgttttcatgtcgcagcatgaccgtctggtaaatttctgcctcacgaaaccaagatctttcatctctggaggagaatattttcacagccacatcttccccacaccatcttccatgccacacctcaccaaatctaccttttcctactatttcctgaagcacaatcgtccttgcaattgtcctttgaaccaacagaggtagaccagagccagatccagaggcggtcacatcataaatcagatctttcagagtttttccagcatttaccagattgcactcagagagtggttcctccacatttggtctctttttcttcctgtaggagcactgtcgaccctggcatgcccatactgtcagcatcgcagctatggacaggaggcaaacaggcacagtaataatgatggccagctccatgggtccaagttttggggcatttggtgatgctgttggaaggtgcagtgttatgttgttgcaaaaatctgtgaagcagcattcggttttggtaacattgttggaactatgacagaagacttgagcattcagttctggaagggagacacaggatttgatcacctgctcttttccattggttagcatgactgatgcccaacatgctccttctgtttggcaggtgaagtttgaagaatcacacaaaagacatacacacttcagtcctggcgagagctcggcggccgctgcgagcagcaggagagcctggcggagcgctgagcagagcgcccgggtcatcgccaccaggcggccgcgccggggctgcgaggccccagagcagagcgaggcagccggggcagcacggcccgctttgaagttcccgggccgcgggaggggagcgcggcaccgacacccttttgaagtgcgcggttggctctagtcagtgtgggcgcccccctccccggccgcccccatcccacgccccctgcggctggcggtgcgcggcgctcctgccact

SEQ ID NO: 3 - DNA, 8761 bp, Homo sapiens
  source 1..8761: mol_type = genomic DNA
gttgcgctgccgtcgggcaggtggccgagccccgcgggagctgtcgtcggggccgaattcactgcgccaaggtccagcggaaagctggggcatcccggcgaccgcagggtgtcccttcgcaaattcatcaggcgaaggggaggcggaagctcctggccgctgctctgggggagggctccgagctccaacctgcaagtccaggactgaagtgtgtatgtcttttgtgtgattcttcaaacttcacctgccaaacagaaggagcatgttgggcatcagtcatgctaaccaatggaaaagagcaggtgatcaaatcctgtgtctcccttccagaactgaatgctcaagtcttctgtcatagttccaacaatgttaccaaaaccgaatgctgcttcacagatttttgcaacaacataacactgcaccttccaacagcatcaccaaatgccccaaaacttggacccatggagctggccatcattattactgtgcctgtttgcctcctgtccatagctgcgatgctgacagtatgggcatgccagggtcgacagtgctcctacaggaagaaaaagagaccaaatgtggaggaaccactctctgagtgcaatctggtaaatgctggaaaaactctgaaagatctgatttatgatgtgaccgcctctggatctggctctggtctacctctgttggttcaaaggacaattgcaaggacgattgtgcttcaggaaatagtaggaaaaggtagatttggtgaggtgtggcatggaagatggtgtggggaagatgtggctgtgaaaatattctcctccagagatgaaagatcttggtttcgtgaggcagaaatttaccagacggtcatgctgcgacatgaaaacatccttggtttcattgctgctgacaacaaagataatggaacttggactcaactttggctggtatctgaatatcatgaacagggctccttatatgactatttgaatagaaatatagtgaccgtggctggaatgatcaagctggcgctctcaattgctagtggtctggcacaccttcatatggagattgttggtacacaaggtaaacctgctattgctcatcgagacataaaatcaaagaatatcttagtgaaaaagtgtgaaacttgtgccatagcggacttagggttggctgtgaagcatgattcaatactgaacactatcgacatacctcagaatcctaaagtgggaaccaagaggtatatggctcctgaaatgcttgatgatacaatgaatgtgaatatctttgagtccttcaaacgagctgacatctattctgttggtctggtttactgggaaatagcccggaggtgttcagtcggaggaattgttgaggagtaccaattgccttattatgacatggtgccttcagatccctcgatagaggaaatgagaaaggttgtttgtgaccagaagtttcgaccaagtatcccaaaccagtggcaaagttgtgaagcactccgagtcatggggagaataatgcgtgagtgttggtatgccaacggagcggcccgcctaactgctcttcgtattaagaagactatatctcaactttgtgtcaaagaagactgcaaagcctaatgatgataattatgttaaaaagaaatctctcatagctttcttttccattttcccctttatgtgaatgtttttgccattttttttttgttctacctcaaagataagacagtacagtatttaagtgcccataaggcagcatgaaaagataactctaaagttaagcatgggcaggagttgacttcatccaatctctatgttatgtttaattttattttgaaagcaacacctcaactcatctttttatttaataaggaagaaatatattacaaaagtataaaataagctctataaaaatgttatagtcattaagtttttattttacttgaaccaagagcacatgaatgaacaggaaaagatgtaaaaacatttttttctgagatgaaaacatattaattaaacatgcaaattagagcatgctatctttaggtgatgcaatctatgtttccccctttttaagttagcaggactttttaaaaataaatattgctctaaactttaatatatcgaacgtgagagtggagctgcttagtggaagatgtaagtgaggtgggtgtcccatgtgcttggtctccccttctgctgttctcctgttcttcataatccactactgcagcagtccctgaaccactaaacttgttcctttcatttacaaaagagatacctgacatcctgagacactgagaaatgtcctgaagtcacacagctaatggcagaactggcactaggtccaaatcttgtgataatgaacaccgtaaggttagctagcttcctactttcccttgaatagtgcttttctccctatgtaatatcttttattatgatatttgtggtttagaaggcatattgagttattttgcagaatcataatggacccgcacaaaatctcagaaccatatctgttgacattttttctcatagaaatatcatggttaccccatttgttaatgagcattaatgttttctgaacacttccaaagattaatcaaacataaatattcattgtctgaaaatgtctttaagatacaattcagaggtccctatttcctttgtacatacacacttagaaagaaaagacagaaaaggaagaggaaggaaggaaatattttgagaatatattgagaagaattaagaaaactcttcaatgaagtgttaacaaccaaaccctacagacggtatcagaaacagcaaatagatattcctctaccctttcacagtgagtgagtgagtacagaagaatgctcatgatagttttgccttcattctactttctgtggacacagagtaatgaatatttaatgggacattaaatatgcccttcaaatctataattttactttggtaaacgagatttaacatgatgtcttttatgctcctaaaacatcttttttcaaactccattccttagaacattcttctactgagatgatccaagaccaaaagtgttctttggtacttgcttataaagtgatagtacatgttagcatataatgtattttgaagagtgaagtaaatgctattgataacagtaaaaaaaaaaaaaaaaactaataacagtaaagaaatgctacttgatttttttttaaactggattgctcagattacctgatcgtggtggaacccttttattaagaggaggggaaactttttactatcccatatttaactgttctataaagcaaagcacagcttgggtaatagcgttctgaaggatatacttctgtattttctcatagagtacaatttagtgattatgcttcatttcactatggaaatatgttactgaatctatcttcattttactgagttgaaataaggaaggcaaaaaactgacagctatggagtttgcgtgtacttccatactcgttaatgctctcatccacttattaaataatcatagagcacccatatcttgcttgccacaatatcgggtacaagagggaatacaaagatagataggtcctgccctcagggattttaaagtctaatttgggaatgggaatagggatgtgagtgtgtgggggaagagattaaattgacagataaaatacgaagtgggatgtcttgagttctgcatgacagtgggtttctaggataggtctgaaaattgctttcatttgcaacacatttagaaagtagctttatttggatattacagacaatctaaatatatcatcagtttttaaaagtgcctatgtgaagtgatttttaaaaagagcctatgtgaaggggtaatcttgcttgttcttgttactaatttctcatagattgtttttctgcatatataagaacgaaattatttatttactatggttgtacgtgcctcaaataaacaagaatgatatttcctgttttatttacttatgttgggtaaatatgcttattgaatttttaagagaggattttttaccatctccatttttcttgtcattatgttttgtagcttatttgagggtgtctaaatataatttcatattttattggttcaactttcactctgaagaaatccgtatgttagtacattttgaggtatttttcttgttcttgtgttgtttaactatgactcctaactgagtagtcttatatttcaattacaaaatacattttttaagaaagggaatagagcagcaaaaatgataaggaaaatgttaaaagttgtaatatttcctttactcttaacaggattatatatagaacatgctcacttacaaaaataggatgatgaagtttagagcataaggcaggcttcttgtatatacttatgctgtcaaatgttatattgtttttaatggagtcccattgtgtaatatttatttcttttacattttgttataagcaaaaaaaaaaaaaattctccttaggttatgttcagagtatcagtgttctttactccttacagatattttggctttggggtataatacaagacttgggaaaacactattatgaattttcagtactgtataaagtggtgatgggatttaaatgcagcatcactttctgaaaataagagaaacattatttgttgtcagtatttcagcatgaacttgttgccttgtaaattttgcctttaagtttgtaattggtacagattctgttgtatgctttcttctatgtctaaaatatttggcatgtcacatctagaattcttaatttatgttctgacttgagagttaagtgaaacatgactgtcgtgcactattttaggcatagcacttgcttttcatctttatactttcaattaactttgcattttaaatttccatgattgtatgaaaatagtaacctggttgcagtatctgaaaaaattaaaattagcttttatttaaaaatgaaaatctacaatagattcattaggttagaagttccagaataatttattattttattacacctactattgtagaattactaataaaacaaaacaaaactactcctattttcctggaattttgccaccatgtgacttattggggcagagaaaactcagggttgtctttgagtctgcacaaaagcaccagggaacctgcttagcaaatcgtctgaaaacagggagctgatgtttgccattatacaaagtttgagtaaacaacttaaaattgcttgttagggcatagtctttgattgaaataagtatgagaatgtatttggctaaataaatgtatttaaaatatacaaattttatttcccactggaaaattaagaaagtagcagtaccaaatgaataaaagctggcagttgatgtcttcaataatcattcctttaaaataaattcacaaacacatcattacaagctacttagaaatgtttagtattcgtatcttaaaatggcaccattgtggttttcaaagatattttaaacatcttttgtgaaacatactatttctgtttgacaatgctttgttctagctctgtgtgctgatacctacatggagtttttctgctattttagtgaaaacagtaattcttttatcttgagagctgcttctaaataacaaaaaagttaattggaatgtaagtttttaaaaaatgttaatattaaatagaatttttataatatgggcatttttcaaaacattttaatgaaaatatatagatatttgactttctttttttcatctagccttgctttatatttcattatttttctcactttttttcttaatattccctcactatctttcaacattatcattagttcctaattttaaaaataactcttatttaacttaaccgtctggaatttagccttctaatgaaagagaatcccttagtactctcagagattatataaagttattccaattttgtgtagatgacgaaaccaaggatcagagattaaatgactactagttactagcagaactcttatgaaagcctggtggtgacacccagcactgttccctgccatatccccaacttttactgattaaaaattaattcgcatgcatctaaacctaccttgaatgcacactaacgtaatgtgccattcaatgatgatgataaaatcccacttttctttgggtttctactaaaataatttactcactcagagtgaggtcaatgagaaaaactaaactaggctaagaaagagttgtagaatggttgttgagctaagtaggcaaccactggggtgctgataaaattaatggataaaatttaggaactgtgagagtatagaatttcttagtgcaagtaatgattagagaagcttcctgacatcccccaccctttctgtaaggactgttctttctctttgtaccttggaatgggggtgaaaggtgatttgatagctgaatttgggactatgtccagtgggatattatctaacttttctctctttctcttttttttcccctcagtttctcattagtttgtctttggcattcatcttcttttagtgcattaaaaaatgtttggcagatctcatcaatcccaagtcactctataattcctgtatttctttagttgtcgtttaacctgtccaaacttctacacaatgaacttcttaacaagattttaagttctctgtataagaggtttcacctcataacttctccagtaatccttcatttggcactatagagtatttgttaatggcagagatgatttttcttttaaaacctaaaaagactagctgttatttgtattctagcttttagctaacatataaagaatgtctacttttgctttaatgctaaattccgcttgagaaatagtaactgggaaagacaatttgaaatatatgccccataatgtgattgttaaatttatttctgctgttccataccattgctttgttttgcttttgacaaactaagccattatgctattagtttggaatataatactacagcaaaattaggtaacaatccctattttaaaattcccctaacaataatagaactgccagcatacttttctctttcagttgtagatgaatacattcgagagaatatgagctgtatttcatcctagattttaatattttcagatgtgactgtatttcctgatcattggtccaagttgtcctaaaagaaatttttctctccagacctaacagttttaactgcaagagtttactgtgggttatgttaatctgaattttaatagggccactaagaatctgagtgccttaggagattacccttatacccactgccatcacatccagtcaggcctgttgtgctctatataaatcttcccagctgaggggcaggtgcgggctaaaatccaactgcaattggctcccagacataattttatattttacagagaagcatcttattggcttatatgtgtttaaagaatggtctggcttatacatcttcagaaaatgagaattaaaaagtcaaaataattcttgacatctacagattgaacaaagaacttagaagaaataatactttatcttttcatcctggcattcctgagagaagagaaattgattgtttatcatgttggtttaatttttcaacccagacaatctgcagcaaggcacatggaccccaattttgatatcgtccatacagttttcattctatgcatggagctaattactgactttgcctgtaaagagaggattgtgtgcctaaattttgtctaacaaatgcaagcgtagaatgacatttactaatatttctatttcttccataggctaaataatagtaactaagtatttttaaggacacagccctttttttctctttatacaaaatgagagtatctgagccaaaatattaaattctagttcttttccgcaatgactagtgtcaagctcatgtactcttctgattctagactggagaagattattcaaacttgatctgtgtttcaggtttttaaatgtcctaaaaacagaaaattagattcagatctcaaaaaaggaattttggattgactttcaaagtactaatactaattatacttttcttttggtagcgtgactcttcttatacctaagaacatattacaaatgtcaaaaccattgcattttgacattgcaaaacatgccttgaactcttgaactactgtgaaaagaatcaccgttgtaaagactttttgtaagctagctgatactcttaagtatgtaaaaagattgtctttcagccgacaggcccaaaggaatgtatataaggaaggaatatgaaaaaataaattaggttttaaaataggaattgggcaataaactgtatcaaaaatatgtagatggattttagtagttgtaatttaaatgtggaaggtgaagagaatttcaaactccaaagagaaatgaatgatattcagatgtttcattaatttctagtctgtgaaaatatgcattttatagtaatatgtatagacttattttatttagaaataatagtgttttagaatttattaaaaactcagtgatagcctttataccaaaatgtttaactttaccaacagcaagtcataaaagtatttattttaaagctttttaatattatcgtgtaactttcatctgtcttcagatgtaaataattatctgcctaaatgttatatttttatgtatgcattttctgaaaatgtattgttttgtaaagtgggaaagataataaatcaagcacttcttgcacttgtttctgtgaagcatatagaactctattttaaataaaggaagatgtgtcgta

SEQ ID NO: 4 - DNA, 8761 bp, Homo sapiens
  source 1..8761: mol_type = genomic DNA
tacgacacatcttcctttatttaaaatagagttctatatgcttcacagaaacaagtgcaagaagtgcttgatttattatctttcccactttacaaaacaatacattttcagaaaatgcatacataaaaatataacatttaggcagataattatttacatctgaagacagatgaaagttacacgataatattaaaaagctttaaaataaatacttttatgacttgctgttggtaaagttaaacattttggtataaaggctatcactgagtttttaataaattctaaaacactattatttctaaataaaataagtctatacatattactataaaatgcatattttcacagactagaaattaatgaaacatctgaatatcattcatttctctttggagtttgaaattctcttcaccttccacatttaaattacaactactaaaatccatctacatatttttgatacagtttattgcccaattcctattttaaaacctaatttattttttcatattccttccttatatacattcctttgggcctgtcggctgaaagacaatctttttacatacttaagagtatcagctagcttacaaaaagtctttacaacggtgattcttttcacagtagttcaagagttcaaggcatgttttgcaatgtcaaaatgcaatggttttgacatttgtaatatgttcttaggtataagaagagtcacgctaccaaaagaaaagtataattagtattagtactttgaaagtcaatccaaaattccttttttgagatctgaatctaattttctgtttttaggacatttaaaaacctgaaacacagatcaagtttgaataatcttctccagtctagaatcagaagagtacatgagcttgacactagtcattgcggaaaagaactagaatttaatattttggctcagatactctcattttgtataaagagaaaaaaagggctgtgtccttaaaaatacttagttactattatttagcctatggaagaaatagaaatattagtaaatgtcattctacgcttgcatttgttagacaaaatttaggcacacaatcctctctttacaggcaaagtcagtaattagctccatgcatagaatgaaaactgtatggacgatatcaaaattggggtccatgtgccttgctgcagattgtctgggttgaaaaattaaaccaacatgataaacaatcaatttctcttctctcaggaatgccaggatgaaaagataaagtattatttcttctaagttctttgttcaatctgtagatgtcaagaattattttgactttttaattctcattttctgaagatgtataagccagaccattctttaaacacatataagccaataagatgcttctctgtaaaatataaaattatgtctgggagccaattgcagttggattttagcccgcacctgcccctcagctgggaagatttatatagagcacaacaggcctgactggatgtgatggcagtgggtataagggtaatctcctaaggcactcagattcttagtggccctattaaaattcagattaacataacccacagtaaactcttgcagttaaaactgttaggtctggagagaaaaatttcttttaggacaacttggaccaatgatcaggaaatacagtcacatctgaaaatattaaaatctaggatgaaatacagctcatattctctcgaatgtattcatctacaactgaaagagaaaagtatgctggcagttctattattgttaggggaattttaaaatagggattgttacctaattttgctgtagtattatattccaaactaatagcataatggcttagtttgtcaaaagcaaaacaaagcaatggtatggaacagcagaaataaatttaacaatcacattatggggcatatatttcaaattgtctttcccagttactatttctcaagcggaatttagcattaaagcaaaagtagacattctttatatgttagctaaaagctagaatacaaataacagctagtctttttaggttttaaaagaaaaatcatctctgccattaacaaatactctatagtgccaaatgaaggattactggagaagttatgaggtgaaacctcttatacagagaacttaaaatcttgttaagaagttcattgtgtagaagtttggacaggttaaacgacaactaaagaaatacaggaattatagagtgacttgggattgatgagatctgccaaacattttttaatgcactaaaagaagatgaatgccaaagacaaactaatgagaaactgaggggaaaaaaaagagaaagagagaaaagttagataatatcccactggacatagtcccaaattcagctatcaaatcacctttcacccccattccaaggtacaaagagaaagaacagtccttacagaaagggtgggggatgtcaggaagcttctctaatcattacttgcactaagaaattctatactctcacagttcctaaattttatccattaattttatcagcaccccagtggttgcctacttagctcaacaaccattctacaactctttcttagcctagtttagtttttctcattgacctcactctgagtgagtaaattattttagtagaaacccaaagaaaagtgggattttatcatcatcattgaatggcacattacgttagtgtgcattcaaggtaggtttagatgcatgcgaattaatttttaatcagtaaaagttggggatatggcagggaacagtgctgggtgtcaccaccaggctttcataagagttctgctagtaactagtagtcatttaatctctgatccttggtttcgtcatctacacaaaattggaataactttatataatctctgagagtactaagggattctctttcattagaaggctaaattccagacggttaagttaaataagagttatttttaaaattaggaactaatgataatgttgaaagatagtgagggaatattaagaaaaaaagtgagaaaaataatgaaatataaagcaaggctagatgaaaaaaagaaagtcaaatatctatatattttcattaaaatgttttgaaaaatgcccatattataaaaattctatttaatattaacattttttaaaaacttacattccaattaacttttttgttatttagaagcagctctcaagataaaagaattactgttttcactaaaatagcagaaaaactccatgtaggtatcagcacacagagctagaacaaagcattgtcaaacagaaatagtatgtttcacaaaagatgtttaaaatatctttgaaaaccacaatggtgccattttaagatacgaatactaaacatttctaagtagcttgtaatgatgtgtttgtgaatttattttaaaggaatgattattgaagacatcaactgccagcttttattcatttggtactgctactttcttaattttccagtgggaaataaaatttgtatattttaaatacatttatttagccaaatacattctcatacttatttcaatcaaagactatgccctaacaagcaattttaagttgtttactcaaactttgtataatggcaaacatcagctccctgttttcagacgatttgctaagcaggttccctggtgcttttgtgcagactcaaagacaaccctgagttttctctgccccaataagtcacatggtggcaaaattccaggaaaataggagtagttttgttttgttttattagtaattctacaatagtaggtgtaataaaataataaattattctggaacttctaacctaatgaatctattgtagattttcatttttaaataaaagctaattttaattttttcagatactgcaaccaggttactattttcatacaatcatggaaatttaaaatgcaaagttaattgaaagtataaagatgaaaagcaagtgctatgcctaaaatagtgcacgacagtcatgtttcacttaactctcaagtcagaacataaattaagaattctagatgtgacatgccaaatattttagacatagaagaaagcatacaacagaatctgtaccaattacaaacttaaaggcaaaatttacaaggcaacaagttcatgctgaaatactgacaacaaataatgtttctcttattttcagaaagtgatgctgcatttaaatcccatcaccactttatacagtactgaaaattcataatagtgttttcccaagtcttgtattataccccaaagccaaaatatctgtaaggagtaaagaacactgatactctgaacataacctaaggagaattttttttttttttgcttataacaaaatgtaaaagaaataaatattacacaatgggactccattaaaaacaatataacatttgacagcataagtatatacaagaagcctgccttatgctctaaacttcatcatcctatttttgtaagtgagcatgttctatatataatcctgttaagagtaaaggaaatattacaacttttaacattttccttatcatttttgctgctctattccctttcttaaaaaatgtattttgtaattgaaatataagactactcagttaggagtcatagttaaacaacacaagaacaagaaaaatacctcaaaatgtactaacatacggatttcttcagagtgaaagttgaaccaataaaatatgaaattatatttagacaccctcaaataagctacaaaacataatgacaagaaaaatggagatggtaaaaaatcctctcttaaaaattcaataagcatatttacccaacataagtaaataaaacaggaaatatcattcttgtttatttgaggcacgtacaaccatagtaaataaataatttcgttcttatatatgcagaaaaacaatctatgagaaattagtaacaagaacaagcaagattaccccttcacataggctctttttaaaaatcacttcacataggcacttttaaaaactgatgatatatttagattgtctgtaatatccaaataaagctactttctaaatgtgttgcaaatgaaagcaattttcagacctatcctagaaacccactgtcatgcagaactcaagacatcccacttcgtattttatctgtcaatttaatctcttcccccacacactcacatccctattcccattcccaaattagactttaaaatccctgagggcaggacctatctatctttgtattccctcttgtacccgatattgtggcaagcaagatatgggtgctctatgattatttaataagtggatgagagcattaacgagtatggaagtacacgcaaactccatagctgtcagttttttgccttccttatttcaactcagtaaaatgaagatagattcagtaacatatttccatagtgaaatgaagcataatcactaaattgtactctatgagaaaatacagaagtatatccttcagaacgctattacccaagctgtgctttgctttatagaacagttaaatatgggatagtaaaaagtttcccctcctcttaataaaagggttccaccacgatcaggtaatctgagcaatccagtttaaaaaaaaatcaagtagcatttctttactgttattagtttttttttttttttttactgttatcaatagcatttacttcactcttcaaaatacattatatgctaacatgtactatcactttataagcaagtaccaaagaacacttttggtcttggatcatctcagtagaagaatgttctaaggaatggagtttgaaaaaagatgttttaggagcataaaagacatcatgttaaatctcgtttaccaaagtaaaattatagatttgaagggcatatttaatgtcccattaaatattcattactctgtgtccacagaaagtagaatgaaggcaaaactatcatgagcattcttctgtactcactcactcactgtgaaagggtagaggaatatctatttgctgtttctgataccgtctgtagggtttggttgttaacacttcattgaagagttttcttaattcttctcaatatattctcaaaatatttccttccttcctcttccttttctgtcttttctttctaagtgtgtatgtacaaaggaaatagggacctctgaattgtatcttaaagacattttcagacaatgaatatttatgtttgattaatctttggaagtgttcagaaaacattaatgctcattaacaaatggggtaaccatgatatttctatgagaaaaaatgtcaacagatatggttctgagattttgtgcgggtccattatgattctgcaaaataactcaatatgccttctaaaccacaaatatcataataaaagatattacatagggagaaaagcactattcaagggaaagtaggaagctagctaaccttacggtgttcattatcacaagatttggacctagtgccagttctgccattagctgtgtgacttcaggacatttctcagtgtctcaggatgtcaggtatctcttttgtaaatgaaaggaacaagtttagtggttcagggactgctgcagtagtggattatgaagaacaggagaacagcagaaggggagaccaagcacatgggacacccacctcacttacatcttccactaagcagctccactctcacgttcgatatattaaagtttagagcaatatttatttttaaaaagtcctgctaacttaaaaagggggaaacatagattgcatcacctaaagatagcatgctctaatttgcatgtttaattaatatgttttcatctcagaaaaaaatgtttttacatcttttcctgttcattcatgtgctcttggttcaagtaaaataaaaacttaatgactataacatttttatagagcttattttatacttttgtaatatatttcttccttattaaataaaaagatgagttgaggtgttgctttcaaaataaaattaaacataacatagagattggatgaagtcaactcctgcccatgcttaactttagagttatcttttcatgctgccttatgggcacttaaatactgtactgtcttatctttgaggtagaacaaaaaaaaaatggcaaaaacattcacataaaggggaaaatggaaaagaaagctatgagagatttctttttaacataattatcatcattaggctttgcagtcttctttgacacaaagttgagatatagtcttcttaatacgaagagcagttaggcgggccgctccgttggcataccaacactcacgcattattctccccatgactcggagtgcttcacaactttgccactggtttgggatacttggtcgaaacttctggtcacaaacaacctttctcatttcctctatcgagggatctgaaggcaccatgtcataataaggcaattggtactcctcaacaattcctccgactgaacacctccgggctatttcccagtaaaccagaccaacagaatagatgtcagctcgtttgaaggactcaaagatattcacattcattgtatcatcaagcatttcaggagccatatacctcttggttcccactttaggattctgaggtatgtcgatagtgttcagtattgaatcatgcttcacagccaaccctaagtccgctatggcacaagtttcacactttttcactaagatattctttgattttatgtctcgatgagcaatagcaggtttaccttgtgtaccaacaatctccatatgaaggtgtgccagaccactagcaattgagagcgccagcttgatcattccagccacggtcactatatttctattcaaatagtcatataaggagccctgttcatgatattcagataccagccaaagttgagtccaagttccattatctttgttgtcagcagcaatgaaaccaaggatgttttcatgtcgcagcatgaccgtctggtaaatttctgcctcacgaaaccaagatctttcatctctggaggagaatattttcacagccacatcttccccacaccatcttccatgccacacctcaccaaatctaccttttcctactatttcctgaagcacaatcgtccttgcaattgtcctttgaaccaacagaggtagaccagagccagatccagaggcggtcacatcataaatcagatctttcagagtttttccagcatttaccagattgcactcagagagtggttcctccacatttggtctctttttcttcctgtaggagcactgtcgaccctggcatgcccatactgtcagcatcgcagctatggacaggaggcaaacaggcacagtaataatgatggccagctccatgggtccaagttttggggcatttggtgatgctgttggaaggtgcagtgttatgttgttgcaaaaatctgtgaagcagcattcggttttggtaacattgttggaactatgacagaagacttgagcattcagttctggaagggagacacaggatttgatcacctgctcttttccattggttagcatgactgatgcccaacatgctccttctgtttggcaggtgaagtttgaagaatcacacaaaagacatacacacttcagtcctggacttgcaggttggagctcggagccctcccccagagcagcggccaggagcttccgcctccccttcgcctgatgaatttgcgaagggacaccctgcggtcgccgggatgccccagctttccgctggaccttggcgcagtgaattcggccccgacgacagctcccgcggggctcggccacctgcccgacggcagcgcaac

SEQ ID NO: 5 - DNA, 8613 bp, Homo sapiens
  source 1..8613: mol_type = genomic DNA
agtggcaggagcgccgcgcaccgccagccgcagggggcgtgggatgggggcggccggggaggggggcgcccacactgactagagccaaccgcgcacttcaaaagggtgtcggtgccgcgctcccctcccgcggcccgggaacttcaaagcgggccgtgctgccccggctgcctcgctctgctctggggcctcgcagccccggcgcggccgcctggtggcgatgacccgggcgctctgctcagcgctccgccaggctctcctgctgctcgcagcggccgccgagctctcgccaggactgaagtgtgtatgtcttttgtgtgattcttcaaacttcacctgccaaacagaaggagcatgttgggcatcagtcatgctaaccaatggaaaagagcaggtgatcaaatcctgtgtctcccttccagaactgaatgctcaagtcttctgtcatagttccaacaatgttaccaaaaccgaatgctgcttcacagatttttgcaacaacataacactgcaccttccaacaggtctacctctgttggttcaaaggacaattgcaaggacgattgtgcttcaggaaatagtaggaaaaggtagatttggtgaggtgtggcatggaagatggtgtggggaagatgtggctgtgaaaatattctcctccagagatgaaagatcttggtttcgtgaggcagaaatttaccagacggtcatgctgcgacatgaaaacatccttggtttcattgctgctgacaacaaagataatggaacttggactcaactttggctggtatctgaatatcatgaacagggctccttatatgactatttgaatagaaatatagtgaccgtggctggaatgatcaagctggcgctctcaattgctagtggtctggcacaccttcatatggagattgttggtacacaaggtaaacctgctattgctcatcgagacataaaatcaaagaatatcttagtgaaaaagtgtgaaacttgtgccatagcggacttagggttggctgtgaagcatgattcaatactgaacactatcgacatacctcagaatcctaaagtgggaaccaagaggtatatggctcctgaaatgcttgatgatacaatgaatgtgaatatctttgagtccttcaaacgagctgacatctattctgttggtctggtttactgggaaatagcccggaggtgttcagtcggaggaattgttgaggagtaccaattgccttattatgacatggtgccttcagatccctcgatagaggaaatgagaaaggttgtttgtgaccagaagtttcgaccaagtatcccaaaccagtggcaaagttgtgaagcactccgagtcatggggagaataatgcgtgagtgttggtatgccaacggagcggcccgcctaactgctcttcgtattaagaagactatatctcaactttgtgtcaaagaagactgcaaagcctaatgatgataattatgttaaaaagaaatctctcatagctttcttttccattttcccctttatgtgaatgtttttgccattttttttttgttctacctcaaagataagacagtacagtatttaagtgcccataaggcagcatgaaaagataactctaaagttaagcatgggcaggagttgacttcatccaatctctatgttatgtttaattttattttgaaagcaacacctcaactcatctttttatttaataaggaagaaatatattacaaaagtataaaataagctctataaaaatgttatagtcattaagtttttattttacttgaaccaagagcacatgaatgaacaggaaaagatgtaaaaacatttttttctgagatgaaaacatattaattaaacatgcaaattagagcatgctatctttaggtgatgcaatctatgtttccccctttttaagttagcaggactttttaaaaataaatattgctctaaactttaatatatcgaacgtgagagtggagctgcttagtggaagatgtaagtgaggtgggtgtcccatgtgcttggtctccccttctgctgttctcctgttcttcataatccactactgcagcagtccctgaaccactaaacttgttcctttcatttacaaaagagatacctgacatcctgagacactgagaaatgtcctgaagtcacacagctaatggcagaactggcactaggtccaaatcttgtgataatgaacaccgtaaggttagctagcttcctactttcccttgaatagtgcttttctccctatgtaatatcttttattatgatatttgtggtttagaaggcatattgagttattttgcagaatcataatggacccgcacaaaatctcagaaccatatctgttgacattttttctcatagaaatatcatggttaccccatttgttaatgagcattaatgttttctgaacacttccaaagattaatcaaacataaatattcattgtctgaaaatgtctttaagatacaattcagaggtccctatttcctttgtacatacacacttagaaagaaaagacagaaaaggaagaggaaggaaggaaatattttgagaatatattgagaagaattaagaaaactcttcaatgaagtgttaacaaccaaaccctacagacggtatcagaaacagcaaatagatattcctctaccctttcacagtgagtgagtgagtacagaagaatgctcatgatagttttgccttcattctactttctgtggacacagagtaatgaatatttaatgggacattaaatatgcccttcaaatctataattttactttggtaaacgagatttaacatgatgtcttttatgctcctaaaacatcttttttcaaactccattccttagaacattcttctactgagatgatccaagaccaaaagtgttctttggtacttgcttataaagtgatagtacatgttagcatataatgtattttgaagagtgaagtaaatgctattgataacagtaaaaaaaaaaaaaaaaactaataacagtaaagaaatgctacttgatttttttttaaactggattgctcagattacctgatcgtggtggaacccttttattaagaggaggggaaactttttactatcccatatttaactgttctataaagcaaagcacagcttgggtaatagcgttctgaaggatatacttctgtattttctcatagagtacaatttagtgattatgcttcatttcactatggaaatatgttactgaatctatcttcattttactgagttgaaataaggaaggcaaaaaactgacagctatggagtttgcgtgtacttccatactcgttaatgctctcatccacttattaaataatcatagagcacccatatcttgcttgccacaatatcgggtacaagagggaatacaaagatagataggtcctgccctcagggattttaaagtctaatttgggaatgggaatagggatgtgagtgtgtgggggaagagattaaattgacagataaaatacgaagtgggatgtcttgagttctgcatgacagtgggtttctaggataggtctgaaaattgctttcatttgcaacacatttagaaagtagctttatttggatattacagacaatctaaatatatcatcagtttttaaaagtgcctatgtgaagtgatttttaaaaagagcctatgtgaaggggtaatcttgcttgttcttgttactaatttctcatagattgtttttctgcatatataagaacgaaattatttatttactatggttgtacgtgcctcaaataaacaagaatgatatttcctgttttatttacttatgttgggtaaatatgcttattgaatttttaagagaggattttttaccatctccatttttcttgtcattatgttttgtagcttatttgagggtgtctaaatataatttcatattttattggttcaactttcactctgaagaaatccgtatgttagtacattttgaggtatttttcttgttcttgtgttgtttaactatgactcctaactgagtagtcttatatttcaattacaaaatacattttttaagaaagggaatagagcagcaaaaatgataaggaaaatgttaaaagttgtaatatttcctttactcttaacaggattatatatagaacatgctcacttacaaaaataggatgatgaagtttagagcataaggcaggcttcttgtatatacttatgctgtcaaatgttatattgtttttaatggagtcccattgtgtaatatttatttcttttacattttgttataagcaaaaaaaaaaaaaattctccttaggttatgttcagagtatcagtgttctttactccttacagatattttggctttggggtataatacaagacttgggaaaacactattatgaattttcagtactgtataaagtggtgatgggatttaaatgcagcatcactttctgaaaataagagaaacattatttgttgtcagtatttcagcatgaacttgttgccttgtaaattttgcctttaagtttgtaattggtacagattctgttgtatgctttcttctatgtctaaaatatttggcatgtcacatctagaattcttaatttatgttctgacttgagagttaagtgaaacatgactgtcgtgcactattttaggcatagcacttgcttttcatctttatactttcaattaactttgcattttaaatttccatgattgtatgaaaatagtaacctggttgcagtatctgaaaaaattaaaattagcttttatttaaaaatgaaaatctacaatagattcattaggttagaagttccagaataatttattattttattacacctactattgtagaattactaataaaacaaaacaaaactactcctattttcctggaattttgccaccatgtgacttattggggcagagaaaactcagggttgtctttgagtctgcacaaaagcaccagggaacctgcttagcaaatcgtctgaaaacagggagctgatgtttgccattatacaaagtttgagtaaacaacttaaaattgcttgttagggcatagtctttgattgaaataagtatgagaatgtatttggctaaataaatgtatttaaaatatacaaattttatttcccactggaaaattaagaaagtagcagtaccaaatgaataaaagctggcagttgatgtcttcaataatcattcctttaaaataaattcacaaacacatcattacaagctacttagaaatgtttagtattcgtatcttaaaatggcaccattgtggttttcaaagatattttaaacatcttttgtgaaacatactatttctgtttgacaatgctttgttctagctctgtgtgctgatacctacatggagtttttctgctattttagtgaaaacagtaattcttttatcttgagagctgcttctaaataacaaaaaagttaattggaatgtaagtttttaaaaaatgttaatattaaatagaatttttataatatgggcatttttcaaaacattttaatgaaaatatatagatatttgactttctttttttcatctagccttgctttatatttcattatttttctcactttttttcttaatattccctcactatctttcaacattatcattagttcctaattttaaaaataactcttatttaacttaaccgtctggaatttagccttctaatgaaagagaatcccttagtactctcagagattatataaagttattccaattttgtgtagatgacgaaaccaaggatcagagattaaatgactactagttactagcagaactcttatgaaagcctggtggtgacacccagcactgttccctgccatatccccaacttttactgattaaaaattaattcgcatgcatctaaacctaccttgaatgcacactaacgtaatgtgccattcaatgatgatgataaaatcccacttttctttgggtttctactaaaataatttactcactcagagtgaggtcaatgagaaaaactaaactaggctaagaaagagttgtagaatggttgttgagctaagtaggcaaccactggggtgctgataaaattaatggataaaatttaggaactgtgagagtatagaatttcttagtgcaagtaatgattagagaagcttcctgacatcccccaccctttctgtaaggactgttctttctctttgtaccttggaatgggggtgaaaggtgatttgatagctgaatttgggactatgtccagtgggatattatctaacttttctctctttctcttttttttcccctcagtttctcattagtttgtctttggcattcatcttcttttagtgcattaaaaaatgtttggcagatctcatcaatcccaagtcactctataattcctgtatttctttagttgtcgtttaacctgtccaaacttctacacaatgaacttcttaacaagattttaagttctctgtataagaggtttcacctcataacttctccagtaatccttcatttggcactatagagtatttgttaatggcagagatgatttttcttttaaaacctaaaaagactagctgttatttgtattctagcttttagctaacatataaagaatgtctacttttgctttaatgctaaattccgcttgagaaatagtaactgggaaagacaatttgaaatatatgccccataatgtgattgttaaatttatttctgctgttccataccattgctttgttttgcttttgacaaactaagccattatgctattagtttggaatataatactacagcaaaattaggtaacaatccctattttaaaattcccctaacaataatagaactgccagcatacttttctctttcagttgtagatgaatacattcgagagaatatgagctgtatttcatcctagattttaatattttcagatgtgactgtatttcctgatcattggtccaagttgtcctaaaagaaatttttctctccagacctaacagttttaactgcaagagtttactgtgggttatgttaatctgaattttaatagggccactaagaatctgagtgccttaggagattacccttatacccactgccatcacatccagtcaggcctgttgtgctctatataaatcttcccagctgaggggcaggtgcgggctaaaatccaactgcaattggctcccagacataattttatattttacagagaagcatcttattggcttatatgtgtttaaagaatggtctggcttatacatcttcagaaaatgagaattaaaaagtcaaaataattcttgacatctacagattgaacaaagaacttagaagaaataatactttatcttttcatcctggcattcctgagagaagagaaattgattgtttatcatgttggtttaatttttcaacccagacaatctgcagcaaggcacatggaccccaattttgatatcgtccatacagttttcattctatgcatggagctaattactgactttgcctgtaaagagaggattgtgtgcctaaattttgtctaacaaatgcaagcgtagaatgacatttactaatatttctatttcttccataggctaaataatagtaactaagtatttttaaggacacagccctttttttctctttatacaaaatgagagtatctgagccaaaatattaaattctagttcttttccgcaatgactagtgtcaagctcatgtactcttctgattctagactggagaagattattcaaacttgatctgtgtttcaggtttttaaatgtcctaaaaacagaaaattagattcagatctcaaaaaaggaattttggattgactttcaaagtactaatactaattatacttttcttttggtagcgtgactcttcttatacctaagaacatattacaaatgtcaaaaccattgcattttgacattgcaaaacatgccttgaactcttgaactactgtgaaaagaatcaccgttgtaaagactttttgtaagctagctgatactcttaagtatgtaaaaagattgtctttcagccgacaggcccaaaggaatgtatataaggaaggaatatgaaaaaataaattaggttttaaaataggaattgggcaataaactgtatcaaaaatatgtagatggattttagtagttgtaatttaaatgtggaaggtgaagagaatttcaaactccaaagagaaatgaatgatattcagatgtttcattaatttctagtctgtgaaaatatgcattttatagtaatatgtatagacttattttatttagaaataatagtgttttagaatttattaaaaactcagtgatagcctttataccaaaatgtttaactttaccaacagcaagtcataaaagtatttattttaaagctttttaatattatcgtgtaactttcatctgtcttcagatgtaaataattatctgcctaaatgttatatttttatgtatgcattttctgaaaatgtattgttttgtaaagtgggaaagataataaatcaagcacttcttgcacttgtttctgtgaagcatatagaactctattttaaataaaggaagatgtgtcgta

SEQ ID NO: 6 - DNA, 8613 bp, Homo sapiens
  source 1..8613: mol_type = genomic DNA
tacgacacatcttcctttatttaaaatagagttctatatgcttcacagaaacaagtgcaagaagtgcttgatttattatctttcccactttacaaaacaatacattttcagaaaatgcatacataaaaatataacatttaggcagataattatttacatctgaagacagatgaaagttacacgataatattaaaaagctttaaaataaatacttttatgacttgctgttggtaaagttaaacattttggtataaaggctatcactgagtttttaataaattctaaaacactattatttctaaataaaataagtctatacatattactataaaatgcatattttcacagactagaaattaatgaaacatctgaatatcattcatttctctttggagtttgaaattctcttcaccttccacatttaaattacaactactaaaatccatctacatatttttgatacagtttattgcccaattcctattttaaaacctaatttattttttcatattccttccttatatacattcctttgggcctgtcggctgaaagacaatctttttacatacttaagagtatcagctagcttacaaaaagtctttacaacggtgattcttttcacagtagttcaagagttcaaggcatgttttgcaatgtcaaaatgcaatggttttgacatttgtaatatgttcttaggtataagaagagtcacgctaccaaaagaaaagtataattagtattagtactttgaaagtcaatccaaaattccttttttgagatctgaatctaattttctgtttttaggacatttaaaaacctgaaacacagatcaagtttgaataatcttctccagtctagaatcagaagagtacatgagcttgacactagtcattgcggaaaagaactagaatttaatattttggctcagatactctcattttgtataaagagaaaaaaagggctgtgtccttaaaaatacttagttactattatttagcctatggaagaaatagaaatattagtaaatgtcattctacgcttgcatttgttagacaaaatttaggcacacaatcctctctttacaggcaaagtcagtaattagctccatgcatagaatgaaaactgtatggacgatatcaaaattggggtccatgtgccttgctgcagattgtctgggttgaaaaattaaaccaacatgataaacaatcaatttctcttctctcaggaatgccaggatgaaaagataaagtattatttcttctaagttctttgttcaatctgtagatgtcaagaattattttgactttttaattctcattttctgaagatgtataagccagaccattctttaaacacatataagccaataagatgcttctctgtaaaatataaaattatgtctgggagccaattgcagttggattttagcccgcacctgcccctcagctgggaagatttatatagagcacaacaggcctgactggatgtgatggcagtgggtataagggtaatctcctaaggcactcagattcttagtggccctattaaaattcagattaacataacccacagtaaactcttgcagttaaaactgttaggtctggagagaaaaatttcttttaggacaacttggaccaatgatcaggaaatacagtcacatctgaaaatattaaaatctaggatgaaatacagctcatattctctcgaatgtattcatctacaactgaaagagaaaagtatgctggcagttctattattgttaggggaattttaaaatagggattgttacctaattttgctgtagtattatattccaaactaatagcataatggcttagtttgtcaaaagcaaaacaaagcaatggtatggaacagcagaaataaatttaacaatcacattatggggcatatatttcaaattgtctttcccagttactatttctcaagcggaatttagcattaaagcaaaagtagacattctttatatgttagctaaaagctagaatacaaataacagctagtctttttaggttttaaaagaaaaatcatctctgccattaacaaatactctatagtgccaaatgaaggattactggagaagttatgaggtgaaacctcttatacagagaacttaaaatcttgttaagaagttcattgtgtagaagtttggacaggttaaacgacaactaaagaaatacaggaattatagagtgacttgggattgatgagatctgccaaacattttttaatgcactaaaagaagatgaatgccaaagacaaactaatgagaaactgaggggaaaaaaaagagaaagagagaaaagttagataatatcccactggacatagtcccaaattcagctatcaaatcacctttcacccccattccaaggtacaaagagaaagaacagtccttacagaaagggtgggggatgtcaggaagcttctctaatcattacttgcactaagaaattctatactctcacagttcctaaattttatccattaattttatcagcaccccagtggttgcctacttagctcaacaaccattctacaactctttcttagcctagtttagtttttctcattgacctcactctgagtgagtaaattattttagtagaaacccaaagaaaagtgggattttatcatcatcattgaatggcacattacgttagtgtgcattcaaggtaggtttagatgcatgcgaattaatttttaatcagtaaaagttggggatatggcagggaacagtgctgggtgtcaccaccaggctttcataagagttctgctagtaactagtagtcatttaatctctgatccttggtttcgtcatctacacaaaattggaataactttatataatctctgagagtactaagggattctctttcattagaaggctaaattccagacggttaagttaaataagagttatttttaaaattaggaactaatgataatgttgaaagatagtgagggaatattaagaaaaaaagtgagaaaaataatgaaatataaagcaaggctagatgaaaaaaagaaagtcaaatatctatatattttcattaaaatgttttgaaaaatgcccatattataaaaattctatttaatattaacattttttaaaaacttacattccaattaacttttttgttatttagaagcagctctcaagataaaagaattactgttttcactaaaatagcagaaaaactccatgtaggtatcagcacacagagctagaacaaagcattgtcaaacagaaatagtatgtttcacaaaagatgtttaaaatatctttgaaaaccacaatggtgccattttaagatacgaatactaaacatttctaagtagcttgtaatgatgtgtttgtgaatttattttaaaggaatgattattgaagacatcaactgccagcttttattcatttggtactgctactttcttaattttccagtgggaaataaaatttgtatattttaaatacatttatttagccaaatacattctcatacttatttcaatcaaagactatgccctaacaagcaattttaagttgtttactcaaactttgtataatggcaaacatcagctccctgttttcagacgatttgctaagcaggttccctggtgcttttgtgcagactcaaagacaaccctgagttttctctgccccaataagtcacatggtggcaaaattccaggaaaataggagtagttttgttttgttttattagtaattctacaatagtaggtgtaataaaataataaattattctggaacttctaacctaatgaatctattgtagattttcatttttaaataaaagctaattttaattttttcagatactgcaaccaggttactattttcatacaatcatggaaatttaaaatgcaaagttaattgaaagtataaagatgaaaagcaagtgctatgcctaaaatagtgcacgacagtcatgtttcacttaactctcaagtcagaacataaattaagaattctagatgtgacatgccaaatattttagacatagaagaaagcatacaacagaatctgtaccaattacaaacttaaaggcaaaatttacaaggcaacaagttcatgctgaaatactgacaacaaataatgtttctcttattttcagaaagtgatgctgcatttaaatcccatcaccactttatacagtactgaaaattcataatagtgttttcccaagtcttgtattataccccaaagccaaaatatctgtaaggagtaaagaacactgatactctgaacataacctaaggagaattttttttttttttgcttataacaaaatgtaaaagaaataaatattacacaatgggactccattaaaaacaatataacatttgacagcataagtatatacaagaagcctgccttatgctctaaacttcatcatcctatttttgtaagtgagcatgttctatatataatcctgttaagagtaaaggaaatattacaacttttaacattttccttatcatttttgctgctctattccctttcttaaaaaatgtattttgtaattgaaatataagactactcagttaggagtcatagttaaacaacacaagaacaagaaaaatacctcaaaatgtactaacatacggatttcttcagagtgaaagttgaaccaataaaatatgaaattatatttagacaccctcaaataagctacaaaacataatgacaagaaaaatggagatggtaaaaaatcctctcttaaaaattcaataagcatatttacccaacataagtaaataaaacaggaaatatcattcttgtttatttgaggcacgtacaaccatagtaaataaataatttcgttcttatatatgcagaaaaacaatctatgagaaattagtaacaagaacaagcaagattaccccttcacataggctctttttaaaaatcacttcacataggcacttttaaaaactgatgatatatttagattgtctgtaatatccaaataaagctactttctaaatgtgttgcaaatgaaagcaattttcagacctatcctagaaacccactgtcatgcagaactcaagacatcccacttcgtattttatctgtcaatttaatctcttcccccacacactcacatccctattcccattcccaaattagactttaaaatccctgagggcaggacctatctatctttgtattccctcttgtacccgatattgtggcaagcaagatatgggtgctctatgattatttaataagtggatgagagcattaacgagtatggaagtacacgcaaactccatagctgtcagttttttgccttccttatttcaactcagtaaaatgaagatagattcagtaacatatttccatagtgaaatgaagcataatcactaaattgtactctatgagaaaatacagaagtatatccttcagaacgctattacccaagctgtgctttgctttatagaacagttaaatatgggatagtaaaaagtttcccctcctcttaataaaagggttccaccacgatcaggtaatctgagcaatccagtttaaaaaaaaatcaagtagcatttctttactgttattagtttttttttttttttttactgttatcaatagcatttacttcactcttcaaaatacattatatgctaacatgtactatcactttataagcaagtaccaaagaacacttttggtcttggatcatctcagtagaagaatgttctaaggaatggagtttgaaaaaagatgttttaggagcataaaagacatcatgttaaatctcgtttaccaaagtaaaattatagatttgaagggcatatttaatgtcccattaaatattcattactctgtgtccacagaaagtagaatgaaggcaaaactatcatgagcattcttctgtactcactcactcactgtgaaagggtagaggaatatctatttgctgtttctgataccgtctgtagggtttggttgttaacacttcattgaagagttttcttaattcttctcaatatattctcaaaatatttccttccttcctcttccttttctgtcttttctttctaagtgtgtatgtacaaaggaaatagggacctctgaattgtatcttaaagacattttcagacaatgaatatttatgtttgattaatctttggaagtgttcagaaaacattaatgctcattaacaaatggggtaaccatgatatttctatgagaaaaaatgtcaacagatatggttctgagattttgtgcgggtccattatgattctgcaaaataactcaatatgccttctaaaccacaaatatcataataaaagatattacatagggagaaaagcactattcaagggaaagtaggaagctagctaaccttacggtgttcattatcacaagatttggacctagtgccagttctgccattagctgtgtgacttcaggacatttctcagtgtctcaggatgtcaggtatctcttttgtaaatgaaaggaacaagtttagtggttcagggactgctgcagtagtggattatgaagaacaggagaacagcagaaggggagaccaagcacatgggacacccacctcacttacatcttccactaagcagctccactctcacgttcgatatattaaagtttagagcaatatttatttttaaaaagtcctgctaacttaaaaagggggaaacatagattgcatcacctaaagatagcatgctctaatttgcatgtttaattaatatgttttcatctcagaaaaaaatgtttttacatcttttcctgttcattcatgtgctcttggttcaagtaaaataaaaacttaatgactataacatttttatagagcttattttatacttttgtaatatatttcttccttattaaataaaaagatgagttgaggtgttgctttcaaaataaaattaaacataacatagagattggatgaagtcaactcctgcccatgcttaactttagagttatcttttcatgctgccttatgggcacttaaatactgtactgtcttatctttgaggtagaacaaaaaaaaaatggcaaaaacattcacataaaggggaaaatggaaaagaaagctatgagagatttctttttaacataattatcatcattaggctttgcagtcttctttgacacaaagttgagatatagtcttcttaatacgaagagcagttaggcgggccgctccgttggcataccaacactcacgcattattctccccatgactcggagtgcttcacaactttgccactggtttgggatacttggtcgaaacttctggtcacaaacaacctttctcatttcctctatcgagggatctgaaggcaccatgtcataataaggcaattggtactcctcaacaattcctccgactgaacacctccgggctatttcccagtaaaccagaccaacagaatagatgtcagctcgtttgaaggactcaaagatattcacattcattgtatcatcaagcatttcaggagccatatacctcttggttcccactttaggattctgaggtatgtcgatagtgttcagtattgaatcatgcttcacagccaaccctaagtccgctatggcacaagtttcacactttttcactaagatattctttgattttatgtctcgatgagcaatagcaggtttaccttgtgtaccaacaatctccatatgaaggtgtgccagaccactagcaattgagagcgccagcttgatcattccagccacggtcactatatttctattcaaatagtcatataaggagccctgttcatgatattcagataccagccaaagttgagtccaagttccattatctttgttgtcagcagcaatgaaaccaaggatgttttcatgtcgcagcatgaccgtctggtaaatttctgcctcacgaaaccaagatctttcatctctggaggagaatattttcacagccacatcttccccacaccatcttccatgccacacctcaccaaatctaccttttcctactatttcctgaagcacaatcgtccttgcaattgtcctttgaaccaacagaggtagacctgttggaaggtgcagtgttatgttgttgcaaaaatctgtgaagcagcattcggttttggtaacattgttggaactatgacagaagacttgagcattcagttctggaagggagacacaggatttgatcacctgctcttttccattggttagcatgactgatgcccaacatgctccttctgtttggcaggtgaagtttgaagaatcacacaaaagacatacacacttcagtcctggcgagagctcggcggccgctgcgagcagcaggagagcctggcggagcgctgagcagagcgcccgggtcatcgccaccaggcggccgcgccggggctgcgaggccccagagcagagcgaggcagccggggcagcacggcccgctttgaagttcccgggccgcgggaggggagcgcggcaccgacacccttttgaagtgcgcggttggctctagtcagtgtgggcgcccccctccccggccgcccccatcccacgccccctgcggctggcggtgcgcggcgctcctgccact

SEQ ID NO: 7 - DNA, 8382 bp, Homo sapiens
  source 1..8382: mol_type = genomic DNA
agtggcaggagcgccgcgcaccgccagccgcagggggcgtgggatgggggcggccggggaggggggcgcccacactgactagagccaaccgcgcacttcaaaagggtgtcggtgccgcgctcccctcccgcggcccgggaacttcaaagcgggccgtgctgccccggctgcctcgctctgctctggggcctcgcagccccggcgcggccgcctggtggcgatgacccgggcgctctgctcagcgctccgccaggctctcctgctgctcgcagcggccgccgagctctcgccaggactgaagtgtgtatgtcttttgtgtgattcttcaaacttcacctgccaaacagaaggagcatgttgggcatcagtcatgctaaccaatggaaaagagcaggtgatcaaatcctgtgtctcccttccagaactgaatgctcaagtcttctgtcatagttccaacaatgttaccaaaaccgaatgctgcttcacagatttttgcaacaacataacactgcaccttccaacagataatggaacttggactcaactttggctggtatctgaatatcatgaacagggctccttatatgactatttgaatagaaatatagtgaccgtggctggaatgatcaagctggcgctctcaattgctagtggtctggcacaccttcatatggagattgttggtacacaaggtaaacctgctattgctcatcgagacataaaatcaaagaatatcttagtgaaaaagtgtgaaacttgtgccatagcggacttagggttggctgtgaagcatgattcaatactgaacactatcgacatacctcagaatcctaaagtgggaaccaagaggtatatggctcctgaaatgcttgatgatacaatgaatgtgaatatctttgagtccttcaaacgagctgacatctattctgttggtctggtttactgggaaatagcccggaggtgttcagtcggaggaattgttgaggagtaccaattgccttattatgacatggtgccttcagatccctcgatagaggaaatgagaaaggttgtttgtgaccagaagtttcgaccaagtatcccaaaccagtggcaaagttgtgaagcactccgagtcatggggagaataatgcgtgagtgttggtatgccaacggagcggcccgcctaactgctcttcgtattaagaagactatatctcaactttgtgtcaaagaagactgcaaagcctaatgatgataattatgttaaaaagaaatctctcatagctttcttttccattttcccctttatgtgaatgtttttgccattttttttttgttctacctcaaagataagacagtacagtatttaagtgcccataaggcagcatgaaaagataactctaaagttaagcatgggcaggagttgacttcatccaatctctatgttatgtttaattttattttgaaagcaacacctcaactcatctttttatttaataaggaagaaatatattacaaaagtataaaataagctctataaaaatgttatagtcattaagtttttattttacttgaaccaagagcacatgaatgaacaggaaaagatgtaaaaacatttttttctgagatgaaaacatattaattaaacatgcaaattagagcatgctatctttaggtgatgcaatctatgtttccccctttttaagttagcaggactttttaaaaataaatattgctctaaactttaatatatcgaacgtgagagtggagctgcttagtggaagatgtaagtgaggtgggtgtcccatgtgcttggtctccccttctgctgttctcctgttcttcataatccactactgcagcagtccctgaaccactaaacttgttcctttcatttacaaaagagatacctgacatcctgagacactgagaaatgtcctgaagtcacacagctaatggcagaactggcactaggtccaaatcttgtgataatgaacaccgtaaggttagctagcttcctactttcccttgaatagtgcttttctccctatgtaatatcttttattatgatatttgtggtttagaaggcatattgagttattttgcagaatcataatggacccgcacaaaatctcagaaccatatctgttgacattttttctcatagaaatatcatggttaccccatttgttaatgagcattaatgttttctgaacacttccaaagattaatcaaacataaatattcattgtctgaaaatgtctttaagatacaattcagaggtccctatttcctttgtacatacacacttagaaagaaaagacagaaaaggaagaggaaggaaggaaatattttgagaatatattgagaagaattaagaaaactcttcaatgaagtgttaacaaccaaaccctacagacggtatcagaaacagcaaatagatattcctctaccctttcacagtgagtgagtgagtacagaagaatgctcatgatagttttgccttcattctactttctgtggacacagagtaatgaatatttaatgggacattaaatatgcccttcaaatctataattttactttggtaaacgagatttaacatgatgtcttttatgctcctaaaacatcttttttcaaactccattccttagaacattcttctactgagatgatccaagaccaaaagtgttctttggtacttgcttataaagtgatagtacatgttagcatataatgtattttgaagagtgaagtaaatgctattgataacagtaaaaaaaaaaaaaaaaactaataacagtaaagaaatgctacttgatttttttttaaactggattgctcagattacctgatcgtggtggaacccttttattaagaggaggggaaactttttactatcccatatttaactgttctataaagcaaagcacagcttgggtaatagcgttctgaaggatatacttctgtattttctcatagagtacaatttagtgattatgcttcatttcactatggaaatatgttactgaatctatcttcattttactgagttgaaataaggaaggcaaaaaactgacagctatggagtttgcgtgtacttccatactcgttaatgctctcatccacttattaaataatcatagagcacccatatcttgcttgccacaatatcgggtacaagagggaatacaaagatagataggtcctgccctcagggattttaaagtctaatttgggaatgggaatagggatgtgagtgtgtgggggaagagattaaattgacagataaaatacgaagtgggatgtcttgagttctgcatgacagtgggtttctaggataggtctgaaaattgctttcatttgcaacacatttagaaagtagctttatttggatattacagacaatctaaatatatcatcagtttttaaaagtgcctatgtgaagtgatttttaaaaagagcctatgtgaaggggtaatcttgcttgttcttgttactaatttctcatagattgtttttctgcatatataagaacgaaattatttatttactatggttgtacgtgcctcaaataaacaagaatgatatttcctgttttatttacttatgttgggtaaatatgcttattgaatttttaagagaggattttttaccatctccatttttcttgtcattatgttttgtagcttatttgagggtgtctaaatataatttcatattttattggttcaactttcactctgaagaaatccgtatgttagtacattttgaggtatttttcttgttcttgtgttgtttaactatgactcctaactgagtagtcttatatttcaattacaaaatacattttttaagaaagggaatagagcagcaaaaatgataaggaaaatgttaaaagttgtaatatttcctttactcttaacaggattatatatagaacatgctcacttacaaaaataggatgatgaagtttagagcataaggcaggcttcttgtatatacttatgctgtcaaatgttatattgtttttaatggagtcccattgtgtaatatttatttcttttacattttgttataagcaaaaaaaaaaaaaattctccttaggttatgttcagagtatcagtgttctttactccttacagatattttggctttggggtataatacaagacttgggaaaacactattatgaattttcagtactgtataaagtggtgatgggatttaaatgcagcatcactttctgaaaataagagaaacattatttgttgtcagtatttcagcatgaacttgttgccttgtaaattttgcctttaagtttgtaattggtacagattctgttgtatgctttcttctatgtctaaaatatttggcatgtcacatctagaattcttaatttatgttctgacttgagagttaagtgaaacatgactgtcgtgcactattttaggcatagcacttgcttttcatctttatactttcaattaactttgcattttaaatttccatgattgtatgaaaatagtaacctggttgcagtatctgaaaaaattaaaattagcttttatttaaaaatgaaaatctacaatagattcattaggttagaagttccagaataatttattattttattacacctactattgtagaattactaataaaacaaaacaaaactactcctattttcctggaattttgccaccatgtgacttattggggcagagaaaactcagggttgtctttgagtctgcacaaaagcaccagggaacctgcttagcaaatcgtctgaaaacagggagctgatgtttgccattatacaaagtttgagtaaacaacttaaaattgcttgttagggcatagtctttgattgaaataagtatgagaatgtatttggctaaataaatgtatttaaaatatacaaattttatttcccactggaaaattaagaaagtagcagtaccaaatgaataaaagctggcagttgatgtcttcaataatcattcctttaaaataaattcacaaacacatcattacaagctacttagaaatgtttagtattcgtatcttaaaatggcaccattgtggttttcaaagatattttaaacatcttttgtgaaacatactatttctgtttgacaatgctttgttctagctctgtgtgctgatacctacatggagtttttctgctattttagtgaaaacagtaattcttttatcttgagagctgcttctaaataacaaaaaagttaattggaatgtaagtttttaaaaaatgttaatattaaatagaatttttataatatgggcatttttcaaaacattttaatgaaaatatatagatatttgactttctttttttcatctagccttgctttatatttcattatttttctcactttttttcttaatattccctcactatctttcaacattatcattagttcctaattttaaaaataactcttatttaacttaaccgtctggaatttagccttctaatgaaagagaatcccttagtactctcagagattatataaagttattccaattttgtgtagatgacgaaaccaaggatcagagattaaatgactactagttactagcagaactcttatgaaagcctggtggtgacacccagcactgttccctgccatatccccaacttttactgattaaaaattaattcgcatgcatctaaacctaccttgaatgcacactaacgtaatgtgccattcaatgatgatgataaaatcccacttttctttgggtttctactaaaataatttactcactcagagtgaggtcaatgagaaaaactaaactaggctaagaaagagttgtagaatggttgttgagctaagtaggcaaccactggggtgctgataaaattaatggataaaatttaggaactgtgagagtatagaatttcttagtgcaagtaatgattagagaagcttcctgacatcccccaccctttctgtaaggactgttctttctctttgtaccttggaatgggggtgaaaggtgatttgatagctgaatttgggactatgtccagtgggatattatctaacttttctctctttctcttttttttcccctcagtttctcattagtttgtctttggcattcatcttcttttagtgcattaaaaaatgtttggcagatctcatcaatcccaagtcactctataattcctgtatttctttagttgtcgtttaacctgtccaaacttctacacaatgaacttcttaacaagattttaagttctctgtataagaggtttcacctcataacttctccagtaatccttcatttggcactatagagtatttgttaatggcagagatgatttttcttttaaaacctaaaaagactagctgttatttgtattctagcttttagctaacatataaagaatgtctacttttgctttaatgctaaattccgcttgagaaatagtaactgggaaagacaatttgaaatatatgccccataatgtgattgttaaatttatttctgctgttccataccattgctttgttttgcttttgacaaactaagccattatgctattagtttggaatataatactacagcaaaattaggtaacaatccctattttaaaattcccctaacaataatagaactgccagcatacttttctctttcagttgtagatgaatacattcgagagaatatgagctgtatttcatcctagattttaatattttcagatgtgactgtatttcctgatcattggtccaagttgtcctaaaagaaatttttctctccagacctaacagttttaactgcaagagtttactgtgggttatgttaatctgaattttaatagggccactaagaatctgagtgccttaggagattacccttatacccactgccatcacatccagtcaggcctgttgtgctctatataaatcttcccagctgaggggcaggtgcgggctaaaatccaactgcaattggctcccagacataattttatattttacagagaagcatcttattggcttatatgtgtttaaagaatggtctggcttatacatcttcagaaaatgagaattaaaaagtcaaaataattcttgacatctacagattgaacaaagaacttagaagaaataatactttatcttttcatcctggcattcctgagagaagagaaattgattgtttatcatgttggtttaatttttcaacccagacaatctgcagcaaggcacatggaccccaattttgatatcgtccatacagttttcattctatgcatggagctaattactgactttgcctgtaaagagaggattgtgtgcctaaattttgtctaacaaatgcaagcgtagaatgacatttactaatatttctatttcttccataggctaaataatagtaactaagtatttttaaggacacagccctttttttctctttatacaaaatgagagtatctgagccaaaatattaaattctagttcttttccgcaatgactagtgtcaagctcatgtactcttctgattctagactggagaagattattcaaacttgatctgtgtttcaggtttttaaatgtcctaaaaacagaaaattagattcagatctcaaaaaaggaattttggattgactttcaaagtactaatactaattatacttttcttttggtagcgtgactcttcttatacctaagaacatattacaaatgtcaaaaccattgcattttgacattgcaaaacatgccttgaactcttgaactactgtgaaaagaatcaccgttgtaaagactttttgtaagctagctgatactcttaagtatgtaaaaagattgtctttcagccgacaggcccaaaggaatgtatataaggaaggaatatgaaaaaataaattaggttttaaaataggaattgggcaataaactgtatcaaaaatatgtagatggattttagtagttgtaatttaaatgtggaaggtgaagagaatttcaaactccaaagagaaatgaatgatattcagatgtttcattaatttctagtctgtgaaaatatgcattttatagtaatatgtatagacttattttatttagaaataatagtgttttagaatttattaaaaactcagtgatagcctttataccaaaatgtttaactttaccaacagcaagtcataaaagtatttattttaaagctttttaatattatcgtgtaactttcatctgtcttcagatgtaaataattatctgcctaaatgttatatttttatgtatgcattttctgaaaatgtattgttttgtaaagtgggaaagataataaatcaagcacttcttgcacttgtttctgtgaagcatatagaactctattttaaataaaggaagatgtgtcgta

SEQ ID NO: 8 - DNA, 8382 bp, Homo sapiens
  source 1..8382: mol_type = genomic DNA
tacgacacatcttcctttatttaaaatagagttctatatgcttcacagaaacaagtgcaagaagtgcttgatttattatctttcccactttacaaaacaatacattttcagaaaatgcatacataaaaatataacatttaggcagataattatttacatctgaagacagatgaaagttacacgataatattaaaaagctttaaaataaatacttttatgacttgctgttggtaaagttaaacattttggtataaaggctatcactgagtttttaataaattctaaaacactattatttctaaataaaataagtctatacatattactataaaatgcatattttcacagactagaaattaatgaaacatctgaatatcattcatttctctttggagtttgaaattctcttcaccttccacatttaaattacaactactaaaatccatctacatatttttgatacagtttattgcccaattcctattttaaaacctaatttattttttcatattccttccttatatacattcctttgggcctgtcggctgaaagacaatctttttacatacttaagagtatcagctagcttacaaaaagtctttacaacggtgattcttttcacagtagttcaagagttcaaggcatgttttgcaatgtcaaaatgcaatggttttgacatttgtaatatgttcttaggtataagaagagtcacgctaccaaaagaaaagtataattagtattagtactttgaaagtcaatccaaaattccttttttgagatctgaatctaattttctgtttttaggacatttaaaaacctgaaacacagatcaagtttgaataatcttctccagtctagaatcagaagagtacatgagcttgacactagtcattgcggaaaagaactagaatttaatattttggctcagatactctcattttgtataaagagaaaaaaagggctgtgtccttaaaaatacttagttactattatttagcctatggaagaaatagaaatattagtaaatgtcattctacgcttgcatttgttagacaaaatttaggcacacaatcctctctttacaggcaaagtcagtaattagctccatgcatagaatgaaaactgtatggacgatatcaaaattggggtccatgtgccttgctgcagattgtctgggttgaaaaattaaaccaacatgataaacaatcaatttctcttctctcaggaatgccaggatgaaaagataaagtattatttcttctaagttctttgttcaatctgtagatgtcaagaattattttgactttttaattctcattttctgaagatgtataagccagaccattctttaaacacatataagccaataagatgcttctctgtaaaatataaaattatgtctgggagccaattgcagttggattttagcccgcacctgcccctcagctgggaagatttatatagagcacaacaggcctgactggatgtgatggcagtgggtataagggtaatctcctaaggcactcagattcttagtggccctattaaaattcagattaacataacccacagtaaactcttgcagttaaaactgttaggtctggagagaaaaatttcttttaggacaacttggaccaatgatcaggaaatacagtcacatctgaaaatattaaaatctaggatgaaatacagctcatattctctcgaatgtattcatctacaactgaaagagaaaagtatgctggcagttctattattgttaggggaattttaaaatagggattgttacctaattttgctgtagtattatattccaaactaatagcataatggcttagtttgtcaaaagcaaaacaaagcaatggtatggaacagcagaaataaatttaacaatcacattatggggcatatatttcaaattgtctttcccagttactatttctcaagcggaatttagcattaaagcaaaagtagacattctttatatgttagctaaaagctagaatacaaataacagctagtctttttaggttttaaaagaaaaatcatctctgccattaacaaatactctatagtgccaaatgaaggattactggagaagttatgaggtgaaacctcttatacagagaacttaaaatcttgttaagaagttcattgtgtagaagtttggacaggttaaacgacaactaaagaaatacaggaattatagagtgacttgggattgatgagatctgccaaacattttttaatgcactaaaagaagatgaatgccaaagacaaactaatgagaaactgaggggaaaaaaaagagaaagagagaaaagttagataatatcccactggacatagtcccaaattcagctatcaaatcacctttcacccccattccaaggtacaaagagaaagaacagtccttacagaaagggtgggggatgtcaggaagcttctctaatcattacttgcactaagaaattctatactctcacagttcctaaattttatccattaattttatcagcaccccagtggttgcctacttagctcaacaaccattctacaactctttcttagcctagtttagtttttctcattgacctcactctgagtgagtaaattattttagtagaaacccaaagaaaagtgggattttatcatcatcattgaatggcacattacgttagtgtgcattcaaggtaggtttagatgcatgcgaattaatttttaatcagtaaaagttggggatatggcagggaacagtgctgggtgtcaccaccaggctttcataagagttctgctagtaactagtagtcatttaatctctgatccttggtttcgtcatctacacaaaattggaataactttatataatctctgagagtactaagggattctctttcattagaaggctaaattccagacggttaagttaaataagagttatttttaaaattaggaactaatgataatgttgaaagatagtgagggaatattaagaaaaaaagtgagaaaaataatgaaatataaagcaaggctagatgaaaaaaagaaagtcaaatatctatatattttcattaaaatgttttgaaaaatgcccatattataaaaattctatttaatattaacattttttaaaaacttacattccaattaacttttttgttatttagaagcagctctcaagataaaagaattactgttttcactaaaatagcagaaaaactccatgtaggtatcagcacacagagctagaacaaagcattgtcaaacagaaatagtatgtttcacaaaagatgtttaaaatatctttgaaaaccacaatggtgccattttaagatacgaatactaaacatttctaagtagcttgtaatgatgtgtttgtgaatttattttaaaggaatgattattgaagacatcaactgccagcttttattcatttggtactgctactttcttaattttccagtgggaaataaaatttgtatattttaaatacatttatttagccaaatacattctcatacttatttcaatcaaagactatgccctaacaagcaattttaagttgtttactcaaactttgtataatggcaaacatcagctccctgttttcagacgatttgctaagcaggttccctggtgcttttgtgcagactcaaagacaaccctgagttttctctgccccaataagtcacatggtggcaaaattccaggaaaataggagtagttttgttttgttttattagtaattctacaatagtaggtgtaataaaataataaattattctggaacttctaacctaatgaatctattgtagattttcatttttaaataaaagctaattttaattttttcagatactgcaaccaggttactattttcatacaatcatggaaatttaaaatgcaaagttaattgaaagtataaagatgaaaagcaagtgctatgcctaaaatagtgcacgacagtcatgtttcacttaactctcaagtcagaacataaattaagaattctagatgtgacatgccaaatattttagacatagaagaaagcatacaacagaatctgtaccaattacaaacttaaaggcaaaatttacaaggcaacaagttcatgctgaaatactgacaacaaataatgtttctcttattttcagaaagtgatgctgcatttaaatcccatcaccactttatacagtactgaaaattcataatagtgttttcccaagtcttgtattataccccaaagccaaaatatctgtaaggagtaaagaacactgatactctgaacataacctaaggagaattttttttttttttgcttataacaaaatgtaaaagaaataaatattacacaatgggactccattaaaaacaatataacatttgacagcataagtatatacaagaagcctgccttatgctctaaacttcatcatcctatttttgtaagtgagcatgttctatatataatcctgttaagagtaaaggaaatattacaacttttaacattttccttatcatttttgctgctctattccctttcttaaaaaatgtattttgtaattgaaatataagactactcagttaggagtcatagttaaacaacacaagaacaagaaaaatacctcaaaatgtactaacatacggatttcttcagagtgaaagttgaaccaataaaatatgaaattatatttagacaccctcaaataagctacaaaacataatgacaagaaaaatggagatggtaaaaaatcctctcttaaaaattcaataagcatatttacccaacataagtaaataaaacaggaaatatcattcttgtttatttgaggcacgtacaaccatagtaaataaataatttcgttcttatatatgcagaaaaacaatctatgagaaattagtaacaagaacaagcaagattaccccttcacataggctctttttaaaaatcacttcacataggcacttttaaaaactgatgatatatttagattgtctgtaatatccaaataaagctactttctaaatgtgttgcaaatgaaagcaattttcagacctatcctagaaacccactgtcatgcagaactcaagacatcccacttcgtattttatctgtcaatttaatctcttcccccacacactcacatccctattcccattcccaaattagactttaaaatccctgagggcaggacctatctatctttgtattccctcttgtacccgatattgtggcaagcaagatatgggtgctctatgattatttaataagtggatgagagcattaacgagtatggaagtacacgcaaactccatagctgtcagttttttgccttccttatttcaactcagtaaaatgaagatagattcagtaacatatttccatagtgaaatgaagcataatcactaaattgtactctatgagaaaatacagaagtatatccttcagaacgctattacccaagctgtgctttgctttatagaacagttaaatatgggatagtaaaaagtttcccctcctcttaataaaagggttccaccacgatcaggtaatctgagcaatccagtttaaaaaaaaatcaagtagcatttctttactgttattagtttttttttttttttttactgttatcaatagcatttacttcactcttcaaaatacattatatgctaacatgtactatcactttataagcaagtaccaaagaacacttttggtcttggatcatctcagtagaagaatgttctaaggaatggagtttgaaaaaagatgttttaggagcataaaagacatcatgttaaatctcgtttaccaaagtaaaattatagatttgaagggcatatttaatgtcccattaaatattcattactctgtgtccacagaaagtagaatgaaggcaaaactatcatgagcattcttctgtactcactcactcactgtgaaagggtagaggaatatctatttgctgtttctgataccgtctgtagggtttggttgttaacacttcattgaagagttttcttaattcttctcaatatattctcaaaatatttccttccttcctcttccttttctgtcttttctttctaagtgtgtatgtacaaaggaaatagggacctctgaattgtatcttaaagacattttcagacaatgaatatttatgtttgattaatctttggaagtgttcagaaaacattaatgctcattaacaaatggggtaaccatgatatttctatgagaaaaaatgtcaacagatatggttctgagattttgtgcgggtccattatgattctgcaaaataactcaatatgccttctaaaccacaaatatcataataaaagatattacatagggagaaaagcactattcaagggaaagtaggaagctagctaaccttacggtgttcattatcacaagatttggacctagtgccagttctgccattagctgtgtgacttcaggacatttctcagtgtctcaggatgtcaggtatctcttttgtaaatgaaaggaacaagtttagtggttcagggactgctgcagtagtggattatgaagaacaggagaacagcagaaggggagaccaagcacatgggacacccacctcacttacatcttccactaagcagctccactctcacgttcgatatattaaagtttagagcaatatttatttttaaaaagtcctgctaacttaaaaagggggaaacatagattgcatcacctaaagatagcatgctctaatttgcatgtttaattaatatgttttcatctcagaaaaaaatgtttttacatcttttcctgttcattcatgtgctcttggttcaagtaaaataaaaacttaatgactataacatttttatagagcttattttatacttttgtaatatatttcttccttattaaataaaaagatgagttgaggtgttgctttcaaaataaaattaaacataacatagagattggatgaagtcaactcctgcccatgcttaactttagagttatcttttcatgctgccttatgggcacttaaatactgtactgtcttatctttgaggtagaacaaaaaaaaaatggcaaaaacattcacataaaggggaaaatggaaaagaaagctatgagagatttctttttaacataattatcatcattaggctttgcagtcttctttgacacaaagttgagatatagtcttcttaatacgaagagcagttaggcgggccgctccgttggcataccaacactcacgcattattctccccatgactcggagtgcttcacaactttgccactggtttgggatacttggtcgaaacttctggtcacaaacaacctttctcatttcctctatcgagggatctgaaggcaccatgtcataataaggcaattggtactcctcaacaattcctccgactgaacacctccgggctatttcccagtaaaccagaccaacagaatagatgtcagctcgtttgaaggactcaaagatattcacattcattgtatcatcaagcatttcaggagccatatacctcttggttcccactttaggattctgaggtatgtcgatagtgttcagtattgaatcatgcttcacagccaaccctaagtccgctatggcacaagtttcacactttttcactaagatattctttgattttatgtctcgatgagcaatagcaggtttaccttgtgtaccaacaatctccatatgaaggtgtgccagaccactagcaattgagagcgccagcttgatcattccagccacggtcactatatttctattcaaatagtcatataaggagccctgttcatgatattcagataccagccaaagttgagtccaagttccattatctgttggaaggtgcagtgttatgttgttgcaaaaatctgtgaagcagcattcggttttggtaacattgttggaactatgacagaagacttgagcattcagttctggaagggagacacaggatttgatcacctgctcttttccattggttagcatgactgatgcccaacatgctccttctgtttggcaggtgaagtttgaagaatcacacaaaagacatacacacttcagtcctggcgagagctcggcggccgctgcgagcagcaggagagcctggcggagcgctgagcagagcgcccgggtcatcgccaccaggcggccgcgccggggctgcgaggccccagagcagagcgaggcagccggggcagcacggcccgctttgaagttcccgggccgcgggaggggagcgcggcaccgacacccttttgaagtgcgcggttggctctagtcagtgtgggcgcccccctccccggccgcccccatcccacgccccctgcggctggcggtgcgcggcgctcctgccact

SEQ ID NO: 9 - DNA, 9033 bp, Mus musculus
  source 1..9033: mol_type = genomic DNA
gccccgggaacttcaaagcggcccgcgctgcgggctgcgctctgggaccccgaagccttgcaccgccgccgggtggccatgaccccagcgcgcggctccgcactgagcctggccctcctgctggtggccctggccgccgaccttgcggcaggactgaagtgtgtgtgtcttttgtgtgattcttcaaacttcacctgccaaacggaaggagcatgttgggcctccgtcatgctaaccaacgggaaagagcaggtgatcaaatcgtgtgtgtccctcccggaactaaatgctcaggtcttctgtcacagttccaacaacgtgaccaaaaccgaatgttgcttcacagacttctgcaacaatatcacactgcaccttcccacagcatcgccaaatgcccctcgacttggtcccacagagctgacggttgttatcaccgtgccggtttgcctcctgtccatagccgccatgctaacaatatgggcgtgccaggaccgccagtgcacatacaggaagactaagagacacaacgtggaggaagcgctggctgagtacagccttgtgaatgcaggaaaaacactcaaggatctgatctacgatgctactgcctctggctcaggctctggtctgcctctcttggttcaaagaacaatcgcaaggacaattgtacttcaagaaatcgtaggaaaaggtcggtttggggaagtgtggcacggaagatggtgtggagaagatgtggctgtgaaaatattctcctccagggatgagagatcttggttccgtgaggcggaaatttatcagacggtgatgctgagacacgagaacatcctcggtttcatcgcagctgacaacaaagataatggaacttggacacaactctggcttgtgtcagagtatcacgagcagggctccttgtatgactatttgaacagaaacatagtgactgtggctggaatggtcaagctggcgctttccatagcgagtggtctggctcacctgcacatggagatcgtgggtactcaaggtaagcctgctattgctcaccgagatataaagtcaaagaatatcctagtcaaaaaatgtgacacttgtgccatagctgacttagggctggctgtgaagcacgattctatcatgaacactatagacataccccagaatcctaaagtgggaaccaagaggtacatggctcccgaaatgcttgatgatacaatgaacctgagcatctttgagtccttcaagcgagctgacatctattcggtggggctggtttactgggaaatagctcgaaggtgttcagttggaggagttgttgaggagtaccagttgccttactatgacatggtgccttcagatccttcgatagaagaaatgaggaaggttgtctgtgatcagaaactccgaccaaatctcccaaaccagtggcaaagctgtgaagcgctgcgggtcatgggaagaataatgcgtgagtgctggtacgccaacggggcagcacgcctgacagccctgcgcgtgaagaagaccatctcccagctgtgtgtcaaggaagactgtaaagcttagctctgcgtacaggcaaaggaagagtgctcacagctttccttcccgtctcccgctttgtgtaaatgtttttgcttcttttctgctgtgttttattttagttctacctcaaggatgactcactacagtgttgaagtgtcccaaaggcagcatgtaaagataacgctaaagttaagcatgggcaggtcttgactttcccagtttccatgttgtccttagttttatgtttaaaggggacacgactcgttttttctttttatttaaggaggaagatgttatgagtataagataagctacatacaatggtaaaaaaaatattaaatttttgttgtacttgaaccaagagcatccacaaatgagatgaagacatatttaaaatgtgaactactgtatattatggtgaaatggaactgtaaaaattaactgggtccttaaaaagtaaattttgctcagaattttaacatctaaagagtggaaaggtggagtaacaaagtgacaccacgttctcaggacttgctttctctgcctatttgccactctgcatcactacgacagctgtccctaagtagttcgaaaaccacctgagccattactcctcctgatacataacagaggtccatatgtctcaaacactgtgaaatggcccagagtcacagagctcttgccagagctggttacgaaccctgtgacaactagcactgtgaagtttgctggccattatactcccttgaattcccatagagcgtttcttcccaagtgggaagatcaatcatcagttataatattttaaatttagtcacatagtgaatgcattgagtattttgtaagaccataatagattttctagaatttcagaaccaatctattagaatttcatcaaagaaatgtcatcattatcccattcgataatgaaaaaaaatgttttctgaacattgccaaatattgaccaattataaacatccattttctaaagatgtatgtcataagatgtcattgcttttgaggttcatggttggaaagaaaatgacagaaagataaacacggaaagaatttgaggagagttcagagaactctcccgaaggagtgtaaccccttactggtaacagaagatcacatcagtgattacaaggcattcctggccttttaacagggaccatgcatggaagggtttggaggatctacctctattctccatttttgaagttcagaatatttaacaggacaccagatatttctttcaaatgtcctataggctttagtgaagatggtttaactcaacgtctttcagtgttctgaaacagtttcccgaaccccattccttagaactttcatctacctagaagttgttagaatggatgtgcactctaacaaggtcttgaaaagtgatatgttaacatattctattctttgatagttctagcagcaaagacacattccatggatatttttaagggtaaatatttgattgtagcctttctattatgagtaaggtgaagttttactatctagcatcttctaaagcccaacatggtaaatgatgttgtgaagaatacgttatgtatcccataagagggtaacttgatgtctacatatcactatggagatatgctactcgatccatctcatttgactaagtggagataagagaaacaaaagctgacagctgtggagtttgcatgtacttccattctcagtcatgtcctcatccatttataagcacagggcaccccataacttacttgccacaatattgggtacaagagggaataacaagatagataggtcctgccctcggggattttaaagtctaatttgggagtggggaaagacatgtgagtatgagggaagcgagtaaattgacagataaaatatgcagtgggatgcctttgagttctatgtgacaatggcttctagaataggtcttaaaatcacttccaatttgcaacacatttagaagggatctttatttagatattacagcctaattatatcatcagcatcaaaaggtgcgcctacgtgaatggatgttaagaagaaccgtgcgaagggagagctggcttatgtctattatcttatttcacagtttctacatgacggcaatggaattatttacttcaatgattgtatccagatatccaatgaaaaaaacctactctatcctgttccattcaccactgttagggaagtatattttctagattttaaaagagggtgttgtaacatctttattttggtcattatgttttataatttatttcagggtatatacaaacataacttatattttcttggtttagatttcacagtggagaaatctgcacattggtacattttgagacttttgctcattattctgttgctgaactgtaatccctaagtgaataatcttaaagagcagagccacagaagtagtcagggaacaatagaagttgtagtttttgcttaactctcaacatagttctacatagatactgctcacttataaaaaatagagtaatttttagagcataaggcatatttactgtatatatctatgcagttcaattttgtattatgtgtttttgatggaatcttatgtaacacttggtccttgtaaattttgttacgagcaaaaatatcttcttaggttaggtgcaaagtgacaccattgctttgctccttatggatattttggctctgggtataacatagagcttaggaatgctattatgaatttttagtactgtatgcaaaaaatggtggggtttatatacagcatcacttcttgaaatacagaacgcattatttgttgtctacatttgagcatgaatttgttgccttataagtcctgcgttttgagtttgtaatcagtactgactctgttgtatgcatccttccacgtctaaaatatttggcatgtcacatctagaattcttaatttatgttctgccatgagagttaagtgaaacatgactgtcatgctctattttaagcgcagcacttgcttttcatctttatacttttcaattaactttgcattttaaatttccataattgtatgaaaatagtaacctgatcgcaatgtctgaagagtttcaaatcggcgtttattttaaaatgaaaaaaaaaaaactacaacacattcattagatcagaagttccacaatcacttattgttttgagtgcttcgtctattgcagaatgattaaataaaagaaatgtctactgtcctggaattttgccaccatgggacttactgagacagagcaaactcagggcaatcttggagtggaagcaaaagtcccagggaagaccgcagtgcactgcctgaaggcagggagcaggcatctgccatcatacaaggagcaagagaacaacttgaaattacttggcaggcaatgatttttgactgattcttgaaaggaaatatgaacatttacatggctaaattaattcatttaaaatgtggaaattttgatttctatcaagcagttagggaacaataacaaatgcatccaagttggttgctgaattcttcagtattcgtttcctttatgtaacttgaaaaactaatattatcaatcactcagaaatgtttatgcttagtgtcctaaaatggtgtcactgtagtttttgaagctcccctctctcttttttcacttgtggaatgtattatctccatgaataacaatactgtgttttaattccagatcctgatattcacttagattttattcactgtcttagtgaagacagtcatcattttaagggcttttaattttttttttttttgcaggattctttaaaactaaaccaaaaaagatagagaaacagatagatggacagaaagaaagaaagagagaaagaaaggaagaaaggaagaaggaagaaagaggcaaaggaagaaaatctagaaggcaaaacattcattaagtctagtattagtcagaatttctatagtgttcatgttcttctgaggatactgatgcaaactccctggtgcctggctttctctttaccctccaccttagcttcgtttcattatctttcttctactattaaacttgatgttctttcatcaccttccaaaattatagttacttcctaattatttttaaacatagctattatttaacttaatcattatagaattgcacatttataatggagaagaaatcccttagtgttctaaattcttttatatgtgccacagcacaaaatgaaaatgagaatgtaaaagttaaagggactctgagcctcagatcttggttctaatattttgtagacgaagaaactgaagaccggtcattagatggcagctaatggttgtagaaacacagtggtgacacctacttctgcagcctcgcccacgtttacaaattgaaaagtcaatcagcatggatttaacactgcttcatgcacatattaacatcacatgccattcagtgctggtggtcagaccctacttgttgatgcatttctattaaaatagatggcttaggccaaggtcactagggaaaaaatgaaaatagacaaagcaaaaacctaaaagttgttatcgagataggcagaaaagccatgaagcactgatgagtttggaaatgtaattgaagaaatttagtgtgtggagggttttagtgctggctggaggtgtagagcagaggccgagaggacttgcctcgaaagtgaaaagatttgggttcaattttcagcactggtaagagaaggaagataggaaggaggtaagaagggaaggaaggaagtgaggaaggaagaaaggaggaaaggaaggataaaagaaagcattcttagtatgaataatgattatcgaagcctctggaccttccttgctcccttcctgaatgcattgttcctttcccttgtgtgttggaatggtgaaaggtgatttggtacacgaactggagactatgtttagtgtcatttatagtctctctcttgtttgttttgtctttgacatcattgtctcccctggtggcagatttcctgagccctgcccccaccactctactcagctctgtcctttcatgtatttgagccctgtccagactgttacacacggaacgtcttaacaaggttttaatttccccactgtgtataagaggcctcggctcaccagttcattagtgatcgttctcctgacactgggaagagggctctgttaatggcagacatgactttctttctcttccattttagtcagactgtctggttatcttgtagcttttggctagtgcataaagaatgtccgcttctgctttcatgctgaactcagcttcaacagcgacttgaacaaagactgtgaaatacatatcccataatgtgattgctcatgttacgcctgtgataattgagccattggtttgttttattcctgccatcctttgaaatatttttatttatttatttttatgtgttatgggagttttgattgaatgtgggtctgtgtaccatatgcatatccggtgcttgggtaggccaaaagagtctgatcccctgaaactagaattacaggtagttgtaagctgccatgtgggtgctggaaaccagaacttggtcctctggaagagcatcagccagtgcttctaactgctaagccatctctcttctgcttctgccatgtttttagactaagccatgtgccatgctgcttagaatgcagattatgctgaaattaggtaacgatctccactttaaaatttgatattgatagctgccaggattctcctgcagttagtcatagatgaacacaacatttgggagaatatgagctccagctcatcctcattttaataatgccagaaatgtatttttctccttgttggtttatgttacactacaagaaaatttcctcctggacccaacactttcattggaatatgcaattcttccccgggttttaggaatctgactgttcacacagcctgagtgtggtaggaaattcacctttctttccagcatcccacatataaattctccacagggaactcaacagattggggcagctgaggactggggtgagcgctggaactagctcttccctatagagacagttctagaccttacagagaaagacattgtgtgtttctatatcaacataaaatgcccaggcttatccatcattatgaaatagatgctaaatttagaaatggttcttgacatatgcaaactgaacacagaatttggaagaatagaatactctgacttttcttctctgtattcccaagagtaacaagagtaacaaggtggactctttatcctggtgatgggtgtatcttttccccaacctaagtcattggctgcaaggcacagtaacctcaatttctatacatccaccaagttttcattctgtggatgaacctactcatttgcttcacctgtaaagggaggcttgagtgtcaggctctaagaaagttaaccatactaagagatttatcaatatgtttggtttttcattggcagaacagtagtatctaggcaattttaaagatgtagcagtttcctgttctctttaccaagtgagagaatctgagtaaaatattagactccagttcatttctagaatggcttatatcaagctcttgtactctcctgaccctgaactggataggattgtttacacttgattgttgtttcaggttttaaaagggtctcaaaagaaaaaattggattcaggtctataaaaaaaaaaaaggattttgtattaattttcaaagcactaatactaattatacttttcttggggtagtgattctcttcttatacctaagaacatattacacatgtcaaaaccattgcattttgacattgcgaaacacaccttgaactcttgaactactgtgagcagaatcactgttgtaaagatttttttttttttttttttttttggtaagcttgctggtattcttaagtatgtaaaaagatgtcggcttccacaggctcaaatgaatgtacataaggactgtgaaaaaaaaataaattgggttttaaaataagaactgggcgataaattgtatctaaactgcgcagatgggcatcgtcgtgcggctgtgttttcattgttgaaggttgaacagagttctacagagtcgtggatgacattcagatgtttcatgacttttggatctgcgaacatatgcattttatagtcatgtatacttatattgttaagaaataatcatattttagaatttagtaagaactcagtgatagccttcataccaaaatgtttaactttgccaacagctagtcataaaaaagtatttattttaaagctttttaatacaattgcataacttcttgccgcctccaggtgtacattcttctctgcctaaatgttatatttttatgtatgcattttcagaaagcatattgttttggaaagtggcaaagacaatgaattaagcactcgttgcacttgtttctgtaaagcataaagagctctattttaaataaaagaaaacgtgtcataaaaaaaaa

SEQ ID NO: 10 - DNA, 9033 bp, Mus musculus
  source 1..9033: mol_type = genomic DNA
tttttttttatgacacgttttcttttatttaaaatagagctctttatgctttacagaaacaagtgcaacgagtgcttaattcattgtctttgccactttccaaaacaatatgctttctgaaaatgcatacataaaaatataacatttaggcagagaagaatgtacacctggaggcggcaagaagttatgcaattgtattaaaaagctttaaaataaatacttttttatgactagctgttggcaaagttaaacattttggtatgaaggctatcactgagttcttactaaattctaaaatatgattatttcttaacaatataagtatacatgactataaaatgcatatgttcgcagatccaaaagtcatgaaacatctgaatgtcatccacgactctgtagaactctgttcaaccttcaacaatgaaaacacagccgcacgacgatgcccatctgcgcagtttagatacaatttatcgcccagttcttattttaaaacccaatttatttttttttcacagtccttatgtacattcatttgagcctgtggaagccgacatctttttacatacttaagaataccagcaagcttaccaaaaaaaaaaaaaaaaaaaaaaatctttacaacagtgattctgctcacagtagttcaagagttcaaggtgtgtttcgcaatgtcaaaatgcaatggttttgacatgtgtaatatgttcttaggtataagaagagaatcactaccccaagaaaagtataattagtattagtgctttgaaaattaatacaaaatccttttttttttttatagacctgaatccaattttttcttttgagacccttttaaaacctgaaacaacaatcaagtgtaaacaatcctatccagttcagggtcaggagagtacaagagcttgatataagccattctagaaatgaactggagtctaatattttactcagattctctcacttggtaaagagaacaggaaactgctacatctttaaaattgcctagatactactgttctgccaatgaaaaaccaaacatattgataaatctcttagtatggttaactttcttagagcctgacactcaagcctccctttacaggtgaagcaaatgagtaggttcatccacagaatgaaaacttggtggatgtatagaaattgaggttactgtgccttgcagccaatgacttaggttggggaaaagatacacccatcaccaggataaagagtccaccttgttactcttgttactcttgggaatacagagaagaaaagtcagagtattctattcttccaaattctgtgttcagtttgcatatgtcaagaaccatttctaaatttagcatctatttcataatgatggataagcctgggcattttatgttgatatagaaacacacaatgtctttctctgtaaggtctagaactgtctctatagggaagagctagttccagcgctcaccccagtcctcagctgccccaatctgttgagttccctgtggagaatttatatgtgggatgctggaaagaaaggtgaatttcctaccacactcaggctgtgtgaacagtcagattcctaaaacccggggaagaattgcatattccaatgaaagtgttgggtccaggaggaaattttcttgtagtgtaacataaaccaacaaggagaaaaatacatttctggcattattaaaatgaggatgagctggagctcatattctcccaaatgttgtgttcatctatgactaactgcaggagaatcctggcagctatcaatatcaaattttaaagtggagatcgttacctaatttcagcataatctgcattctaagcagcatggcacatggcttagtctaaaaacatggcagaagcagaagagagatggcttagcagttagaagcactggctgatgctcttccagaggaccaagttctggtttccagcacccacatggcagcttacaactacctgtaattctagtttcaggggatcagactcttttggcctacccaagcaccggatatgcatatggtacacagacccacattcaatcaaaactcccataacacataaaaataaataaataaaaatatttcaaaggatggcaggaataaaacaaaccaatggctcaattatcacaggcgtaacatgagcaatcacattatgggatatgtatttcacagtctttgttcaagtcgctgttgaagctgagttcagcatgaaagcagaagcggacattctttatgcactagccaaaagctacaagataaccagacagtctgactaaaatggaagagaaagaaagtcatgtctgccattaacagagccctcttcccagtgtcaggagaacgatcactaatgaactggtgagccgaggcctcttatacacagtggggaaattaaaaccttgttaagacgttccgtgtgtaacagtctggacagggctcaaatacatgaaaggacagagctgagtagagtggtgggggcagggctcaggaaatctgccaccaggggagacaatgatgtcaaagacaaaacaaacaagagagagactataaatgacactaaacatagtctccagttcgtgtaccaaatcacctttcaccattccaacacacaagggaaaggaacaatgcattcaggaagggagcaaggaaggtccagaggcttcgataatcattattcatactaagaatgctttcttttatccttcctttcctcctttcttccttcctcacttccttccttcccttcttacctccttcctatcttccttctcttaccagtgctgaaaattgaacccaaatcttttcactttcgaggcaagtcctctcggcctctgctctacacctccagccagcactaaaaccctccacacactaaatttcttcaattacatttccaaactcatcagtgcttcatggcttttctgcctatctcgataacaacttttaggtttttgctttgtctattttcattttttccctagtgaccttggcctaagccatctattttaatagaaatgcatcaacaagtagggtctgaccaccagcactgaatggcatgtgatgttaatatgtgcatgaagcagtgttaaatccatgctgattgacttttcaatttgtaaacgtgggcgaggctgcagaagtaggtgtcaccactgtgtttctacaaccattagctgccatctaatgaccggtcttcagtttcttcgtctacaaaatattagaaccaagatctgaggctcagagtccctttaacttttacattctcattttcattttgtgctgtggcacatataaaagaatttagaacactaagggatttcttctccattataaatgtgcaattctataatgattaagttaaataatagctatgtttaaaaataattaggaagtaactataattttggaaggtgatgaaagaacatcaagtttaatagtagaagaaagataatgaaacgaagctaaggtggagggtaaagagaaagccaggcaccagggagtttgcatcagtatcctcagaagaacatgaacactatagaaattctgactaatactagacttaatgaatgttttgccttctagattttcttcctttgcctctttcttccttcttcctttcttcctttctttctctctttctttctttctgtccatctatctgtttctctatcttttttggtttagttttaaagaatcctgcaaaaaaaaaaaaaattaaaagcccttaaaatgatgactgtcttcactaagacagtgaataaaatctaagtgaatatcaggatctggaattaaaacacagtattgttattcatggagataatacattccacaagtgaaaaaagagagaggggagcttcaaaaactacagtgacaccattttaggacactaagcataaacatttctgagtgattgataatattagtttttcaagttacataaaggaaacgaatactgaagaattcagcaaccaacttggatgcatttgttattgttccctaactgcttgatagaaatcaaaatttccacattttaaatgaattaatttagccatgtaaatgttcatatttcctttcaagaatcagtcaaaaatcattgcctgccaagtaatttcaagttgttctcttgctccttgtatgatggcagatgcctgctccctgccttcaggcagtgcactgcggtcttccctgggacttttgcttccactccaagattgccctgagtttgctctgtctcagtaagtcccatggtggcaaaattccaggacagtagacatttcttttatttaatcattctgcaatagacgaagcactcaaaacaataagtgattgtggaacttctgatctaatgaatgtgttgtagttttttttttttcattttaaaataaacgccgatttgaaactcttcagacattgcgatcaggttactattttcatacaattatggaaatttaaaatgcaaagttaattgaaaagtataaagatgaaaagcaagtgctgcgcttaaaatagagcatgacagtcatgtttcacttaactctcatggcagaacataaattaagaattctagatgtgacatgccaaatattttagacgtggaaggatgcatacaacagagtcagtactgattacaaactcaaaacgcaggacttataaggcaacaaattcatgctcaaatgtagacaacaaataatgcgttctgtatttcaagaagtgatgctgtatataaaccccaccattttttgcatacagtactaaaaattcataatagcattcctaagctctatgttatacccagagccaaaatatccataaggagcaaagcaatggtgtcactttgcacctaacctaagaagatatttttgctcgtaacaaaatttacaaggaccaagtgttacataagattccatcaaaaacacataatacaaaattgaactgcatagatatatacagtaaatatgccttatgctctaaaaattactctattttttataagtgagcagtatctatgtagaactatgttgagagttaagcaaaaactacaacttctattgttccctgactacttctgtggctctgctctttaagattattcacttagggattacagttcagcaacagaataatgagcaaaagtctcaaaatgtaccaatgtgcagatttctccactgtgaaatctaaaccaagaaaatataagttatgtttgtatataccctgaaataaattataaaacataatgaccaaaataaagatgttacaacaccctcttttaaaatctagaaaatatacttccctaacagtggtgaatggaacaggatagagtaggtttttttcattggatatctggatacaatcattgaagtaaataattccattgccgtcatgtagaaactgtgaaataagataatagacataagccagctctcccttcgcacggttcttcttaacatccattcacgtaggcgcaccttttgatgctgatgatataattaggctgtaatatctaaataaagatcccttctaaatgtgttgcaaattggaagtgattttaagacctattctagaagccattgtcacatagaactcaaaggcatcccactgcatattttatctgtcaatttactcgcttccctcatactcacatgtctttccccactcccaaattagactttaaaatccccgagggcaggacctatctatcttgttattccctcttgtacccaatattgtggcaagtaagttatggggtgccctgtgcttataaatggatgaggacatgactgagaatggaagtacatgcaaactccacagctgtcagcttttgtttctcttatctccacttagtcaaatgagatggatcgagtagcatatctccatagtgatatgtagacatcaagttaccctcttatgggatacataacgtattcttcacaacatcatttaccatgttgggctttagaagatgctagatagtaaaacttcaccttactcataatagaaaggctacaatcaaatatttacccttaaaaatatccatggaatgtgtctttgctgctagaactatcaaagaatagaatatgttaacatatcacttttcaagaccttgttagagtgcacatccattctaacaacttctaggtagatgaaagttctaaggaatggggttcgggaaactgtttcagaacactgaaagacgttgagttaaaccatcttcactaaagcctataggacatttgaaagaaatatctggtgtcctgttaaatattctgaacttcaaaaatggagaatagaggtagatcctccaaacccttccatgcatggtccctgttaaaaggccaggaatgccttgtaatcactgatgtgatcttctgttaccagtaaggggttacactccttcgggagagttctctgaactctcctcaaattctttccgtgtttatctttctgtcattttctttccaaccatgaacctcaaaagcaatgacatcttatgacatacatctttagaaaatggatgtttataattggtcaatatttggcaatgttcagaaaacattttttttcattatcgaatgggataatgatgacatttctttgatgaaattctaatagattggttctgaaattctagaaaatctattatggtcttacaaaatactcaatgcattcactatgtgactaaatttaaaatattataactgatgattgatcttcccacttgggaagaaacgctctatgggaattcaagggagtataatggccagcaaacttcacagtgctagttgtcacagggttcgtaaccagctctggcaagagctctgtgactctgggccatttcacagtgtttgagacatatggacctctgttatgtatcaggaggagtaatggctcaggtggttttcgaactacttagggacagctgtcgtagtgatgcagagtggcaaataggcagagaaagcaagtcctgagaacgtggtgtcactttgttactccacctttccactctttagatgttaaaattctgagcaaaatttactttttaaggacccagttaatttttacagttccatttcaccataatatacagtagttcacattttaaatatgtcttcatctcatttgtggatgctcttggttcaagtacaacaaaaatttaatattttttttaccattgtatgtagcttatcttatactcataacatcttcctccttaaataaaaagaaaaaacgagtcgtgtcccctttaaacataaaactaaggacaacatggaaactgggaaagtcaagacctgcccatgcttaactttagcgttatctttacatgctgcctttgggacacttcaacactgtagtgagtcatccttgaggtagaactaaaataaaacacagcagaaaagaagcaaaaacatttacacaaagcgggagacgggaaggaaagctgtgagcactcttcctttgcctgtacgcagagctaagctttacagtcttccttgacacacagctgggagatggtcttcttcacgcgcagggctgtcaggcgtgctgccccgttggcgtaccagcactcacgcattattcttcccatgacccgcagcgcttcacagctttgccactggtttgggagatttggtcggagtttctgatcacagacaaccttcctcatttcttctatcgaaggatctgaaggcaccatgtcatagtaaggcaactggtactcctcaacaactcctccaactgaacaccttcgagctatttcccagtaaaccagccccaccgaatagatgtcagctcgcttgaaggactcaaagatgctcaggttcattgtatcatcaagcatttcgggagccatgtacctcttggttcccactttaggattctggggtatgtctatagtgttcatgatagaatcgtgcttcacagccagccctaagtcagctatggcacaagtgtcacattttttgactaggatattctttgactttatatctcggtgagcaatagcaggcttaccttgagtacccacgatctccatgtgcaggtgagccagaccactcgctatggaaagcgccagcttgaccattccagccacagtcactatgtttctgttcaaatagtcatacaaggagccctgctcgtgatactctgacacaagccagagttgtgtccaagttccattatctttgttgtcagctgcgatgaaaccgaggatgttctcgtgtctcagcatcaccgtctgataaatttccgcctcacggaaccaagatctctcatccctggaggagaatattttcacagccacatcttctccacaccatcttccgtgccacacttccccaaaccgaccttttcctacgatttcttgaagtacaattgtccttgcgattgttctttgaaccaagagaggcagaccagagcctgagccagaggcagtagcatcgtagatcagatccttgagtgtttttcctgcattcacaaggctgtactcagccagcgcttcctccacgttgtgtctcttagtcttcctgtatgtgcactggcggtcctggcacgcccatattgttagcatggcggctatggacaggaggcaaaccggcacggtgataacaaccgtcagctctgtgggaccaagtcgaggggcatttggcgatgctgtgggaaggtgcagtgtgatattgttgcagaagtctgtgaagcaacattcggttttggtcacgttgttggaactgtgacagaagacctgagcatttagttccgggagggacacacacgatttgatcacctgctctttcccgttggttagcatgacggaggcccaacatgctccttccgtttggcaggtgaagtttgaagaatcacacaaaagacacacacacttcagtcctgccgcaaggtcggcggccagggccaccagcaggagggccaggctcagtgcggagccgcgcgctggggtcatggccacccggcggcggtgcaaggcttcggggtcccagagcgcagcccgcagcgcgggccgctttgaagttcccggggc

SEQ ID NO: 11 - DNA, 8666 bp, Mus musculus
  source 1..8666: mol_type = genomic DNA
agttccccttggctgggctctgaggactgaagtgtgtgtgtcttttgtgtgattcttcaaacttcacctgccaaacggaaggagcatgttgggcctccgtcatgctaaccaacgggaaagagcaggtgatcaaatcgtgtgtgtccctcccggaactaaatgctcaggtcttctgtcacagttccaacaacgtgaccaaaaccgaatgttgcttcacagacttctgcaacaatatcacactgcaccttcccacaggtctgcctctcttggttcaaagaacaatcgcaaggacaattgtacttcaagaaatcgtaggaaaaggtcggtttggggaagtgtggcacggaagatggtgtggagaagatgtggctgtgaaaatattctcctccagggatgagagatcttggttccgtgaggcggaaatttatcagacggtgatgctgagacacgagaacatcctcggtttcatcgcagctgacaacaaagataatggaacttggacacaactctggcttgtgtcagagtatcacgagcagggctccttgtatgactatttgaacagaaacatagtgactgtggctggaatggtcaagctggcgctttccatagcgagtggtctggctcacctgcacatggagatcgtgggtactcaaggtaagcctgctattgctcaccgagatataaagtcaaagaatatcctagtcaaaaaatgtgacacttgtgccatagctgacttagggctggctgtgaagcacgattctatcatgaacactatagacataccccagaatcctaaagtgggaaccaagaggtacatggctcccgaaatgcttgatgatacaatgaacctgagcatctttgagtccttcaagcgagctgacatctattcggtggggctggtttactgggaaatagctcgaaggtgttcagttggaggagttgttgaggagtaccagttgccttactatgacatggtgccttcagatccttcgatagaagaaatgaggaaggttgtctgtgatcagaaactccgaccaaatctcccaaaccagtggcaaagctgtgaagcgctgcgggtcatgggaagaataatgcgtgagtgctggtacgccaacggggcagcacgcctgacagccctgcgcgtgaagaagaccatctcccagctgtgtgtcaaggaagactgtaaagcttagctctgcgtacaggcaaaggaagagtgctcacagctttccttcccgtctcccgctttgtgtaaatgtttttgcttcttttctgctgtgttttattttagttctacctcaaggatgactcactacagtgttgaagtgtcccaaaggcagcatgtaaagataacgctaaagttaagcatgggcaggtcttgactttcccagtttccatgttgtccttagttttatgtttaaaggggacacgactcgttttttctttttatttaaggaggaagatgttatgagtataagataagctacatacaatggtaaaaaaaatattaaatttttgttgtacttgaaccaagagcatccacaaatgagatgaagacatatttaaaatgtgaactactgtatattatggtgaaatggaactgtaaaaattaactgggtccttaaaaagtaaattttgctcagaattttaacatctaaagagtggaaaggtggagtaacaaagtgacaccacgttctcaggacttgctttctctgcctatttgccactctgcatcactacgacagctgtccctaagtagttcgaaaaccacctgagccattactcctcctgatacataacagaggtccatatgtctcaaacactgtgaaatggcccagagtcacagagctcttgccagagctggttacgaaccctgtgacaactagcactgtgaagtttgctggccattatactcccttgaattcccatagagcgtttcttcccaagtgggaagatcaatcatcagttataatattttaaatttagtcacatagtgaatgcattgagtattttgtaagaccataatagattttctagaatttcagaaccaatctattagaatttcatcaaagaaatgtcatcattatcccattcgataatgaaaaaaaatgttttctgaacattgccaaatattgaccaattataaacatccattttctaaagatgtatgtcataagatgtcattgcttttgaggttcatggttggaaagaaaatgacagaaagataaacacggaaagaatttgaggagagttcagagaactctcccgaaggagtgtaaccccttactggtaacagaagatcacatcagtgattacaaggcattcctggccttttaacagggaccatgcatggaagggtttggaggatctacctctattctccatttttgaagttcagaatatttaacaggacaccagatatttctttcaaatgtcctataggctttagtgaagatggtttaactcaacgtctttcagtgttctgaaacagtttcccgaaccccattccttagaactttcatctacctagaagttgttagaatggatgtgcactctaacaaggtcttgaaaagtgatatgttaacatattctattctttgatagttctagcagcaaagacacattccatggatatttttaagggtaaatatttgattgtagcctttctattatgagtaaggtgaagttttactatctagcatcttctaaagcccaacatggtaaatgatgttgtgaagaatacgttatgtatcccataagagggtaacttgatgtctacatatcactatggagatatgctactcgatccatctcatttgactaagtggagataagagaaacaaaagctgacagctgtggagtttgcatgtacttccattctcagtcatgtcctcatccatttataagcacagggcaccccataacttacttgccacaatattgggtacaagagggaataacaagatagataggtcctgccctcggggattttaaagtctaatttgggagtggggaaagacatgtgagtatgagggaagcgagtaaattgacagataaaatatgcagtgggatgcctttgagttctatgtgacaatggcttctagaataggtcttaaaatcacttccaatttgcaacacatttagaagggatctttatttagatattacagcctaattatatcatcagcatcaaaaggtgcgcctacgtgaatggatgttaagaagaaccgtgcgaagggagagctggcttatgtctattatcttatttcacagtttctacatgacggcaatggaattatttacttcaatgattgtatccagatatccaatgaaaaaaacctactctatcctgttccattcaccactgttagggaagtatattttctagattttaaaagagggtgttgtaacatctttattttggtcattatgttttataatttatttcagggtatatacaaacataacttatattttcttggtttagatttcacagtggagaaatctgcacattggtacattttgagacttttgctcattattctgttgctgaactgtaatccctaagtgaataatcttaaagagcagagccacagaagtagtcagggaacaatagaagttgtagtttttgcttaactctcaacatagttctacatagatactgctcacttataaaaaatagagtaatttttagagcataaggcatatttactgtatatatctatgcagttcaattttgtattatgtgtttttgatggaatcttatgtaacacttggtccttgtaaattttgttacgagcaaaaatatcttcttaggttaggtgcaaagtgacaccattgctttgctccttatggatattttggctctgggtataacatagagcttaggaatgctattatgaatttttagtactgtatgcaaaaaatggtggggtttatatacagcatcacttcttgaaatacagaacgcattatttgttgtctacatttgagcatgaatttgttgccttataagtcctgcgttttgagtttgtaatcagtactgactctgttgtatgcatccttccacgtctaaaatatttggcatgtcacatctagaattcttaatttatgttctgccatgagagttaagtgaaacatgactgtcatgctctattttaagcgcagcacttgcttttcatctttatacttttcaattaactttgcattttaaatttccataattgtatgaaaatagtaacctgatcgcaatgtctgaagagtttcaaatcggcgtttattttaaaatgaaaaaaaaaaaactacaacacattcattagatcagaagttccacaatcacttattgttttgagtgcttcgtctattgcagaatgattaaataaaagaaatgtctactgtcctggaattttgccaccatgggacttactgagacagagcaaactcagggcaatcttggagtggaagcaaaagtcccagggaagaccgcagtgcactgcctgaaggcagggagcaggcatctgccatcatacaaggagcaagagaacaacttgaaattacttggcaggcaatgatttttgactgattcttgaaaggaaatatgaacatttacatggctaaattaattcatttaaaatgtggaaattttgatttctatcaagcagttagggaacaataacaaatgcatccaagttggttgctgaattcttcagtattcgtttcctttatgtaacttgaaaaactaatattatcaatcactcagaaatgtttatgcttagtgtcctaaaatggtgtcactgtagtttttgaagctcccctctctcttttttcacttgtggaatgtattatctccatgaataacaatactgtgttttaattccagatcctgatattcacttagattttattcactgtcttagtgaagacagtcatcattttaagggcttttaattttttttttttttgcaggattctttaaaactaaaccaaaaaagatagagaaacagatagatggacagaaagaaagaaagagagaaagaaaggaagaaaggaagaaggaagaaagaggcaaaggaagaaaatctagaaggcaaaacattcattaagtctagtattagtcagaatttctatagtgttcatgttcttctgaggatactgatgcaaactccctggtgcctggctttctctttaccctccaccttagcttcgtttcattatctttcttctactattaaacttgatgttctttcatcaccttccaaaattatagttacttcctaattatttttaaacatagctattatttaacttaatcattatagaattgcacatttataatggagaagaaatcccttagtgttctaaattcttttatatgtgccacagcacaaaatgaaaatgagaatgtaaaagttaaagggactctgagcctcagatcttggttctaatattttgtagacgaagaaactgaagaccggtcattagatggcagctaatggttgtagaaacacagtggtgacacctacttctgcagcctcgcccacgtttacaaattgaaaagtcaatcagcatggatttaacactgcttcatgcacatattaacatcacatgccattcagtgctggtggtcagaccctacttgttgatgcatttctattaaaatagatggcttaggccaaggtcactagggaaaaaatgaaaatagacaaagcaaaaacctaaaagttgttatcgagataggcagaaaagccatgaagcactgatgagtttggaaatgtaattgaagaaatttagtgtgtggagggttttagtgctggctggaggtgtagagcagaggccgagaggacttgcctcgaaagtgaaaagatttgggttcaattttcagcactggtaagagaaggaagataggaaggaggtaagaagggaaggaaggaagtgaggaaggaagaaaggaggaaaggaaggataaaagaaagcattcttagtatgaataatgattatcgaagcctctggaccttccttgctcccttcctgaatgcattgttcctttcccttgtgtgttggaatggtgaaaggtgatttggtacacgaactggagactatgtttagtgtcatttatagtctctctcttgtttgttttgtctttgacatcattgtctcccctggtggcagatttcctgagccctgcccccaccactctactcagctctgtcctttcatgtatttgagccctgtccagactgttacacacggaacgtcttaacaaggttttaatttccccactgtgtataagaggcctcggctcaccagttcattagtgatcgttctcctgacactgggaagagggctctgttaatggcagacatgactttctttctcttccattttagtcagactgtctggttatcttgtagcttttggctagtgcataaagaatgtccgcttctgctttcatgctgaactcagcttcaacagcgacttgaacaaagactgtgaaatacatatcccataatgtgattgctcatgttacgcctgtgataattgagccattggtttgttttattcctgccatcctttgaaatatttttatttatttatttttatgtgttatgggagttttgattgaatgtgggtctgtgtaccatatgcatatccggtgcttgggtaggccaaaagagtctgatcccctgaaactagaattacaggtagttgtaagctgccatgtgggtgctggaaaccagaacttggtcctctggaagagcatcagccagtgcttctaactgctaagccatctctcttctgcttctgccatgtttttagactaagccatgtgccatgctgcttagaatgcagattatgctgaaattaggtaacgatctccactttaaaatttgatattgatagctgccaggattctcctgcagttagtcatagatgaacacaacatttgggagaatatgagctccagctcatcctcattttaataatgccagaaatgtatttttctccttgttggtttatgttacactacaagaaaatttcctcctggacccaacactttcattggaatatgcaattcttccccgggttttaggaatctgactgttcacacagcctgagtgtggtaggaaattcacctttctttccagcatcccacatataaattctccacagggaactcaacagattggggcagctgaggactggggtgagcgctggaactagctcttccctatagagacagttctagaccttacagagaaagacattgtgtgtttctatatcaacataaaatgcccaggcttatccatcattatgaaatagatgctaaatttagaaatggttcttgacatatgcaaactgaacacagaatttggaagaatagaatactctgacttttcttctctgtattcccaagagtaacaagagtaacaaggtggactctttatcctggtgatgggtgtatcttttccccaacctaagtcattggctgcaaggcacagtaacctcaatttctatacatccaccaagttttcattctgtggatgaacctactcatttgcttcacctgtaaagggaggcttgagtgtcaggctctaagaaagttaaccatactaagagatttatcaatatgtttggtttttcattggcagaacagtagtatctaggcaattttaaagatgtagcagtttcctgttctctttaccaagtgagagaatctgagtaaaatattagactccagttcatttctagaatggcttatatcaagctcttgtactctcctgaccctgaactggataggattgtttacacttgattgttgtttcaggttttaaaagggtctcaaaagaaaaaattggattcaggtctataaaaaaaaaaaaggattttgtattaattttcaaagcactaatactaattatacttttcttggggtagtgattctcttcttatacctaagaacatattacacatgtcaaaaccattgcattttgacattgcgaaacacaccttgaactcttgaactactgtgagcagaatcactgttgtaaagatttttttttttttttttttttttggtaagcttgctggtattcttaagtatgtaaaaagatgtcggcttccacaggctcaaatgaatgtacataaggactgtgaaaaaaaaataaattgggttttaaaataagaactgggcgataaattgtatctaaactgcgcagatgggcatcgtcgtgcggctgtgttttcattgttgaaggttgaacagagttctacagagtcgtggatgacattcagatgtttcatgacttttggatctgcgaacatatgcattttatagtcatgtatacttatattgttaagaaataatcatattttagaatttagtaagaactcagtgatagccttcataccaaaatgtttaactttgccaacagctagtcataaaaaagtatttattttaaagctttttaatacaattgcataacttcttgccgcctccaggtgtacattcttctctgcctaaatgttatatttttatgtatgcattttcagaaagcatattgttttggaaagtggcaaagacaatgaattaagcactcgttgcacttgtttctgtaaagcataaagagctctattttaaataaaagaaaacgtgtcataaaaaaaaa

SEQ ID NO: 12 - DNA, 8666 bp, Mus musculus
  source 1..8666: mol_type = genomic DNA
tttttttttatgacacgttttcttttatttaaaatagagctctttatgctttacagaaacaagtgcaacgagtgcttaattcattgtctttgccactttccaaaacaatatgctttctgaaaatgcatacataaaaatataacatttaggcagagaagaatgtacacctggaggcggcaagaagttatgcaattgtattaaaaagctttaaaataaatacttttttatgactagctgttggcaaagttaaacattttggtatgaaggctatcactgagttcttactaaattctaaaatatgattatttcttaacaatataagtatacatgactataaaatgcatatgttcgcagatccaaaagtcatgaaacatctgaatgtcatccacgactctgtagaactctgttcaaccttcaacaatgaaaacacagccgcacgacgatgcccatctgcgcagtttagatacaatttatcgcccagttcttattttaaaacccaatttatttttttttcacagtccttatgtacattcatttgagcctgtggaagccgacatctttttacatacttaagaataccagcaagcttaccaaaaaaaaaaaaaaaaaaaaaaatctttacaacagtgattctgctcacagtagttcaagagttcaaggtgtgtttcgcaatgtcaaaatgcaatggttttgacatgtgtaatatgttcttaggtataagaagagaatcactaccccaagaaaagtataattagtattagtgctttgaaaattaatacaaaatccttttttttttttatagacctgaatccaattttttcttttgagacccttttaaaacctgaaacaacaatcaagtgtaaacaatcctatccagttcagggtcaggagagtacaagagcttgatataagccattctagaaatgaactggagtctaatattttactcagattctctcacttggtaaagagaacaggaaactgctacatctttaaaattgcctagatactactgttctgccaatgaaaaaccaaacatattgataaatctcttagtatggttaactttcttagagcctgacactcaagcctccctttacaggtgaagcaaatgagtaggttcatccacagaatgaaaacttggtggatgtatagaaattgaggttactgtgccttgcagccaatgacttaggttggggaaaagatacacccatcaccaggataaagagtccaccttgttactcttgttactcttgggaatacagagaagaaaagtcagagtattctattcttccaaattctgtgttcagtttgcatatgtcaagaaccatttctaaatttagcatctatttcataatgatggataagcctgggcattttatgttgatatagaaacacacaatgtctttctctgtaaggtctagaactgtctctatagggaagagctagttccagcgctcaccccagtcctcagctgccccaatctgttgagttccctgtggagaatttatatgtgggatgctggaaagaaaggtgaatttcctaccacactcaggctgtgtgaacagtcagattcctaaaacccggggaagaattgcatattccaatgaaagtgttgggtccaggaggaaattttcttgtagtgtaacataaaccaacaaggagaaaaatacatttctggcattattaaaatgaggatgagctggagctcatattctcccaaatgttgtgttcatctatgactaactgcaggagaatcctggcagctatcaatatcaaattttaaagtggagatcgttacctaatttcagcataatctgcattctaagcagcatggcacatggcttagtctaaaaacatggcagaagcagaagagagatggcttagcagttagaagcactggctgatgctcttccagaggaccaagttctggtttccagcacccacatggcagcttacaactacctgtaattctagtttcaggggatcagactcttttggcctacccaagcaccggatatgcatatggtacacagacccacattcaatcaaaactcccataacacataaaaataaataaataaaaatatttcaaaggatggcaggaataaaacaaaccaatggctcaattatcacaggcgtaacatgagcaatcacattatgggatatgtatttcacagtctttgttcaagtcgctgttgaagctgagttcagcatgaaagcagaagcggacattctttatgcactagccaaaagctacaagataaccagacagtctgactaaaatggaagagaaagaaagtcatgtctgccattaacagagccctcttcccagtgtcaggagaacgatcactaatgaactggtgagccgaggcctcttatacacagtggggaaattaaaaccttgttaagacgttccgtgtgtaacagtctggacagggctcaaatacatgaaaggacagagctgagtagagtggtgggggcagggctcaggaaatctgccaccaggggagacaatgatgtcaaagacaaaacaaacaagagagagactataaatgacactaaacatagtctccagttcgtgtaccaaatcacctttcaccattccaacacacaagggaaaggaacaatgcattcaggaagggagcaaggaaggtccagaggcttcgataatcattattcatactaagaatgctttcttttatccttcctttcctcctttcttccttcctcacttccttccttcccttcttacctccttcctatcttccttctcttaccagtgctgaaaattgaacccaaatcttttcactttcgaggcaagtcctctcggcctctgctctacacctccagccagcactaaaaccctccacacactaaatttcttcaattacatttccaaactcatcagtgcttcatggcttttctgcctatctcgataacaacttttaggtttttgctttgtctattttcattttttccctagtgaccttggcctaagccatctattttaatagaaatgcatcaacaagtagggtctgaccaccagcactgaatggcatgtgatgttaatatgtgcatgaagcagtgttaaatccatgctgattgacttttcaatttgtaaacgtgggcgaggctgcagaagtaggtgtcaccactgtgtttctacaaccattagctgccatctaatgaccggtcttcagtttcttcgtctacaaaatattagaaccaagatctgaggctcagagtccctttaacttttacattctcattttcattttgtgctgtggcacatataaaagaatttagaacactaagggatttcttctccattataaatgtgcaattctataatgattaagttaaataatagctatgtttaaaaataattaggaagtaactataattttggaaggtgatgaaagaacatcaagtttaatagtagaagaaagataatgaaacgaagctaaggtggagggtaaagagaaagccaggcaccagggagtttgcatcagtatcctcagaagaacatgaacactatagaaattctgactaatactagacttaatgaatgttttgccttctagattttcttcctttgcctctttcttccttcttcctttcttcctttctttctctctttctttctttctgtccatctatctgtttctctatcttttttggtttagttttaaagaatcctgcaaaaaaaaaaaaaattaaaagcccttaaaatgatgactgtcttcactaagacagtgaataaaatctaagtgaatatcaggatctggaattaaaacacagtattgttattcatggagataatacattccacaagtgaaaaaagagagaggggagcttcaaaaactacagtgacaccattttaggacactaagcataaacatttctgagtgattgataatattagtttttcaagttacataaaggaaacgaatactgaagaattcagcaaccaacttggatgcatttgttattgttccctaactgcttgatagaaatcaaaatttccacattttaaatgaattaatttagccatgtaaatgttcatatttcctttcaagaatcagtcaaaaatcattgcctgccaagtaatttcaagttgttctcttgctccttgtatgatggcagatgcctgctccctgccttcaggcagtgcactgcggtcttccctgggacttttgcttccactccaagattgccctgagtttgctctgtctcagtaagtcccatggtggcaaaattccaggacagtagacatttcttttatttaatcattctgcaatagacgaagcactcaaaacaataagtgattgtggaacttctgatctaatgaatgtgttgtagttttttttttttcattttaaaataaacgccgatttgaaactcttcagacattgcgatcaggttactattttcatacaattatggaaatttaaaatgcaaagttaattgaaaagtataaagatgaaaagcaagtgctgcgcttaaaatagagcatgacagtcatgtttcacttaactctcatggcagaacataaattaagaattctagatgtgacatgccaaatattttagacgtggaaggatgcatacaacagagtcagtactgattacaaactcaaaacgcaggacttataaggcaacaaattcatgctcaaatgtagacaacaaataatgcgttctgtatttcaagaagtgatgctgtatataaaccccaccattttttgcatacagtactaaaaattcataatagcattcctaagctctatgttatacccagagccaaaatatccataaggagcaaagcaatggtgtcactttgcacctaacctaagaagatatttttgctcgtaacaaaatttacaaggaccaagtgttacataagattccatcaaaaacacataatacaaaattgaactgcatagatatatacagtaaatatgccttatgctctaaaaattactctattttttataagtgagcagtatctatgtagaactatgttgagagttaagcaaaaactacaacttctattgttccctgactacttctgtggctctgctctttaagattattcacttagggattacagttcagcaacagaataatgagcaaaagtctcaaaatgtaccaatgtgcagatttctccactgtgaaatctaaaccaagaaaatataagttatgtttgtatataccctgaaataaattataaaacataatgaccaaaataaagatgttacaacaccctcttttaaaatctagaaaatatacttccctaacagtggtgaatggaacaggatagagtaggtttttttcattggatatctggatacaatcattgaagtaaataattccattgccgtcatgtagaaactgtgaaataagataatagacataagccagctctcccttcgcacggttcttcttaacatccattcacgtaggcgcaccttttgatgctgatgatataattaggctgtaatatctaaataaagatcccttctaaatgtgttgcaaattggaagtgattttaagacctattctagaagccattgtcacatagaactcaaaggcatcccactgcatattttatctgtcaatttactcgcttccctcatactcacatgtctttccccactcccaaattagactttaaaatccccgagggcaggacctatctatcttgttattccctcttgtacccaatattgtggcaagtaagttatggggtgccctgtgcttataaatggatgaggacatgactgagaatggaagtacatgcaaactccacagctgtcagcttttgtttctcttatctccacttagtcaaatgagatggatcgagtagcatatctccatagtgatatgtagacatcaagttaccctcttatgggatacataacgtattcttcacaacatcatttaccatgttgggctttagaagatgctagatagtaaaacttcaccttactcataatagaaaggctacaatcaaatatttacccttaaaaatatccatggaatgtgtctttgctgctagaactatcaaagaatagaatatgttaacatatcacttttcaagaccttgttagagtgcacatccattctaacaacttctaggtagatgaaagttctaaggaatggggttcgggaaactgtttcagaacactgaaagacgttgagttaaaccatcttcactaaagcctataggacatttgaaagaaatatctggtgtcctgttaaatattctgaacttcaaaaatggagaatagaggtagatcctccaaacccttccatgcatggtccctgttaaaaggccaggaatgccttgtaatcactgatgtgatcttctgttaccagtaaggggttacactccttcgggagagttctctgaactctcctcaaattctttccgtgtttatctttctgtcattttctttccaaccatgaacctcaaaagcaatgacatcttatgacatacatctttagaaaatggatgtttataattggtcaatatttggcaatgttcagaaaacattttttttcattatcgaatgggataatgatgacatttctttgatgaaattctaatagattggttctgaaattctagaaaatctattatggtcttacaaaatactcaatgcattcactatgtgactaaatttaaaatattataactgatgattgatcttcccacttgggaagaaacgctctatgggaattcaagggagtataatggccagcaaacttcacagtgctagttgtcacagggttcgtaaccagctctggcaagagctctgtgactctgggccatttcacagtgtttgagacatatggacctctgttatgtatcaggaggagtaatggctcaggtggttttcgaactacttagggacagctgtcgtagtgatgcagagtggcaaataggcagagaaagcaagtcctgagaacgtggtgtcactttgttactccacctttccactctttagatgttaaaattctgagcaaaatttactttttaaggacccagttaatttttacagttccatttcaccataatatacagtagttcacattttaaatatgtcttcatctcatttgtggatgctcttggttcaagtacaacaaaaatttaatattttttttaccattgtatgtagcttatcttatactcataacatcttcctccttaaataaaaagaaaaaacgagtcgtgtcccctttaaacataaaactaaggacaacatggaaactgggaaagtcaagacctgcccatgcttaactttagcgttatctttacatgctgcctttgggacacttcaacactgtagtgagtcatccttgaggtagaactaaaataaaacacagcagaaaagaagcaaaaacatttacacaaagcgggagacgggaaggaaagctgtgagcactcttcctttgcctgtacgcagagctaagctttacagtcttccttgacacacagctgggagatggtcttcttcacgcgcagggctgtcaggcgtgctgccccgttggcgtaccagcactcacgcattattcttcccatgacccgcagcgcttcacagctttgccactggtttgggagatttggtcggagtttctgatcacagacaaccttcctcatttcttctatcgaaggatctgaaggcaccatgtcatagtaaggcaactggtactcctcaacaactcctccaactgaacaccttcgagctatttcccagtaaaccagccccaccgaatagatgtcagctcgcttgaaggactcaaagatgctcaggttcattgtatcatcaagcatttcgggagccatgtacctcttggttcccactttaggattctggggtatgtctatagtgttcatgatagaatcgtgcttcacagccagccctaagtcagctatggcacaagtgtcacattttttgactaggatattctttgactttatatctcggtgagcaatagcaggcttaccttgagtacccacgatctccatgtgcaggtgagccagaccactcgctatggaaagcgccagcttgaccattccagccacagtcactatgtttctgttcaaatagtcatacaaggagccctgctcgtgatactctgacacaagccagagttgtgtccaagttccattatctttgttgtcagctgcgatgaaaccgaggatgttctcgtgtctcagcatcaccgtctgataaatttccgcctcacggaaccaagatctctcatccctggaggagaatattttcacagccacatcttctccacaccatcttccgtgccacacttccccaaaccgaccttttcctacgatttcttgaagtacaattgtccttgcgattgttctttgaaccaagagaggcagacctgtgggaaggtgcagtgtgatattgttgcagaagtctgtgaagcaacattcggttttggtcacgttgttggaactgtgacagaagacctgagcatttagttccgggagggacacacacgatttgatcacctgctctttcccgttggttagcatgacggaggcccaacatgctccttccgtttggcaggtgaagtttgaagaatcacacaaaagacacacacacttcagtcctcagagcccagccaaggggaact

SEQ ID NO: 13 - DNA, 1899 bp, Rattus norvegicus
  source 1..1899: mol_type = genomic DNA
gggagcgcccgctgccactagagccaaccgcgcacttccgaagggtgtcgcggctgcgctcccctcccgcgccccgggaacttcaaagcggcccgcgctgcgggctgcgctctgggaccccgaagccttgcaccgccgcggggtggccatgaccccagcgcgccgctccgcactgagcctggccctcctgctggtggcactggcctccgaccttgcggcaggactgaagtgtgtgtgtcttttgtgtgattcctcaaactttacctgccaaaccgaaggagcatgctgggcctctgtcatgctaaccaacgggaaagaacaggtgatcaaatcgtgcgtgtccctcccggaactaaatgctcaggtcttctgtcacagttccaacaacgtgaccaagaccgaatgttgcttcacagacttctgcaacaacatcactctgcaccttcccacagcatctccagatgcccctagacttggccccacagagctgacggttgttatcactgtacctgtttgcctcctgtccatcgcagccatgctaacgatatgggcctgccaggaccgccagtgcacatacaggaagaccaagagacacaatgtggaggaaccactggcagagtacagccttgtcaatgctggaaaaaccctcaaagatctgatttatgatgccactgcctcgggctcaggatctggcctgcctcttttggttcaaagaaccatcgcaaggacaattgtacttcaagaaatcgtaggaaaaggtcggtttggggaagtgtggcacggaagatggtgtggagaagatgtggctgtgaaaatattctcctccagagatgagagatcttggttccgtgaggcagaaatttatcagacggtaatgctgagacatgagaatattctcggtttcatcgcggccgacaacaaagataatggaacctggactcagctttggcttgtgtcagagtatcacgagcagggctccttatatgactatttgaatagaaacatagtgaccgtggctggaatggtcaagttggcgctttcaatagcgagtggtctggctcacctacacatggagatcgtgggcactcaaggtaagcctgctattgctcaccgagatataaagtcaaagaatatcttagtcaaaaagtgtgacacttgtgccatagctgacttagggctggctgtgaaacatgattctatcatgaacactatagatataccccagaatcctaaagtgggaaccaagaggtatatggctcccgaaatgcttgatgatacaatgaacgtcaacatctttgagtccttcaagcgagctgacatctattcggtggggctggtttactgggaaatagctcgaaggtgttcagttggaggacttgttgaagagtaccagttgccttattatgacatggtgccttcagatccttccatagaggaaatgaggaaggtcgtttgtgatcagaaactccgaccaaatctcccaaaccagtggcaaagctgtgaggcgctccgggtcatgggaagaataatgcgtgagtgctggtatgccaacggggcagctcgcctgaccgccctgcgcgtgaagaagaccatttctcagctgtgtgtcaaggaagactgtaaggcctaaggccgcatacaggcgacgggaaagccctcaccactctctttcatgtctcctgctttgtgtaaatgttttcgtttcttttctgctgtgttttgttttagttctacctcaaagatgattcactacagtgttgaagtgtcccaaaggcagcatgaaaagataactctaagcatgggcaggtcttgactttcccagtttccatgttgtccgtacttttatttttaaaggtgacactattcatttttctttttatttaaggaggaagatgttat

SEQ ID NO: 14 - DNA, 1899 bp, Rattus norvegicus
  source 1..1899: mol_type = genomic DNA
ataacatcttcctccttaaataaaaagaaaaatgaatagtgtcacctttaaaaataaaagtacggacaacatggaaactgggaaagtcaagacctgcccatgcttagagttatcttttcatgctgcctttgggacacttcaacactgtagtgaatcatctttgaggtagaactaaaacaaaacacagcagaaaagaaacgaaaacatttacacaaagcaggagacatgaaagagagtggtgagggctttcccgtcgcctgtatgcggccttaggccttacagtcttccttgacacacagctgagaaatggtcttcttcacgcgcagggcggtcaggcgagctgccccgttggcataccagcactcacgcattattcttcccatgacccggagcgcctcacagctttgccactggtttgggagatttggtcggagtttctgatcacaaacgaccttcctcatttcctctatggaaggatctgaaggcaccatgtcataataaggcaactggtactcttcaacaagtcctccaactgaacaccttcgagctatttcccagtaaaccagccccaccgaatagatgtcagctcgcttgaaggactcaaagatgttgacgttcattgtatcatcaagcatttcgggagccatatacctcttggttcccactttaggattctggggtatatctatagtgttcatgatagaatcatgtttcacagccagccctaagtcagctatggcacaagtgtcacactttttgactaagatattctttgactttatatctcggtgagcaatagcaggcttaccttgagtgcccacgatctccatgtgtaggtgagccagaccactcgctattgaaagcgccaacttgaccattccagccacggtcactatgtttctattcaaatagtcatataaggagccctgctcgtgatactctgacacaagccaaagctgagtccaggttccattatctttgttgtcggccgcgatgaaaccgagaatattctcatgtctcagcattaccgtctgataaatttctgcctcacggaaccaagatctctcatctctggaggagaatattttcacagccacatcttctccacaccatcttccgtgccacacttccccaaaccgaccttttcctacgatttcttgaagtacaattgtccttgcgatggttctttgaaccaaaagaggcaggccagatcctgagcccgaggcagtggcatcataaatcagatctttgagggtttttccagcattgacaaggctgtactctgccagtggttcctccacattgtgtctcttggtcttcctgtatgtgcactggcggtcctggcaggcccatatcgttagcatggctgcgatggacaggaggcaaacaggtacagtgataacaaccgtcagctctgtggggccaagtctaggggcatctggagatgctgtgggaaggtgcagagtgatgttgttgcagaagtctgtgaagcaacattcggtcttggtcacgttgttggaactgtgacagaagacctgagcatttagttccgggagggacacgcacgatttgatcacctgttctttcccgttggttagcatgacagaggcccagcatgctccttcggtttggcaggtaaagtttgaggaatcacacaaaagacacacacacttcagtcctgccgcaaggtcggaggccagtgccaccagcaggagggccaggctcagtgcggagcggcgcgctggggtcatggccaccccgcggcggtgcaaggcttcggggtcccagagcgcagcccgcagcgcgggccgctttgaagttcccggggcgcgggaggggagcgcagccgcgacacccttcggaagtgcgcggttggctctagtggcagcgggcgctccc

SEQ ID NO: 15 - DNA, 3100 bp, Macaca fascicularis
  source 1..3100: mol_type = genomic DNA
gctgccccggctgcctcgctctgctctggggcctcgcagccccggcgcggccgcctggtggcgatgacccgggcgctccgctcagcgctccgccaggctctcctgctgctcgccgcggccgccgagctctcggcaggactgaagtgtgtatgtcttttgtgtgattcttcaaactttacctgccaaacagaaggagcatgttgggcatcagtcatgctaaccaatggaaaagaacaggtgatcaaatcctgtgtctcccttccagaactgaatgctcaagtgttctgtcatagttccaacaatgttaccaaaaccgaatgctgcttcacagatttttgcaacaacataacactgcaccttccaacagcatcaccaaatgccccaaaacttggacccatggagctggccatcattattactgtgcctgtttgcctcctgtccatagctgcgatgctgacaatatgggcatgccagggtcgacagtgctcctacaggaagaaaaagagaccgaatgtggaggaaccactctctgagtgcaatctggtaaatgctggaaaaaccctgaaagatctgatttatgatgtaactgcctctggatctggctctggtctacctctgttggttcaaaggacaattgcaaggacgattgtgcttcaggaaatagtaggaaaaggtagatttggtgaggtgtggcatggaagatggtgtggggaagatgtggctgtgaaaatattctcctccagagatgaaagatcttggtttcgtgaggcagaaatttaccagacggtcatgctgcgacatgaaaacatccttggtttcattgctgctgacaacaaagataatggaacctggactcaactttggctggtatctgaatatcatgaacagggctccttatatgactatttgaatagaaatatagtgacggtggctggaatgatcaagctggcgctctcaattgctagtggtctggcacaccttcatatggagattgttgggacacaaggtaaacctgctattgctcatcgagacataaaatcaaagaatatcttagtgaaaaaatgtgaaacttgtgccatagcggacttagggttggctgtgaagcatgattcaatactgaacactatcgacatacctcagaatcctaaagtgggaacgaagaggtatatggctcctgaaatgcttgatgatacaatgaatgtgagtatctttgagtccttcaaacgagcggacatctattctgttggtctggtttactgggaaatagcccggaggtgttcggtcggaggaattgttgaggagtaccaattgccttattatgacatggtgccttcagatccctcgatagaggaaatgagaaaggttgtttgtgaccagaagtttcgaccaagtatcccaaaccagtggcaaagttgtgaagcactccgagtcatggggagaataatgcgtgagtgttggtatgccaacggagcggcccgcctaactgctcttcgtattaagaagactatatctcaactttgtgtcaaagaagactgcaaagcctaatgatgataattatgttaaaaagaaatctctcacagctttcttttccattttcccctttatgtgaatgtttttgccattttttttgttctacctcaaagataagacagtacagtatttaagtgcccataaggccgcgtgaaaagataactctaaagttaagcatgggcaggagttgacttcatccaatctctctgttatgtttaattttattttgaaagcaacacctccactcatctttttatttaataagaaagaaatatattacaaaagtataaaataagctctataaaaatgatatagtcattaagtttttattttacttgaaccaagagcacatgagtgaacaggaaaagatgttaaaacttttttttttttctgagacgaaaacatattaattaaacatgcaaactagaccatgctatcttaaatagaaatttaggtcatgcaatctatgtttccccatttttaagttagcaggactttttaaaaataaatattgctctaaattttaatatatcaaacatgtgaaagtggagctgctcagcggaagatgtgagatcggtgtcccacgtgcttggtctccccttctgctgttctccttcataatccactactgcagcagtcgctgaaccactaaacttgttcctttcctttgcaaaagacatacctgatatcctgagacgctgagaaatgtcccaaagtcacacagctaatggcagaactggcactaggtccacatcttgtgataatgagcactgtagagtcaactagcttcctacttttccttgaatagtgcttttctccgtatgcaatcttttattatgatatttgtggtttagtcatgcagaaggcatattattttgcagaatcatgatggacctgcatgaaatctcagaaccatatctgttgacatttttttctcatagaaatatcatggttatcccattcgttaatgagtattaatgttttctgaacacttccaaagattaatcaaacataaatattcattgtctgaaaatatctttaagatacaattcagaggtccctatttcctttgtacatatacacttagaaagaaaagacagaagaggaagaggaaagaaggaaatattttgagaatatattgagaagaattaagaaaactcttcaatgaagtgtaacaaccaaaccctacagagggtatgagaaacagcaaatacatattcctctaccctttcacaatgagcgagtgagtacagaagaatgctcatgatagttccgccttcattctactttctgtggacacagagtaatgaatatttaatgggacgttaaatatgcccttcaaatctataatgctattttggtaaaggaaatttaacatgatgtcttttattctcctaaaacatcttttgtcaaactccattccatagaactttcttctgctgagatgatccaagaccaaagtgttctttgatattgcttagaaagtgatagtacatgttagcatataatgtattttgaagaatgaaataaatgctattgataacagtaaaaacaaaaaacaaaacaaaac

SEQ ID NO: 16 - DNA, 3100 bp, Macaca fascicularis
  source 1..3100: mol_type = genomic DNA
gttttgttttgttttttgtttttactgttatcaatagcatttatttcattcttcaaaatacattatatgctaacatgtactatcactttctaagcaatatcaaagaacactttggtcttggatcatctcagcagaagaaagttctatggaatggagtttgacaaaagatgttttaggagaataaaagacatcatgttaaatttcctttaccaaaatagcattatagatttgaagggcatatttaacgtcccattaaatattcattactctgtgtccacagaaagtagaatgaaggcggaactatcatgagcattcttctgtactcactcgctcattgtgaaagggtagaggaatatgtatttgctgtttctcataccctctgtagggtttggttgttacacttcattgaagagttttcttaattcttctcaatatattctcaaaatatttccttctttcctcttcctcttctgtcttttctttctaagtgtatatgtacaaaggaaatagggacctctgaattgtatcttaaagatattttcagacaatgaatatttatgtttgattaatctttggaagtgttcagaaaacattaatactcattaacgaatgggataaccatgatatttctatgagaaaaaaatgtcaacagatatggttctgagatttcatgcaggtccatcatgattctgcaaaataatatgccttctgcatgactaaaccacaaatatcataataaaagattgcatacggagaaaagcactattcaaggaaaagtaggaagctagttgactctacagtgctcattatcacaagatgtggacctagtgccagttctgccattagctgtgtgactttgggacatttctcagcgtctcaggatatcaggtatgtcttttgcaaaggaaaggaacaagtttagtggttcagcgactgctgcagtagtggattatgaaggagaacagcagaaggggagaccaagcacgtgggacaccgatctcacatcttccgctgagcagctccactttcacatgtttgatatattaaaatttagagcaatatttatttttaaaaagtcctgctaacttaaaaatggggaaacatagattgcatgacctaaatttctatttaagatagcatggtctagtttgcatgtttaattaatatgttttcgtctcagaaaaaaaaaaaagttttaacatcttttcctgttcactcatgtgctcttggttcaagtaaaataaaaacttaatgactatatcatttttatagagcttattttatacttttgtaatatatttctttcttattaaataaaaagatgagtggaggtgttgctttcaaaataaaattaaacataacagagagattggatgaagtcaactcctgcccatgcttaactttagagttatcttttcacgcggccttatgggcacttaaatactgtactgtcttatctttgaggtagaacaaaaaaaatggcaaaaacattcacataaaggggaaaatggaaaagaaagctgtgagagatttctttttaacataattatcatcattaggctttgcagtcttctttgacacaaagttgagatatagtcttcttaatacgaagagcagttaggcgggccgctccgttggcataccaacactcacgcattattctccccatgactcggagtgcttcacaactttgccactggtttgggatacttggtcgaaacttctggtcacaaacaacctttctcatttcctctatcgagggatctgaaggcaccatgtcataataaggcaattggtactcctcaacaattcctccgaccgaacacctccgggctatttcccagtaaaccagaccaacagaatagatgtccgctcgtttgaaggactcaaagatactcacattcattgtatcatcaagcatttcaggagccatatacctcttcgttcccactttaggattctgaggtatgtcgatagtgttcagtattgaatcatgcttcacagccaaccctaagtccgctatggcacaagtttcacattttttcactaagatattctttgattttatgtctcgatgagcaatagcaggtttaccttgtgtcccaacaatctccatatgaaggtgtgccagaccactagcaattgagagcgccagcttgatcattccagccaccgtcactatatttctattcaaatagtcatataaggagccctgttcatgatattcagataccagccaaagttgagtccaggttccattatctttgttgtcagcagcaatgaaaccaaggatgttttcatgtcgcagcatgaccgtctggtaaatttctgcctcacgaaaccaagatctttcatctctggaggagaatattttcacagccacatcttccccacaccatcttccatgccacacctcaccaaatctaccttttcctactatttcctgaagcacaatcgtccttgcaattgtcctttgaaccaacagaggtagaccagagccagatccagaggcagttacatcataaatcagatctttcagggtttttccagcatttaccagattgcactcagagagtggttcctccacattcggtctctttttcttcctgtaggagcactgtcgaccctggcatgcccatattgtcagcatcgcagctatggacaggaggcaaacaggcacagtaataatgatggccagctccatgggtccaagttttggggcatttggtgatgctgttggaaggtgcagtgttatgttgttgcaaaaatctgtgaagcagcattcggttttggtaacattgttggaactatgacagaacacttgagcattcagttctggaagggagacacaggatttgatcacctgttcttttccattggttagcatgactgatgcccaacatgctccttctgtttggcaggtaaagtttgaagaatcacacaaaagacatacacacttcagtcctgccgagagctcggcggccgcggcgagcagcaggagagcctggcggagcgctgagcggagcgcccgggtcatcgccaccaggcggccgcgccggggctgcgaggccccagagcagagcgaggcagccggggcagc

SEQ ID NO: 17 - DNA, 10445 bp, Macaca fascicularis
  source 1..10445: mol_type = genomic DNA
gtactttgcagttttctacaatttgtaattcaatacatctttattgaattttaccacactgccagaccctattctaaatgttggggaagtgatagtagataaaacaggagaaaggccctgccctcatgaaattttcattctagtggggctaatacaattttaaaaagcgaattatagattgtgatacgtagcaggaaggatggggagcagatccttgagcaagggtagtcactgaagatttctctgaggtggtgacatttgagctaagacctggagaatgagaagaaaggggagagcactacaggtaaagggaacaaaatgagtaaaggccatgaggtgggaaacttgttatatcacagctgcgaaaaggagacaagtgctccggaaggctgagttatgagagatgaggttggatgagtgggatgaacccagactattagcctatcaggtcatgataatgattgtggattttgctttattctaaatgtaattggaatccattaaacaccaatattctccaaagcagaagacagtagattaagaaaccccaactactggggaacagtttgatgaggaaccatttaggctgccagggtaagaaaataacctttcaaaccaagcaagaattgtatgtgaggagtggcagaggaaacgtgtcttgtgattgggaatactcttttctttgacccttcaaatagggtctgttttttcccctacatggctgcaaagtctaaactgggccagaggactccagataggctgtatcctccttaaggaaacaaagattaagccgtggaaacactgctatatacccaagagcagttatcaccaactgccacccctgctagcctgttgcgcactcatgccttgacttccaaaggcaggaaggagaaggctgccatcttcctatctaagaatcctgcgttttcatcccttcaaagggatgttttaagagaatccacacaaataattttgtcacgaaccattttggttatattgtatccctttatggttgattactaattgtcccacactggaggagcttagcagcaaaggttattaatggtatttctggaaaaagccttctttgaaaggtgaaactttcagttaatcaccaagctgataagcaaaaatgctaaatagaaattttcccgttaagttttaaaattgcagtaaaagctttgtgacattgtgccatcatatgtgtcctttccatatgtattcaaagttttgaggcaataagtaaataaataacatcattctagtcagttttaagctctaattgctgtcagccattgaaatatttttgggaaacgttttcatatctacttagtagaatgtagagtattcagattgctgaagtgtggtgctcttttgagttgcttttggtcttgcataccgtttctgtgatcctgtggatactaagattgagggactcagcaacagtctctagatgtctcacataactcagagaggctatgaacattttcaggcctccatcacattccccccatcgcccccagatttcatgctgatattggaaagaacattcaattctcgtgtagtacatatagtacaagataaacaatctttaacattaattggagaagttttgctgatttagaaaccagtagaattctctcaccctctgaaacagcagcgtgtgaatttgggggcacagaccaatcctgttcacatccctaaccccagctctctcttttcatctatcataggtaatccttaagtcacttatattgagaactgtgacacaagttcagagtagcagaggactagagaactggaggggtctttagaagtcttctagcctgcttcttgacctcctcattttacaggactgaagtgtgtatgtcttttgtgtgattcttcaaactttacctgccaaacagaaggagcatgttgggcatcagtcatgctaaccaatggaaaagaacaggtgatcaaatcctgtgtctcccttccagaattgaatgctcaagtcttctgtcatagttccaacaatgttaccaaaaccgaatgctgcttcacagatttttgcaacaacataacactgcaccttccaacagcatcaccaaatgccccaaaacttggacccatggagctggccatcattattactgtgcctgtttgcctcctgtccatagctgcgatgctgacaatatgggcatgccagggtcgacagtgctcctacaggaagaaaaagagaccgaatgtggaggaaccactctctgagtgcaatctggtaaatgctggaaaaaccctgaaagatctgatttatgatgtaactgcctctggatctggctctggtctacctctgttggttcaaaggacaattgcaaggacgattgtgcttcaggaaatagtaggaaaaggtagatttggtgaggtgtggcatggaagatggtgtggggaagatgtggctgtgaaaatattctcctccagagatgaaagatcttggtttcgtgaggcagaaatttaccagacggtcatgctgcgacatgaaaacatccttggtttcattgctgctgacaacaaagataatggaacctggactcaactttggctggtatctgaatatcatgaacagggctccttatatgactatttgaatagaaatatagtgacggtggctggaatgatcaagctggccctctcaattgctagtggtctggcacaccttcatatggagattgttgggacacaaggtaaacctgctattgctcatcgagacataaaatcaaagaatatcttagtgaaaaaatgtgaaacttgtgccatagcggacttagggttggctgtgaagcatgattcaatactgaacactatcgacatacctcagaatcctaaagtgggaacgaagaggtatatggctcctgaaatgcttgatgatacaatgaatgtgaatatctttgagtccttcaaacgagctgacatctattctgttggtctggtttactgggaaatagcccggaggtgttcggtcggaggaattgttgaggagtaccaattgccttattatgacatggtgccttcagatccctcgatagaggaaatgagaaaggttgtttgtgaccagaagtttcgaccaagtatcccaaaccagtggcaaagttgtgaagcactccgagtcatggggagaataatgcgtgagtgttggtatgccaacggagcggcccgcctaactgctcttcgtattaagaagactatatctcaactttgtgtcaaagaagactgcaaagcctaatgatgataattatgttaaaaagaaatctctcacagctttcttttccattttcccctttatgtgaatgtttttgccattttttttgttctacctcaaagataagacagtacagtatttaagtgcccataaggccgcgtgaaaagataactctaaagttaagcatgggcaggagttgacttcatccaatctctctgttatgtttaattttattttgaaagcaacacctccactcatctttttatttaataagaaagaaatatattacaaaagtataaaataagctctataaaaatgatatagtcattaagtttttattttacttgaaccaagagcacatgagtgaacaggaaaagatgttaaaacttttttttttttctgagacgaaaacatattaattaaacatgcaaactagaccatgctatcttaaatagaaatttaggtcatgcaatctatgtttccccatttttaagttagcaggactttttaaaaataaatattgctctaaattttaatatatcaaacatgtgaaagtggagctgctcagtggaagatgtgagatcggtgtcccacgtgcttggtctccccttctgctgttctccttcataatccactactgcagcagtcgctgaaccactaaacttgttcctttcctttgcaaaagacatacctgatatcctgagacgctgagaaatgtcccaaagtcacacagctaatggcagaactggcactaggtccacatcttgtgataatgagcactgtagagtcaactagcttcctacttttccttgaatagtgcttttctccgtatgcaatcttttattatgatatttgtggtttagtcatgcagaaggcatattattttgcagaatcatgatggacctgcatgaaatctcagaaccatatctgttgacatttttttctcatagaaatatcatggttatcccattcgttaatgagtattaatgttttctgaacacttccaaagattaatcaaacataaatattcattgtctgaaaatatctttaagatacaattcagaggtccctatttcctttgtacatatacacttagaaagaaaagacagaagaggaagaggaaagaaggaaatattttgagaatatattgagaagaattaagaaaactcttcaatgaagtgtaacaaccaaaccctacagagggtatgagaaacagcaaatacatattcctctaccctttcacaatgagcgagtgagtacagaagaatgctcatgatagttccgccttcattctactttctgtggacacagagtaatgaatatttaatgggacgttaaatatgcccttcaaatctataatgctattttggtaaaggaaatttaacatgatgtcttttattctcctaaaacatcttttgtcaaactccattccatagaactttcttctgctgagatgatccaagaccaaagtgttctttgatattgcttagaaagtgatagtacatgttagcatataatgtattttgaagaatgaaataaatgctattgataacagtaaaaacaaaaaacaaaacaaaacaaaaaaccaaaactaataccagtaaagaaatgctacttgaattttttttttaaactggattgctcagattacctgatcgtggtggaacccttttattaagaggaggagaaactttttactatcccatatttaactgttctataaagcaaagcacagcttgggtaatagtgttctgaaggatatacttctgtattttctcatagaatacagtttagtgattatgcttcatttcactatgaaaatatgttactgaatatatcttcattttactgagctgaaataaggaaggcaaaacactgacagctatggaatttgcgtgtacttccatacttgttaatgctctcatccacttattaaataatcatagagtacccatatcttgcttgccacaatatagggtacaagagggaatacaaagatagataggtcctgccctcagggattttaaagtctaatttgggaatgtgaatagggatgtgagtgtgtgggggaagaaaataaattgacagataaaatatgaagtgggatgtcttgagttctgcatgacagtgggtttctaggataggtctgaaaatcgctttcatttgcaacgcatttagaaagtagctttatttggatattacagacaatctaaatatatcatcagtttttaaaagtgcctatgtgaagtgattttttaaaaagagcctatgtaaaggggtaatcttgcttatgcttgttactaatttctcatagattgttgttctgcatatataagaatgaaattatttatttactatagttgtacgtgcctcaaataaacaagaatgatatttcctgttttatttacttatgttgggtaaatatgcttattgaatttttaagagaggattttttaacatctccattcttcttgtcattatgttttgtagcttatttgagggtgtctaaatataatttcatattttattggttcaactttcactctgaagaaatccgtatgttagtacattttgaggtatttttcttgttcttgtgttggttaactatgactcctagctgaatagtcttatatttcaattacaaaacacatttttaaagaaagggaatagagcagcaaaaatgatgaggaaaatgttaaaagttataatatttcctttactcttaacaggattatatatagaatatgctcacttacaaaaataggatgatgaagtatagagcataaggcaggcttcttgtatatacttatgctgtcaaatgttatattgtttttaatggagtccctttgtgtaatatttatttcatttaaattttgttataagcaaaaaaaaaaaaaaaaaaattcttcttaggttaggttcagagtatcagtgttctttactccttacagatattttggctttggggtataatacaagacttgggaaaacgctattatgaatttttagtactgtataaagtggtgatgggatttaaatgcagcatcactttctgaaaataagagaaacattatttgttgtcagtatttcagcatgaacttgttgccttgtaaattttgcctttaagtttgtaattggtacagattctgttgtatgctttcttctatgtctaaaatatttggcatgtcacatctagaattcttaatttatgttctgacttgagagttaagtgaaacatgactgtcgtgcactattttaggcatagcacttgcttttcatctttatactttcaattaactttgcattttaaatttccatgattgtatgaaaatagtaacctggttgcagtatctgaaaaaattaaaattagcttttatttaaaaatgaaaatctacaatagattcattaggttagaagttccacagtaatttattattttattacagctactattgtagaattattaataaaataaaacaaaactacttctattttcctggaattttgccaccatgtgactcattggggcagagaaaactcagggttatctttgagtctgcgcaaaagtaccaaggaacctgcttagcaaatcatctgaaaacagggagttgatgtttgccattatacaaagtttgagtaaacaacttaaaattgcttgttagggcatagtctttgattgaaataagtatgagagtgtatttggctaaataaatgtatttaaaatatagaaattttgtttcccactggaaaattaagaaaataacagtactaaatgaataaaagctggcagttgatgtcttcaataatcattcctttaaataaattcacaaacacattattacaagctacttaggaatgtttagtatgagtatcttaaaatggcaccattgcggttttcgaagatattttaagcatcttttgtgaaacataccatttctgtttgacaatgcttagttctagctctgcgtgctaatacctacatggagtttttctgctattttagtgaaaacagtaattgttttatcttgagagctgcttctaaataacaagtcaattggaatataagtttttaaaaaacattaatattaagtagaatttttataatatgggcatttttcaaaacattttaatgaaaatatatagatatttgactttcttttttccatctagccttgctttatatttcattatttttctcactttttttcttaatattccctcactatctttcaacattatcattagtttctaattaaaaaaataactattatttaacttaaccatctggaatttagccttctaatgaaagagaatcccttagtactctcagagattatataacttgattccagttttgtttcgatgatgagaccaaggatcagagattaaatgactactagttattagcagaactctcatgaaagccaggtggtgacacccagcactgttccttgccatatccccaacttttactgattaaaaattaatttgcatgcatctaaacctaccttgaatgcacactaacgtaatgtgccattcaatgatgatgataaaatcccacttcttgtgtttctactaaaataatttactcactcagggtggggtcagtgagaaaaactaaactaggcaaagagagagttgtagaatggttgtcaagctaagtaggcaaccactggggtgctgatcaaattaatggataaaatttagggacagagagagtatagaatttctcagtgccagtaataattagaaaagcttcctgacatcccccaccctttctgtaaggattgttctttctctttgtactttggaatgggggtgaaaggtgatttaatagctgaatttgggactatgtccagtggtgtattatctgacttttctctctttctctttttttttcccccgtcagtttctcattagtttgtctttggcattcatcttcttttagtgcattaaaaaatgtttggcagatctcatcaatcccaagtcagtctataattcctgtaattctttagttatcttttaatctgtccaaactgctacacaatgcacttcttaacaagattttaagttccccactgatgtgtaagaggtttcacctcgtaacttctccagtaatccttcatttggcactatagagtatttgttaatggcagagatgattttttttttccaaaacctaaaaagactagctgttaattgtattctaacttttagctaacatgtaaagaatgtctacttttgctttaatgctaaatcccacttgagaaatagtgactgggaaagacaatttgaaatatatgccccataatgtggttgctaaatttatttctgctgttccataccattgctttgttttgcttttgacatctcttaaaactaagccattatgctattagtttggaatataatactacagcaaaattaggtaacaatctctattttaaaattcccctaacaataatagaactgccagcatacttttctctttcagttgtagatgaatacatttgagagaagagctctatttcatcctagatttcaatattttcagatgtgactgtatttcctgatcattggtccaggttatcctaaaagaaatttttctctccagacctaacagttttaactgcaagagtttactgtgggttacattaatctgaattttaatagggccactgagaatctgagtgctttaggggattacccttatacccactgccatcacatccagtcgggcctgttgtgctctatacaaatcttcccagctgaggggcagatgggggctaaaatccaactgcaattggctcccagacataattttatattttacagaaaagcatcttattggcttatatatgtttaaagaatggtctggcttatacatcttcagaaaatgagaattaaaaagccaaaataattcttgacgtctgcaaattgaacatagaacttagaagaagtaatactttatcttttcatcctggcattcctgagagaaaagaaattgtatgtttatcgtgttggtttaatttttcaacccagacaatctgcagcaaggcacatggaccctaattttgacatcttacacacagttttcattctatgcatggagctaattactgactttgcctgtaaagagaggattgtgtgcctaaattttgtctaggaaatgcaagcatagaatgaaatttactaatatttctatttcttccataggctaaataatagcaactatttttgaagacccagccctttttttcctctttatacaaaataagagtatctgagccaaaatattaaattctagttcatttctgcaatgactagtgtcatgctcatgtactcttctaattctagactggagaagattattcaaacttgatctgtgtttcaggtttttaaatgtcctaaaaacagaaaattagattcagatctcaaaaaaggaattttggattgactttcaaagtactaatactaattatacttttcttttggtagcgtgactcttcttatacctaagaacatattacaaatgtcaaaaccattgcagtttgacattgcaaaacatgccttgaactcttgaactactgtgaaaagaatcaccgttgtaaagactttttgtaagctagctgatactcttaagtatgtaaaaagattgtctttcagccgacaggcccaaaggaatgtatataaggaaggaatatgaaaaaataaattaggttttaaaataagaattgggcaataaactgtatcgaaaatatgtagatggattttagtagttgtaatttaaatgtcgaaggtgaagagaatttcaaattccaaagagaagtgaatgatattcagatgtttcattaatttctagtctgtgaaaatatgcattttatagtaaatgtatagacttattttatttagaaataatagtgttttagaatttattaaaaactcagtgatagcctttataccaaaatgtttaactttaccaacagcaagtcataaaagtatttattttaaagctttttaatattatcgcgtaactttcatctgtcttcagatgtaaataattatctgcctaaatgttatatttttatgtatgcattttctgaaaatgtattgttttgtaaagtgggaaagataataaatcaagcacttgcacttgtttctgtgaagcatatagaactctattttaaataaaggaagatgtgtcgta

SEQ ID NO: 18 - DNA, 10445 bp, Macaca fascicularis
  source 1..10445: mol_type = genomic DNA
tacgacacatcttcctttatttaaaatagagttctatatgcttcacagaaacaagtgcaagtgcttgatttattatctttcccactttacaaaacaatacattttcagaaaatgcatacataaaaatataacatttaggcagataattatttacatctgaagacagatgaaagttacgcgataatattaaaaagctttaaaataaatacttttatgacttgctgttggtaaagttaaacattttggtataaaggctatcactgagtttttaataaattctaaaacactattatttctaaataaaataagtctatacatttactataaaatgcatattttcacagactagaaattaatgaaacatctgaatatcattcacttctctttggaatttgaaattctcttcaccttcgacatttaaattacaactactaaaatccatctacatattttcgatacagtttattgcccaattcttattttaaaacctaatttattttttcatattccttccttatatacattcctttgggcctgtcggctgaaagacaatctttttacatacttaagagtatcagctagcttacaaaaagtctttacaacggtgattcttttcacagtagttcaagagttcaaggcatgttttgcaatgtcaaactgcaatggttttgacatttgtaatatgttcttaggtataagaagagtcacgctaccaaaagaaaagtataattagtattagtactttgaaagtcaatccaaaattccttttttgagatctgaatctaattttctgtttttaggacatttaaaaacctgaaacacagatcaagtttgaataatcttctccagtctagaattagaagagtacatgagcatgacactagtcattgcagaaatgaactagaatttaatattttggctcagatactcttattttgtataaagaggaaaaaaagggctgggtcttcaaaaatagttgctattatttagcctatggaagaaatagaaatattagtaaatttcattctatgcttgcatttcctagacaaaatttaggcacacaatcctctctttacaggcaaagtcagtaattagctccatgcatagaatgaaaactgtgtgtaagatgtcaaaattagggtccatgtgccttgctgcagattgtctgggttgaaaaattaaaccaacacgataaacatacaatttcttttctctcaggaatgccaggatgaaaagataaagtattacttcttctaagttctatgttcaatttgcagacgtcaagaattattttggctttttaattctcattttctgaagatgtataagccagaccattctttaaacatatataagccaataagatgcttttctgtaaaatataaaattatgtctgggagccaattgcagttggattttagcccccatctgcccctcagctgggaagatttgtatagagcacaacaggcccgactggatgtgatggcagtgggtataagggtaatcccctaaagcactcagattctcagtggccctattaaaattcagattaatgtaacccacagtaaactcttgcagttaaaactgttaggtctggagagaaaaatttcttttaggataacctggaccaatgatcaggaaatacagtcacatctgaaaatattgaaatctaggatgaaatagagctcttctctcaaatgtattcatctacaactgaaagagaaaagtatgctggcagttctattattgttaggggaattttaaaatagagattgttacctaattttgctgtagtattatattccaaactaatagcataatggcttagttttaagagatgtcaaaagcaaaacaaagcaatggtatggaacagcagaaataaatttagcaaccacattatggggcatatatttcaaattgtctttcccagtcactatttctcaagtgggatttagcattaaagcaaaagtagacattctttacatgttagctaaaagttagaatacaattaacagctagtctttttaggttttggaaaaaaaaaatcatctctgccattaacaaatactctatagtgccaaatgaaggattactggagaagttacgaggtgaaacctcttacacatcagtggggaacttaaaatcttgttaagaagtgcattgtgtagcagtttggacagattaaaagataactaaagaattacaggaattatagactgacttgggattgatgagatctgccaaacattttttaatgcactaaaagaagatgaatgccaaagacaaactaatgagaaactgacgggggaaaaaaaaagagaaagagagaaaagtcagataatacaccactggacatagtcccaaattcagctattaaatcacctttcacccccattccaaagtacaaagagaaagaacaatccttacagaaagggtgggggatgtcaggaagcttttctaattattactggcactgagaaattctatactctctctgtccctaaattttatccattaatttgatcagcaccccagtggttgcctacttagcttgacaaccattctacaactctctctttgcctagtttagtttttctcactgaccccaccctgagtgagtaaattattttagtagaaacacaagaagtgggattttatcatcatcattgaatggcacattacgttagtgtgcattcaaggtaggtttagatgcatgcaaattaatttttaatcagtaaaagttggggatatggcaaggaacagtgctgggtgtcaccacctggctttcatgagagttctgctaataactagtagtcatttaatctctgatccttggtctcatcatcgaaacaaaactggaatcaagttatataatctctgagagtactaagggattctctttcattagaaggctaaattccagatggttaagttaaataatagttatttttttaattagaaactaatgataatgttgaaagatagtgagggaatattaagaaaaaaagtgagaaaaataatgaaatataaagcaaggctagatggaaaaaagaaagtcaaatatctatatattttcattaaaatgttttgaaaaatgcccatattataaaaattctacttaatattaatgttttttaaaaacttatattccaattgacttgttatttagaagcagctctcaagataaaacaattactgttttcactaaaatagcagaaaaactccatgtaggtattagcacgcagagctagaactaagcattgtcaaacagaaatggtatgtttcacaaaagatgcttaaaatatcttcgaaaaccgcaatggtgccattttaagatactcatactaaacattcctaagtagcttgtaataatgtgtttgtgaatttatttaaaggaatgattattgaagacatcaactgccagcttttattcatttagtactgttattttcttaattttccagtgggaaacaaaatttctatattttaaatacatttatttagccaaatacactctcatacttatttcaatcaaagactatgccctaacaagcaattttaagttgtttactcaaactttgtataatggcaaacatcaactccctgttttcagatgatttgctaagcaggttccttggtacttttgcgcagactcaaagataaccctgagttttctctgccccaatgagtcacatggtggcaaaattccaggaaaatagaagtagttttgttttattttattaataattctacaatagtagctgtaataaaataataaattactgtggaacttctaacctaatgaatctattgtagattttcatttttaaataaaagctaattttaattttttcagatactgcaaccaggttactattttcatacaatcatggaaatttaaaatgcaaagttaattgaaagtataaagatgaaaagcaagtgctatgcctaaaatagtgcacgacagtcatgtttcacttaactctcaagtcagaacataaattaagaattctagatgtgacatgccaaatattttagacatagaagaaagcatacaacagaatctgtaccaattacaaacttaaaggcaaaatttacaaggcaacaagttcatgctgaaatactgacaacaaataatgtttctcttattttcagaaagtgatgctgcatttaaatcccatcaccactttatacagtactaaaaattcataatagcgttttcccaagtcttgtattataccccaaagccaaaatatctgtaaggagtaaagaacactgatactctgaacctaacctaagaagaatttttttttttttttttttgcttataacaaaatttaaatgaaataaatattacacaaagggactccattaaaaacaatataacatttgacagcataagtatatacaagaagcctgccttatgctctatacttcatcatcctatttttgtaagtgagcatattctatatataatcctgttaagagtaaaggaaatattataacttttaacattttcctcatcatttttgctgctctattccctttctttaaaaatgtgttttgtaattgaaatataagactattcagctaggagtcatagttaaccaacacaagaacaagaaaaatacctcaaaatgtactaacatacggatttcttcagagtgaaagttgaaccaataaaatatgaaattatatttagacaccctcaaataagctacaaaacataatgacaagaagaatggagatgttaaaaaatcctctcttaaaaattcaataagcatatttacccaacataagtaaataaaacaggaaatatcattcttgtttatttgaggcacgtacaactatagtaaataaataatttcattcttatatatgcagaacaacaatctatgagaaattagtaacaagcataagcaagattacccctttacataggctctttttaaaaaatcacttcacataggcacttttaaaaactgatgatatatttagattgtctgtaatatccaaataaagctactttctaaatgcgttgcaaatgaaagcgattttcagacctatcctagaaacccactgtcatgcagaactcaagacatcccacttcatattttatctgtcaatttattttcttcccccacacactcacatccctattcacattcccaaattagactttaaaatccctgagggcaggacctatctatctttgtattccctcttgtaccctatattgtggcaagcaagatatgggtactctatgattatttaataagtggatgagagcattaacaagtatggaagtacacgcaaattccatagctgtcagtgttttgccttccttatttcagctcagtaaaatgaagatatattcagtaacatattttcatagtgaaatgaagcataatcactaaactgtattctatgagaaaatacagaagtatatccttcagaacactattacccaagctgtgctttgctttatagaacagttaaatatgggatagtaaaaagtttctcctcctcttaataaaagggttccaccacgatcaggtaatctgagcaatccagtttaaaaaaaaaattcaagtagcatttctttactggtattagttttggttttttgttttgttttgttttttgtttttactgttatcaatagcatttatttcattcttcaaaatacattatatgctaacatgtactatcactttctaagcaatatcaaagaacactttggtcttggatcatctcagcagaagaaagttctatggaatggagtttgacaaaagatgttttaggagaataaaagacatcatgttaaatttcctttaccaaaatagcattatagatttgaagggcatatttaacgtcccattaaatattcattactctgtgtccacagaaagtagaatgaaggcggaactatcatgagcattcttctgtactcactcgctcattgtgaaagggtagaggaatatgtatttgctgtttctcataccctctgtagggtttggttgttacacttcattgaagagttttcttaattcttctcaatatattctcaaaatatttccttctttcctcttcctcttctgtcttttctttctaagtgtatatgtacaaaggaaatagggacctctgaattgtatcttaaagatattttcagacaatgaatatttatgtttgattaatctttggaagtgttcagaaaacattaatactcattaacgaatgggataaccatgatatttctatgagaaaaaaatgtcaacagatatggttctgagatttcatgcaggtccatcatgattctgcaaaataatatgccttctgcatgactaaaccacaaatatcataataaaagattgcatacggagaaaagcactattcaaggaaaagtaggaagctagttgactctacagtgctcattatcacaagatgtggacctagtgccagttctgccattagctgtgtgactttgggacatttctcagcgtctcaggatatcaggtatgtcttttgcaaaggaaaggaacaagtttagtggttcagcgactgctgcagtagtggattatgaaggagaacagcagaaggggagaccaagcacgtgggacaccgatctcacatcttccactgagcagctccactttcacatgtttgatatattaaaatttagagcaatatttatttttaaaaagtcctgctaacttaaaaatggggaaacatagattgcatgacctaaatttctatttaagatagcatggtctagtttgcatgtttaattaatatgttttcgtctcagaaaaaaaaaaaagttttaacatcttttcctgttcactcatgtgctcttggttcaagtaaaataaaaacttaatgactatatcatttttatagagcttattttatacttttgtaatatatttctttcttattaaataaaaagatgagtggaggtgttgctttcaaaataaaattaaacataacagagagattggatgaagtcaactcctgcccatgcttaactttagagttatcttttcacgcggccttatgggcacttaaatactgtactgtcttatctttgaggtagaacaaaaaaaatggcaaaaacattcacataaaggggaaaatggaaaagaaagctgtgagagatttctttttaacataattatcatcattaggctttgcagtcttctttgacacaaagttgagatatagtcttcttaatacgaagagcagttaggcgggccgctccgttggcataccaacactcacgcattattctccccatgactcggagtgcttcacaactttgccactggtttgggatacttggtcgaaacttctggtcacaaacaacctttctcatttcctctatcgagggatctgaaggcaccatgtcataataaggcaattggtactcctcaacaattcctccgaccgaacacctccgggctatttcccagtaaaccagaccaacagaatagatgtcagctcgtttgaaggactcaaagatattcacattcattgtatcatcaagcatttcaggagccatatacctcttcgttcccactttaggattctgaggtatgtcgatagtgttcagtattgaatcatgcttcacagccaaccctaagtccgctatggcacaagtttcacattttttcactaagatattctttgattttatgtctcgatgagcaatagcaggtttaccttgtgtcccaacaatctccatatgaaggtgtgccagaccactagcaattgagagggccagcttgatcattccagccaccgtcactatatttctattcaaatagtcatataaggagccctgttcatgatattcagataccagccaaagttgagtccaggttccattatctttgttgtcagcagcaatgaaaccaaggatgttttcatgtcgcagcatgaccgtctggtaaatttctgcctcacgaaaccaagatctttcatctctggaggagaatattttcacagccacatcttccccacaccatcttccatgccacacctcaccaaatctaccttttcctactatttcctgaagcacaatcgtccttgcaattgtcctttgaaccaacagaggtagaccagagccagatccagaggcagttacatcataaatcagatctttcagggtttttccagcatttaccagattgcactcagagagtggttcctccacattcggtctctttttcttcctgtaggagcactgtcgaccctggcatgcccatattgtcagcatcgcagctatggacaggaggcaaacaggcacagtaataatgatggccagctccatgggtccaagttttggggcatttggtgatgctgttggaaggtgcagtgttatgttgttgcaaaaatctgtgaagcagcattcggttttggtaacattgttggaactatgacagaagacttgagcattcaattctggaagggagacacaggatttgatcacctgttcttttccattggttagcatgactgatgcccaacatgctccttctgtttggcaggtaaagtttgaagaatcacacaaaagacatacacacttcagtcctgtaaaatgaggaggtcaagaagcaggctagaagacttctaaagacccctccagttctctagtcctctgctactctgaacttgtgtcacagttctcaatataagtgacttaaggattacctatgatagatgaaaagagagagctggggttagggatgtgaacaggattggtctgtgcccccaaattcacacgctgctgtttcagagggtgagagaattctactggtttctaaatcagcaaaacttctccaattaatgttaaagattgtttatcttgtactatatgtactacacgagaattgaatgttctttccaatatcagcatgaaatctgggggcgatggggggaatgtgatggaggcctgaaaatgttcatagcctctctgagttatgtgagacatctagagactgttgctgagtccctcaatcttagtatccacaggatcacagaaacggtatgcaagaccaaaagcaactcaaaagagcaccacacttcagcaatctgaatactctacattctactaagtagatatgaaaacgtttcccaaaaatatttcaatggctgacagcaattagagcttaaaactgactagaatgatgttatttatttacttattgcctcaaaactttgaatacatatggaaaggacacatatgatggcacaatgtcacaaagcttttactgcaattttaaaacttaacgggaaaatttctatttagcatttttgcttatcagcttggtgattaactgaaagtttcacctttcaaagaaggctttttccagaaataccattaataacctttgctgctaagctcctccagtgtgggacaattagtaatcaaccataaagggatacaatataaccaaaatggttcgtgacaaaattatttgtgtggattctcttaaaacatccctttgaagggatgaaaacgcaggattcttagataggaagatggcagccttctccttcctgcctttggaagtcaaggcatgagtgcgcaacaggctagcaggggtggcagttggtgataactgctcttgggtatatagcagtgtttccacggcttaatctttgtttccttaaggaggatacagcctatctggagtcctctggcccagtttagactttgcagccatgtaggggaaaaaacagaccctatttgaagggtcaaagaaaagagtattcccaatcacaagacacgtttcctctgccactcctcacatacaattcttgcttggtttgaaaggttattttcttaccctggcagcctaaatggttcctcatcaaactgttccccagtagttggggtttcttaatctactgtcttctgctttggagaatattggtgtttaatggattccaattacatttagaataaagcaaaatccacaatcattatcatgacctgataggctaatagtctgggttcatcccactcatccaacctcatctctcataactcagccttccggagcacttgtctccttttcgcagctgtgatataacaagtttcccacctcatggcctttactcattttgttccctttacctgtagtgctctcccctttcttctcattctccaggtcttagctcaaatgtcaccacctcagagaaatcttcagtgactacccttgctcaaggatctgctccccatccttcctgctacgtatcacaatctataattcgctttttaaaattgtattagccccactagaatgaaaatttcatgagggcagggcctttctcctgttttatctactatcacttccccaacatttagaatagggtctggcagtgtggtaaaattcaataaagatgtattgaattacaaattgtagaaaactgcaaagtac

SEQ ID NO: 19 - DNA, 8831 bp, Macaca fascicularis
  source 1..8831: mol_type = genomic DNA
tggggccgaattcactgcaccaaggtccagcggacagctagggcgtcccggcgaccccagggtgcccgttcgcaaattcatcagacgaaggggaggcggaagccgctgaccgctgctctggggtaatccttaagtcacttatattgagaactgtgacacaagttcagagtagcagaggactagagaactggaggggtctttagaagtcttctagcctgcttcttgacctcctcattttacaggactgaagtgtgtatgtcttttgtgtgattcttcaaactttacctgccaaacagaaggagcatgttgggcatcagtcatgctaaccaatggaaaagaacaggtgatcaaatcctgtgtctcccttccagaactgaatgctcaagtgttctgtcatagttccaacaatgttaccaaaaccgaatgctgcttcacagatttttgcaacaacataacactgcaccttccaacagcatcaccaaatgccccaaaacttggacccatggagctggccatcattattactgtgcctgtttgcctcctgtccatagctgcgatgctgacaatatgggcatgccagggtcgacagtgctcctacaggaagaaaaagagaccgaatgtggaggaaccactctctgagtgcaatctggtaaatgctggaaaaaccctgaaagatctgatttatgatgtaactgcctctggatctggctctggtctacctctgttggttcaaaggacaattgcaaggacgattgtgcttcaggaaatagtaggaaaaggtagatttggtgaggtgtggcatggaagatggtgtggggaagatgtggctgtgaaaatattctcctccagagatgaaagatcttggtttcgtgaggcagaaatttaccagacggtcatgctgcgacatgaaaacatccttggtttcattgctgctgacaacaaagataatggaacctggactcagctttggctggtatctgaatatcatgaacagggctccttatatgactatttgaatagaaatatagtgacggtggctggaatgatcaagctggcgctctcaattgctagtggtctggcacaccttcatatggagattgttgggacacaaggtaaacctgctattgctcatcgagacataaaatcaaagaatatcttagtgaaaaaatgtgaaacttgtgccatagcggacttagggttggctgtgaagcatgattcaatactgaacactatcgacatacctcagaatcctaaagtgggaacgaagaggtatatggctcctgaaatgcttgatgatacaatgaatgtgaatatctttgagtccttcaaacgagctgacatctattctgttggtctggtttactgggaaatagcccggaggtgttcggtcggaggaattgttgaggagtaccaattgccttattatgacatggtgccttcagatccctcgatagaggaaatgagaaaggttgtttgtgaccagaagtttcgaccaagtatcccaaaccagtggcaaagttgtgaagcactccgagtcatggggagaataatgcgtgagtgttggtatgccaacggagcggcccgcctaactgctcttcgtattaagaagactatatctcaactttgtgtcaaagaagactgcaaagcctaatgatgataattatgttaaaaagaaatctctcacagctttcttttccattttcccctttatgtgaatgtttttgccattttttttgttctacctcaaagataagacagtacagtatttaagtgcccataaggccgcgtgaaaagataactctaaagttaagcatgggcaggagttgacttcatccaatctctctgttatgtttaattttattttgaaagcaacacctccactcatctttttatttaataagaaagaaatatattacaaaagtataaaataagctctataaaaatgatatagtcattaagtttttattttacttgaaccaagagcacatgagtgaacaggaaaagatgttgaaacttttttttttttctgagacgaaaacatattaattaaacatgcaaactagaccatgctatcttaaatagaaatttaggtcatgcaatctatgtttccccatttttaagttagcaggactttttaaaaataaatattgctctaaattttaatatatcaaacatgtgaaagtggagctgctcagtggaagatgtgagatcggtgtcccacgtgcttggtctccccttctgctgttctccttcataatccactactgcagcagtcgctgaaccactaaacttgttcctttcctttgcaaaagacatacctgatatcctgagacgctgagaaatgtcccaaagtcacacagctaatggcagaactggcactaggtccacatcttgtgataatgagcactgtagagtcaactagcttcctacttttccttgaatagtgcttttctccgtatgcaatcttttattatgatatttgtggtttagtcatgcagaaggcatattattttgcagaatcatgatggacctgcatgaaatctcagaaccatatctgttgacatttttttctcatagaaatatcatggttatcccattcgttaatgagtattaatgttttctgaacacttccaaagattaatcaaacttaaacattcattgtctgaaaatatctttaagatacaattcagaggtccctatttcctttgtacatatacacttagaaagaaaagacagaagaggaagaggaaagaaggaaatattttgagaatatattgagaagaattaagaaaactcttcaatgaagtgtaacaaccaaaccctacagaggtatgagaaacagcaaatacatattcctctaccctttcacaatgagcgagtgagtacagaagaatgctcatgatagttccgccttcattctactttctgtggacacagagtaatgaatatttaatgggacgttaaatatgcccttcaaatctataatgctattttggtaaaggaaatttaacatgatgtcttttattctcctaaaacatcttttgtcaaactccattccatagatctttcttctgctgagatgatccaagaccaaagtgttctttgatattgcttagaaagtgatagtacatgttagcatataatgtattttgaagagtgaaataaatgctattgataacagtaaaaacaaaaaacaaacaaacaaaaaaccccaaaactaataacagtaaagaaatgctacttgaattttttttttaaactggattgctcagattacctgatcgtggtggaacccttttattaagaggaggagaaactttttactatcccatatttaactgttctataaagcaaagcacagcttgggtaatagtgttctgaaggatatacttctgtattttctcatagaatacagtttagtgattatgcttcatttcactatgaaaatatgttactgaatatatcttcattttactgagctgaaataaggaaggcaaaacactgacagctatggaatttgcgtgtacttccatacttgttaatgctctcatccacttattaaataatcatagagtacccatatcttgcttgccacaatatcgggtacaagagggaatacaaagatagataggtcctgccctcagggattttaaagtctaatttgggaatgtgaatagggatgtgagtgtgtgggggaagaaaataaattgacagataaaatatgaagtgggatgtcttgagttctgcatgacagtgggtttctaggataggtctgaaaatcgctttcatttgcaacgcatttagaaagtagctttatttggatattacagacaatctaaatatatcatcagtttttaaaagtgcctatgtgaagtgattttttaaaaagagcctatgtaaaggggtaatcttgcttatgcttgttactaatttctcatagattgttgttctgcatatataagaatgaaattatttatttactatagttgtacgtgcctcaaataaacaagaatgatatttcctgttttatttacttatgttgggtaaatatgcttattgaatttttaagagaggattttttaacatctccattcttcttgtcattatgttttgtagcttatttgagggtgtctaaatataatttcatattttattggttcaactttcactctgaagaaatccgtatgttagtacattttgaggtatttttcttgttcttgtgttggttaactatgactcctagctgaatagtcttatatttcaattacaaaacacatttttaaagaaagggaatagagcagcaaaaatgatgaggaaaatgttaaaagttataatatttcctttactcttaacaggattatatatagaatatgctcacttacaaaaataggatgatgaagtatagagcataaggcaggcttcttgtatatacttatgctgtcaaatgttatattgtttttaatggagtccctttgtgtaatatttatttcatttaaattttgttataagcaaaaaaaaaaaaaaaaattcttcttaggttaggttcagagtatcagtgttctttactccttacagatattttggctttggggtataatacaagacttgggaaaacgctattatgaatttttagtactgtataaagtggtgatgggatttaaatgcagcatcactttctgaaaataagagaaacattatttgttgtcagtatttcagcatgaacttgttgccttgtaaattttgcctttaagtttgtaattggtacagattctgttgtatgctttcttctatgtctaaaatatttggcatgtcacatctagaattcttaatttatgttctgacttgagagttaagtgaaacatgactgtcgtgcactattttaggcatagcacttgcttttcatctttatactttcaattaactttgcattttaaatttccatgattgtatgaaaatagtaacctggttgcagtatctgaaaaaattaaaattagcttttatttaaaaatgaaaatctacaatagattcattaggttagaagttccacagtaatttattattttattacagctactattgtagaattattaataaaataaaacaaaactacttctattttcctggaattttgccaccatgtgactcattggggcagagaaaactcagggttatctttgagtctgcgcaaaagtaccaaggaacctgcttagcaaatcatctgaaaacagggagttgatgtttgccattatacaaagtttgagtaaacaacttaaaattgcttgttagggcatagtctttgattgaaataagtatgagagtgtatttggctaaataaatgtatttaaaatatagaaattttgtttcccactggaaaattaagaaaataacagtactaaatgaataaaagctggcagttgatgtcttcaataatcattcctttaaataaattcacaaacacattattacaagctacttaggaatgtttagtatgagtatcttaaaatggcaccattgtggttttcgaagatattttaagcatcttttgtgaaacataccatttctgtttgacaatgcttagttctagctctgcgtgctaatacctacatggagtttttctgctattttagtgaaaacagtaattgttttatcttgagagctgcttctaaataacaagtcaattggaatataagtttttaaaaaacgttaatattaagtagaatttttataatatgggcatttttcaaaacattttaatgaaaatatatagatatttgactttcttttttccatctagccttgctttatatttcattatttttctcactttttttcttaatattccctcactatctttcaacattatcattagtttctaatttaaaaaataactattatttaacttaaccatctggaatttagccttctaatgaaagagaatcccttagtactctcagagattatataacttgattccagttttgtttcgatgatgagaccaaggatcagagattaaatgactactagttattagcagaactctcatgaaagccaggtggtgacacccagcactgttccttgccatatccccaacttttactgattaaaaattaatttgcatgcatctaaacctaccttgaatgcacactaacgtaatgtgccattcaatgatgatgataaaatcccacttcttgtgtttctactaaaataatttactcactcagggtggggtcagtgagaaaaactaaactaggcaaagagagagttgtagaatggttgtcaagctaagtaggcaaccactggggtgctgataaaattaatggataaaatttagggacagagagagtatagaatttcttagtgccagtaataattagaaaagcttcctgacatcccccaccctttctgtaaggattgttctttctctttgtactttggaatgggggtgaaaggtgatttaatagctgaatttgggactatgtccagtggcatattatctgacttttctctctttctctttttttttcccccgtcagtttctcattagtttgtctttggcattcatcttcttttagtgcattaaaaaatgtttggcagatctcatcaatcccaagtcagtctataattcctataattctttagttatcttttaatctgtccaaactgctacacaatgaacttcttaacaagattttaagttccccactgatgtgtaagaggtttcacctcgtaacttctccagtaatccttcatttggcactatagagtatttgttaatggcagagatgattttttttttccaaaacctaaaaagactagctgttaattgtattctaacttttagctaacatgtaaagaatgtctacttttgctttaatgctaaatctcacttgagaaatagtgactgggaaagacaatttgaaatatatgccccataatgtggttgctaaatttatttctgctgttccataccattgctttgttttgcttttgacatctcttaaaactaagccattatgctattagtttggaatataatactacagcaaaattaggtaacaatctctattttaaaattcccctaacaataatagaactgccagcatacttttctctttcagttgtagatgaatacatttgagagaagagctctatttcatcctagatttcaatattttcagatgtgactgtatttcctgatcattggtccaggttatcctaaaagaaatttttctctccagacctaacagttttaactgcaagagtttactgtgggttacattaatctgaattttaatagggccactgagaatctgagtgctttaggggattacccttatacccactgccatcacatccagtcgggcctgttgtgctctatacaaatcttcccagctgaggggcagatgggggctaaaatccaactgcaattggctcccagacataattttatattttacagaaaagcatcttattggcttatatatgtttaaagaatggtctggcttatacatcttcagaaaatgagaattaaaaagccaaaataattcttgacgtctgcaaattgaacatagaacttagaagaagtaatactttatcttttcatcctggcattcctgagagaaaagaaattgtatgtttatcgtgttggtttaatttttcaacccagacaatctgcagcaaggcacatggaccctaattttgacatcttacacacagttttcattctatgcatggagctaattactgactttgcctgtaaagagaggattgtgtgcctaaattttgtctaggaaatgcaagcatagaatgaaatttactaatatttctatttcttccataggctaagtaatagcaactatttttgaagacccagccctttttttcctctttatacaaaataagagtatctgagccaaaatattaaattctagttcatttctgcaatgactagtgtcatgctcatgtactcttctaattctagactggagaagattattcaaacttgatctgtgtttcaggtttttaaatgtcctaaaaacagaaaattagattcagatctcaaaaaaggaattttggattgactttcaaagtactaatactaattatacttttcttttggtagcgtgactcttcttatacctaagaacatattacaaatgtcaaaaccattgcagtttgacattgcaaaacatgccttgaactcttgaactactgtgaaaagaatcaccgttgtaaagactttttgtaagctagctgatactcttaagtatgtaaaaagattgtctttcagccgacaggcccaaaggaatgtatataaggaaggaatatgaaaaaataaattaggttttaaaataagaattgggcaataaactgtatcgaaaatatgtagatggattttagtagttgtaatttaaatgtcgaaggtgaagagaatttcaaattccaaagagaagtgaatgatattcagatgtttcattaatttctagtctgtgaaaatatgcattttatagtaaatgtatagacttattttatttagaaataatagtgttttagaatttattaaaaactcagtgatagcctttataccaaaatgtttaactttaccaacagcaagtcataaaagtatttattttaaagctttttaatattatcgcgtaactttcatctgtcttcagatgtaaataattatctgcctaaatgttatatttttatgtatgcattttctgaaaatgtattgttttgtaaagtgggaaagataataaatcaagcacttgcacttgtttctgtgaagcatatagaactctattttaaataaaggaagatgtgtcgta

SEQ ID NO: 20 - DNA, 8831 bp, Macaca fascicularis
  source 1..8831: mol_type = genomic DNA
tacgacacatcttcctttatttaaaatagagttctatatgcttcacagaaacaagtgcaagtgcttgatttattatctttcccactttacaaaacaatacattttcagaaaatgcatacataaaaatataacatttaggcagataattatttacatctgaagacagatgaaagttacgcgataatattaaaaagctttaaaataaatacttttatgacttgctgttggtaaagttaaacattttggtataaaggctatcactgagtttttaataaattctaaaacactattatttctaaataaaataagtctatacatttactataaaatgcatattttcacagactagaaattaatgaaacatctgaatatcattcacttctctttggaatttgaaattctcttcaccttcgacatttaaattacaactactaaaatccatctacatattttcgatacagtttattgcccaattcttattttaaaacctaatttattttttcatattccttccttatatacattcctttgggcctgtcggctgaaagacaatctttttacatacttaagagtatcagctagcttacaaaaagtctttacaacggtgattcttttcacagtagttcaagagttcaaggcatgttttgcaatgtcaaactgcaatggttttgacatttgtaatatgttcttaggtataagaagagtcacgctaccaaaagaaaagtataattagtattagtactttgaaagtcaatccaaaattccttttttgagatctgaatctaattttctgtttttaggacatttaaaaacctgaaacacagatcaagtttgaataatcttctccagtctagaattagaagagtacatgagcatgacactagtcattgcagaaatgaactagaatttaatattttggctcagatactcttattttgtataaagaggaaaaaaagggctgggtcttcaaaaatagttgctattacttagcctatggaagaaatagaaatattagtaaatttcattctatgcttgcatttcctagacaaaatttaggcacacaatcctctctttacaggcaaagtcagtaattagctccatgcatagaatgaaaactgtgtgtaagatgtcaaaattagggtccatgtgccttgctgcagattgtctgggttgaaaaattaaaccaacacgataaacatacaatttcttttctctcaggaatgccaggatgaaaagataaagtattacttcttctaagttctatgttcaatttgcagacgtcaagaattattttggctttttaattctcattttctgaagatgtataagccagaccattctttaaacatatataagccaataagatgcttttctgtaaaatataaaattatgtctgggagccaattgcagttggattttagcccccatctgcccctcagctgggaagatttgtatagagcacaacaggcccgactggatgtgatggcagtgggtataagggtaatcccctaaagcactcagattctcagtggccctattaaaattcagattaatgtaacccacagtaaactcttgcagttaaaactgttaggtctggagagaaaaatttcttttaggataacctggaccaatgatcaggaaatacagtcacatctgaaaatattgaaatctaggatgaaatagagctcttctctcaaatgtattcatctacaactgaaagagaaaagtatgctggcagttctattattgttaggggaattttaaaatagagattgttacctaattttgctgtagtattatattccaaactaatagcataatggcttagttttaagagatgtcaaaagcaaaacaaagcaatggtatggaacagcagaaataaatttagcaaccacattatggggcatatatttcaaattgtctttcccagtcactatttctcaagtgagatttagcattaaagcaaaagtagacattctttacatgttagctaaaagttagaatacaattaacagctagtctttttaggttttggaaaaaaaaaatcatctctgccattaacaaatactctatagtgccaaatgaaggattactggagaagttacgaggtgaaacctcttacacatcagtggggaacttaaaatcttgttaagaagttcattgtgtagcagtttggacagattaaaagataactaaagaattataggaattatagactgacttgggattgatgagatctgccaaacattttttaatgcactaaaagaagatgaatgccaaagacaaactaatgagaaactgacgggggaaaaaaaaagagaaagagagaaaagtcagataatatgccactggacatagtcccaaattcagctattaaatcacctttcacccccattccaaagtacaaagagaaagaacaatccttacagaaagggtgggggatgtcaggaagcttttctaattattactggcactaagaaattctatactctctctgtccctaaattttatccattaattttatcagcaccccagtggttgcctacttagcttgacaaccattctacaactctctctttgcctagtttagtttttctcactgaccccaccctgagtgagtaaattattttagtagaaacacaagaagtgggattttatcatcatcattgaatggcacattacgttagtgtgcattcaaggtaggtttagatgcatgcaaattaatttttaatcagtaaaagttggggatatggcaaggaacagtgctgggtgtcaccacctggctttcatgagagttctgctaataactagtagtcatttaatctctgatccttggtctcatcatcgaaacaaaactggaatcaagttatataatctctgagagtactaagggattctctttcattagaaggctaaattccagatggttaagttaaataatagttattttttaaattagaaactaatgataatgttgaaagatagtgagggaatattaagaaaaaaagtgagaaaaataatgaaatataaagcaaggctagatggaaaaaagaaagtcaaatatctatatattttcattaaaatgttttgaaaaatgcccatattataaaaattctacttaatattaacgttttttaaaaacttatattccaattgacttgttatttagaagcagctctcaagataaaacaattactgttttcactaaaatagcagaaaaactccatgtaggtattagcacgcagagctagaactaagcattgtcaaacagaaatggtatgtttcacaaaagatgcttaaaatatcttcgaaaaccacaatggtgccattttaagatactcatactaaacattcctaagtagcttgtaataatgtgtttgtgaatttatttaaaggaatgattattgaagacatcaactgccagcttttattcatttagtactgttattttcttaattttccagtgggaaacaaaatttctatattttaaatacatttatttagccaaatacactctcatacttatttcaatcaaagactatgccctaacaagcaattttaagttgtttactcaaactttgtataatggcaaacatcaactccctgttttcagatgatttgctaagcaggttccttggtacttttgcgcagactcaaagataaccctgagttttctctgccccaatgagtcacatggtggcaaaattccaggaaaatagaagtagttttgttttattttattaataattctacaatagtagctgtaataaaataataaattactgtggaacttctaacctaatgaatctattgtagattttcatttttaaataaaagctaattttaattttttcagatactgcaaccaggttactattttcatacaatcatggaaatttaaaatgcaaagttaattgaaagtataaagatgaaaagcaagtgctatgcctaaaatagtgcacgacagtcatgtttcacttaactctcaagtcagaacataaattaagaattctagatgtgacatgccaaatattttagacatagaagaaagcatacaacagaatctgtaccaattacaaacttaaaggcaaaatttacaaggcaacaagttcatgctgaaatactgacaacaaataatgtttctcttattttcagaaagtgatgctgcatttaaatcccatcaccactttatacagtactaaaaattcataatagcgttttcccaagtcttgtattataccccaaagccaaaatatctgtaaggagtaaagaacactgatactctgaacctaacctaagaagaatttttttttttttttttgcttataacaaaatttaaatgaaataaatattacacaaagggactccattaaaaacaatataacatttgacagcataagtatatacaagaagcctgccttatgctctatacttcatcatcctatttttgtaagtgagcatattctatatataatcctgttaagagtaaaggaaatattataacttttaacattttcctcatcatttttgctgctctattccctttctttaaaaatgtgttttgtaattgaaatataagactattcagctaggagtcatagttaaccaacacaagaacaagaaaaatacctcaaaatgtactaacatacggatttcttcagagtgaaagttgaaccaataaaatatgaaattatatttagacaccctcaaataagctacaaaacataatgacaagaagaatggagatgttaaaaaatcctctcttaaaaattcaataagcatatttacccaacataagtaaataaaacaggaaatatcattcttgtttatttgaggcacgtacaactatagtaaataaataatttcattcttatatatgcagaacaacaatctatgagaaattagtaacaagcataagcaagattacccctttacataggctctttttaaaaaatcacttcacataggcacttttaaaaactgatgatatatttagattgtctgtaatatccaaataaagctactttctaaatgcgttgcaaatgaaagcgattttcagacctatcctagaaacccactgtcatgcagaactcaagacatcccacttcatattttatctgtcaatttattttcttcccccacacactcacatccctattcacattcccaaattagactttaaaatccctgagggcaggacctatctatctttgtattccctcttgtacccgatattgtggcaagcaagatatgggtactctatgattatttaataagtggatgagagcattaacaagtatggaagtacacgcaaattccatagctgtcagtgttttgccttccttatttcagctcagtaaaatgaagatatattcagtaacatattttcatagtgaaatgaagcataatcactaaactgtattctatgagaaaatacagaagtatatccttcagaacactattacccaagctgtgctttgctttatagaacagttaaatatgggatagtaaaaagtttctcctcctcttaataaaagggttccaccacgatcaggtaatctgagcaatccagtttaaaaaaaaaattcaagtagcatttctttactgttattagttttggggttttttgtttgtttgttttttgtttttactgttatcaatagcatttatttcactcttcaaaatacattatatgctaacatgtactatcactttctaagcaatatcaaagaacactttggtcttggatcatctcagcagaagaaagatctatggaatggagtttgacaaaagatgttttaggagaataaaagacatcatgttaaatttcctttaccaaaatagcattatagatttgaagggcatatttaacgtcccattaaatattcattactctgtgtccacagaaagtagaatgaaggcggaactatcatgagcattcttctgtactcactcgctcattgtgaaagggtagaggaatatgtatttgctgtttctcatacctctgtagggtttggttgttacacttcattgaagagttttcttaattcttctcaatatattctcaaaatatttccttctttcctcttcctcttctgtcttttctttctaagtgtatatgtacaaaggaaatagggacctctgaattgtatcttaaagatattttcagacaatgaatgtttaagtttgattaatctttggaagtgttcagaaaacattaatactcattaacgaatgggataaccatgatatttctatgagaaaaaaatgtcaacagatatggttctgagatttcatgcaggtccatcatgattctgcaaaataatatgccttctgcatgactaaaccacaaatatcataataaaagattgcatacggagaaaagcactattcaaggaaaagtaggaagctagttgactctacagtgctcattatcacaagatgtggacctagtgccagttctgccattagctgtgtgactttgggacatttctcagcgtctcaggatatcaggtatgtcttttgcaaaggaaaggaacaagtttagtggttcagcgactgctgcagtagtggattatgaaggagaacagcagaaggggagaccaagcacgtgggacaccgatctcacatcttccactgagcagctccactttcacatgtttgatatattaaaatttagagcaatatttatttttaaaaagtcctgctaacttaaaaatggggaaacatagattgcatgacctaaatttctatttaagatagcatggtctagtttgcatgtttaattaatatgttttcgtctcagaaaaaaaaaaaagtttcaacatcttttcctgttcactcatgtgctcttggttcaagtaaaataaaaacttaatgactatatcatttttatagagcttattttatacttttgtaatatatttctttcttattaaataaaaagatgagtggaggtgttgctttcaaaataaaattaaacataacagagagattggatgaagtcaactcctgcccatgcttaactttagagttatcttttcacgcggccttatgggcacttaaatactgtactgtcttatctttgaggtagaacaaaaaaaatggcaaaaacattcacataaaggggaaaatggaaaagaaagctgtgagagatttctttttaacataattatcatcattaggctttgcagtcttctttgacacaaagttgagatatagtcttcttaatacgaagagcagttaggcgggccgctccgttggcataccaacactcacgcattattctccccatgactcggagtgcttcacaactttgccactggtttgggatacttggtcgaaacttctggtcacaaacaacctttctcatttcctctatcgagggatctgaaggcaccatgtcataataaggcaattggtactcctcaacaattcctccgaccgaacacctccgggctatttcccagtaaaccagaccaacagaatagatgtcagctcgtttgaaggactcaaagatattcacattcattgtatcatcaagcatttcaggagccatatacctcttcgttcccactttaggattctgaggtatgtcgatagtgttcagtattgaatcatgcttcacagccaaccctaagtccgctatggcacaagtttcacattttttcactaagatattctttgattttatgtctcgatgagcaatagcaggtttaccttgtgtcccaacaatctccatatgaaggtgtgccagaccactagcaattgagagcgccagcttgatcattccagccaccgtcactatatttctattcaaatagtcatataaggagccctgttcatgatattcagataccagccaaagctgagtccaggttccattatctttgttgtcagcagcaatgaaaccaaggatgttttcatgtcgcagcatgaccgtctggtaaatttctgcctcacgaaaccaagatctttcatctctggaggagaatattttcacagccacatcttccccacaccatcttccatgccacacctcaccaaatctaccttttcctactatttcctgaagcacaatcgtccttgcaattgtcctttgaaccaacagaggtagaccagagccagatccagaggcagttacatcataaatcagatctttcagggtttttccagcatttaccagattgcactcagagagtggttcctccacattcggtctctttttcttcctgtaggagcactgtcgaccctggcatgcccatattgtcagcatcgcagctatggacaggaggcaaacaggcacagtaataatgatggccagctccatgggtccaagttttggggcatttggtgatgctgttggaaggtgcagtgttatgttgttgcaaaaatctgtgaagcagcattcggttttggtaacattgttggaactatgacagaacacttgagcattcagttctggaagggagacacaggatttgatcacctgttcttttccattggttagcatgactgatgcccaacatgctccttctgtttggcaggtaaagtttgaagaatcacacaaaagacatacacacttcagtcctgtaaaatgaggaggtcaagaagcaggctagaagacttctaaagacccctccagttctctagtcctctgctactctgaacttgtgtcacagttctcaatataagtgacttaaggattaccccagagcagcggtcagcggcttccgcctccccttcgtctgatgaatttgcgaacgggcaccctggggtcgccgggacgccctagctgtccgctggaccttggtgcagtgaattcggcccca

SEQ ID NO: 21 - DNA, 8711 bp, Macaca fascicularis
  source 1..8711: mol_type = genomic DNA
tggggccgaattcactgcaccaaggtccagcggacagctagggcgtcccggcgaccccagggtgcccgttcgcaaattcatcagacgaaggggaggcggaagccgctgaccgctgctctggggactgaagtgtgtatgtcttttgtgtgattcttcaaactttacctgccaaacagaaggagcatgttgggcatcagtcatgctaaccaatggaaaagaacaggtgatcaaatcctgtgtctcccttccagaactgaatgctcaagtgttctgtcatagttccaacaatgttaccaaaaccgaatgctgcttcacagatttttgcaacaacataacactgcaccttccaacagcatcaccaaatgccccaaaacttggacccatggagctggccatcattattactgtgcctgtttgcctcctgtccatagctgcgatgctgacaatatgggcatgccagggtcgacagtgctcctacaggaagaaaaagagaccgaatgtggaggaaccactctctgagtgcaatctggtaaatgctggaaaaaccctgaaagatctgatttatgatgtaactgcctctggatctggctctggtctacctctgttggttcaaaggacaattgcaaggacgattgtgcttcaggaaatagtaggaaaaggtagatttggtgaggtgtggcatggaagatggtgtggggaagatgtggctgtgaaaatattctcctccagagatgaaagatcttggtttcgtgaggcagaaatttaccagacggtcatgctgcgacatgaaaacatccttggtttcattgctgctgacaacaaagataatggaacctggactcagctttggctggtatctgaatatcatgaacagggctccttatatgactatttgaatagaaatatagtgacggtggctggaatgatcaagctggcgctctcaattgctagtggtctggcacaccttcatatggagattgttgggacacaaggtaaacctgctattgctcatcgagacataaaatcaaagaatatcttagtgaaaaaatgtgaaacttgtgccatagcggacttagggttggctgtgaagcatgattcaatactgaacactatcgacatacctcagaatcctaaagtgggaacgaagaggtatatggctcctgaaatgcttgatgatacaatgaatgtgaatatctttgagtccttcaaacgagctgacatctattctgttggtctggtttactgggaaatagcccggaggtgttcggtcggaggaattgttgaggagtaccaattgccttattatgacatggtgccttcagatccctcgatagaggaaatgagaaaggttgtttgtgaccagaagtttcgaccaagtatcccaaaccagtggcaaagttgtgaagcactccgagtcatggggagaataatgcgtgagtgttggtatgccaacggagcggcccgcctaactgctcttcgtattaagaagactatatctcaactttgtgtcaaagaagactgcaaagcctaatgatgataattatgttaaaaagaaatctctcacagctttcttttccattttcccctttatgtgaatgtttttgccattttttttgttctacctcaaagataagacagtacagtatttaagtgcccataaggccgcgtgaaaagataactctaaagttaagcatgggcaggagttgacttcatccaatctctctgttatgtttaattttattttgaaagcaacacctccactcatctttttatttaataagaaagaaatatattacaaaagtataaaataagctctataaaaatgatatagtcattaagtttttattttacttgaaccaagagcacatgagtgaacaggaaaagatgttgaaacttttttttttttctgagacgaaaacatattaattaaacatgcaaactagaccatgctatcttaaatagaaatttaggtcatgcaatctatgtttccccatttttaagttagcaggactttttaaaaataaatattgctctaaattttaatatatcaaacatgtgaaagtggagctgctcagtggaagatgtgagatcggtgtcccacgtgcttggtctccccttctgctgttctccttcataatccactactgcagcagtcgctgaaccactaaacttgttcctttcctttgcaaaagacatacctgatatcctgagacgctgagaaatgtcccaaagtcacacagctaatggcagaactggcactaggtccacatcttgtgataatgagcactgtagagtcaactagcttcctacttttccttgaatagtgcttttctccgtatgcaatcttttattatgatatttgtggtttagtcatgcagaaggcatattattttgcagaatcatgatggacctgcatgaaatctcagaaccatatctgttgacatttttttctcatagaaatatcatggttatcccattcgttaatgagtattaatgttttctgaacacttccaaagattaatcaaacttaaacattcattgtctgaaaatatctttaagatacaattcagaggtccctatttcctttgtacatatacacttagaaagaaaagacagaagaggaagaggaaagaaggaaatattttgagaatatattgagaagaattaagaaaactcttcaatgaagtgtaacaaccaaaccctacagaggtatgagaaacagcaaatacatattcctctaccctttcacaatgagcgagtgagtacagaagaatgctcatgatagttccgccttcattctactttctgtggacacagagtaatgaatatttaatgggacgttaaatatgcccttcaaatctataatgctattttggtaaaggaaatttaacatgatgtcttttattctcctaaaacatcttttgtcaaactccattccatagatctttcttctgctgagatgatccaagaccaaagtgttctttgatattgcttagaaagtgatagtacatgttagcatataatgtattttgaagagtgaaataaatgctattgataacagtaaaaacaaaaaacaaacaaacaaaaaaccccaaaactaataacagtaaagaaatgctacttgaattttttttttaaactggattgctcagattacctgatcgtggtggaacccttttattaagaggaggagaaactttttactatcccatatttaactgttctataaagcaaagcacagcttgggtaatagtgttctgaaggatatacttctgtattttctcatagaatacagtttagtgattatgcttcatttcactatgaaaatatgttactgaatatatcttcattttactgagctgaaataaggaaggcaaaacactgacagctatggaatttgcgtgtacttccatacttgttaatgctctcatccacttattaaataatcatagagtacccatatcttgcttgccacaatatcgggtacaagagggaatacaaagatagataggtcctgccctcagggattttaaagtctaatttgggaatgtgaatagggatgtgagtgtgtgggggaagaaaataaattgacagataaaatatgaagtgggatgtcttgagttctgcatgacagtgggtttctaggataggtctgaaaatcgctttcatttgcaacgcatttagaaagtagctttatttggatattacagacaatctaaatatatcatcagtttttaaaagtgcctatgtgaagtgattttttaaaaagagcctatgtaaaggggtaatcttgcttatgcttgttactaatttctcatagattgttgttctgcatatataagaatgaaattatttatttactatagttgtacgtgcctcaaataaacaagaatgatatttcctgttttatttacttatgttgggtaaatatgcttattgaatttttaagagaggattttttaacatctccattcttcttgtcattatgttttgtagcttatttgagggtgtctaaatataatttcatattttattggttcaactttcactctgaagaaatccgtatgttagtacattttgaggtatttttcttgttcttgtgttggttaactatgactcctagctgaatagtcttatatttcaattacaaaacacatttttaaagaaagggaatagagcagcaaaaatgatgaggaaaatgttaaaagttataatatttcctttactcttaacaggattatatatagaatatgctcacttacaaaaataggatgatgaagtatagagcataaggcaggcttcttgtatatacttatgctgtcaaatgttatattgtttttaatggagtccctttgtgtaatatttatttcatttaaattttgttataagcaaaaaaaaaaaaaaaaattcttcttaggttaggttcagagtatcagtgttctttactccttacagatattttggctttggggtataatacaagacttgggaaaacgctattatgaatttttagtactgtataaagtggtgatgggatttaaatgcagcatcactttctgaaaataagagaaacattatttgttgtcagtatttcagcatgaacttgttgccttgtaaattttgcctttaagtttgtaattggtacagattctgttgtatgctttcttctatgtctaaaatatttggcatgtcacatctagaattcttaatttatgttctgacttgagagttaagtgaaacatgactgtcgtgcactattttaggcatagcacttgcttttcatctttatactttcaattaactttgcattttaaatttccatgattgtatgaaaatagtaacctggttgcagtatctgaaaaaattaaaattagcttttatttaaaaatgaaaatctacaatagattcattaggttagaagttccacagtaatttattattttattacagctactattgtagaattattaataaaataaaacaaaactacttctattttcctggaattttgccaccatgtgactcattggggcagagaaaactcagggttatctttgagtctgcgcaaaagtaccaaggaacctgcttagcaaatcatctgaaaacagggagttgatgtttgccattatacaaagtttgagtaaacaacttaaaattgcttgttagggcatagtctttgattgaaataagtatgagagtgtatttggctaaataaatgtatttaaaatatagaaattttgtttcccactggaaaattaagaaaataacagtactaaatgaataaaagctggcagttgatgtcttcaataatcattcctttaaataaattcacaaacacattattacaagctacttaggaatgtttagtatgagtatcttaaaatggcaccattgtggttttcgaagatattttaagcatcttttgtgaaacataccatttctgtttgacaatgcttagttctagctctgcgtgctaatacctacatggagtttttctgctattttagtgaaaacagtaattgttttatcttgagagctgcttctaaataacaagtcaattggaatataagtttttaaaaaacgttaatattaagtagaatttttataatatgggcatttttcaaaacattttaatgaaaatatatagatatttgactttcttttttccatctagccttgctttatatttcattatttttctcactttttttcttaatattccctcactatctttcaacattatcattagtttctaatttaaaaaataactattatttaacttaaccatctggaatttagccttctaatgaaagagaatcccttagtactctcagagattatataacttgattccagttttgtttcgatgatgagaccaaggatcagagattaaatgactactagttattagcagaactctcatgaaagccaggtggtgacacccagcactgttccttgccatatccccaacttttactgattaaaaattaatttgcatgcatctaaacctaccttgaatgcacactaacgtaatgtgccattcaatgatgatgataaaatcccacttcttgtgtttctactaaaataatttactcactcagggtggggtcagtgagaaaaactaaactaggcaaagagagagttgtagaatggttgtcaagctaagtaggcaaccactggggtgctgataaaattaatggataaaatttagggacagagagagtatagaatttcttagtgccagtaataattagaaaagcttcctgacatcccccaccctttctgtaaggattgttctttctctttgtactttggaatgggggtgaaaggtgatttaatagctgaatttgggactatgtccagtggcatattatctgacttttctctctttctctttttttttcccccgtcagtttctcattagtttgtctttggcattcatcttcttttagtgcattaaaaaatgtttggcagatctcatcaatcccaagtcagtctataattcctataattctttagttatcttttaatctgtccaaactgctacacaatgaacttcttaacaagattttaagttccccactgatgtgtaagaggtttcacctcgtaacttctccagtaatccttcatttggcactatagagtatttgttaatggcagagatgattttttttttccaaaacctaaaaagactagctgttaattgtattctaacttttagctaacatgtaaagaatgtctacttttgctttaatgctaaatctcacttgagaaatagtgactgggaaagacaatttgaaatatatgccccataatgtggttgctaaatttatttctgctgttccataccattgctttgttttgcttttgacatctcttaaaactaagccattatgctattagtttggaatataatactacagcaaaattaggtaacaatctctattttaaaattcccctaacaataatagaactgccagcatacttttctctttcagttgtagatgaatacatttgagagaagagctctatttcatcctagatttcaatattttcagatgtgactgtatttcctgatcattggtccaggttatcctaaaagaaatttttctctccagacctaacagttttaactgcaagagtttactgtgggttacattaatctgaattttaatagggccactgagaatctgagtgctttaggggattacccttatacccactgccatcacatccagtcgggcctgttgtgctctatacaaatcttcccagctgaggggcagatgggggctaaaatccaactgcaattggctcccagacataattttatattttacagaaaagcatcttattggcttatatatgtttaaagaatggtctggcttatacatcttcagaaaatgagaattaaaaagccaaaataattcttgacgtctgcaaattgaacatagaacttagaagaagtaatactttatcttttcatcctggcattcctgagagaaaagaaattgtatgtttatcgtgttggtttaatttttcaacccagacaatctgcagcaaggcacatggaccctaattttgacatcttacacacagttttcattctatgcatggagctaattactgactttgcctgtaaagagaggattgtgtgcctaaattttgtctaggaaatgcaagcatagaatgaaatttactaatatttctatttcttccataggctaagtaatagcaactatttttgaagacccagccctttttttcctctttatacaaaataagagtatctgagccaaaatattaaattctagttcatttctgcaatgactagtgtcatgctcatgtactcttctaattctagactggagaagattattcaaacttgatctgtgtttcaggtttttaaatgtcctaaaaacagaaaattagattcagatctcaaaaaaggaattttggattgactttcaaagtactaatactaattatacttttcttttggtagcgtgactcttcttatacctaagaacatattacaaatgtcaaaaccattgcagtttgacattgcaaaacatgccttgaactcttgaactactgtgaaaagaatcaccgttgtaaagactttttgtaagctagctgatactcttaagtatgtaaaaagattgtctttcagccgacaggcccaaaggaatgtatataaggaaggaatatgaaaaaataaattaggttttaaaataagaattgggcaataaactgtatcgaaaatatgtagatggattttagtagttgtaatttaaatgtcgaaggtgaagagaatttcaaattccaaagagaagtgaatgatattcagatgtttcattaatttctagtctgtgaaaatatgcattttatagtaaatgtatagacttattttatttagaaataatagtgttttagaatttattaaaaactcagtgatagcctttataccaaaatgtttaactttaccaacagcaagtcataaaagtatttattttaaagctttttaatattatcgcgtaactttcatctgtcttcagatgtaaataattatctgcctaaatgttatatttttatgtatgcattttctgaaaatgtattgttttgtaaagtgggaaagataataaatcaagcacttgcacttgtttctgtgaagcatatagaactctattttaaataaaggaagatgtgtcgta

SEQ ID NO: 22 - DNA, 8711 bp, Macaca fascicularis
  source 1..8711: mol_type = genomic DNA
tacgacacatcttcctttatttaaaatagagttctatatgcttcacagaaacaagtgcaagtgcttgatttattatctttcccactttacaaaacaatacattttcagaaaatgcatacataaaaatataacatttaggcagataattatttacatctgaagacagatgaaagttacgcgataatattaaaaagctttaaaataaatacttttatgacttgctgttggtaaagttaaacattttggtataaaggctatcactgagtttttaataaattctaaaacactattatttctaaataaaataagtctatacatttactataaaatgcatattttcacagactagaaattaatgaaacatctgaatatcattcacttctctttggaatttgaaattctcttcaccttcgacatttaaattacaactactaaaatccatctacatattttcgatacagtttattgcccaattcttattttaaaacctaatttattttttcatattccttccttatatacattcctttgggcctgtcggctgaaagacaatctttttacatacttaagagtatcagctagcttacaaaaagtctttacaacggtgattcttttcacagtagttcaagagttcaaggcatgttttgcaatgtcaaactgcaatggttttgacatttgtaatatgttcttaggtataagaagagtcacgctaccaaaagaaaagtataattagtattagtactttgaaagtcaatccaaaattccttttttgagatctgaatctaattttctgtttttaggacatttaaaaacctgaaacacagatcaagtttgaataatcttctccagtctagaattagaagagtacatgagcatgacactagtcattgcagaaatgaactagaatttaatattttggctcagatactcttattttgtataaagaggaaaaaaagggctgggtcttcaaaaatagttgctattacttagcctatggaagaaatagaaatattagtaaatttcattctatgcttgcatttcctagacaaaatttaggcacacaatcctctctttacaggcaaagtcagtaattagctccatgcatagaatgaaaactgtgtgtaagatgtcaaaattagggtccatgtgccttgctgcagattgtctgggttgaaaaattaaaccaacacgataaacatacaatttcttttctctcaggaatgccaggatgaaaagataaagtattacttcttctaagttctatgttcaatttgcagacgtcaagaattattttggctttttaattctcattttctgaagatgtataagccagaccattctttaaacatatataagccaataagatgcttttctgtaaaatataaaattatgtctgggagccaattgcagttggattttagcccccatctgcccctcagctgggaagatttgtatagagcacaacaggcccgactggatgtgatggcagtgggtataagggtaatcccctaaagcactcagattctcagtggccctattaaaattcagattaatgtaacccacagtaaactcttgcagttaaaactgttaggtctggagagaaaaatttcttttaggataacctggaccaatgatcaggaaatacagtcacatctgaaaatattgaaatctaggatgaaatagagctcttctctcaaatgtattcatctacaactgaaagagaaaagtatgctggcagttctattattgttaggggaattttaaaatagagattgttacctaattttgctgtagtattatattccaaactaatagcataatggcttagttttaagagatgtcaaaagcaaaacaaagcaatggtatggaacagcagaaataaatttagcaaccacattatggggcatatatttcaaattgtctttcccagtcactatttctcaagtgagatttagcattaaagcaaaagtagacattctttacatgttagctaaaagttagaatacaattaacagctagtctttttaggttttggaaaaaaaaaatcatctctgccattaacaaatactctatagtgccaaatgaaggattactggagaagttacgaggtgaaacctcttacacatcagtggggaacttaaaatcttgttaagaagttcattgtgtagcagtttggacagattaaaagataactaaagaattataggaattatagactgacttgggattgatgagatctgccaaacattttttaatgcactaaaagaagatgaatgccaaagacaaactaatgagaaactgacgggggaaaaaaaaagagaaagagagaaaagtcagataatatgccactggacatagtcccaaattcagctattaaatcacctttcacccccattccaaagtacaaagagaaagaacaatccttacagaaagggtgggggatgtcaggaagcttttctaattattactggcactaagaaattctatactctctctgtccctaaattttatccattaattttatcagcaccccagtggttgcctacttagcttgacaaccattctacaactctctctttgcctagtttagtttttctcactgaccccaccctgagtgagtaaattattttagtagaaacacaagaagtgggattttatcatcatcattgaatggcacattacgttagtgtgcattcaaggtaggtttagatgcatgcaaattaatttttaatcagtaaaagttggggatatggcaaggaacagtgctgggtgtcaccacctggctttcatgagagttctgctaataactagtagtcatttaatctctgatccttggtctcatcatcgaaacaaaactggaatcaagttatataatctctgagagtactaagggattctctttcattagaaggctaaattccagatggttaagttaaataatagttattttttaaattagaaactaatgataatgttgaaagatagtgagggaatattaagaaaaaaagtgagaaaaataatgaaatataaagcaaggctagatggaaaaaagaaagtcaaatatctatatattttcattaaaatgttttgaaaaatgcccatattataaaaattctacttaatattaacgttttttaaaaacttatattccaattgacttgttatttagaagcagctctcaagataaaacaattactgttttcactaaaatagcagaaaaactccatgtaggtattagcacgcagagctagaactaagcattgtcaaacagaaatggtatgtttcacaaaagatgcttaaaatatcttcgaaaaccacaatggtgccattttaagatactcatactaaacattcctaagtagcttgtaataatgtgtttgtgaatttatttaaaggaatgattattgaagacatcaactgccagcttttattcatttagtactgttattttcttaattttccagtgggaaacaaaatttctatattttaaatacatttatttagccaaatacactctcatacttatttcaatcaaagactatgccctaacaagcaattttaagttgtttactcaaactttgtataatggcaaacatcaactccctgttttcagatgatttgctaagcaggttccttggtacttttgcgcagactcaaagataaccctgagttttctctgccccaatgagtcacatggtggcaaaattccaggaaaatagaagtagttttgttttattttattaataattctacaatagtagctgtaataaaataataaattactgtggaacttctaacctaatgaatctattgtagattttcatttttaaataaaagctaattttaattttttcagatactgcaaccaggttactattttcatacaatcatggaaatttaaaatgcaaagttaattgaaagtataaagatgaaaagcaagtgctatgcctaaaatagtgcacgacagtcatgtttcacttaactctcaagtcagaacataaattaagaattctagatgtgacatgccaaatattttagacatagaagaaagcatacaacagaatctgtaccaattacaaacttaaaggcaaaatttacaaggcaacaagttcatgctgaaatactgacaacaaataatgtttctcttattttcagaaagtgatgctgcatttaaatcccatcaccactttatacagtactaaaaattcataatagcgttttcccaagtcttgtattataccccaaagccaaaatatctgtaaggagtaaagaacactgatactctgaacctaacctaagaagaatttttttttttttttttgcttataacaaaatttaaatgaaataaatattacacaaagggactccattaaaaacaatataacatttgacagcataagtatatacaagaagcctgccttatgctctatacttcatcatcctatttttgtaagtgagcatattctatatataatcctgttaagagtaaaggaaatattataacttttaacattttcctcatcatttttgctgctctattccctttctttaaaaatgtgttttgtaattgaaatataagactattcagctaggagtcatagttaaccaacacaagaacaagaaaaatacctcaaaatgtactaacatacggatttcttcagagtgaaagttgaaccaataaaatatgaaattatatttagacaccctcaaataagctacaaaacataatgacaagaagaatggagatgttaaaaaatcctctcttaaaaattcaataagcatatttacccaacataagtaaataaaacaggaaatatcattcttgtttatttgaggcacgtacaactatagtaaataaataatttcattcttatatatgcagaacaacaatctatgagaaattagtaacaagcataagcaagattacccctttacataggctctttttaaaaaatcacttcacataggcacttttaaaaactgatgatatatttagattgtctgtaatatccaaataaagctactttctaaatgcgttgcaaatgaaagcgattttcagacctatcctagaaacccactgtcatgcagaactcaagacatcccacttcatattttatctgtcaatttattttcttcccccacacactcacatccctattcacattcccaaattagactttaaaatccctgagggcaggacctatctatctttgtattccctcttgtacccgatattgtggcaagcaagatatgggtactctatgattatttaataagtggatgagagcattaacaagtatggaagtacacgcaaattccatagctgtcagtgttttgccttccttatttcagctcagtaaaatgaagatatattcagtaacatattttcatagtgaaatgaagcataatcactaaactgtattctatgagaaaatacagaagtatatccttcagaacactattacccaagctgtgctttgctttatagaacagttaaatatgggatagtaaaaagtttctcctcctcttaataaaagggttccaccacgatcaggtaatctgagcaatccagtttaaaaaaaaaattcaagtagcatttctttactgttattagttttggggttttttgtttgtttgttttttgtttttactgttatcaatagcatttatttcactcttcaaaatacattatatgctaacatgtactatcactttctaagcaatatcaaagaacactttggtcttggatcatctcagcagaagaaagatctatggaatggagtttgacaaaagatgttttaggagaataaaagacatcatgttaaatttcctttaccaaaatagcattatagatttgaagggcatatttaacgtcccattaaatattcattactctgtgtccacagaaagtagaatgaaggcggaactatcatgagcattcttctgtactcactcgctcattgtgaaagggtagaggaatatgtatttgctgtttctcatacctctgtagggtttggttgttacacttcattgaagagttttcttaattcttctcaatatattctcaaaatatttccttctttcctcttcctcttctgtcttttctttctaagtgtatatgtacaaaggaaatagggacctctgaattgtatcttaaagatattttcagacaatgaatgtttaagtttgattaatctttggaagtgttcagaaaacattaatactcattaacgaatgggataaccatgatatttctatgagaaaaaaatgtcaacagatatggttctgagatttcatgcaggtccatcatgattctgcaaaataatatgccttctgcatgactaaaccacaaatatcataataaaagattgcatacggagaaaagcactattcaaggaaaagtaggaagctagttgactctacagtgctcattatcacaagatgtggacctagtgccagttctgccattagctgtgtgactttgggacatttctcagcgtctcaggatatcaggtatgtcttttgcaaaggaaaggaacaagtttagtggttcagcgactgctgcagtagtggattatgaaggagaacagcagaaggggagaccaagcacgtgggacaccgatctcacatcttccactgagcagctccactttcacatgtttgatatattaaaatttagagcaatatttatttttaaaaagtcctgctaacttaaaaatggggaaacatagattgcatgacctaaatttctatttaagatagcatggtctagtttgcatgtttaattaatatgttttcgtctcagaaaaaaaaaaaagtttcaacatcttttcctgttcactcatgtgctcttggttcaagtaaaataaaaacttaatgactatatcatttttatagagcttattttatacttttgtaatatatttctttcttattaaataaaaagatgagtggaggtgttgctttcaaaataaaattaaacataacagagagattggatgaagtcaactcctgcccatgcttaactttagagttatcttttcacgcggccttatgggcacttaaatactgtactgtcttatctttgaggtagaacaaaaaaaatggcaaaaacattcacataaaggggaaaatggaaaagaaagctgtgagagatttctttttaacataattatcatcattaggctttgcagtcttctttgacacaaagttgagatatagtcttcttaatacgaagagcagttaggcgggccgctccgttggcataccaacactcacgcattattctccccatgactcggagtgcttcacaactttgccactggtttgggatacttggtcgaaacttctggtcacaaacaacctttctcatttcctctatcgagggatctgaaggcaccatgtcataataaggcaattggtactcctcaacaattcctccgaccgaacacctccgggctatttcccagtaaaccagaccaacagaatagatgtcagctcgtttgaaggactcaaagatattcacattcattgtatcatcaagcatttcaggagccatatacctcttcgttcccactttaggattctgaggtatgtcgatagtgttcagtattgaatcatgcttcacagccaaccctaagtccgctatggcacaagtttcacattttttcactaagatattctttgattttatgtctcgatgagcaatagcaggtttaccttgtgtcccaacaatctccatatgaaggtgtgccagaccactagcaattgagagcgccagcttgatcattccagccaccgtcactatatttctattcaaatagtcatataaggagccctgttcatgatattcagataccagccaaagctgagtccaggttccattatctttgttgtcagcagcaatgaaaccaaggatgttttcatgtcgcagcatgaccgtctggtaaatttctgcctcacgaaaccaagatctttcatctctggaggagaatattttcacagccacatcttccccacaccatcttccatgccacacctcaccaaatctaccttttcctactatttcctgaagcacaatcgtccttgcaattgtcctttgaaccaacagaggtagaccagagccagatccagaggcagttacatcataaatcagatctttcagggtttttccagcatttaccagattgcactcagagagtggttcctccacattcggtctctttttcttcctgtaggagcactgtcgaccctggcatgcccatattgtcagcatcgcagctatggacaggaggcaaacaggcacagtaataatgatggccagctccatgggtccaagttttggggcatttggtgatgctgttggaaggtgcagtgttatgttgttgcaaaaatctgtgaagcagcattcggttttggtaacattgttggaactatgacagaacacttgagcattcagttctggaagggagacacaggatttgatcacctgttcttttccattggttagcatgactgatgcccaacatgctccttctgtttggcaggtaaagtttgaagaatcacacaaaagacatacacacttcagtccccagagcagcggtcagcggcttccgcctccccttcgtctgatgaatttgcgaacgggcaccctggggtcgccgggacgccctagctgtccgctggaccttggtgcagtgaattcggcccca

SEQ ID NO: 23 - DNA, 3949 bp, Macaca fascicularis
  source 1..3949: mol_type = genomic DNA
gggggcgcccacactgactagagccaaccgcgcacttcaaaagggtgtcggtgccgcgctcccctcccgcggcccgggaacttcaaagcgggccgtgctgccccggctgcctcgctctgctctggggcctcgcagccccggcgcggccgcctggtggcgatgacccgggcgctccgctcagcgctccgccaggctctcctgctgctcgccgcggccgccgagctctcggcaggactgaagtgtgtatgtcttttgtgtgattcttcaaactttacctgccaaacagaaggagcatgttgggcatcagtcatgctaaccaatggaaaagaacaggtgatcaaatcctgtgtctcccttccagaactgaatgctcaagtgttctgtcatagttccaacaatgttaccaaaaccgaatgctgcttcacagatttttgcaacaacataacactgcaccttccaacagctgcgatgctgacaatatgggcatgccagggtcgacagtgctcctacaggaagaaaaagagaccgaatgtggaggaaccactctctgagtgcaatctggtaaatgctggaaaaaccctgaaagatctgatttatgatgtaactgcctctggatctggctctggtctacctctgttggttcaaaggacaattgcaaggacgattgtgcttcaggaaatagtaggaaaaggtagatttggtgaggtgtggcatggaagatggtgtggggaagatgtggctgtgaaaatattctcctccagagatgaaagatcttggtttcgtgaggcagaaatttaccagacggtcatgctgcgacatgaaaacatccttggtttcattgctgctgacaacaaagataatggaacctggactcagctttggctggtatctgaatatcatgaacagggctccttatatgactatttgaatagaaatatagtgacggtggctggaatgatcaagctggcgctctcaattgctagtggtctggcacaccttcatatggagattgttgggacacaaggtaaacctgctattgctcatcgagacataaaatcaaagaatatcttagtgaaaaaatgtgaaacttgtgccatagcggacttagggttggctgtgaagcatgattcaatactgaacactatcgacatacctcagaatcctaaagtgggaacgaagaggtatatggctcctgaaatgcttgatgatacaatgaatgtgaatatctttgagtccttcaaacgagctgacatctattctgttggtctggtttactgggaaatagcccggaggtgttcggtcggaggaattgttgaggagtaccaattgccttattatgacatggtgccttcagatccctcgatagaggaaatgagaaaggttgtttgtgaccagaagtttcgaccaagtatcccaaaccagtggcaaagttgtgaagcactccgagtcatggggagaataatgcgtgagtgttggtatgccaacggagcggcccgcctaactgctcttcgtattaagaagactatatctcaactttgtgtcaaagaagactgcaaagcctaatgatgataattatgttaaaaagaaatctctcacagctttcttttccattttcccctttatgtgaatgtttttgccattttttttgttctacctcaaagataagacagtacagtatttaagtgcccataaggccgcgtgaaaagataactctaaagttaagcatgggcaggagttgacttcatccaatctctctgttatgtttaattttattttgaaagcaacacctccactcatctttttatttaataagaaagaaatatattacaaaagtataaaataagctctataaaaatgatatagtcattaagtttttattttacttgaaccaagagcacatgagtgaacaggaaaagatgttgaaacttttttttttttctgagacgaaaacatattaattaaacatgcaaactagaccatgctatcttaaatagaaatttaggtcatgcaatctatgtttccccatttttaagttagcaggactttttaaaaataaatattgctctaaattttaatatatcaaacatgtgaaagtggagctgctcagtggaagatgtgagatcggtgtcccacgtgcttggtctccccttctgctgttctccttcataatccactactgcagcagtcgctgaaccactaaacttgttcctttcctttgcaaaagacatacctgatatcctgagacgctgagaaatgtcccaaagtcacacagctaatggcagaactggcactaggtccacatcttgtgataatgagcactgtagagtcaactagcttcctacttttccttgaatagtgcttttctccgtatgcaatcttttattatgatatttgtggtttagtcatgcagaaggcatattattttgcagaatcatgatggacctgcatgaaatctcagaaccatatctgttgacatttttttctcatagaaatatcatggttatcccattcgttaatgagtattaatgttttctgaacacttccaaagattaatcaaacttaaacattcattgtctgaaaatatctttaagatacaattcagaggtccctatttcctttgtacatatacacttagaaagaaaagacagaagaggaagaggaaagaaggaaatattttgagaatatattgagaagaattaagaaaactcttcaatgaagtgtaacaaccaaaccctacagaggtatgagaaacagcaaatacatattcctctaccctttcacaatgagcgagtgagtacagaagaatgctcatgatagttccgccttcattctactttctgtggacacagagtaatgaatatttaatgggacgttaaatatgcccttcaaatctataatgctattttggtaaaggaaatttaacatgatgtcttttattctcctaaaacatcttttgtcaaactccattccatagatctttcttctgctgagatgatccaagaccaaagtgttctttgatattgcttagaaagtgatagtacatgttagcatataatgtattttgaagagtgaaataaatgctattgataacagtaaaaacaaaaaacaaacaaacaaaaaaccccaaaactaataacagtaaagaaatgctacttgaattttttttttaaactggattgctcagattacctgatcgtggtggaacccttttattaagaggaggagaaactttttactatcccatatttaactgttctataaagcaaagcacagcttgggtaatagtgttctgaaggatatacttctgtattttctcatagaatacagtttagtgattatgcttcatttcactatgaaaatatgttactgaatatatcttcattttactgagctgaaataaggaaggcaaaacactgacagctatggaatttgcgtgtacttccatacttgttaatgctctcatccacttattaaataatcatagagtacccatatcttgcttgccacaatatcgggtacaagagggaatacaaagatagataggtcctgccctcagggattttaaagtctaatttgggaatgtgaatagggatgtgagtgtgtgggggaagaaaataaattgacagataaaatatgaagtgggatgtcttgagttctgcatgacagtgggtttctaggataggtctgaaaatcgctttcatttgcaacgcatttagaaagtagctttatttggatattacagacaatctaaatatatcatcagtttttaaaagtgcctatgtgaagtgattttttaaaaagagcctatgtaaaggggtaatcttgcttatgcttgttactaatttctcatagattgttgttctgcatatataagaatgaaattatttatttactatagttgtacgtgcctcaaataaacaagaatgatatttcctgttttatttactta

SEQ ID NO: 24 - DNA, 3949 bp, Macaca fascicularis
  source 1..3949: mol_type = genomic DNA
taagtaaataaaacaggaaatatcattcttgtttatttgaggcacgtacaactatagtaaataaataatttcattcttatatatgcagaacaacaatctatgagaaattagtaacaagcataagcaagattacccctttacataggctctttttaaaaaatcacttcacataggcacttttaaaaactgatgatatatttagattgtctgtaatatccaaataaagctactttctaaatgcgttgcaaatgaaagcgattttcagacctatcctagaaacccactgtcatgcagaactcaagacatcccacttcatattttatctgtcaatttattttcttcccccacacactcacatccctattcacattcccaaattagactttaaaatccctgagggcaggacctatctatctttgtattccctcttgtacccgatattgtggcaagcaagatatgggtactctatgattatttaataagtggatgagagcattaacaagtatggaagtacacgcaaattccatagctgtcagtgttttgccttccttatttcagctcagtaaaatgaagatatattcagtaacatattttcatagtgaaatgaagcataatcactaaactgtattctatgagaaaatacagaagtatatccttcagaacactattacccaagctgtgctttgctttatagaacagttaaatatgggatagtaaaaagtttctcctcctcttaataaaagggttccaccacgatcaggtaatctgagcaatccagtttaaaaaaaaaattcaagtagcatttctttactgttattagttttggggttttttgtttgtttgttttttgtttttactgttatcaatagcatttatttcactcttcaaaatacattatatgctaacatgtactatcactttctaagcaatatcaaagaacactttggtcttggatcatctcagcagaagaaagatctatggaatggagtttgacaaaagatgttttaggagaataaaagacatcatgttaaatttcctttaccaaaatagcattatagatttgaagggcatatttaacgtcccattaaatattcattactctgtgtccacagaaagtagaatgaaggcggaactatcatgagcattcttctgtactcactcgctcattgtgaaagggtagaggaatatgtatttgctgtttctcatacctctgtagggtttggttgttacacttcattgaagagttttcttaattcttctcaatatattctcaaaatatttccttctttcctcttcctcttctgtcttttctttctaagtgtatatgtacaaaggaaatagggacctctgaattgtatcttaaagatattttcagacaatgaatgtttaagtttgattaatctttggaagtgttcagaaaacattaatactcattaacgaatgggataaccatgatatttctatgagaaaaaaatgtcaacagatatggttctgagatttcatgcaggtccatcatgattctgcaaaataatatgccttctgcatgactaaaccacaaatatcataataaaagattgcatacggagaaaagcactattcaaggaaaagtaggaagctagttgactctacagtgctcattatcacaagatgtggacctagtgccagttctgccattagctgtgtgactttgggacatttctcagcgtctcaggatatcaggtatgtcttttgcaaaggaaaggaacaagtttagtggttcagcgactgctgcagtagtggattatgaaggagaacagcagaaggggagaccaagcacgtgggacaccgatctcacatcttccactgagcagctccactttcacatgtttgatatattaaaatttagagcaatatttatttttaaaaagtcctgctaacttaaaaatggggaaacatagattgcatgacctaaatttctatttaagatagcatggtctagtttgcatgtttaattaatatgttttcgtctcagaaaaaaaaaaaagtttcaacatcttttcctgttcactcatgtgctcttggttcaagtaaaataaaaacttaatgactatatcatttttatagagcttattttatacttttgtaatatatttctttcttattaaataaaaagatgagtggaggtgttgctttcaaaataaaattaaacataacagagagattggatgaagtcaactcctgcccatgcttaactttagagttatcttttcacgcggccttatgggcacttaaatactgtactgtcttatctttgaggtagaacaaaaaaaatggcaaaaacattcacataaaggggaaaatggaaaagaaagctgtgagagatttctttttaacataattatcatcattaggctttgcagtcttctttgacacaaagttgagatatagtcttcttaatacgaagagcagttaggcgggccgctccgttggcataccaacactcacgcattattctccccatgactcggagtgcttcacaactttgccactggtttgggatacttggtcgaaacttctggtcacaaacaacctttctcatttcctctatcgagggatctgaaggcaccatgtcataataaggcaattggtactcctcaacaattcctccgaccgaacacctccgggctatttcccagtaaaccagaccaacagaatagatgtcagctcgtttgaaggactcaaagatattcacattcattgtatcatcaagcatttcaggagccatatacctcttcgttcccactttaggattctgaggtatgtcgatagtgttcagtattgaatcatgcttcacagccaaccctaagtccgctatggcacaagtttcacattttttcactaagatattctttgattttatgtctcgatgagcaatagcaggtttaccttgtgtcccaacaatctccatatgaaggtgtgccagaccactagcaattgagagcgccagcttgatcattccagccaccgtcactatatttctattcaaatagtcatataaggagccctgttcatgatattcagataccagccaaagctgagtccaggttccattatctttgttgtcagcagcaatgaaaccaaggatgttttcatgtcgcagcatgaccgtctggtaaatttctgcctcacgaaaccaagatctttcatctctggaggagaatattttcacagccacatcttccccacaccatcttccatgccacacctcaccaaatctaccttttcctactatttcctgaagcacaatcgtccttgcaattgtcctttgaaccaacagaggtagaccagagccagatccagaggcagttacatcataaatcagatctttcagggtttttccagcatttaccagattgcactcagagagtggttcctccacattcggtctctttttcttcctgtaggagcactgtcgaccctggcatgcccatattgtcagcatcgcagctgttggaaggtgcagtgttatgttgttgcaaaaatctgtgaagcagcattcggttttggtaacattgttggaactatgacagaacacttgagcattcagttctggaagggagacacaggatttgatcacctgttcttttccattggttagcatgactgatgcccaacatgctccttctgtttggcaggtaaagtttgaagaatcacacaaaagacatacacacttcagtcctgccgagagctcggcggccgcggcgagcagcaggagagcctggcggagcgctgagcggagcgcccgggtcatcgccaccaggcggccgcgccggggctgcgaggccccagagcagagcgaggcagccggggcagcacggcccgctttgaagttcccgggccgcgggaggggagcgcggcaccgacacccttttgaagtgcgcggttggctctagtcagtgtgggcgccccc

SEQ ID NO: 25 - DNA, 9296 bp, Macaca fascicularis
  source 1..9296: mol_type = genomic DNA
gtagaaagcccgcggggctctcacagcgcagcctggttggacttaaggaccctggacaataaacgtcaggagagctagggggctggctcttctgcgggaggctatagagcggatcaccagggtgcaatcgccgcgtagttgaagtttccctaaagtctcagtggggctttccctctcgtgcggagcccccttccggagtatctagtcccggaggttccgcgacgcttccccacctcccctctttcttcgccccagctctgggctctcaccgctgggtacagggccgcctttgcccgcctgccctgcagcagcaggcccgggcggctgcgagagggcgcagggggcggaggcgcggcaggggcgggctctgccgctcgccccaccaccccctccccgcccggctgcggggccagtggcaggagcgccgcgcaccgccagccgcggggggcgtgggatgggggcggccggggaggggggcgcccacactgactagagccaaccgcgcacttcaaaagggtgtcggtgccgcgctcccctcccgcggcccgggaacttcaaagcgggccgtgctgccccggctgcctcgctctgctctggggcctcgcagccccggcgcggccgcctggtggcgatgacccgggcgctcagctcagcgctccgccaggctctcctgctgctcgccgcggccgccgagctctcggcaggactgaagtgtgtatgtcttttgtgtgattcttcaaactttacctgccaaacagaaggagcatgttgggcatcagtcatgctaaccaatggaaaagaacaggtgatcaaatcctgtgtctcccttccagaattgaatgctcaagtcttctgtcatagttccaacaatgttaccaaaaccgaatgctgcttcacagatttttgcaacaacataacactgcaccttccaacagcatcaccaaatgccccaaaacttggacccatggagctggccatcattattactgtgcctgtttgcctcctgtccatagctgcgatgctgacaatatgggcatgccagggtcgacagtgctcctacaggaagaaaaagagaccgaatgtggaggaaccactctctgagtgcaatctggtaaatgctggaaaaaccctgaaagatctgatttatgatgtaactgcctctggatctggctctggtctacctctgttggttcaaaggacaattgcaaggacgattgtgcttcaggaaatagtaggaaaaggtagatttggtgaggtgtggcatggaagatggtgtggggaagatgtggctgtgaaaatattctcctccagagatgaaagatcttggtttcgtgaggcagaaatttaccagacggtcatgctgcgacatgaaaacatccttggtttcattgctgctgacaacaaagataatggaacctggactcaactttggctggtatctgaatatcatgaacagggctccttatatgactatttgaatagaaatatagtgacggtggctggaatgatcaagctggccctctcaattgctagtggtctggcacaccttcatatggagattgttgggacacaaggtaaacctgctattgctcatcgagacataaaatcaaagaatatcttagtgaaaaaatgtgaaacttgtgccatagcggacttagggttggctgtgaagcatgattcaatactgaacactatcgacatacctcagaatcctaaagtgggaacgaagaggtatatggctcctgaaatgcttgatgatacaatgaatgtgaatatctttgagtccttcaaacgagctgacatctattctgttggtctggtttactgggaaatagcccggaggtgttcggtcggaggaattgttgaggagtaccaattgccttattatgacatggtgccttcagatccctcgatagaggaaatgagaaaggttgtttgtgaccagaagtttcgaccaagtatcccaaaccagtggcaaagttgtgaagcactccgagtcatggggagaataatgcgtgagtgttggtatgccaacggagcggcccgcctaactgctcttcgtattaagaagactatatctcaactttgtgtcaaagaagactgcaaagcctaatgatgataattatgttaaaaagaaatctctcacagctttcttttccattttcccctttatgtgaatgtttttgccattttttttgttctacctcaaagataagacagtacagtatttaagtgcccataaggccgcgtgaaaagataactctaaagttaagcatgggcaggagttgacttcatccaatctctctgttatgtttaattttattttgaaagcaacacctccactcatctttttatttaataagaaagaaatatattacaaaagtataaaataagctctataaaaatgatatagtcattaagtttttattttacttgaaccaagagcacatgagtgaacaggaaaagatgttaaaacttttttttttttctgagacgaaaacatattaattaaacatgcaaactagaccatgctatcttaaatagaaatttaggtcatgcaatctatgtttccccatttttaagttagcaggactttttaaaaataaatattgctctaaattttaatatatcaaacatgtgaaagtggagctgctcagtggaagatgtgagatcggtgtcccacgtgcttggtctccccttctgctgttctccttcataatccactactgcagcagtcgctgaaccactaaacttgttcctttcctttgcaaaagacatacctgatatcctgagacgctgagaaatgtcccaaagtcacacagctaatggcagaactggcactaggtccacatcttgtgataatgagcactgtagagtcaactagcttcctacttttccttgaatagtgcttttctccgtatgcaatcttttattatgatatttgtggtttagtcatgcagaaggcatattattttgcagaatcatgatggacctgcatgaaatctcagaaccatatctgttgacatttttttctcatagaaatatcatggttatcccattcgttaatgagtattaatgttttctgaacacttccaaagattaatcaaacataaatattcattgtctgaaaatatctttaagatacaattcagaggtccctatttcctttgtacatatacacttagaaagaaaagacagaagaggaagaggaaagaaggaaatattttgagaatatattgagaagaattaagaaaactcttcaatgaagtgtaacaaccaaaccctacagagggtatgagaaacagcaaatacatattcctctaccctttcacaatgagcgagtgagtacagaagaatgctcatgatagttccgccttcattctactttctgtggacacagagtaatgaatatttaatgggacgttaaatatgcccttcaaatctataatgctattttggtaaaggaaatttaacatgatgtcttttattctcctaaaacatcttttgtcaaactccattccatagaactttcttctgctgagatgatccaagaccaaagtgttctttgatattgcttagaaagtgatagtacatgttagcatataatgtattttgaagaatgaaataaatgctattgataacagtaaaaacaaaaaacaaaacaaaacaaaaaaccaaaactaataccagtaaagaaatgctacttgaattttttttttaaactggattgctcagattacctgatcgtggtggaacccttttattaagaggaggagaaactttttactatcccatatttaactgttctataaagcaaagcacagcttgggtaatagtgttctgaaggatatacttctgtattttctcatagaatacagtttagtgattatgcttcatttcactatgaaaatatgttactgaatatatcttcattttactgagctgaaataaggaaggcaaaacactgacagctatggaatttgcgtgtacttccatacttgttaatgctctcatccacttattaaataatcatagagtacccatatcttgcttgccacaatatagggtacaagagggaatacaaagatagataggtcctgccctcagggattttaaagtctaatttgggaatgtgaatagggatgtgagtgtgtgggggaagaaaataaattgacagataaaatatgaagtgggatgtcttgagttctgcatgacagtgggtttctaggataggtctgaaaatcgctttcatttgcaacgcatttagaaagtagctttatttggatattacagacaatctaaatatatcatcagtttttaaaagtgcctatgtgaagtgattttttaaaaagagcctatgtaaaggggtaatcttgcttatgcttgttactaatttctcatagattgttgttctgcatatataagaatgaaattatttatttactatagttgtacgtgcctcaaataaacaagaatgatatttcctgttttatttacttatgttgggtaaatatgcttattgaatttttaagagaggattttttaacatctccattcttcttgtcattatgttttgtagcttatttgagggtgtctaaatataatttcatattttattggttcaactttcactctgaagaaatccgtatgttagtacattttgaggtatttttcttgttcttgtgttggttaactatgactcctagctgaatagtcttatatttcaattacaaaacacatttttaaagaaagggaatagagcagcaaaaatgatgaggaaaatgttaaaagttataatatttcctttactcttaacaggattatatatagaatatgctcacttacaaaaataggatgatgaagtatagagcataaggcaggcttcttgtatatacttatgctgtcaaatgttatattgtttttaatggagtccctttgtgtaatatttatttcatttaaattttgttataagcaaaaaaaaaaaaaaaaaaattcttcttaggttaggttcagagtatcagtgttctttactccttacagatattttggctttggggtataatacaagacttgggaaaacgctattatgaatttttagtactgtataaagtggtgatgggatttaaatgcagcatcactttctgaaaataagagaaacattatttgttgtcagtatttcagcatgaacttgttgccttgtaaattttgcctttaagtttgtaattggtacagattctgttgtatgctttcttctatgtctaaaatatttggcatgtcacatctagaattcttaatttatgttctgacttgagagttaagtgaaacatgactgtcgtgcactattttaggcatagcacttgcttttcatctttatactttcaattaactttgcattttaaatttccatgattgtatgaaaatagtaacctggttgcagtatctgaaaaaattaaaattagcttttatttaaaaatgaaaatctacaatagattcattaggttagaagttccacagtaatttattattttattacagctactattgtagaattattaataaaataaaacaaaactacttctattttcctggaattttgccaccatgtgactcattggggcagagaaaactcagggttatctttgagtctgcgcaaaagtaccaaggaacctgcttagcaaatcatctgaaaacagggagttgatgtttgccattatacaaagtttgagtaaacaacttaaaattgcttgttagggcatagtctttgattgaaataagtatgagagtgtatttggctaaataaatgtatttaaaatatagaaattttgtttcccactggaaaattaagaaaataacagtactaaatgaataaaagctggcagttgatgtcttcaataatcattcctttaaataaattcacaaacacattattacaagctacttaggaatgtttagtatgagtatcttaaaatggcaccattgcggttttcgaagatattttaagcatcttttgtgaaacataccatttctgtttgacaatgcttagttctagctctgcgtgctaatacctacatggagtttttctgctattttagtgaaaacagtaattgttttatcttgagagctgcttctaaataacaagtcaattggaatataagtttttaaaaaacattaatattaagtagaatttttataatatgggcatttttcaaaacattttaatgaaaatatatagatatttgactttcttttttccatctagccttgctttatatttcattatttttctcactttttttcttaatattccctcactatctttcaacattatcattagtttctaattaaaaaaataactattatttaacttaaccatctggaatttagccttctaatgaaagagaatcccttagtactctcagagattatataacttgattccagttttgtttcgatgatgagaccaaggatcagagattaaatgactactagttattagcagaactctcatgaaagccaggtggtgacacccagcactgttccttgccatatccccaacttttactgattaaaaattaatttgcatgcatctaaacctaccttgaatgcacactaacgtaatgtgccattcaatgatgatgataaaatcccacttcttgtgtttctactaaaataatttactcactcagggtggggtcagtgagaaaaactaaactaggcaaagagagagttgtagaatggttgtcaagctaagtaggcaaccactggggtgctgatcaaattaatggataaaatttagggacagagagagtatagaatttctcagtgccagtaataattagaaaagcttcctgacatcccccaccctttctgtaaggattgttctttctctttgtactttggaatgggggtgaaaggtgatttaatagctgaatttgggactatgtccagtggtgtattatctgacttttctctctttctctttttttttcccccgtcagtttctcattagtttgtctttggcattcatcttcttttagtgcattaaaaaatgtttggcagatctcatcaatcccaagtcagtctataattcctgtaattctttagttatcttttaatctgtccaaactgctacacaatgcacttcttaacaagattttaagttccccactgatgtgtaagaggtttcacctcgtaacttctccagtaatccttcatttggcactatagagtatttgttaatggcagagatgattttttttttccaaaacctaaaaagactagctgttaattgtattctaacttttagctaacatgtaaagaatgtctacttttgctttaatgctaaatcccacttgagaaatagtgactgggaaagacaatttgaaatatatgccccataatgtggttgctaaatttatttctgctgttccataccattgctttgttttgcttttgacatctcttaaaactaagccattatgctattagtttggaatataatactacagcaaaattaggtaacaatctctattttaaaattcccctaacaataatagaactgccagcatacttttctctttcagttgtagatgaatacatttgagagaagagctctatttcatcctagatttcaatattttcagatgtgactgtatttcctgatcattggtccaggttatcctaaaagaaatttttctctccagacctaacagttttaactgcaagagtttactgtgggttacattaatctgaattttaatagggccactgagaatctgagtgctttaggggattacccttatacccactgccatcacatccagtcgggcctgttgtgctctatacaaatcttcccagctgaggggcagatgggggctaaaatccaactgcaattggctcccagacataattttatattttacagaaaagcatcttattggcttatatatgtttaaagaatggtctggcttatacatcttcagaaaatgagaattaaaaagccaaaataattcttgacgtctgcaaattgaacatagaacttagaagaagtaatactttatcttttcatcctggcattcctgagagaaaagaaattgtatgtttatcgtgttggtttaatttttcaacccagacaatctgcagcaaggcacatggaccctaattttgacatcttacacacagttttcattctatgcatggagctaattactgactttgcctgtaaagagaggattgtgtgcctaaattttgtctaggaaatgcaagcatagaatgaaatttactaatatttctatttcttccataggctaaataatagcaactatttttgaagacccagccctttttttcctctttatacaaaataagagtatctgagccaaaatattaaattctagttcatttctgcaatgactagtgtcatgctcatgtactcttctaattctagactggagaagattattcaaacttgatctgtgtttcaggtttttaaatgtcctaaaaacagaaaattagattcagatctcaaaaaaggaattttggattgactttcaaagtactaatactaattatacttttcttttggtagcgtgactcttcttatacctaagaacatattacaaatgtcaaaaccattgcagtttgacattgcaaaacatgccttgaactcttgaactactgtgaaaagaatcaccgttgtaaagactttttgtaagctagctgatactcttaagtatgtaaaaagattgtctttcagccgacaggcccaaaggaatgtatataaggaaggaatatgaaaaaataaattaggttttaaaataagaattgggcaataaactgtatcgaaaatatgtagatggattttagtagttgtaatttaaatgtcgaaggtgaagagaatttcaaattccaaagagaagtgaatgatattcagatgtttcattaatttctagtctgtgaaaatatgcattttatagtaaatgtatagacttattttatttagaaataatagtgttttagaatttattaaaaactcagtgatagcctttataccaaaatgtttaactttaccaacagcaagtcataaaagtatttattttaaagctttttaatattatcgcgtaactttcatctgtcttcagatgtaaataattatctgcctaaatgttatatttttatgtatgcattttctgaaaatgtattgttttgtaaagtgggaaagataataaatcaagcacttgcacttgtttctgtgaagcatatagaactctattttaaataaaggaagatgtgtcgta

SEQ ID NO: 26 - DNA, 9296 bp, Macaca fascicularis
  source 1..9296: mol_type = genomic DNA
tacgacacatcttcctttatttaaaatagagttctatatgcttcacagaaacaagtgcaagtgcttgatttattatctttcccactttacaaaacaatacattttcagaaaatgcatacataaaaatataacatttaggcagataattatttacatctgaagacagatgaaagttacgcgataatattaaaaagctttaaaataaatacttttatgacttgctgttggtaaagttaaacattttggtataaaggctatcactgagtttttaataaattctaaaacactattatttctaaataaaataagtctatacatttactataaaatgcatattttcacagactagaaattaatgaaacatctgaatatcattcacttctctttggaatttgaaattctcttcaccttcgacatttaaattacaactactaaaatccatctacatattttcgatacagtttattgcccaattcttattttaaaacctaatttattttttcatattccttccttatatacattcctttgggcctgtcggctgaaagacaatctttttacatacttaagagtatcagctagcttacaaaaagtctttacaacggtgattcttttcacagtagttcaagagttcaaggcatgttttgcaatgtcaaactgcaatggttttgacatttgtaatatgttcttaggtataagaagagtcacgctaccaaaagaaaagtataattagtattagtactttgaaagtcaatccaaaattccttttttgagatctgaatctaattttctgtttttaggacatttaaaaacctgaaacacagatcaagtttgaataatcttctccagtctagaattagaagagtacatgagcatgacactagtcattgcagaaatgaactagaatttaatattttggctcagatactcttattttgtataaagaggaaaaaaagggctgggtcttcaaaaatagttgctattatttagcctatggaagaaatagaaatattagtaaatttcattctatgcttgcatttcctagacaaaatttaggcacacaatcctctctttacaggcaaagtcagtaattagctccatgcatagaatgaaaactgtgtgtaagatgtcaaaattagggtccatgtgccttgctgcagattgtctgggttgaaaaattaaaccaacacgataaacatacaatttcttttctctcaggaatgccaggatgaaaagataaagtattacttcttctaagttctatgttcaatttgcagacgtcaagaattattttggctttttaattctcattttctgaagatgtataagccagaccattctttaaacatatataagccaataagatgcttttctgtaaaatataaaattatgtctgggagccaattgcagttggattttagcccccatctgcccctcagctgggaagatttgtatagagcacaacaggcccgactggatgtgatggcagtgggtataagggtaatcccctaaagcactcagattctcagtggccctattaaaattcagattaatgtaacccacagtaaactcttgcagttaaaactgttaggtctggagagaaaaatttcttttaggataacctggaccaatgatcaggaaatacagtcacatctgaaaatattgaaatctaggatgaaatagagctcttctctcaaatgtattcatctacaactgaaagagaaaagtatgctggcagttctattattgttaggggaattttaaaatagagattgttacctaattttgctgtagtattatattccaaactaatagcataatggcttagttttaagagatgtcaaaagcaaaacaaagcaatggtatggaacagcagaaataaatttagcaaccacattatggggcatatatttcaaattgtctttcccagtcactatttctcaagtgggatttagcattaaagcaaaagtagacattctttacatgttagctaaaagttagaatacaattaacagctagtctttttaggttttggaaaaaaaaaatcatctctgccattaacaaatactctatagtgccaaatgaaggattactggagaagttacgaggtgaaacctcttacacatcagtggggaacttaaaatcttgttaagaagtgcattgtgtagcagtttggacagattaaaagataactaaagaattacaggaattatagactgacttgggattgatgagatctgccaaacattttttaatgcactaaaagaagatgaatgccaaagacaaactaatgagaaactgacgggggaaaaaaaaagagaaagagagaaaagtcagataatacaccactggacatagtcccaaattcagctattaaatcacctttcacccccattccaaagtacaaagagaaagaacaatccttacagaaagggtgggggatgtcaggaagcttttctaattattactggcactgagaaattctatactctctctgtccctaaattttatccattaatttgatcagcaccccagtggttgcctacttagcttgacaaccattctacaactctctctttgcctagtttagtttttctcactgaccccaccctgagtgagtaaattattttagtagaaacacaagaagtgggattttatcatcatcattgaatggcacattacgttagtgtgcattcaaggtaggtttagatgcatgcaaattaatttttaatcagtaaaagttggggatatggcaaggaacagtgctgggtgtcaccacctggctttcatgagagttctgctaataactagtagtcatttaatctctgatccttggtctcatcatcgaaacaaaactggaatcaagttatataatctctgagagtactaagggattctctttcattagaaggctaaattccagatggttaagttaaataatagttatttttttaattagaaactaatgataatgttgaaagatagtgagggaatattaagaaaaaaagtgagaaaaataatgaaatataaagcaaggctagatggaaaaaagaaagtcaaatatctatatattttcattaaaatgttttgaaaaatgcccatattataaaaattctacttaatattaatgttttttaaaaacttatattccaattgacttgttatttagaagcagctctcaagataaaacaattactgttttcactaaaatagcagaaaaactccatgtaggtattagcacgcagagctagaactaagcattgtcaaacagaaatggtatgtttcacaaaagatgcttaaaatatcttcgaaaaccgcaatggtgccattttaagatactcatactaaacattcctaagtagcttgtaataatgtgtttgtgaatttatttaaaggaatgattattgaagacatcaactgccagcttttattcatttagtactgttattttcttaattttccagtgggaaacaaaatttctatattttaaatacatttatttagccaaatacactctcatacttatttcaatcaaagactatgccctaacaagcaattttaagttgtttactcaaactttgtataatggcaaacatcaactccctgttttcagatgatttgctaagcaggttccttggtacttttgcgcagactcaaagataaccctgagttttctctgccccaatgagtcacatggtggcaaaattccaggaaaatagaagtagttttgttttattttattaataattctacaatagtagctgtaataaaataataaattactgtggaacttctaacctaatgaatctattgtagattttcatttttaaataaaagctaattttaattttttcagatactgcaaccaggttactattttcatacaatcatggaaatttaaaatgcaaagttaattgaaagtataaagatgaaaagcaagtgctatgcctaaaatagtgcacgacagtcatgtttcacttaactctcaagtcagaacataaattaagaattctagatgtgacatgccaaatattttagacatagaagaaagcatacaacagaatctgtaccaattacaaacttaaaggcaaaatttacaaggcaacaagttcatgctgaaatactgacaacaaataatgtttctcttattttcagaaagtgatgctgcatttaaatcccatcaccactttatacagtactaaaaattcataatagcgttttcccaagtcttgtattataccccaaagccaaaatatctgtaaggagtaaagaacactgatactctgaacctaacctaagaagaatttttttttttttttttttgcttataacaaaatttaaatgaaataaatattacacaaagggactccattaaaaacaatataacatttgacagcataagtatatacaagaagcctgccttatgctctatacttcatcatcctatttttgtaagtgagcatattctatatataatcctgttaagagtaaaggaaatattataacttttaacattttcctcatcatttttgctgctctattccctttctttaaaaatgtgttttgtaattgaaatataagactattcagctaggagtcatagttaaccaacacaagaacaagaaaaatacctcaaaatgtactaacatacggatttcttcagagtgaaagttgaaccaataaaatatgaaattatatttagacaccctcaaataagctacaaaacataatgacaagaagaatggagatgttaaaaaatcctctcttaaaaattcaataagcatatttacccaacataagtaaataaaacaggaaatatcattcttgtttatttgaggcacgtacaactatagtaaataaataatttcattcttatatatgcagaacaacaatctatgagaaattagtaacaagcataagcaagattacccctttacataggctctttttaaaaaatcacttcacataggcacttttaaaaactgatgatatatttagattgtctgtaatatccaaataaagctactttctaaatgcgttgcaaatgaaagcgattttcagacctatcctagaaacccactgtcatgcagaactcaagacatcccacttcatattttatctgtcaatttattttcttcccccacacactcacatccctattcacattcccaaattagactttaaaatccctgagggcaggacctatctatctttgtattccctcttgtaccctatattgtggcaagcaagatatgggtactctatgattatttaataagtggatgagagcattaacaagtatggaagtacacgcaaattccatagctgtcagtgttttgccttccttatttcagctcagtaaaatgaagatatattcagtaacatattttcatagtgaaatgaagcataatcactaaactgtattctatgagaaaatacagaagtatatccttcagaacactattacccaagctgtgctttgctttatagaacagttaaatatgggatagtaaaaagtttctcctcctcttaataaaagggttccaccacgatcaggtaatctgagcaatccagtttaaaaaaaaaattcaagtagcatttctttactggtattagttttggttttttgttttgttttgttttttgtttttactgttatcaatagcatttatttcattcttcaaaatacattatatgctaacatgtactatcactttctaagcaatatcaaagaacactttggtcttggatcatctcagcagaagaaagttctatggaatggagtttgacaaaagatgttttaggagaataaaagacatcatgttaaatttcctttaccaaaatagcattatagatttgaagggcatatttaacgtcccattaaatattcattactctgtgtccacagaaagtagaatgaaggcggaactatcatgagcattcttctgtactcactcgctcattgtgaaagggtagaggaatatgtatttgctgtttctcataccctctgtagggtttggttgttacacttcattgaagagttttcttaattcttctcaatatattctcaaaatatttccttctttcctcttcctcttctgtcttttctttctaagtgtatatgtacaaaggaaatagggacctctgaattgtatcttaaagatattttcagacaatgaatatttatgtttgattaatctttggaagtgttcagaaaacattaatactcattaacgaatgggataaccatgatatttctatgagaaaaaaatgtcaacagatatggttctgagatttcatgcaggtccatcatgattctgcaaaataatatgccttctgcatgactaaaccacaaatatcataataaaagattgcatacggagaaaagcactattcaaggaaaagtaggaagctagttgactctacagtgctcattatcacaagatgtggacctagtgccagttctgccattagctgtgtgactttgggacatttctcagcgtctcaggatatcaggtatgtcttttgcaaaggaaaggaacaagtttagtggttcagcgactgctgcagtagtggattatgaaggagaacagcagaaggggagaccaagcacgtgggacaccgatctcacatcttccactgagcagctccactttcacatgtttgatatattaaaatttagagcaatatttatttttaaaaagtcctgctaacttaaaaatggggaaacatagattgcatgacctaaatttctatttaagatagcatggtctagtttgcatgtttaattaatatgttttcgtctcagaaaaaaaaaaaagttttaacatcttttcctgttcactcatgtgctcttggttcaagtaaaataaaaacttaatgactatatcatttttatagagcttattttatacttttgtaatatatttctttcttattaaataaaaagatgagtggaggtgttgctttcaaaataaaattaaacataacagagagattggatgaagtcaactcctgcccatgcttaactttagagttatcttttcacgcggccttatgggcacttaaatactgtactgtcttatctttgaggtagaacaaaaaaaatggcaaaaacattcacataaaggggaaaatggaaaagaaagctgtgagagatttctttttaacataattatcatcattaggctttgcagtcttctttgacacaaagttgagatatagtcttcttaatacgaagagcagttaggcgggccgctccgttggcataccaacactcacgcattattctccccatgactcggagtgcttcacaactttgccactggtttgggatacttggtcgaaacttctggtcacaaacaacctttctcatttcctctatcgagggatctgaaggcaccatgtcataataaggcaattggtactcctcaacaattcctccgaccgaacacctccgggctatttcccagtaaaccagaccaacagaatagatgtcagctcgtttgaaggactcaaagatattcacattcattgtatcatcaagcatttcaggagccatatacctcttcgttcccactttaggattctgaggtatgtcgatagtgttcagtattgaatcatgcttcacagccaaccctaagtccgctatggcacaagtttcacattttttcactaagatattctttgattttatgtctcgatgagcaatagcaggtttaccttgtgtcccaacaatctccatatgaaggtgtgccagaccactagcaattgagagggccagcttgatcattccagccaccgtcactatatttctattcaaatagtcatataaggagccctgttcatgatattcagataccagccaaagttgagtccaggttccattatctttgttgtcagcagcaatgaaaccaaggatgttttcatgtcgcagcatgaccgtctggtaaatttctgcctcacgaaaccaagatctttcatctctggaggagaatattttcacagccacatcttccccacaccatcttccatgccacacctcaccaaatctaccttttcctactatttcctgaagcacaatcgtccttgcaattgtcctttgaaccaacagaggtagaccagagccagatccagaggcagttacatcataaatcagatctttcagggtttttccagcatttaccagattgcactcagagagtggttcctccacattcggtctctttttcttcctgtaggagcactgtcgaccctggcatgcccatattgtcagcatcgcagctatggacaggaggcaaacaggcacagtaataatgatggccagctccatgggtccaagttttggggcatttggtgatgctgttggaaggtgcagtgttatgttgttgcaaaaatctgtgaagcagcattcggttttggtaacattgttggaactatgacagaagacttgagcattcaattctggaagggagacacaggatttgatcacctgttcttttccattggttagcatgactgatgcccaacatgctccttctgtttggcaggtaaagtttgaagaatcacacaaaagacatacacacttcagtcctgccgagagctcggcggccgcggcgagcagcaggagagcctggcggagcgctgagctgagcgcccgggtcatcgccaccaggcggccgcgccggggctgcgaggccccagagcagagcgaggcagccggggcagcacggcccgctttgaagttcccgggccgcgggaggggagcgcggcaccgacacccttttgaagtgcgcggttggctctagtcagtgtgggcgcccccctccccggccgcccccatcccacgccccccgcggctggcggtgcgcggcgctcctgccactggccccgcagccgggcggggagggggtggtggggcgagcggcagagcccgcccctgccgcgcctccgccccctgcgccctctcgcagccgcccgggcctgctgctgcagggcaggcgggcaaaggcggccctgtacccagcggtgagagcccagagctggggcgaagaaagaggggaggtggggaagcgtcgcggaacctccgggactagatactccggaagggggctccgcacgagagggaaagccccactgagactttagggaaacttcaactacgcggcgattgcaccctggtgatccgctctatagcctcccgcagaagagccagccccctagctctcctgacgtttattgtccagggtccttaagtccaaccaggctgcgctgtgagagccccgcgggctttctac

SEQ ID NO: 27 - DNA, 9060 bp, Macaca fascicularis
  source 1..9060: mol_type = genomic DNA
gcgagtagaaagcccgcggggctctcacagcgcagcctggttggacttaaggaccctggacaataaacgtcaggagagctagggggctggctcttctgcgggaggctatagagcggatcaccagggtgcaatcgccgcgtagttgaagtttccctaaagtctcagtggggctttccctctcgtgcggagcccccttccggagtatctagtcccggaggttccgcgacgcttccccacctcccctctttcttcgccccagctctgggctctcaccgctgggtacagggccgcctttgcccgcctgccctgcagcagcaggcccgggcggctgcgagagggcgcagggggcggaggcgcggcaggggcgggctctgccgctcgccccaccaccccctccccgcccggctgcggggccagtggcaggagcgccgcgcaccgccagccgcggggggcgtgggatgggggcggccggggaggggggcgcccacactgactagagccaaccgcgcacttcaaaagggtgtcggtgccgcgctcccctcccgcggcccgggaacttcaaagcgggccgtgctgccccggctgcctcgctctgctctggggcctcgcagccccggcgcggccgcctggtggcgatgacccgggcgctcagctcagcgctccgccaggctctcctgctgctcgccgcggccgccgagctctcggcaggactgaagtgtgtatgtcttttgtgtgattcttcaaactttacctgccaaacagaaggagcatgttgggcatcagtcatgctaaccaatggaaaagaacaggtgatcaaatcctgtgtctcccttccagaattgaatgctcaagtcttctgtcatagttccaacaatgttaccaaaaccgaatgctgcttcacagatttttgcaacaacataacactgcaccttccaacaggtctacctctgttggttcaaaggacaattgcaaggacgattgtgcttcaggaaatagtaggaaaaggtagatttggtgaggtgtggcatggaagatggtgtggggaagatgtggctgtgaaaatattctcctccagagatgaaagatcttggtttcgtgaggcagaaatttaccagacggtcatgctgcgacatgaaaacatccttggtttcattgctgctgacaacaaagataatggaacctggactcaactttggctggtatctgaatatcatgaacagggctccttatatgactatttgaatagaaatatagtgacggtggctggaatgatcaagctggccctctcaattgctagtggtctggcacaccttcatatggagattgttgggacacaaggtaaacctgctattgctcatcgagacataaaatcaaagaatatcttagtgaaaaaatgtgaaacttgtgccatagcggacttagggttggctgtgaagcatgattcaatactgaacactatcgacatacctcagaatcctaaagtgggaacgaagaggtatatggctcctgaaatgcttgatgatacaatgaatgtgaatatctttgagtccttcaaacgagctgacatctattctgttggtctggtttactgggaaatagcccggaggtgttcggtcggaggaattgttgaggagtaccaattgccttattatgacatggtgccttcagatccctcgatagaggaaatgagaaaggttgtttgtgaccagaagtttcgaccaagtatcccaaaccagtggcaaagttgtgaagcactccgagtcatggggagaataatgcgtgagtgttggtatgccaacggagcggcccgcctaactgctcttcgtattaagaagactatatctcaactttgtgtcaaagaagactgcaaagcctaatgatgataattatgttaaaaagaaatctctcacagctttcttttccattttcccctttatgtgaatgtttttgccattttttttgttctacctcaaagataagacagtacagtatttaagtgcccataaggccgcgtgaaaagataactctaaagttaagcatgggcaggagttgacttcatccaatctctctgttatgtttaattttattttgaaagcaacacctccactcatctttttatttaataagaaagaaatatattacaaaagtataaaataagctctataaaaatgatatagtcattaagtttttattttacttgaaccaagagcacatgagtgaacaggaaaagatgttaaaacttttttttttttctgagacgaaaacatattaattaaacatgcaaactagaccatgctatcttaaatagaaatttaggtcatgcaatctatgtttccccatttttaagttagcaggactttttaaaaataaatattgctctaaattttaatatatcaaacatgtgaaagtggagctgctcagtggaagatgtgagatcggtgtcccacgtgcttggtctccccttctgctgttctccttcataatccactactgcagcagtcgctgaaccactaaacttgttcctttcctttgcaaaagacatacctgatatcctgagacgctgagaaatgtcccaaagtcacacagctaatggcagaactggcactaggtccacatcttgtgataatgagcactgtagagtcaactagcttcctacttttccttgaatagtgcttttctccgtatgcaatcttttattatgatatttgtggtttagtcatgcagaaggcatattattttgcagaatcatgatggacctgcatgaaatctcagaaccatatctgttgacatttttttctcatagaaatatcatggttatcccattcgttaatgagtattaatgttttctgaacacttccaaagattaatcaaacataaatattcattgtctgaaaatatctttaagatacaattcagaggtccctatttcctttgtacatatacacttagaaagaaaagacagaagaggaagaggaaagaaggaaatattttgagaatatattgagaagaattaagaaaactcttcaatgaagtgtaacaaccaaaccctacagagggtatgagaaacagcaaatacatattcctctaccctttcacaatgagcgagtgagtacagaagaatgctcatgatagttccgccttcattctactttctgtggacacagagtaatgaatatttaatgggacgttaaatatgcccttcaaatctataatgctattttggtaaaggaaatttaacatgatgtcttttattctcctaaaacatcttttgtcaaactccattccatagaactttcttctgctgagatgatccaagaccaaagtgttctttgatattgcttagaaagtgatagtacatgttagcatataatgtattttgaagaatgaaataaatgctattgataacagtaaaaacaaaaaacaaaacaaaacaaaaaaccaaaactaataccagtaaagaaatgctacttgaattttttttttaaactggattgctcagattacctgatcgtggtggaacccttttattaagaggaggagaaactttttactatcccatatttaactgttctataaagcaaagcacagcttgggtaatagtgttctgaaggatatacttctgtattttctcatagaatacagtttagtgattatgcttcatttcactatgaaaatatgttactgaatatatcttcattttactgagctgaaataaggaaggcaaaacactgacagctatggaatttgcgtgtacttccatacttgttaatgctctcatccacttattaaataatcatagagtacccatatcttgcttgccacaatatagggtacaagagggaatacaaagatagataggtcctgccctcagggattttaaagtctaatttgggaatgtgaatagggatgtgagtgtgtgggggaagaaaataaattgacagataaaatatgaagtgggatgtcttgagttctgcatgacagtgggtttctaggataggtctgaaaatcgctttcatttgcaacgcatttagaaagtagctttatttggatattacagacaatctaaatatatcatcagtttttaaaagtgcctatgtgaagtgattttttaaaaagagcctatgtaaaggggtaatcttgcttatgcttgttactaatttctcatagattgttgttctgcatatataagaatgaaattatttatttactatagttgtacgtgcctcaaataaacaagaatgatatttcctgttttatttacttatgttgggtaaatatgcttattgaatttttaagagaggattttttaacatctccattcttcttgtcattatgttttgtagcttatttgagggtgtctaaatataatttcatattttattggttcaactttcactctgaagaaatccgtatgttagtacattttgaggtatttttcttgttcttgtgttggttaactatgactcctagctgaatagtcttatatttcaattacaaaacacatttttaaagaaagggaatagagcagcaaaaatgatgaggaaaatgttaaaagttataatatttcctttactcttaacaggattatatatagaatatgctcacttacaaaaataggatgatgaagtatagagcataaggcaggcttcttgtatatacttatgctgtcaaatgttatattgtttttaatggagtccctttgtgtaatatttatttcatttaaattttgttataagcaaaaaaaaaaaaaaaaaaattcttcttaggttaggttcagagtatcagtgttctttactccttacagatattttggctttggggtataatacaagacttgggaaaacgctattatgaatttttagtactgtataaagtggtgatgggatttaaatgcagcatcactttctgaaaataagagaaacattatttgttgtcagtatttcagcatgaacttgttgccttgtaaattttgcctttaagtttgtaattggtacagattctgttgtatgctttcttctatgtctaaaatatttggcatgtcacatctagaattcttaatttatgttctgacttgagagttaagtgaaacatgactgtcgtgcactattttaggcatagcacttgcttttcatctttatactttcaattaactttgcattttaaatttccatgattgtatgaaaatagtaacctggttgcagtatctgaaaaaattaaaattagcttttatttaaaaatgaaaatctacaatagattcattaggttagaagttccacagtaatttattattttattacagctactattgtagaattattaataaaataaaacaaaactacttctattttcctggaattttgccaccatgtgactcattggggcagagaaaactcagggttatctttgagtctgcgcaaaagtaccaaggaacctgcttagcaaatcatctgaaaacagggagttgatgtttgccattatacaaagtttgagtaaacaacttaaaattgcttgttagggcatagtctttgattgaaataagtatgagagtgtatttggctaaataaatgtatttaaaatatagaaattttgtttcccactggaaaattaagaaaataacagtactaaatgaataaaagctggcagttgatgtcttcaataatcattcctttaaataaattcacaaacacattattacaagctacttaggaatgtttagtatgagtatcttaaaatggcaccattgcggttttcgaagatattttaagcatcttttgtgaaacataccatttctgtttgacaatgcttagttctagctctgcgtgctaatacctacatggagtttttctgctattttagtgaaaacagtaattgttttatcttgagagctgcttctaaataacaagtcaattggaatataagtttttaaaaaacattaatattaagtagaatttttataatatgggcatttttcaaaacattttaatgaaaatatatagatatttgactttcttttttccatctagccttgctttatatttcattatttttctcactttttttcttaatattccctcactatctttcaacattatcattagtttctaattaaaaaaataactattatttaacttaaccatctggaatttagccttctaatgaaagagaatcccttagtactctcagagattatataacttgattccagttttgtttcgatgatgagaccaaggatcagagattaaatgactactagttattagcagaactctcatgaaagccaggtggtgacacccagcactgttccttgccatatccccaacttttactgattaaaaattaatttgcatgcatctaaacctaccttgaatgcacactaacgtaatgtgccattcaatgatgatgataaaatcccacttcttgtgtttctactaaaataatttactcactcagggtggggtcagtgagaaaaactaaactaggcaaagagagagttgtagaatggttgtcaagctaagtaggcaaccactggggtgctgatcaaattaatggataaaatttagggacagagagagtatagaatttctcagtgccagtaataattagaaaagcttcctgacatcccccaccctttctgtaaggattgttctttctctttgtactttggaatgggggtgaaaggtgatttaatagctgaatttgggactatgtccagtggtgtattatctgacttttctctctttctctttttttttcccccgtcagtttctcattagtttgtctttggcattcatcttcttttagtgcattaaaaaatgtttggcagatctcatcaatcccaagtcagtctataattcctgtaattctttagttatcttttaatctgtccaaactgctacacaatgcacttcttaacaagattttaagttccccactgatgtgtaagaggtttcacctcgtaacttctccagtaatccttcatttggcactatagagtatttgttaatggcagagatgattttttttttccaaaacctaaaaagactagctgttaattgtattctaacttttagctaacatgtaaagaatgtctacttttgctttaatgctaaatcccacttgagaaatagtgactgggaaagacaatttgaaatatatgccccataatgtggttgctaaatttatttctgctgttccataccattgctttgttttgcttttgacatctcttaaaactaagccattatgctattagtttggaatataatactacagcaaaattaggtaacaatctctattttaaaattcccctaacaataatagaactgccagcatacttttctctttcagttgtagatgaatacatttgagagaagagctctatttcatcctagatttcaatattttcagatgtgactgtatttcctgatcattggtccaggttatcctaaaagaaatttttctctccagacctaacagttttaactgcaagagtttactgtgggttacattaatctgaattttaatagggccactgagaatctgagtgctttaggggattacccttatacccactgccatcacatccagtcgggcctgttgtgctctatacaaatcttcccagctgaggggcagatgggggctaaaatccaactgcaattggctcccagacataattttatattttacagaaaagcatcttattggcttatatatgtttaaagaatggtctggcttatacatcttcagaaaatgagaattaaaaagccaaaataattcttgacgtctgcaaattgaacatagaacttagaagaagtaatactttatcttttcatcctggcattcctgagagaaaagaaattgtatgtttatcgtgttggtttaatttttcaacccagacaatctgcagcaaggcacatggaccctaattttgacatcttacacacagttttcattctatgcatggagctaattactgactttgcctgtaaagagaggattgtgtgcctaaattttgtctaggaaatgcaagcatagaatgaaatttactaatatttctatttcttccataggctaaataatagcaactatttttgaagacccagccctttttttcctctttatacaaaataagagtatctgagccaaaatattaaattctagttcatttctgcaatgactagtgtcatgctcatgtactcttctaattctagactggagaagattattcaaacttgatctgtgtttcaggtttttaaatgtcctaaaaacagaaaattagattcagatctcaaaaaaggaattttggattgactttcaaagtactaatactaattatacttttcttttggtagcgtgactcttcttatacctaagaacatattacaaatgtcaaaaccattgcagtttgacattgcaaaacatgccttgaactcttgaactactgtgaaaagaatcaccgttgtaaagactttttgtaagctagctgatactcttaagtatgtaaaaagattgtctttcagccgacaggcccaaaggaatgtatataaggaaggaatatgaaaaaataaattaggttttaaaataagaattgggcaataaactgtatcgaaaatatgtagatggattttagtagttgtaatttaaatgtcgaaggtgaagagaatttcaaattccaaagagaagtgaatgatattcagatgtttcattaatttctagtctgtgaaaatatgcattttatagtaaatgtatagacttattttatttagaaataatagtgttttagaatttattaaaaactcagtgatagcctttataccaaaatgtttaactttaccaacagcaagtcataaaagtatttattttaaagctttttaatattatcgcgtaactttcatctgtcttcagatgtaaataattatctgcctaaatgttatatttttatgtatgcattttctgaaaatgtattgttttgtaaagtgggaaagataataaatcaagcacttgcacttgtttctgtgaagcatatagaactctattttaaataaaggaagatgtgtcgta

SEQ ID NO: 28 - DNA, 9060 bp, Macaca fascicularis
  source 1..9060: mol_type = genomic DNA
tacgacacatcttcctttatttaaaatagagttctatatgcttcacagaaacaagtgcaagtgcttgatttattatctttcccactttacaaaacaatacattttcagaaaatgcatacataaaaatataacatttaggcagataattatttacatctgaagacagatgaaagttacgcgataatattaaaaagctttaaaataaatacttttatgacttgctgttggtaaagttaaacattttggtataaaggctatcactgagtttttaataaattctaaaacactattatttctaaataaaataagtctatacatttactataaaatgcatattttcacagactagaaattaatgaaacatctgaatatcattcacttctctttggaatttgaaattctcttcaccttcgacatttaaattacaactactaaaatccatctacatattttcgatacagtttattgcccaattcttattttaaaacctaatttattttttcatattccttccttatatacattcctttgggcctgtcggctgaaagacaatctttttacatacttaagagtatcagctagcttacaaaaagtctttacaacggtgattcttttcacagtagttcaagagttcaaggcatgttttgcaatgtcaaactgcaatggttttgacatttgtaatatgttcttaggtataagaagagtcacgctaccaaaagaaaagtataattagtattagtactttgaaagtcaatccaaaattccttttttgagatctgaatctaattttctgtttttaggacatttaaaaacctgaaacacagatcaagtttgaataatcttctccagtctagaattagaagagtacatgagcatgacactagtcattgcagaaatgaactagaatttaatattttggctcagatactcttattttgtataaagaggaaaaaaagggctgggtcttcaaaaatagttgctattatttagcctatggaagaaatagaaatattagtaaatttcattctatgcttgcatttcctagacaaaatttaggcacacaatcctctctttacaggcaaagtcagtaattagctccatgcatagaatgaaaactgtgtgtaagatgtcaaaattagggtccatgtgccttgctgcagattgtctgggttgaaaaattaaaccaacacgataaacatacaatttcttttctctcaggaatgccaggatgaaaagataaagtattacttcttctaagttctatgttcaatttgcagacgtcaagaattattttggctttttaattctcattttctgaagatgtataagccagaccattctttaaacatatataagccaataagatgcttttctgtaaaatataaaattatgtctgggagccaattgcagttggattttagcccccatctgcccctcagctgggaagatttgtatagagcacaacaggcccgactggatgtgatggcagtgggtataagggtaatcccctaaagcactcagattctcagtggccctattaaaattcagattaatgtaacccacagtaaactcttgcagttaaaactgttaggtctggagagaaaaatttcttttaggataacctggaccaatgatcaggaaatacagtcacatctgaaaatattgaaatctaggatgaaatagagctcttctctcaaatgtattcatctacaactgaaagagaaaagtatgctggcagttctattattgttaggggaattttaaaatagagattgttacctaattttgctgtagtattatattccaaactaatagcataatggcttagttttaagagatgtcaaaagcaaaacaaagcaatggtatggaacagcagaaataaatttagcaaccacattatggggcatatatttcaaattgtctttcccagtcactatttctcaagtgggatttagcattaaagcaaaagtagacattctttacatgttagctaaaagttagaatacaattaacagctagtctttttaggttttggaaaaaaaaaatcatctctgccattaacaaatactctatagtgccaaatgaaggattactggagaagttacgaggtgaaacctcttacacatcagtggggaacttaaaatcttgttaagaagtgcattgtgtagcagtttggacagattaaaagataactaaagaattacaggaattatagactgacttgggattgatgagatctgccaaacattttttaatgcactaaaagaagatgaatgccaaagacaaactaatgagaaactgacgggggaaaaaaaaagagaaagagagaaaagtcagataatacaccactggacatagtcccaaattcagctattaaatcacctttcacccccattccaaagtacaaagagaaagaacaatccttacagaaagggtgggggatgtcaggaagcttttctaattattactggcactgagaaattctatactctctctgtccctaaattttatccattaatttgatcagcaccccagtggttgcctacttagcttgacaaccattctacaactctctctttgcctagtttagtttttctcactgaccccaccctgagtgagtaaattattttagtagaaacacaagaagtgggattttatcatcatcattgaatggcacattacgttagtgtgcattcaaggtaggtttagatgcatgcaaattaatttttaatcagtaaaagttggggatatggcaaggaacagtgctgggtgtcaccacctggctttcatgagagttctgctaataactagtagtcatttaatctctgatccttggtctcatcatcgaaacaaaactggaatcaagttatataatctctgagagtactaagggattctctttcattagaaggctaaattccagatggttaagttaaataatagttatttttttaattagaaactaatgataatgttgaaagatagtgagggaatattaagaaaaaaagtgagaaaaataatgaaatataaagcaaggctagatggaaaaaagaaagtcaaatatctatatattttcattaaaatgttttgaaaaatgcccatattataaaaattctacttaatattaatgttttttaaaaacttatattccaattgacttgttatttagaagcagctctcaagataaaacaattactgttttcactaaaatagcagaaaaactccatgtaggtattagcacgcagagctagaactaagcattgtcaaacagaaatggtatgtttcacaaaagatgcttaaaatatcttcgaaaaccgcaatggtgccattttaagatactcatactaaacattcctaagtagcttgtaataatgtgtttgtgaatttatttaaaggaatgattattgaagacatcaactgccagcttttattcatttagtactgttattttcttaattttccagtgggaaacaaaatttctatattttaaatacatttatttagccaaatacactctcatacttatttcaatcaaagactatgccctaacaagcaattttaagttgtttactcaaactttgtataatggcaaacatcaactccctgttttcagatgatttgctaagcaggttccttggtacttttgcgcagactcaaagataaccctgagttttctctgccccaatgagtcacatggtggcaaaattccaggaaaatagaagtagttttgttttattttattaataattctacaatagtagctgtaataaaataataaattactgtggaacttctaacctaatgaatctattgtagattttcatttttaaataaaagctaattttaattttttcagatactgcaaccaggttactattttcatacaatcatggaaatttaaaatgcaaagttaattgaaagtataaagatgaaaagcaagtgctatgcctaaaatagtgcacgacagtcatgtttcacttaactctcaagtcagaacataaattaagaattctagatgtgacatgccaaatattttagacatagaagaaagcatacaacagaatctgtaccaattacaaacttaaaggcaaaatttacaaggcaacaagttcatgctgaaatactgacaacaaataatgtttctcttattttcagaaagtgatgctgcatttaaatcccatcaccactttatacagtactaaaaattcataatagcgttttcccaagtcttgtattataccccaaagccaaaatatctgtaaggagtaaagaacactgatactctgaacctaacctaagaagaatttttttttttttttttttgcttataacaaaatttaaatgaaataaatattacacaaagggactccattaaaaacaatataacatttgacagcataagtatatacaagaagcctgccttatgctctatacttcatcatcctatttttgtaagtgagcatattctatatataatcctgttaagagtaaaggaaatattataacttttaacattttcctcatcatttttgctgctctattccctttctttaaaaatgtgttttgtaattgaaatataagactattcagctaggagtcatagttaaccaacacaagaacaagaaaaatacctcaaaatgtactaacatacggatttcttcagagtgaaagttgaaccaataaaatatgaaattatatttagacaccctcaaataagctacaaaacataatgacaagaagaatggagatgttaaaaaatcctctcttaaaaattcaataagcatatttacccaacataagtaaataaaacaggaaatatcattcttgtttatttgaggcacgtacaactatagtaaataaataatttcattcttatatatgcagaacaacaatctatgagaaattagtaacaagcataagcaagattacccctttacataggctctttttaaaaaatcacttcacataggcacttttaaaaactgatgatatatttagattgtctgtaatatccaaataaagctactttctaaatgcgttgcaaatgaaagcgattttcagacctatcctagaaacccactgtcatgcagaactcaagacatcccacttcatattttatctgtcaatttattttcttcccccacacactcacatccctattcacattcccaaattagactttaaaatccctgagggcaggacctatctatctttgtattccctcttgtaccctatattgtggcaagcaagatatgggtactctatgattatttaataagtggatgagagcattaacaagtatggaagtacacgcaaattccatagctgtcagtgttttgccttccttatttcagctcagtaaaatgaagatatattcagtaacatattttcatagtgaaatgaagcataatcactaaactgtattctatgagaaaatacagaagtatatccttcagaacactattacccaagctgtgctttgctttatagaacagttaaatatgggatagtaaaaagtttctcctcctcttaataaaagggttccaccacgatcaggtaatctgagcaatccagtttaaaaaaaaaattcaagtagcatttctttactggtattagttttggttttttgttttgttttgttttttgtttttactgttatcaatagcatttatttcattcttcaaaatacattatatgctaacatgtactatcactttctaagcaatatcaaagaacactttggtcttggatcatctcagcagaagaaagttctatggaatggagtttgacaaaagatgttttaggagaataaaagacatcatgttaaatttcctttaccaaaatagcattatagatttgaagggcatatttaacgtcccattaaatattcattactctgtgtccacagaaagtagaatgaaggcggaactatcatgagcattcttctgtactcactcgctcattgtgaaagggtagaggaatatgtatttgctgtttctcataccctctgtagggtttggttgttacacttcattgaagagttttcttaattcttctcaatatattctcaaaatatttccttctttcctcttcctcttctgtcttttctttctaagtgtatatgtacaaaggaaatagggacctctgaattgtatcttaaagatattttcagacaatgaatatttatgtttgattaatctttggaagtgttcagaaaacattaatactcattaacgaatgggataaccatgatatttctatgagaaaaaaatgtcaacagatatggttctgagatttcatgcaggtccatcatgattctgcaaaataatatgccttctgcatgactaaaccacaaatatcataataaaagattgcatacggagaaaagcactattcaaggaaaagtaggaagctagttgactctacagtgctcattatcacaagatgtggacctagtgccagttctgccattagctgtgtgactttgggacatttctcagcgtctcaggatatcaggtatgtcttttgcaaaggaaaggaacaagtttagtggttcagcgactgctgcagtagtggattatgaaggagaacagcagaaggggagaccaagcacgtgggacaccgatctcacatcttccactgagcagctccactttcacatgtttgatatattaaaatttagagcaatatttatttttaaaaagtcctgctaacttaaaaatggggaaacatagattgcatgacctaaatttctatttaagatagcatggtctagtttgcatgtttaattaatatgttttcgtctcagaaaaaaaaaaaagttttaacatcttttcctgttcactcatgtgctcttggttcaagtaaaataaaaacttaatgactatatcatttttatagagcttattttatacttttgtaatatatttctttcttattaaataaaaagatgagtggaggtgttgctttcaaaataaaattaaacataacagagagattggatgaagtcaactcctgcccatgcttaactttagagttatcttttcacgcggccttatgggcacttaaatactgtactgtcttatctttgaggtagaacaaaaaaaatggcaaaaacattcacataaaggggaaaatggaaaagaaagctgtgagagatttctttttaacataattatcatcattaggctttgcagtcttctttgacacaaagttgagatatagtcttcttaatacgaagagcagttaggcgggccgctccgttggcataccaacactcacgcattattctccccatgactcggagtgcttcacaactttgccactggtttgggatacttggtcgaaacttctggtcacaaacaacctttctcatttcctctatcgagggatctgaaggcaccatgtcataataaggcaattggtactcctcaacaattcctccgaccgaacacctccgggctatttcccagtaaaccagaccaacagaatagatgtcagctcgtttgaaggactcaaagatattcacattcattgtatcatcaagcatttcaggagccatatacctcttcgttcccactttaggattctgaggtatgtcgatagtgttcagtattgaatcatgcttcacagccaaccctaagtccgctatggcacaagtttcacattttttcactaagatattctttgattttatgtctcgatgagcaatagcaggtttaccttgtgtcccaacaatctccatatgaaggtgtgccagaccactagcaattgagagggccagcttgatcattccagccaccgtcactatatttctattcaaatagtcatataaggagccctgttcatgatattcagataccagccaaagttgagtccaggttccattatctttgttgtcagcagcaatgaaaccaaggatgttttcatgtcgcagcatgaccgtctggtaaatttctgcctcacgaaaccaagatctttcatctctggaggagaatattttcacagccacatcttccccacaccatcttccatgccacacctcaccaaatctaccttttcctactatttcctgaagcacaatcgtccttgcaattgtcctttgaaccaacagaggtagacctgttggaaggtgcagtgttatgttgttgcaaaaatctgtgaagcagcattcggttttggtaacattgttggaactatgacagaagacttgagcattcaattctggaagggagacacaggatttgatcacctgttcttttccattggttagcatgactgatgcccaacatgctccttctgtttggcaggtaaagtttgaagaatcacacaaaagacatacacacttcagtcctgccgagagctcggcggccgcggcgagcagcaggagagcctggcggagcgctgagctgagcgcccgggtcatcgccaccaggcggccgcgccggggctgcgaggccccagagcagagcgaggcagccggggcagcacggcccgctttgaagttcccgggccgcgggaggggagcgcggcaccgacacccttttgaagtgcgcggttggctctagtcagtgtgggcgcccccctccccggccgcccccatcccacgccccccgcggctggcggtgcgcggcgctcctgccactggccccgcagccgggcggggagggggtggtggggcgagcggcagagcccgcccctgccgcgcctccgccccctgcgccctctcgcagccgcccgggcctgctgctgcagggcaggcgggcaaaggcggccctgtacccagcggtgagagcccagagctggggcgaagaaagaggggaggtggggaagcgtcgcggaacctccgggactagatactccggaagggggctccgcacgagagggaaagccccactgagactttagggaaacttcaactacgcggcgattgcaccctggtgatccgctctatagcctcccgcagaagagccagccccctagctctcctgacgtttattgtccagggtccttaagtccaaccaggctgcgctgtgagagccccgcgggctttctactcgc

SEQ ID NO: 29 - RNA, 21 nt, synthetic construct
  source 1..21: mol_type = other RNA
gccaaccgcgcacttcaaaaa

SEQ ID NO: 30 - RNA, 21 nt, synthetic construct
  source 1..21: mol_type = other RNA
ccaaccgcgcacttcaaaaga

SEQ ID NO: 31 - RNA, 21 nt, synthetic construct
  source 1..21: mol_type = other RNA
caaccgcgcacttcaaaagga

SEQ ID NO: 32 - RNA, 21 nt, synthetic construct
  source 1..21: mol_type = other RNA
aaccgcgcacttcaaaaggga

SEQ ID NO: 33 - RNA, 21 nt, synthetic construct
  source 1..21: mol_type = other RNA
accgcgcacttcaaaagggta

SEQ ID NO: 34 - RNA, 21 nt, synthetic construct
  source 1..21: mol_type = other RNA
ccgcgcacttcaaaagggtga

SEQ ID NO: 35 - RNA, 21 nt, synthetic construct
  source 1..21: mol_type = other RNA
cgcgcacttcaaaagggtgta

SEQ ID NO: 36 - RNA, 21 nt, synthetic construct
  source 1..21: mol_type = other RNA
gcgcacttcaaaagggtgtca

SEQ ID NO: 37 - RNA, 21 nt, synthetic construct
  source 1..21: mol_type = other RNA
cgcacttcaaaagggtgtcga

SEQ ID NO: 38 - RNA, 21 nt, synthetic construct
  source 1..21: mol_type = other RNA
gcacttcaaaagggtgtcgga

SEQ ID NO: 39 - RNA, 21 nt, synthetic construct
  source 1..21: mol_type = other RNA
cacttcaaaagggtgtcggta

SEQ ID NO: 40 - RNA, 21 nt, synthetic construct
  source 1..21: mol_type = other RNA
cgccaggactgaagtgtgtaa

SEQ ID NO: 41 - RNA, 21 nt, synthetic construct
  source 1..21: mol_type = other RNA
gccaggactgaagtgtgtata

SEQ ID NO: 42 - RNA, 21 nt, synthetic construct
  source 1..21: mol_type = other RNA
ccaggactgaagtgtgtatga

SEQ ID NO: 43 - RNA, 21 nt, synthetic construct
  source 1..21: mol_type = other RNA
caggactgaagtgtgtatgta

SEQ ID NO: 44 - RNA, 21 nt, synthetic construct
  source 1..21: mol_type = other RNA
aggactgaagtgtgtatgtca

SEQ ID NO: 45 - RNA, 21 nt, synthetic construct
  source 1..21: mol_type = other RNA
ggactgaagtgtgtatgtcta

SEQ ID NO: 46 - RNA, 21 nt, synthetic construct
  source 1..21: mol_type = other RNA
gactgaagtgtgtatgtctta

SEQ ID NO: 47 - RNA, 21 nt, synthetic construct
  source 1..21: mol_type = other RNA
actgaagtgtgtatgtcttta

SEQ ID NO: 48 - RNA, 21 nt, synthetic construct
  source 1..21: mol_type = other RNA
ctgaagtgtgtatgtctttta

SEQ ID NO: 49 - RNA, 21 nt, synthetic construct
  source 1..21: mol_type = other RNA
tgaagtgtgtatgtcttttga

SEQ ID NO: 50 - RNA, 21 nt, synthetic construct
  source 1..21: mol_type = other RNA
gaagtgtgtatgtcttttgta

SEQ ID NO: 51 - RNA, 21 nt, synthetic construct
  source 1..21: mol_type = other RNA
aagtgtgtatgtcttttgtga

SEQ ID NO: 52 - RNA, 21 nt, synthetic construct
  source 1..21: mol_type = other RNA
agtgtgtatgtcttttgtgta

SEQ ID NO: 53 - RNA, 21 nt, synthetic construct
  source 1..21: mol_type = other RNA
gtgtgtatgtcttttgtgtga

SEQ ID NO: 54 - RNA, 21 nt, synthetic construct
  source 1..21: mol_type = other RNA
tgtgtatgtcttttgtgtgaa

SEQ ID NO: 55 - RNA, 21 nt, synthetic construct
  source 1..21: mol_type = other RNA
gtgtatgtcttttgtgtgata

SEQ ID NO: 56 - RNA, 21 nt, synthetic construct
  source 1..21: mol_type = other RNA
tgtatgtcttttgtgtgatta

SEQ ID NO: 57 - RNA, 21 nt, synthetic construct
  source 1..21: mol_type = other RNA
gtatgtcttttgtgtgattca

SEQ ID NO: 58 - RNA, 21 nt, synthetic construct
  source 1..21: mol_type = other RNA
tatgtcttttgtgtgattcta

SEQ ID NO: 59 - RNA, 21 nt, synthetic construct
  source 1..21: mol_type = other RNA
atgtcttttgtgtgattctta

SEQ ID NO: 60 - RNA, 21 nt, synthetic construct
  source 1..21: mol_type = other RNA
tgtcttttgtgtgattcttca

SEQ ID NO: 61 - RNA, 21 nt, synthetic construct
  source 1..21: mol_type = other RNA
gtcttttgtgtgattcttcaa

SEQ ID NO: 62 - RNA, 21 nt, synthetic construct
  source 1..21: mol_type = other RNA
tcttttgtgtgattcttcaaa

SEQ ID NO: 63 - RNA, 21 nt, synthetic construct
  source 1..21: mol_type = other RNA
cttttgtgtgattcttcaaaa

SEQ ID NO: 64 - RNA, 21 nt, synthetic construct
  source 1..21: mol_type = other RNA
ttttgtgtgattcttcaaaca

SEQ ID NO: 65 - RNA, 21 nt, synthetic construct
  source 1..21: mol_type = other RNA
tttgtgtgattcttcaaacta

SEQ ID NO: 66 - RNA, 21 nt, synthetic construct
  source 1..21: mol_type = other RNA
ttgtgtgattcttcaaactta

SEQ ID NO: 67 - RNA, 21 nt, synthetic construct
  source 1..21: mol_type = other RNA
ccaaacagaaggagcatgtta

SEQ ID NO: 68 - RNA, 21 nt, synthetic construct
  source 1..21: mol_type = other RNA
caaacagaaggagcatgttga

SEQ ID NO: 69 - RNA, 21 nt, synthetic construct
  source 1..21: mol_type = other RNA
ttgggcatcagtcatgctaaa

SEQ ID NO: 70 - RNA, 21 nt, synthetic construct
  source 1..21: mol_type = other RNA
ggcatcagtcatgctaaccaa

SEQ ID NO: 71 - RNA, 21 nt, synthetic construct
  source 1..21: mol_type = other RNA
atcagtcatgctaaccaatga

SEQ ID NO: 72 - RNA, 21 nt, synthetic construct
  source 1..21: mol_type = other RNA
gtcatgctaaccaatggaaaa

SEQ ID NO: 73 - RNA, 21 nt, synthetic construct
  source 1..21: mol_type = other RNA
atgctaaccaatggaaaagaa

SEQ ID NO: 74 - RNA, 21 nt, synthetic construct
  source 1..21: mol_type = other RNA
aaaagagcaggtgatcaaata

SEQ ID NO: 75 - RNA, 21 nt, synthetic construct
  source 1..21: mol_type = other RNA
ctcccttccagaactgaatga

SEQ ID NO: 76 - RNA, 21 nt, synthetic construct
  source 1..21: mol_type = other RNA
tcccttccagaactgaatgca

SEQ ID NO: 77 - RNA, 21 nt, synthetic construct
  source 1..21: mol_type = other RNA
cccttccagaactgaatgcta

SEQ ID NO: 78 - RNA, 21 nt, synthetic construct
  source 1..21: mol_type = other RNA
ccttccagaactgaatgctca

SEQ ID NO: 79 - RNA, 21 nt, synthetic construct
  source 1..21: mol_type = other RNA
cttccagaactgaatgctcaa

SEQ ID NO: 80 - RNA, 21 nt, synthetic construct
  source 1..21: mol_type = other RNA
ttccagaactgaatgctcaaa

SEQ ID NO: 81 - RNA, 21 nt, synthetic construct
  source 1..21: mol_type = other RNA
tccagaactgaatgctcaaga

SEQ ID NO: 82 - RNA, 21 nt, synthetic construct
  source 1..21: mol_type = other RNA
ccagaactgaatgctcaagta

SEQ ID NO: 83 - RNA, 21 nt, synthetic construct
  source 1..21: mol_type = other RNA
cagaactgaatgctcaagtca

SEQ ID NO: 84 - RNA, 21 nt, synthetic construct
  source 1..21: mol_type = other RNA
agaactgaatgctcaagtcta

SEQ ID NO: 85 - RNA, 21 nt, synthetic construct
  source 1..21: mol_type = other RNA
gaactgaatgctcaagtctta

SEQ ID NO: 86 - RNA, 21 nt, synthetic construct
  source 1..21: mol_type = other RNA
aactgaatgctcaagtcttca

SEQ ID NO: 87 - RNA, 21 nt, synthetic construct
  source 1..21: mol_type = other RNA
actgaatgctcaagtcttcta

SEQ ID NO: 88 - RNA, 21 nt, synthetic construct
  source 1..21: mol_type = other RNA
ctgaatgctcaagtcttctga

SEQ ID NO: 89 - RNA, 21 nt, synthetic construct
  source 1..21: mol_type = other RNA
tgaatgctcaagtcttctgta

SEQ ID NO: 90 - RNA, 21 nt, synthetic construct
  source 1..21: mol_type = other RNA
gaatgctcaagtcttctgtca

SEQ ID NO: 91 - RNA, 21 nt, synthetic construct
  source 1..21: mol_type = other RNA
aatgctcaagtcttctgtcaa

SEQ ID NO: 92 - RNA, 21 nt, synthetic construct
  source 1..21: mol_type = other RNA
atgctcaagtcttctgtcata

SEQ ID NO: 93 - RNA, 21 nt, synthetic construct
  source 1..21: mol_type = other RNA
tgctcaagtcttctgtcataa

SEQ ID NO: 94 - RNA, 21 nt, synthetic construct
  source 1..21: mol_type = other RNA
gctcaagtcttctgtcataga

SEQ ID NO: 95 - RNA, 21 nt, synthetic construct
  source 1..21: mol_type = other RNA
ctcaagtcttctgtcatagta

SEQ ID NO: 96 - RNA, 21 nt, synthetic construct
  source 1..21: mol_type = other RNA
tcaagtcttctgtcatagtta

SEQ ID NO: 97 - RNA, 21 nt, synthetic construct
  source 1..21: mol_type = other RNA
caagtcttctgtcatagttca

SEQ ID NO: 98 - RNA, 21 nt, synthetic construct
  source 1..21: mol_type = other RNA
aagtcttctgtcatagttcca

SEQ ID NO: 99 - RNA, 21 nt, synthetic construct
  source 1..21: mol_type = other RNA
agtcttctgtcatagttccaa

SEQ ID NO: 100 - RNA, 21 nt, synthetic construct
  source 1..21: mol_type = other RNA
gtcttctgtcatagttccaaa

SEQ ID NO: 101 - RNA, 21 nt, synthetic construct
  source 1..21: mol_type = other RNA
tcttctgtcatagttccaaca

SEQ ID NO: 102 - RNA, 21 nt, synthetic construct
  source 1..21: mol_type = other RNA
cttctgtcatagttccaacaa

SEQ ID NO: 103 - RNA, 21 nt, synthetic construct
  source 1..21: mol_type = other RNA
ttctgtcatagttccaacaaa

SEQ ID NO: 104 - RNA, 21 nt, synthetic construct
  source 1..21: mol_type = other RNA
tctgtcatagttccaacaata

SEQ ID NO: 105 - RNA, 21 nt, synthetic construct
  source 1..21: mol_type = other RNA
ctgtcatagttccaacaatga

SEQ ID NO: 106 - RNA, 21 nt, synthetic construct
  source 1..21: mol_type = other RNA
tgtcatagttccaacaatgta

SEQ ID NO: 107 - RNA, 21 nt, synthetic construct
  source 1..21: mol_type = other RNA
gtcatagttccaacaatgtta

SEQ ID NO: 108 - RNA, 21 nt, synthetic construct
  source 1..21: mol_type = other RNA
tcatagttccaacaatgttaa

SEQ ID NO: 109 - RNA, 21 nt, synthetic construct
  source 1..21: mol_type = other RNA
catagttccaacaatgttaca

SEQ ID NO: 110 - RNA, 21 nt, synthetic construct
  source 1..21: mol_type = other RNA
atagttccaacaatgttacca

SEQ ID NO: 111 - RNA, 21 nt, synthetic construct
  source 1..21: mol_type = other RNA
tagttccaacaatgttaccaa

SEQ ID NO: 112 - RNA, 21 nt, synthetic construct
  source 1..21: mol_type = other RNA
agttccaacaatgttaccaaa

SEQ ID NO: 113 - RNA, 21 nt, synthetic construct
  source 1..21: mol_type = other RNA
gttccaacaatgttaccaaaa

SEQ ID NO: 114 - RNA, 21 nt, synthetic construct
  source 1..21: mol_type = other RNA
ttccaacaatgttaccaaaaa

SEQ ID NO: 115 - RNA, 21 nt, synthetic construct
  source 1..21: mol_type = other RNA
tccaacaatgttaccaaaaca

SEQ ID NO: 116 - RNA, 21 nt, synthetic construct
  source 1..21: mol_type = other RNA
ccaacaatgttaccaaaacca

SEQ ID NO: 117 - RNA, 21 nt, synthetic construct
  source 1..21: mol_type = other RNA
caacaatgttaccaaaaccga

SEQ ID NO: 118 - RNA, 21 nt, synthetic construct
  source 1..21: mol_type = other RNA
aacaatgttaccaaaaccgaa

SEQ ID NO: 119 - RNA, 21 nt, synthetic construct
  source 1..21: mol_type = other RNA
acaatgttaccaaaaccgaaa

SEQ ID NO: 120 - RNA, 21 nt, synthetic construct
  source 1..21: mol_type = other RNA
caatgttaccaaaaccgaata

SEQ ID NO: 121 - RNA, 21 nt, synthetic construct
  source 1..21: mol_type = other RNA
aatgttaccaaaaccgaatga

SEQ ID NO: 122 - RNA, 21 nt, synthetic construct
  source 1..21: mol_type = other RNA
atgttaccaaaaccgaatgca

SEQ ID NO: 123 - RNA, 21 nt, synthetic construct
  source 1..21: mol_type = other RNA
tgttaccaaaaccgaatgcta

SEQ ID NO: 124 - RNA, 21 nt, synthetic construct
  source 1..21: mol_type = other RNA
gttaccaaaaccgaatgctga

SEQ ID NO: 125 - RNA, 21 nt, synthetic construct
  source 1..21: mol_type = other RNA
ttaccaaaaccgaatgctgca

SEQ ID NO: 126 - RNA, 21 nt, synthetic construct
  source 1..21: mol_type = other RNA
taccaaaaccgaatgctgcta

SEQ ID NO: 127 - RNA, 21 nt, synthetic construct
  source 1..21: mol_type = other RNA
accaaaaccgaatgctgctta

SEQ ID NO: 128 - RNA, 21 nt, synthetic construct
  source 1..21: mol_type = other RNA
ccaaaaccgaatgctgcttca

SEQ ID NO: 129 - RNA, 21 nt, synthetic construct
  source 1..21: mol_type = other RNA
caaaaccgaatgctgcttcaa

SEQ ID NO: 130 - RNA, 21 nt, synthetic construct
  source 1..21: mol_type = other RNA
aaaaccgaatgctgcttcaca

SEQ ID NO: 131 - RNA, 21 nt, synthetic construct
  source 1..21: mol_type = other RNA
aaaccgaatgctgcttcacaa

SEQ ID NO: 132 - RNA, 21 nt, synthetic construct
  source 1..21: mol_type = other RNA
aaccgaatgctgcttcacaga

SEQ ID NO: 133 - RNA, 21 nt, synthetic construct
  source 1..21: mol_type = other RNA
accgaatgctgcttcacagaa

SEQ ID NO: 134 - RNA, 21 nt, synthetic construct
  source 1..21: mol_type = other RNA
cgaatgctgcttcacagatta

SEQ ID NO: 135 - RNA, 21 nt, synthetic construct
  source 1..21: mol_type = other RNA
atgctgcttcacagattttta

SEQ ID NO: 136 - RNA, 21 nt, synthetic construct
  source 1..21: mol_type = other RNA
tgctgcttcacagatttttga

SEQ ID NO: 137 - RNA, 21 nt, synthetic construct
  source 1..21: mol_type = other RNA
gctgcttcacagatttttgca

SEQ ID NO: 138 - RNA, 21 nt, synthetic construct
  source 1..21: mol_type = other RNA
ctgcttcacagatttttgcaa

SEQ ID NO: 139 - RNA, 21 nt, synthetic construct
  source 1..21: mol_type = other RNA
tgcttcacagatttttgcaaa

SEQ ID NO: 140 - RNA, 21 nt, synthetic construct
  source 1..21: mol_type = other RNA
gcttcacagatttttgcaaca

SEQ ID NO: 141 - RNA, 21 nt, synthetic construct
  source 1..21: mol_type = other RNA
cttcacagatttttgcaacaa

SEQ ID NO: 142 - RNA, 21 nt, synthetic construct
  source 1..21: mol_type = other RNA
ttcacagatttttgcaacaaa

SEQ ID NO: 143 - RNA, 21 nt, synthetic construct
  source 1..21: mol_type = other RNA
tcacagatttttgcaacaaca

SEQ ID NO: 144 - RNA, 21 nt, synthetic construct
  source 1..21: mol_type = other RNA
cacagatttttgcaacaacaa

SEQ ID NO: 145 - RNA, 21 nt, synthetic construct
  source 1..21: mol_type = other RNA
acagatttttgcaacaacata

SEQ ID NO: 146 - RNA, 21 nt, synthetic construct
  source 1..21: mol_type = other RNA
cagatttttgcaacaacataa

SEQ ID NO: 147 - RNA, 21 nt, synthetic construct
  source 1..21: mol_type = other RNA
agatttttgcaacaacataaa

SEQ ID NO: 148 - RNA, 21 nt, synthetic construct
  source 1..21: mol_type = other RNA
gatttttgcaacaacataaca

SEQ ID NO: 149 - RNA, 21 nt, synthetic construct
  source 1..21: mol_type = other RNA
atttttgcaacaacataacaa

SEQ ID NO: 150 - RNA, 21 nt, synthetic construct
  source 1..21: mol_type = other RNA
tttttgcaacaacataacaca

SEQ ID NO: 151 - RNA, 21 nt, synthetic construct
  source 1..21: mol_type = other RNA
ttttgcaacaacataacacta

SEQ ID NO: 152 - RNA, 21 nt, synthetic construct
  source 1..21: mol_type = other RNA
tttgcaacaacataacactga

SEQ ID NO: 153 - RNA, 21 nt, synthetic construct
  source 1..21: mol_type = other RNA
ttgcaacaacataacactgca

SEQ ID NO: 154 - RNA, 21 nt, synthetic construct
  source 1..21: mol_type = other RNA
tgcaacaacataacactgcaa

SEQ ID NO: 155 - RNA, 21 nt, synthetic construct
  source 1..21: mol_type = other RNA
gcaacaacataacactgcaca

SEQ ID NO: 156 - RNA, 21 nt, synthetic construct
  source 1..21: mol_type = other RNA
caacaacataacactgcacca

SEQ ID NO: 157 - RNA, 21 nt, synthetic construct
  source 1..21: mol_type = other RNA
aacaacataacactgcaccta

SEQ ID NO: 158 - RNA, 21 nt, synthetic construct
  source 1..21: mol_type = other RNA
acaacataacactgcacctta

SEQ ID NO: 159 - RNA, 21 nt, synthetic construct
  source 1..21: mol_type = other RNA
caacataacactgcaccttca

SEQ ID NO: 160 - RNA, 21 nt, synthetic construct
  source 1..21: mol_type = other RNA
aacataacactgcaccttcca

SEQ ID NO: 161 - RNA, 21 nt, synthetic construct
  source 1..21: mol_type = other RNA
acataacactgcaccttccaa

SEQ ID NO: 162 - RNA, 21 nt, synthetic construct
  source 1..21: mol_type = other RNA
cataacactgcaccttccaaa

SEQ ID NO: 163 - RNA, 21 nt, synthetic construct
  source 1..21: mol_type = other RNA
ataacactgcaccttccaaca

SEQ ID NO: 164 - RNA, 21 nt, synthetic construct
  source 1..21: mol_type = other RNA
taacactgcaccttccaacaa

SEQ ID NO: 165 - RNA, 21 nt, synthetic construct
  source 1..21: mol_type = other RNA
aacactgcaccttccaacaga

SEQ ID NO: 166 - RNA, 21 nt, synthetic construct
  source 1..21: mol_type = other RNA
acactgcaccttccaacagca

SEQ ID NO: 167 - RNA, 21 nt, synthetic construct
  source 1..21: mol_type = other RNA
cactgcaccttccaacagcaa

SEQ ID NO: 168 - RNA, 21 nt, synthetic construct
  source 1..21: mol_type = other RNA
actgcaccttccaacagcata

SEQ ID NO: 169 - RNA, 21 nt, synthetic construct
  source 1..21: mol_type = other RNA
ctgcaccttccaacagcatca

SEQ ID NO: 170 - RNA, 21 nt, synthetic construct
  source 1..21: mol_type = other RNA
tgcaccttccaacagcatcaa

SEQ ID NO: 171 - RNA, 21 nt, synthetic construct
  source 1..21: mol_type = other RNA
gcaccttccaacagcatcaca

SEQ ID NO: 172 - RNA, 21 nt, synthetic construct
  source 1..21: mol_type = other RNA
caccttccaacagcatcacca

SEQ ID NO: 173 - RNA, 21 nt, synthetic construct
  source 1..21: mol_type = other RNA
accttccaacagcatcaccaa

SEQ ID NO: 174 - RNA, 21 nt, synthetic construct
  source 1..21: mol_type = other RNA
ccttccaacagcatcaccaaa

SEQ ID NO: 175 - RNA, 21 nt, synthetic construct
  source 1..21: mol_type = other RNA
cttccaacagcatcaccaaaa

SEQ ID NO: 176 - RNA, 21 nt, synthetic construct
  source 1..21: mol_type = other RNA
ttccaacagcatcaccaaata

SEQ ID NO: 177 - RNA, 21 nt, synthetic construct
  source 1..21: mol_type = other RNA
tccaacagcatcaccaaatga

SEQ ID NO: 178 - RNA, 21 nt, synthetic construct
  source 1..21: mol_type = other RNA
ccaacagcatcaccaaatgca

SEQ ID NO: 179 - RNA, 21 nt, synthetic construct
  source 1..21: mol_type = other RNA
caacagcatcaccaaatgcca

SEQ ID NO: 180 - RNA, 21 nt, synthetic construct
  source 1..21: mol_type = other RNA
ggagctggccatcattattaa

SEQ ID NO: 181 - RNA, 21 nt, synthetic construct
  source 1..21: mol_type = other RNA
gctggccatcattattactga

SEQ ID NO: 182 - RNA, 21 nt, synthetic construct
  source 1..21: mol_type = other RNA
ctggccatcattattactgta

SEQ ID NO: 183 - RNA, 21 nt, synthetic construct
  source 1..21: mol_type = other RNA
ggccatcattattactgtgca

SEQ ID NO: 184 - RNA, 21 nt, synthetic construct
  source 1..21: mol_type = other RNA
cattattactgtgcctgttta

SEQ ID NO: 185 - RNA, 21 nt, synthetic construct
  source 1..21: mol_type = other RNA
attactgtgcctgtttgccta

SEQ ID NO: 186 - RNA, 21 nt, synthetic construct
  source 1..21: mol_type = other RNA
gcctgtttgcctcctgtccaa

SEQ ID NO: 187 - RNA, 21 nt, synthetic construct
  source 1..21: mol_type = other RNA
agctgcgatgctgacagtata

SEQ ID NO: 188 - RNA, 21 nt, synthetic construct
  source 1..21: mol_type = other RNA
gtgctcctacaggaagaaaaa

SEQ ID NO: 189 - RNA, 21 nt, synthetic construct
  source 1..21: mol_type = other RNA
tgctcctacaggaagaaaaaa

SEQ ID NO: 190 - RNA, 21 nt, synthetic construct
  source 1..21: mol_type = other RNA
ctcctacaggaagaaaaagaa

SEQ ID NO: 191 - RNA, 21 nt, synthetic construct
  source 1..21: mol_type = other RNA
ctacaggaagaaaaagagaca

SEQ ID NO: 192 - RNA, 21 nt, synthetic construct
  source 1..21: mol_type = other RNA
cactctctgagtgcaatctga

SEQ ID NO: 193 - RNA, 21 nt, synthetic construct
  source 1..21: mol_type = other RNA
ctctgagtgcaatctggtaaa

SEQ ID NO: 194 - RNA, 21 nt, synthetic construct
  source 1..21: mol_type = other RNA
tgagtgcaatctggtaaatga

SEQ ID NO: 195 - RNA, 21 nt, synthetic construct
  source 1..21: mol_type = other RNA
aatctggtaaatgctggaaaa

SEQ ID NO: 196 - RNA, 21 nt, synthetic construct
  source 1..21: mol_type = other RNA
ctggtaaatgctggaaaaaca

SEQ ID NO: 197 - RNA, 21 nt, synthetic construct
  source 1..21: mol_type = other RNA
gctggaaaaactctgaaagaa

SEQ ID NO: 198 - RNA, 21 nt, synthetic construct
  source 1..21: mol_type = other RNA
tggaaaaactctgaaagatca

SEQ ID NO: 199 - RNA, 21 nt, synthetic construct
  source 1..21: mol_type = other RNA
ggaaaaactctgaaagatcta

SEQ ID NO: 200 - RNA, 21 nt, synthetic construct
  source 1..21: mol_type = other RNA
gaaaaactctgaaagatctga

SEQ ID NO: 201 - RNA, 21 nt, synthetic construct
  source 1..21: mol_type = other RNA
aaaaactctgaaagatctgaa

SEQ ID NO: 202 - RNA, 21 nt, synthetic construct
  source 1..21: mol_type = other RNA
aaaactctgaaagatctgata

SEQ ID NO: 203 - RNA, 21 nt, synthetic construct
  source 1..21: mol_type = other RNA
aaactctgaaagatctgatta

SEQ ID NO: 204 - RNA, 21 nt, synthetic construct
  source 1..21: mol_type = other RNA
aactctgaaagatctgattta

SEQ ID NO: 205 - RNA, 21 nt, synthetic construct
  source 1..21: mol_type = other RNA
actctgaaagatctgatttaa

SEQ ID NO: 206 - RNA, 21 nt, synthetic construct
  source 1..21: mol_type = other RNA
ctctgaaagatctgatttata

SEQ ID NO: 207 - RNA, 21 nt, synthetic construct
  source 1..21: mol_type = other RNA
tctgaaagatctgatttatga

SEQ ID NO: 208 - RNA, 21 nt, synthetic construct
  source 1..21: mol_type = other RNA
ctgaaagatctgatttatgaa

SEQ ID NO: 209 - RNA, 21 nt, synthetic construct
  source 1..21: mol_type = other RNA
tgaaagatctgatttatgata

SEQ ID NO: 210 - RNA, 21 nt, synthetic construct
  source 1..21: mol_type = other RNA
gaaagatctgatttatgatga

SEQ ID NO: 211 - RNA, 21 nt, synthetic construct
  source 1..21: mol_type = other RNA
aaagatctgatttatgatgta

SEQ ID NO: 212 - RNA, 21 nt, synthetic construct
  source 1..21: mol_type = other RNA
aagatctgatttatgatgtga

SEQ ID NO: 213 - RNA, 21 nt, synthetic construct
  source 1..21: mol_type = other RNA
agatctgatttatgatgtgaa

SEQ ID NO: 214 - RNA, 21 nt, synthetic construct
  source 1..21: mol_type = other RNA
gatctgatttatgatgtgaca

SEQ ID NO: 215 - RNA, 21 nt, synthetic construct
  source 1..21: mol_type = other RNA
gtctacctctgttggttcaaa

SEQ ID NO: 216 - RNA, 21 nt, synthetic construct
  source 1..21: mol_type = other RNA
tctacctctgttggttcaaaa

SEQ ID NO: 217 - RNA, 21 nt, synthetic construct
  source 1..21: mol_type = other RNA
acctctgttggttcaaaggaa

SEQ ID NO: 218 - RNA, 21 nt, synthetic construct
  source 1..21: mol_type = other RNA
cctctgttggttcaaaggaca

SEQ ID NO: 219 - RNA, 21 nt, synthetic construct
  source 1..21: mol_type = other RNA
ctgttggttcaaaggacaata

SEQ ID NO: 220 - RNA, 21 nt, synthetic construct
  source 1..21: mol_type = other RNA
tgttggttcaaaggacaatta

SEQ ID NO: 221 - RNA, 21 nt, synthetic construct
  source 1..21: mol_type = other RNA
ggttcaaaggacaattgcaaa

SEQ ID NO: 222 - RNA, 21 nt, synthetic construct
  source 1..21: mol_type = other RNA
tcaaaggacaattgcaaggaa

SEQ ID NO: 223 - RNA, 21 nt, synthetic construct
  source 1..21: mol_type = other RNA
tagtaggaaaaggtagattta

SEQ ID NO: 224 - RNA, 21 nt, synthetic construct
  source 1..21: mol_type = other RNA
taggaaaaggtagatttggta

SEQ ID NO: 225 - RNA, 21 nt, synthetic construct
  source 1..21: mol_type = other RNA
gaagatgtggctgtgaaaata

SEQ ID NO: 226 - RNA, 21 nt, synthetic construct
  source 1..21: mol_type = other RNA
aagatgtggctgtgaaaataa

SEQ ID NO: 227 - RNA, 21 nt, synthetic construct
  source 1..21: mol_type = other RNA
agatgtggctgtgaaaatata

SEQ ID NO: 228 - RNA, 21 nt, synthetic construct
  source 1..21: mol_type = other RNA
ctcctccagagatgaaagata

SEQ ID NO: 229 - RNA, 21 nt, synthetic construct
  source 1..21: mol_type = other RNA
tcctccagagatgaaagatca

SEQ ID NO: 230 - RNA, 21 nt, synthetic construct
  source 1..21: mol_type = other RNA
cctccagagatgaaagatcta

SEQ ID NO: 231 - RNA, 21 nt, synthetic construct
  source 1..21: mol_type = other RNA
ctccagagatgaaagatctta

SEQ ID NO: 232 - RNA, 21 nt, synthetic construct
  source 1..21: mol_type = other RNA
tccagagatgaaagatcttga

SEQ ID NO: 233 - RNA, 21 nt, synthetic construct
  source 1..21: mol_type = other RNA
ccagagatgaaagatcttgga

SEQ ID NO: 234 - RNA, 21 nt, synthetic construct
  source 1..21: mol_type = other RNA
agagatgaaagatcttggtta

SEQ ID NO: 235 - RNA, 21 nt, synthetic construct
  source 1..21: mol_type = other RNA
gagatgaaagatcttggttta

SEQ ID NO: 236 - RNA, 21 nt, synthetic construct
  source 1..21: mol_type = other RNA
atgaaagatcttggtttcgta

SEQ ID NO: 237 - RNA, 21 nt, synthetic construct
  source 1..21: mol_type = other RNA
tttcgtgaggcagaaatttaa

SEQ ID NO: 238 - RNA, 21 nt, synthetic construct
  source 1..21: mol_type = other RNA
atgctgcgacatgaaaacata

SEQ ID NO: 239 - RNA, 21 nt, synthetic construct
  source 1..21: mol_type = other RNA
ctgcgacatgaaaacatccta

SEQ ID NO: 240 - RNA, 21 nt, synthetic construct
  source 1..21: mol_type = other RNA
tgcgacatgaaaacatcctta

SEQ ID NO: 241 - RNA, 21 nt, synthetic construct
  source 1..21: mol_type = other RNA
gcgacatgaaaacatccttga

SEQ ID NO: 242 - RNA, 21 nt, synthetic construct
  source 1..21: mol_type = other RNA
gacatgaaaacatccttggta

SEQ ID NO: 243 - RNA, 21 nt, synthetic construct
  source 1..21: mol_type = other RNA
acatgaaaacatccttggtta

SEQ ID NO: 244 - RNA, 21 nt, synthetic construct
  source 1..21: mol_type = other RNA
catgaaaacatccttggttta

SEQ ID NO: 245 - RNA, 21 nt, synthetic construct
  source 1..21: mol_type = other RNA
gaaaacatccttggtttcata

SEQ ID NO: 246 - RNA, 21 nt, synthetic construct
  source 1..21: mol_type = other RNA
catccttggtttcattgctga

SEQ ID NO: 247 - RNA, 21 nt, synthetic construct
  source 1..21: mol_type = other RNA
cttggtttcattgctgctgaa

SEQ ID NO: 248 - RNA, 21 nt, synthetic construct
  source 1..21: mol_type = other RNA
ggtttcattgctgctgacaaa

SEQ ID NO: 249 - RNA, 21 nt, synthetic construct
  source 1..21: mol_type = other RNA
ttcattgctgctgacaacaaa

SEQ ID NO: 250 - RNA, 21 nt, synthetic construct
  source 1..21: mol_type = other RNA
tcattgctgctgacaacaaaa

SEQ ID NO: 251 - RNA, 21 nt, synthetic construct
  source 1..21: mol_type = other RNA
ttgctgctgacaacaaagata

SEQ ID NO: 252 - RNA, 21 nt, synthetic construct
  source 1..21: mol_type = other RNA
tgctgacaacaaagataatga

SEQ ID NO: 253 - RNA, 21 nt, synthetic construct
  source 1..21: mol_type = other RNA
gctgacaacaaagataatgga

SEQ ID NO: 254 - RNA, 21 nt, synthetic construct
  source 1..21: mol_type = other RNA
tgacaacaaagataatggaaa

SEQ ID NO: 255 - RNA, 21 nt, synthetic construct
  source 1..21: mol_type = other RNA
gacaacaaagataatggaaca

SEQ ID NO: 256 - RNA, 21 nt, synthetic construct
  source 1..21: mol_type = other RNA
aacaaagataatggaacttga

SEQ ID NO: 257 - RNA, 21 nt, synthetic construct
  source 1..21: mol_type = other RNA
actttggctggtatctgaata

SEQ ID NO: 258 - RNA, 21 nt, synthetic construct
  source 1..21: mol_type = other RNA
tttggctggtatctgaatata

SEQ ID NO: 259 - RNA, 21 nt, synthetic construct
  source 1..21: mol_type = other RNA
ttggctggtatctgaatatca

SEQ ID NO: 260 - RNA, 21 nt, synthetic construct
  source 1..21: mol_type = other RNA
tggctggtatctgaatatcaa

SEQ ID NO: 261 - RNA, 21 nt, synthetic construct
  source 1..21: mol_type = other RNA
tggtatctgaatatcatgaaa

SEQ ID NO: 262 - RNA, 21 nt, synthetic construct
  source 1..21: mol_type = other RNA
gtatctgaatatcatgaacaa

SEQ ID NO: 263 - RNA, 21 nt, synthetic construct
  source 1..21: mol_type = other RNA
catgaacagggctccttataa

SEQ ID NO: 264 - RNA, 21 nt, synthetic construct
  source 1..21: mol_type = other RNA
atgaacagggctccttatata

SEQ ID NO: 265 - RNA, 21 nt, synthetic construct
  source 1..21: mol_type = other RNA
acagggctccttatatgacta

SEQ ID NO: 266 - RNA, 21 nt, synthetic construct
  source 1..21: mol_type = other RNA
cagggctccttatatgactaa

SEQ ID NO: 267 - RNA, 21 nt, synthetic construct
  source 1..21: mol_type = other RNA
agggctccttatatgactata

SEQ ID NO: 268 - RNA, 21 nt, synthetic construct
  source 1..21: mol_type = other RNA
gggctccttatatgactatta

SEQ ID NO: 269 - RNA, 21 nt, synthetic construct
  source 1..21: mol_type = other RNA
ggctccttatatgactattta

SEQ ID NO: 270 - RNA, 21 nt, synthetic construct
  source 1..21: mol_type = other RNA
gctccttatatgactatttga

SEQ ID NO: 271 - RNA, 21 nt, synthetic construct
  source 1..21: mol_type = other RNA
ctccttatatgactatttgaa

SEQ ID NO: 272 - RNA, 21 nt, synthetic construct
  source 1..21: mol_type = other RNA
tccttatatgactatttgaaa

SEQ ID NO: 273 - RNA, 21 nt, synthetic construct
  source 1..21: mol_type = other RNA
ccttatatgactatttgaata

SEQ ID NO: 274 - RNA, 21 nt, synthetic construct
  source 1..21: mol_type = other RNA
ttatatgactatttgaataga

SEQ ID NO: 275 - RNA, 21 nt, synthetic construct
  source 1..21: mol_type = other RNA
gtgaccgtggctggaatgata

SEQ ID NO: 276 - RNA, 21 nt, synthetic construct
  source 1..21: mol_type = other RNA
cgtggctggaatgatcaagca

SEQ ID NO: 277 - RNA, 21 nt, synthetic construct
  source 1..21: mol_type = other RNA
tggctggaatgatcaagctga

SEQ ID NO: 278 - RNA, 21 nt, synthetic construct
  source 1..21: mol_type = other RNA
ggcgctctcaattgctagtga

SEQ ID NO: 279 - RNA, 21 nt, synthetic construct
  source 1..21: mol_type = other RNA
ctctcaattgctagtggtcta

SEQ ID NO: 280 - RNA, 21 nt, synthetic construct
  source 1..21: mol_type = other RNA
ctggcacaccttcatatggaa

SEQ ID NO: 281 - RNA, 21 nt, synthetic construct
  source 1..21: mol_type = other RNA
tggcacaccttcatatggaga

SEQ ID NO: 282 - RNA, 21 nt, synthetic construct
  source 1..21: mol_type = other RNA
ggcacaccttcatatggagaa

SEQ ID NO: 283 - RNA, 21 nt, synthetic construct
  source 1..21: mol_type = other RNA
gcacaccttcatatggagata

SEQ ID NO: 284 - RNA, 21 nt, synthetic construct
  source 1..21: mol_type = other RNA
cacaccttcatatggagatta

SEQ ID NO: 285 - RNA, 21 nt, synthetic construct
  source 1..21: mol_type = other RNA
acaccttcatatggagattga

SEQ ID NO: 286 - RNA, 21 nt, synthetic construct
  source 1..21: mol_type = other RNA
caccttcatatggagattgta

SEQ ID NO: 287 - RNA, 21 nt, synthetic construct
  source 1..21: mol_type = other RNA
accttcatatggagattgtta

SEQ ID NO: 288 - RNA, 21 nt, synthetic construct
  source 1..21: mol_type = other RNA
ccttcatatggagattgttga

SEQ ID NO: 289 - RNA, 21 nt, synthetic construct
  source 1..21: mol_type = other RNA
cttcatatggagattgttgga

SEQ ID NO: 290 - RNA, 21 nt, synthetic construct
  source 1..21: mol_type = other RNA
ttcatatggagattgttggta

SEQ ID NO: 291 - RNA, 21 nt, synthetic construct
  source 1..21: mol_type = other RNA
tcatatggagattgttggtaa

SEQ ID NO: 292 - RNA, 21 nt, synthetic construct
  source 1..21: mol_type = other RNA
catatggagattgttggtaca

SEQ ID NO: 293 - RNA, 21 nt, synthetic construct
  source 1..21: mol_type = other RNA
atatggagattgttggtacaa

SEQ ID NO: 294 - RNA, 21 nt, synthetic construct
  source 1..21: mol_type = other RNA
tatggagattgttggtacaca

SEQ ID NO: 295 - RNA, 21 nt, synthetic construct
  source 1..21: mol_type = other RNA
atggagattgttggtacacaa

SEQ ID NO: 296 - RNA, 21 nt, synthetic construct
  source 1..21: mol_type = other RNA
tggagattgttggtacacaaa

SEQ ID NO: 297 - RNA, 21 nt, synthetic construct
  source 1..21: mol_type = other RNA
ggagattgttggtacacaaga

SEQ ID NO: 298 - RNA, 21 nt, synthetic construct
  source 1..21: mol_type = other RNA
gagattgttggtacacaagga

SEQ ID NO: 299 - RNA, 21 nt, synthetic construct
  source 1..21: mol_type = other RNA
attgttggtacacaaggtaaa

SEQ ID NO: 300 - RNA, 21 nt, synthetic construct
  source 1..21: mol_type = other RNA
ttggtacacaaggtaaaccta

SEQ ID NO: 301 - RNA, 21 nt, synthetic construct
  source 1..21: mol_type = other RNA
gtacacaaggtaaacctgcta

SEQ ID NO: 302 - RNA, 21 nt, synthetic construct
  source 1..21: mol_type = other RNA
tacacaaggtaaacctgctaa

SEQ ID NO: 303 - RNA, 21 nt, synthetic construct
  source 1..21: mol_type = other RNA
acacaaggtaaacctgctata

SEQ ID NO: 304 - RNA, 21 nt, synthetic construct
  source 1..21: mol_type = other RNA
cacaaggtaaacctgctatta

SEQ ID NO: 305 - RNA, 21 nt, synthetic construct
  source 1..21: mol_type = other RNA
acaaggtaaacctgctattga

SEQ ID NO: 306 - RNA, 21 nt, synthetic construct
  source 1..21: mol_type = other RNA
caaggtaaacctgctattgca

SEQ ID NO: 307 - RNA, 21 nt, synthetic construct
  source 1..21: mol_type = other RNA
aaggtaaacctgctattgcta

SEQ ID NO: 308 - RNA, 21 nt, synthetic construct
  source 1..21: mol_type = other RNA
aggtaaacctgctattgctca

SEQ ID NO: 309 - RNA, 21 nt, synthetic construct
  source 1..21: mol_type = other RNA
ggtaaacctgctattgctcaa

SEQ ID NO: 310 - RNA, 21 nt, synthetic construct
  source 1..21: mol_type = other RNA
gtaaacctgctattgctcata

SEQ ID NO: 311 - RNA, 21 nt, synthetic construct
  source 1..21: mol_type = other RNA
taaacctgctattgctcatca

SEQ ID NO: 312 - RNA, 21 nt, synthetic construct
  source 1..21: mol_type = other RNA
aaacctgctattgctcatcga

SEQ ID NO: 313 - RNA, 21 nt, synthetic construct
  source 1..21: mol_type = other RNA
aacctgctattgctcatcgaa

SEQ ID NO: 314 - RNA, 21 nt, synthetic construct
  source 1..21: mol_type = other RNA
acctgctattgctcatcgaga

SEQ ID NO: 315 - RNA, 21 nt, synthetic construct
  source 1..21: mol_type = other RNA
cctgctattgctcatcgagaa

SEQ ID NO: 316 - RNA, 21 nt, synthetic construct
  source 1..21: mol_type = other RNA
ctgctattgctcatcgagaca

SEQ ID NO: 317 - RNA, 21 nt, synthetic construct
  source 1..21: mol_type = other RNA
tgctattgctcatcgagacaa

SEQ ID NO: 318 - RNA, 21 nt, synthetic construct
  source 1..21: mol_type = other RNA
gctattgctcatcgagacata

SEQ ID NO: 319 - RNA, 21 nt, synthetic construct
  source 1..21: mol_type = other RNA
ctattgctcatcgagacataa

SEQ ID NO: 320 - RNA, 21 nt, synthetic construct
  source 1..21: mol_type = other RNA
tattgctcatcgagacataaa

SEQ ID NO: 321 - RNA, 21 nt, synthetic construct
  source 1..21: mol_type = other RNA
attgctcatcgagacataaaa

SEQ ID NO: 322 - RNA, 21 nt, synthetic construct
  source 1..21: mol_type = other RNA
ttgctcatcgagacataaaaa

SEQ ID NO: 323 - RNA, 21 nt, synthetic construct
  source 1..21: mol_type = other RNA
tgctcatcgagacataaaata

SEQ ID NO: 324 - RNA, 21 nt, synthetic construct
  source 1..21: mol_type = other RNA
gctcatcgagacataaaatca

SEQ ID NO: 325 - RNA, 21 nt, synthetic construct
  source 1..21: mol_type = other RNA
ctcatcgagacataaaatcaa

SEQ ID NO: 326 - RNA, 21 nt, synthetic construct
  source 1..21: mol_type = other RNA
tcatcgagacataaaatcaaa

SEQ ID NO: 327 - RNA, 21 nt, synthetic construct
  source 1..21: mol_type = other RNA
catcgagacataaaatcaaaa

SEQ ID NO: 328 - RNA, 21 nt, synthetic construct
  source 1..21: mol_type = other RNA
atcgagacataaaatcaaaga

SEQ ID NO: 329 - RNA, 21 nt, synthetic construct
  source 1..21: mol_type = other RNA
tcgagacataaaatcaaagaa

SEQ ID NO: 330 - RNA, 21 nt, synthetic construct
  source 1..21: mol_type = other RNA
cgagacataaaatcaaagaaa

SEQ ID NO: 331 - RNA, 21 nt, synthetic construct
  source 1..21: mol_type = other RNA
gagacataaaatcaaagaata

SEQ ID NO: 332 - RNA, 21 nt, synthetic construct
  source 1..21: mol_type = other RNA
agacataaaatcaaagaataa

SEQ ID NO: 333 - RNA, 21 nt, synthetic construct
  source 1..21: mol_type = other RNA
aatatcttagtgaaaaagtga

SEQ ID NO: 334 - RNA, 21 nt, synthetic construct
  source 1..21: mol_type = other RNA
atatcttagtgaaaaagtgta

SEQ ID NO: 335 - RNA, 21 nt, synthetic construct
  source 1..21: mol_type = other RNA
tatcttagtgaaaaagtgtga

SEQ ID NO: 336 - RNA, 21 nt, synthetic construct
  source 1..21: mol_type = other RNA
atcttagtgaaaaagtgtgaa

SEQ ID NO: 337 - RNA, 21 nt, synthetic construct
  source 1..21: mol_type = other RNA
tcttagtgaaaaagtgtgaaa

SEQ ID NO: 338 - RNA, 21 nt, synthetic construct
  source 1..21: mol_type = other RNA
cttagtgaaaaagtgtgaaaa

SEQ ID NO: 339 - RNA, 21 nt, synthetic construct
  source 1..21: mol_type = other RNA
ttagtgaaaaagtgtgaaaca

SEQ ID NO: 340 - RNA, 21 nt, synthetic construct
  source 1..21: mol_type = other RNA
tagtgaaaaagtgtgaaacta

SEQ ID NO: 341 - RNA, 21 nt, synthetic construct
  source 1..21: mol_type = other RNA
agtgaaaaagtgtgaaactta

SEQ ID NO: 342 - RNA, 21 nt, synthetic construct
  source 1..21: mol_type = other RNA
gtgaaaaagtgtgaaacttga

SEQ ID NO: 343 - RNA, 21 nt, synthetic construct
  source 1..21: mol_type = other RNA
tgaaaaagtgtgaaacttgta

SEQ ID NO: 344 - RNA, 21 nt, synthetic construct
  source 1..21: mol_type = other RNA
gaaaaagtgtgaaacttgtga

SEQ ID NO: 345 - RNA, 21 nt, synthetic construct
  source 1..21: mol_type = other RNA
aaaaagtgtgaaacttgtgca

SEQ ID NO: 346 - RNA, 21 nt, synthetic construct
  source 1..21: mol_type = other RNA
aaaagtgtgaaacttgtgcca

SEQ ID NO: 347 - RNA, 21 nt, synthetic construct
  source 1..21: mol_type = other RNA
aagtgtgaaacttgtgccata

SEQ ID NO: 348 - RNA, 21 nt, synthetic construct
  source 1..21: mol_type = other RNA
agtgtgaaacttgtgccataa

SEQ ID NO: 349 - RNA, 21 nt, synthetic construct
  source 1..21: mol_type = other RNA
gctgtgaagcatgattcaata

SEQ ID NO: 350 - RNA, 21 nt, synthetic construct
  source 1..21: mol_type = other RNA
ctgtgaagcatgattcaataa

SEQ ID NO: 351 - RNA, 21 nt, synthetic construct
  source 1..21: mol_type = other RNA
gtgaagcatgattcaatacta

SEQ ID NO: 352 - RNA, 21 nt, synthetic construct
  source 1..21: mol_type = other RNA
tgaagcatgattcaatactga

SEQ ID NO: 353 - RNA, 21 nt, synthetic construct
  source 1..21: mol_type = other RNA
gcatgattcaatactgaacaa

SEQ ID NO: 354 - RNA, 21 nt, synthetic construct
  source 1..21: mol_type = other RNA
atgattcaatactgaacacta

SEQ ID NO: 355 - RNA, 21 nt, synthetic construct
  source 1..21: mol_type = other RNA
tgattcaatactgaacactaa

SEQ ID NO: 356 - RNA, 21 nt, synthetic construct
  source 1..21: mol_type = other RNA
atactgaacactatcgacata

SEQ ID NO: 357 - RNA, 21 nt, synthetic construct
  source 1..21: mol_type = other RNA
actgaacactatcgacataca

SEQ ID NO: 358 - RNA, 21 nt, synthetic construct
  source 1..21: mol_type = other RNA
atacctcagaatcctaaagta

SEQ ID NO: 359 - RNA, 21 nt, synthetic construct
  source 1..21: mol_type = other RNA
tatatggctcctgaaatgcta

SEQ ID NO: 360 - RNA, 21 nt, synthetic construct
  source 1..21: mol_type = other RNA
tggctcctgaaatgcttgata

SEQ ID NO: 361 - RNA, 21 nt, synthetic construct
  source 1..21: mol_type = other RNA
ggctcctgaaatgcttgatga

SEQ ID NO: 362 - RNA, 21 nt, synthetic construct
  source 1..21: mol_type = other RNA
gctcctgaaatgcttgatgaa

SEQ ID NO: 363 - RNA, 21 nt, synthetic construct
  source 1..21: mol_type = other RNA
ctcctgaaatgcttgatgata

SEQ ID NO: 364 - RNA, 21 nt, synthetic construct
  source 1..21: mol_type = other RNA
tcctgaaatgcttgatgataa

SEQ ID NO: 365 - RNA, 21 nt, synthetic construct
  source 1..21: mol_type = other RNA
cctgaaatgcttgatgataca

SEQ ID NO: 366 - RNA, 21 nt, synthetic construct
  source 1..21: mol_type = other RNA
ctgaaatgcttgatgatacaa

SEQ ID NO: 367 - RNA, 21 nt, synthetic construct
  source 1..21: mol_type = other RNA
tgaaatgcttgatgatacaaa

SEQ ID NO: 368 - RNA, 21 nt, synthetic construct
  source 1..21: mol_type = other RNA
gaaatgcttgatgatacaata

SEQ ID NO: 369 - RNA, 21 nt, synthetic construct
  source 1..21: mol_type = other RNA
aaatgcttgatgatacaatga

SEQ ID NO: 370 - RNA, 21 nt, synthetic construct
  source 1..21: mol_type = other RNA
aatgcttgatgatacaatgaa

SEQ ID NO: 371 - RNA, 21 nt, synthetic construct
  source 1..21: mol_type = other RNA
atgcttgatgatacaatgaaa

SEQ ID NO: 372 - RNA, 21 nt, synthetic construct
  source 1..21: mol_type = other RNA
tgcttgatgatacaatgaata

SEQ ID NO: 373 - RNA, 21 nt, synthetic construct
  source 1..21: mol_type = other RNA
gcttgatgatacaatgaatga

SEQ ID NO: 374 - RNA, 21 nt, synthetic construct
  source 1..21: mol_type = other RNA
cttgatgatacaatgaatgta

SEQ ID NO: 375 - RNA, 21 nt, synthetic construct
  source 1..21: mol_type = other RNA
ttgatgatacaatgaatgtga

SEQ ID NO: 376 - RNA, 21 nt, synthetic construct
  source 1..21: mol_type = other RNA
tgatgatacaatgaatgtgaa

SEQ ID NO: 377 - RNA, 21 nt, synthetic construct
  source 1..21: mol_type = other RNA
gatgatacaatgaatgtgaaa

SEQ ID NO: 378 - RNA, 21 nt, synthetic construct
  source 1..21: mol_type = other RNA
atgatacaatgaatgtgaata

SEQ ID NO: 379 - RNA, 21 nt, synthetic construct
  source 1..21: mol_type = other RNA
tgatacaatgaatgtgaataa

SEQ ID NO: 380 - RNA, 21 nt, synthetic construct
  source 1..21: mol_type = other RNA
atacaatgaatgtgaatatca

SEQ ID NO: 381 - RNA, 21 nt, synthetic construct
  source 1..21: mol_type = other RNA
tacaatgaatgtgaatatcta

SEQ ID NO: 382 - RNA, 21 nt, synthetic construct
  source 1..21: mol_type = other RNA
aatgaatgtgaatatctttga

SEQ ID NO: 383 - RNA, 21 nt, synthetic construct
  source 1..21: mol_type = other RNA
atgaatgtgaatatctttgaa

SEQ ID NO: 384 - RNA, 21 nt, synthetic construct
  source 1..21: mol_type = other RNA
tgaatgtgaatatctttgaga

SEQ ID NO: 385 - RNA, 21 nt, synthetic construct
  source 1..21: mol_type = other RNA
gaatgtgaatatctttgagta

SEQ ID NO: 386 - RNA, 21 nt, synthetic construct
  source 1..21: mol_type = other RNA
aatgtgaatatctttgagtca

SEQ ID NO: 387 - RNA, 21 nt, synthetic construct
  source 1..21: mol_type = other RNA
atgtgaatatctttgagtcca

SEQ ID NO: 388 - RNA, 21 nt, synthetic construct
  source 1..21: mol_type = other RNA
tgtgaatatctttgagtccta

SEQ ID NO: 389 - RNA, 21 nt, synthetic construct
  source 1..21: mol_type = other RNA
gtgaatatctttgagtcctta

SEQ ID NO: 390 - RNA, 21 nt, synthetic construct
  source 1..21: mol_type = other RNA
tgaatatctttgagtccttca

SEQ ID NO: 391 - RNA, 21 nt, synthetic construct
  source 1..21: mol_type = other RNA
gaatatctttgagtccttcaa

SEQ ID NO: 392 - RNA, 21 nt, synthetic construct
  source 1..21: mol_type = other RNA
aatatctttgagtccttcaaa

SEQ ID NO: 393 - RNA, 21 nt, synthetic construct
  source 1..21: mol_type = other RNA
atatctttgagtccttcaaaa

SEQ ID NO: 394 - RNA, 21 nt, synthetic construct
  source 1..21: mol_type = other RNA
tatctttgagtccttcaaaca

SEQ ID NO: 395 - RNA, 21 nt, synthetic construct
  source 1..21: mol_type = other RNA
atctttgagtccttcaaacga

SEQ ID NO: 396 - RNA, 21 nt, synthetic construct
  source 1..21: mol_type = other RNA
tctttgagtccttcaaacgaa

SEQ ID NO: 397 - RNA, 21 nt, synthetic construct
  source 1..21: mol_type = other RNA
ctttgagtccttcaaacgaga

SEQ ID NO: 398 - RNA, 21 nt, synthetic construct
  source 1..21: mol_type = other RNA
ttcaaacgagctgacatctaa

SEQ ID NO: 399 - RNA, 21 nt, synthetic construct
  source 1..21: mol_type = other RNA
aacgagctgacatctattcta

SEQ ID NO: 400 - RNA, 21 nt, synthetic construct
  source 1..21: mol_type = other RNA
acgagctgacatctattctga

SEQ ID NO: 401 - RNA, 21 nt, synthetic construct
  source 1..21: mol_type = other RNA
cgagctgacatctattctgta

SEQ ID NO: 402 - RNA, 21 nt, synthetic construct
  source 1..21: mol_type = other RNA
agctgacatctattctgttga

SEQ ID NO: 403 - RNA, 21 nt, synthetic construct
  source 1..21: mol_type = other RNA
gctgacatctattctgttgga

SEQ ID NO: 404 - RNA, 21 nt, synthetic construct
  source 1..21: mol_type = other RNA
gacatctattctgttggtcta

SEQ ID NO: 405 - RNA, 21 nt, synthetic construct
  source 1..21: mol_type = other RNA
tattctgttggtctggtttaa

SEQ ID NO: 406 - RNA, 21 nt, synthetic construct
  source 1..21: mol_type = other RNA
gtctggtttactgggaaataa

SEQ ID NO: 407 - RNA, 21 nt, synthetic construct
  source 1..21: mol_type = other RNA
tgaggagtaccaattgcctta

SEQ ID NO: 408 - RNA, 21 nt, synthetic construct
  source 1..21: mol_type = other RNA
gaggagtaccaattgccttaa

SEQ ID NO: 409 - RNA, 21 nt, synthetic construct
  source 1..21: mol_type = other RNA
aggagtaccaattgccttata

SEQ ID NO: 410 - RNA, 21 nt, synthetic construct
  source 1..21: mol_type = other RNA
ggagtaccaattgccttatta

SEQ ID NO: 411 - RNA, 21 nt, synthetic construct
  source 1..21: mol_type = other RNA
gagtaccaattgccttattaa

SEQ ID NO: 412 - RNA, 21 nt, synthetic construct
  source 1..21: mol_type = other RNA
agtaccaattgccttattata

SEQ ID NO: 413 - RNA, 21 nt, synthetic construct
  source 1..21: mol_type = other RNA
gtaccaattgccttattatga

SEQ ID NO: 414 - RNA, 21 nt, synthetic construct
  source 1..21: mol_type = other RNA
taccaattgccttattatgaa

SEQ ID NO: 415 - RNA, 21 nt, synthetic construct
  source 1..21: mol_type = other RNA
accaattgccttattatgaca

SEQ ID NO: 416 - RNA, 21 nt, synthetic construct
  source 1..21: mol_type = other RNA
ccaattgccttattatgacaa

SEQ ID NO: 417 - RNA, 21 nt, synthetic construct
  source 1..21: mol_type = other RNA
caattgccttattatgacata

SEQ ID NO: 418 - RNA, 21 nt, synthetic construct
  source 1..21: mol_type = other RNA
aattgccttattatgacatga

SEQ ID NO: 419 - RNA, 21 nt, synthetic construct
  source 1..21: mol_type = other RNA
attgccttattatgacatgga

SEQ ID NO: 420 - RNA, 21 nt, synthetic construct
  source 1..21: mol_type = other RNA
ttgccttattatgacatggta

SEQ ID NO: 421 - RNA, 21 nt, synthetic construct
  source 1..21: mol_type = other RNA
tgccttattatgacatggtga

SEQ ID NO: 422 - RNA, 21 nt, synthetic construct
  source 1..21: mol_type = other RNA
gccttattatgacatggtgca

SEQ ID NO: 423 - RNA, 21 nt, synthetic construct
  source 1..21: mol_type = other RNA
ccttattatgacatggtgcca

SEQ ID NO: 424 - RNA, 21 nt, synthetic construct
  source 1..21: mol_type = other RNA
cttattatgacatggtgccta

SEQ ID NO: 425 - RNA, 21 nt, synthetic construct
  source 1..21: mol_type = other RNA
ttattatgacatggtgcctta

SEQ ID NO: 426 - RNA, 21 nt, synthetic construct
  source 1..21: mol_type = other RNA
tattatgacatggtgccttca

SEQ ID NO: 427 - RNA, 21 nt, synthetic construct
  source 1..21: mol_type = other RNA
attatgacatggtgccttcaa

SEQ ID NO: 428 - RNA, 21 nt, synthetic construct
  source 1..21: mol_type = other RNA
atagaggaaatgagaaaggta

SEQ ID NO: 429 - RNA, 21 nt, synthetic construct
  source 1..21: mol_type = other RNA
gaggaaatgagaaaggttgta

SEQ ID NO: 430 - RNA, 21 nt, synthetic construct
  source 1..21: mol_type = other RNA
aggaaatgagaaaggttgtta

SEQ ID NO: 431 - RNA, 21 nt, synthetic construct
  source 1..21: mol_type = other RNA
ggaaatgagaaaggttgttta

SEQ ID NO: 432 - RNA, 21 nt, synthetic construct
  source 1..21: mol_type = other RNA
gaaatgagaaaggttgtttga

SEQ ID NO: 433 - RNA, 21 nt, synthetic construct
  source 1..21: mol_type = other RNA
aaatgagaaaggttgtttgta

SEQ ID NO: 434 - RNA, 21 nt, synthetic construct
  source 1..21: mol_type = other RNA
aatgagaaaggttgtttgtga

SEQ ID NO: 435 - RNA, 21 nt, synthetic construct
  source 1..21: mol_type = other RNA
atgagaaaggttgtttgtgaa

SEQ ID NO: 436 - RNA, 21 nt, synthetic construct
  source 1..21: mol_type = other RNA
tgagaaaggttgtttgtgaca

SEQ ID NO: 437 - RNA, 21 nt, synthetic construct
  source 1..21: mol_type = other RNA
gagaaaggttgtttgtgacca

SEQ ID NO: 438 - RNA, 21 nt, synthetic construct
  source 1..21: mol_type = other RNA
agaaaggttgtttgtgaccaa

SEQ ID NO: 439 - RNA, 21 nt, synthetic construct
  source 1..21: mol_type = other RNA
gaaaggttgtttgtgaccaga

SEQ ID NO: 440 - RNA, 21 nt, synthetic construct
  source 1..21: mol_type = other RNA
aaaggttgtttgtgaccagaa

SEQ ID NO: 441 - RNA, 21 nt, synthetic construct
  source 1..21: mol_type = other RNA
aaggttgtttgtgaccagaaa

SEQ ID NO: 442 - RNA, 21 nt, synthetic construct
  source 1..21: mol_type = other RNA
aggttgtttgtgaccagaaga

SEQ ID NO: 443 - RNA, 21 nt, synthetic construct
  source 1..21: mol_type = other RNA
ggttgtttgtgaccagaagta

SEQ ID NO: 444 - RNA, 21 nt, synthetic construct
  source 1..21: mol_type = other RNA
gttgtttgtgaccagaagtta

SEQ ID NO: 445 - RNA, 21 nt, synthetic construct
  source 1..21: mol_type = other RNA
ttgtttgtgaccagaagttta

SEQ ID NO: 446 - RNA, 21 nt, synthetic construct
  source 1..21: mol_type = other RNA
cagaagtttcgaccaagtata

SEQ ID NO: 447 - RNA, 21 nt, synthetic construct
  source 1..21: mol_type = other RNA
agtggcaaagttgtgaagcaa

SEQ ID NO: 448 - RNA, 21 nt, synthetic construct
  source 1..21: mol_type = other RNA
tggcaaagttgtgaagcacta

SEQ ID NO: 449 - RNA, 21 nt, synthetic construct
  source 1..21: mol_type = other RNA
taatgcgtgagtgttggtata

SEQ ID NO: 450 - RNA, 21 nt, synthetic construct
  source 1..21: mol_type = other RNA
gcctaactgctcttcgtatta

SEQ ID NO: 451 - RNA, 21 nt, synthetic construct
  source 1..21: mol_type = other RNA
cctaactgctcttcgtattaa

SEQ ID NO: 452 - RNA, 21 nt, synthetic construct
  source 1..21: mol_type = other RNA
ctaactgctcttcgtattaaa

SEQ ID NO: 453 - RNA, 21 nt, synthetic construct
  source 1..21: mol_type = other RNA
actgctcttcgtattaagaaa

SEQ ID NO: 454 - RNA, 21 nt, synthetic construct
  source 1..21: mol_type = other RNA
gctcttcgtattaagaagaca

SEQ ID NO: 455 - RNA, 21 nt, synthetic construct
  source 1..21: mol_type = other RNA
ctcttcgtattaagaagacta

SEQ ID NO: 456 - RNA, 21 nt, synthetic construct
  source 1..21: mol_type = other RNA
tatatctcaactttgtgtcaa

SEQ ID NO: 457 - RNA, 21 nt, synthetic construct
  source 1..21: mol_type = other RNA
atatctcaactttgtgtcaaa

SEQ ID NO: 458 - RNA, 21 nt, synthetic construct
  source 1..21: mol_type = other RNA
tatctcaactttgtgtcaaaa

SEQ ID NO: 459 - RNA, 21 nt, synthetic construct
  source 1..21: mol_type = other RNA
ctcaactttgtgtcaaagaaa

SEQ ID NO: 460 - RNA, 21 nt, synthetic construct
  source 1..21: mol_type = other RNA
actgcaaagcctaatgatgaa

SEQ ID NO: 461 - RNA, 21 nt, synthetic construct
  source 1..21: mol_type = other RNA
ctgcaaagcctaatgatgata

SEQ ID NO: 462 - RNA, 21 nt, synthetic construct
  source 1..21: mol_type = other RNA
tgcaaagcctaatgatgataa

SEQ ID NO: 463 - RNA, 21 nt, synthetic construct
  source 1..21: mol_type = other RNA
gcaaagcctaatgatgataaa

SEQ ID NO: 464 - RNA, 21 nt, synthetic construct
  source 1..21: mol_type = other RNA
caaagcctaatgatgataata

SEQ ID NO: 465 - RNA, 21 nt, synthetic construct
  source 1..21: mol_type = other RNA
aaagcctaatgatgataatta

SEQ ID NO: 466 - RNA, 21 nt, synthetic construct
  source 1..21: mol_type = other RNA
aagcctaatgatgataattaa

SEQ ID NO: 467 - RNA, 21 nt, synthetic construct
  source 1..21: mol_type = other RNA
gcctaatgatgataattatga

SEQ ID NO: 468 - RNA, 21 nt, synthetic construct
  source 1..21: mol_type = other RNA
cctaatgatgataattatgta

SEQ ID NO: 469 - RNA, 21 nt, synthetic construct
  source 1..21: mol_type = other RNA
ctaatgatgataattatgtta

SEQ ID NO: 470 - RNA, 21 nt, synthetic construct
  source 1..21: mol_type = other RNA
taaaaagaaatctctcataga

SEQ ID NO: 471 - RNA, 21 nt, synthetic construct
  source 1..21: mol_type = other RNA
aaaaagaaatctctcatagca

SEQ ID NO: 472 - RNA, 21 nt, synthetic construct
  source 1..21: mol_type = other RNA
aaatctctcatagctttctta

SEQ ID NO: 473 - RNA, 21 nt, synthetic construct
  source 1..21: mol_type = other RNA
atctctcatagctttctttta

SEQ ID NO: 474 - RNA, 21 nt, synthetic construct
  source 1..21: mol_type = other RNA
tcatagctttcttttccatta

SEQ ID NO: 475 - RNA, 21 nt, synthetic construct
  source 1..21: mol_type = other RNA
catagctttcttttccattta

SEQ ID NO: 476 - RNA, 21 nt, synthetic construct
  source 1..21: mol_type = other RNA
ctttatgtgaatgtttttgca

SEQ ID NO: 477 - RNA, 21 nt, synthetic construct
  source 1..21: mol_type = other RNA
atgtgaatgtttttgccatta

SEQ ID NO: 478 - RNA, 21 nt, synthetic construct
  source 1..21: mol_type = other RNA
gtgaatgtttttgccatttta

SEQ ID NO: 479 - RNA, 21 nt, synthetic construct
  source 1..21: mol_type = other RNA
gaatgtttttgccatttttta

SEQ ID NO: 480 - RNA, 21 nt, synthetic construct
  source 1..21: mol_type = other RNA
agataagacagtacagtatta

SEQ ID NO: 481 - RNA, 21 nt, synthetic construct
  source 1..21: mol_type = other RNA
taagacagtacagtatttaaa

SEQ ID NO: 482 - RNA, 21 nt, synthetic construct
  source 1..21: mol_type = other RNA
agacagtacagtatttaagta

SEQ ID NO: 483 - RNA, 21 nt, synthetic construct
  source 1..21: mol_type = other RNA
cagcatgaaaagataactcta

SEQ ID NO: 484 - RNA, 21 nt, synthetic construct
  source 1..21: mol_type = other RNA
ttcatccaatctctatgttaa

SEQ ID NO: 485 - RNA, 21 nt, synthetic construct
  source 1..21: mol_type = other RNA
aagcaacacctcaactcatca

SEQ ID NO: 486 - RNA, 21 nt, synthetic construct
  source 1..21: mol_type = other RNA
caacacctcaactcatcttta

SEQ ID NO: 487 - RNA, 21 nt, synthetic construct
  source 1..21: mol_type = other RNA
cacctcaactcatctttttaa

SEQ ID NO: 488 - RNA, 21 nt, synthetic construct
  source 1..21: mol_type = other RNA
cctcaactcatctttttatta

SEQ ID NO: 489 - RNA, 21 nt, synthetic construct
  source 1..21: mol_type = other RNA
ctcaactcatctttttattta

SEQ ID NO: 490 - RNA, 21 nt, synthetic construct
  source 1..21: mol_type = other RNA
tctataaaaatgttatagtca

SEQ ID NO: 491 - RNA, 21 nt, synthetic construct
  source 1..21: mol_type = other RNA
attttacttgaaccaagagca

SEQ ID NO: 492 - RNA, 21 nt, synthetic construct
  source 1..21: mol_type = other RNA
ttttacttgaaccaagagcaa

SEQ ID NO: 493 - RNA, 21 nt, synthetic construct
  source 1..21: mol_type = other RNA
tttacttgaaccaagagcaca

SEQ ID NO: 494 - RNA, 21 nt, synthetic construct
  source 1..21: mol_type = other RNA
ttacttgaaccaagagcacaa

SEQ ID NO: 495 - RNA, 21 nt, synthetic construct
  source 1..21: mol_type = other RNA
tacttgaaccaagagcacata

SEQ ID NO: 496 - RNA, 21 nt, synthetic construct
  source 1..21: mol_type = other RNA
acttgaaccaagagcacatga

SEQ ID NO: 497 - RNA, 21 nt, synthetic construct
  source 1..21: mol_type = other RNA
cttgaaccaagagcacatgaa

SEQ ID NO: 498 - RNA, 21 nt, synthetic construct
  source 1..21: mol_type = other RNA
ttgaaccaagagcacatgaaa

SEQ ID NO: 499 - RNA, 21 nt, synthetic construct
  source 1..21: mol_type = other RNA
tgaaccaagagcacatgaata

SEQ ID NO: 500 - RNA, 21 nt, synthetic construct
  source 1..21: mol_type = other RNA
gaaccaagagcacatgaatga

SEQ ID NO: 501 - RNA, 21 nt, synthetic construct
  source 1..21: mol_type = other RNA
aaccaagagcacatgaatgaa

SEQ ID NO: 502 - RNA, 21 nt, synthetic construct
  source 1..21: mol_type = other RNA
accaagagcacatgaatgaaa

SEQ ID NO: 503 - RNA, 21 nt, synthetic construct
  source 1..21: mol_type = other RNA
ccaagagcacatgaatgaaca

SEQ ID NO: 504 - RNA, 21 nt, synthetic construct
  source 1..21: mol_type = other RNA
caagagcacatgaatgaacaa

SEQ ID NO: 505 - RNA, 21 nt, synthetic construct
  source 1..21: mol_type = other RNA
aagagcacatgaatgaacaga

SEQ ID NO: 506 - RNA, 21 nt, synthetic construct
  source 1..21: mol_type = other RNA
ggaaaagatgtaaaaacatta

SEQ ID NO: 507 - RNA, 21 nt, synthetic construct
  source 1..21: mol_type = other RNA
tttttttctgagatgaaaaca

SEQ ID NO: 508 - RNA, 21 nt, synthetic construct
  source 1..21: mol_type = other RNA
atgcaaattagagcatgctaa

SEQ ID NO: 509 - RNA, 21 nt, synthetic construct
  source 1..21: mol_type = other RNA
tgcaaattagagcatgctata

SEQ ID NO: 510 - RNA, 21 nt, synthetic construct
  source 1..21: mol_type = other RNA
aaattagagcatgctatctta

SEQ ID NO: 511 - RNA, 21 nt, synthetic construct
  source 1..21: mol_type = other RNA
agagcatgctatctttaggta

SEQ ID NO: 512 - RNA, 21 nt, synthetic construct
  source 1..21: mol_type = other RNA
gcatgctatctttaggtgata

SEQ ID NO: 513 - RNA, 21 nt, synthetic construct
  source 1..21: mol_type = other RNA
tctttaggtgatgcaatctaa

SEQ ID NO: 514 - RNA, 21 nt, synthetic construct
  source 1..21: mol_type = other RNA
agttagcaggactttttaaaa

SEQ ID NO: 515 - RNA, 21 nt, synthetic construct
  source 1..21: mol_type = other RNA
gttagcaggactttttaaaaa

SEQ ID NO: 516 - RNA, 21 nt, synthetic construct
  source 1..21: mol_type = other RNA
ttagcaggactttttaaaaaa

SEQ ID NO: 517 - RNA, 21 nt, synthetic construct
  source 1..21: mol_type = other RNA
tagcaggactttttaaaaata

SEQ ID NO: 518 - RNA, 21 nt, synthetic construct
  source 1..21: mol_type = other RNA
ctctaaactttaatatatcga

SEQ ID NO: 519 - RNA, 21 nt, synthetic construct
  source 1..21: mol_type = other RNA
tctaaactttaatatatcgaa

SEQ ID NO: 520 - RNA, 21 nt, synthetic construct
  source 1..21: mol_type = other RNA
aaactttaatatatcgaacga

SEQ ID NO: 521 - RNA, 21 nt, synthetic construct
  source 1..21: mol_type = other RNA
actttaatatatcgaacgtga

SEQ ID NO: 522 - RNA, 21 nt, synthetic construct
  source 1..21: mol_type = other RNA
ctttaatatatcgaacgtgaa

SEQ ID NO: 523 - RNA, 21 nt, synthetic construct
  source 1..21: mol_type = other RNA
tttaatatatcgaacgtgaga

SEQ ID NO: 524 - RNA, 21 nt, synthetic construct
  source 1..21: mol_type = other RNA
ttaatatatcgaacgtgagaa

SEQ ID NO: 525 - RNA, 21 nt, synthetic construct
  source 1..21: mol_type = other RNA
taatatatcgaacgtgagaga

SEQ ID NO: 526 - RNA, 21 nt, synthetic construct
  source 1..21: mol_type = other RNA
aatatatcgaacgtgagagta

SEQ ID NO: 527 - RNA, 21 nt, synthetic construct
  source 1..21: mol_type = other RNA
atatatcgaacgtgagagtga

SEQ ID NO: 528 - RNA, 21 nt, synthetic construct
  source 1..21: mol_type = other RNA
tatatcgaacgtgagagtgga

SEQ ID NO: 529 - RNA, 21 nt, synthetic construct
  source 1..21: mol_type = other RNA
gttcttcataatccactacta

SEQ ID NO: 530 - RNA, 21 nt, synthetic construct
  source 1..21: mol_type = other RNA
tgaaccactaaacttgttcca

SEQ ID NO: 531 - RNA, 21 nt, synthetic construct
  source 1..21: mol_type = other RNA
gaaccactaaacttgttccta

SEQ ID NO: 532 - RNA, 21 nt, synthetic construct
  source 1..21: mol_type = other RNA
aaccactaaacttgttcctta

SEQ ID NO: 533 - RNA, 21 nt, synthetic construct
  source 1..21: mol_type = other RNA
accactaaacttgttccttta

SEQ ID NO: 534 - RNA, 21 nt, synthetic construct
  source 1..21: mol_type = other RNA
ccactaaacttgttcctttca

SEQ ID NO: 535 - RNA, 21 nt, synthetic construct
  source 1..21: mol_type = other RNA
cactaaacttgttcctttcaa

SEQ ID NO: 536 - RNA, 21 nt, synthetic construct
  source 1..21: mol_type = other RNA
actaaacttgttcctttcata

SEQ ID NO: 537 - RNA, 21 nt, synthetic construct
  source 1..21: mol_type = other RNA
ctaaacttgttcctttcatta

SEQ ID NO: 538 - RNA, 21 nt, synthetic construct
  source 1..21: mol_type = other RNA
taaacttgttcctttcattta

SEQ ID NO: 539 - RNA, 21 nt, synthetic construct
  source 1..21: mol_type = other RNA
aaacttgttcctttcatttaa

SEQ ID NO: 540 - RNA, 21 nt, synthetic construct
  source 1..21: mol_type = other RNA
aacttgttcctttcatttaca

SEQ ID NO: 541 - RNA, 21 nt, synthetic construct
  source 1..21: mol_type = other RNA
acttgttcctttcatttacaa

SEQ ID NO: 542 - RNA, 21 nt, synthetic construct
  source 1..21: mol_type = other RNA
cttgttcctttcatttacaaa

SEQ ID NO: 543 - RNA, 21 nt, synthetic construct
  source 1..21: mol_type = other RNA
ttgttcctttcatttacaaaa

SEQ ID NO: 544 - RNA, 21 nt, synthetic construct
  source 1..21: mol_type = other RNA
tgttcctttcatttacaaaaa

SEQ ID NO: 545 - RNA, 21 nt, synthetic construct
  source 1..21: mol_type = other RNA
gttcctttcatttacaaaaga

SEQ ID NO: 546 - RNA, 21 nt, synthetic construct
  source 1..21: mol_type = other RNA
ttcctttcatttacaaaagaa

SEQ ID NO: 547 - RNA, 21 nt, synthetic construct
  source 1..21: mol_type = other RNA
tcctttcatttacaaaagaga

SEQ ID NO: 548 - RNA, 21 nt, synthetic construct
  source 1..21: mol_type = other RNA
cctttcatttacaaaagagaa

SEQ ID NO: 549 - RNA, 21 nt, synthetic construct
  source 1..21: mol_type = other RNA
ctttcatttacaaaagagata

SEQ ID NO: 550 - RNA, 21 nt, synthetic construct
  source 1..21: mol_type = other RNA
tttcatttacaaaagagataa

SEQ ID NO: 551 - RNA, 21 nt, synthetic construct
  source 1..21: mol_type = other RNA
ttcatttacaaaagagataca

SEQ ID NO: 552 - RNA, 21 nt, synthetic construct
  source 1..21: mol_type = other RNA
tcatttacaaaagagatacca

SEQ ID NO: 553 - RNA, 21 nt, synthetic construct
  source 1..21: mol_type = other RNA
catttacaaaagagataccta

SEQ ID NO: 554 - RNA, 21 nt, synthetic construct
  source 1..21: mol_type = other RNA
atttacaaaagagatacctga

SEQ ID NO: 555 - RNA, 21 nt, synthetic construct
  source 1..21: mol_type = other RNA
tttacaaaagagatacctgaa

SEQ ID NO: 556 - RNA, 21 nt, synthetic construct
  source 1..21: mol_type = other RNA
ttacaaaagagatacctgaca

SEQ ID NO: 557 - RNA, 21 nt, synthetic construct
  source 1..21: mol_type = other RNA
tacaaaagagatacctgacaa

SEQ ID NO: 558 - RNA, 21 nt, synthetic construct
  source 1..21: mol_type = other RNA
acaaaagagatacctgacata

SEQ ID NO: 559 - RNA, 21 nt, synthetic construct
  source 1..21: mol_type = other RNA
caaaagagatacctgacatca

SEQ ID NO: 560 - RNA, 21 nt, synthetic construct
  source 1..21: mol_type = other RNA
aaaagagatacctgacatcca

SEQ ID NO: 561 - RNA, 21 nt, synthetic construct
  source 1..21: mol_type = other RNA
tcctgagacactgagaaatga

SEQ ID NO: 562 - RNA, 21 nt, synthetic construct
  source 1..21: mol_type = other RNA
ctgagacactgagaaatgtca

SEQ ID NO: 563 - RNA, 21 nt, synthetic construct
  source 1..21: mol_type = other RNA
gagacactgagaaatgtccta

SEQ ID NO: 564 - RNA, 21 nt, synthetic construct
  source 1..21: mol_type = other RNA
agaaatgtcctgaagtcacaa

SEQ ID NO: 565 - RNA, 21 nt, synthetic construct
  source 1..21: mol_type = other RNA
cctgaagtcacacagctaata

SEQ ID NO: 566 - RNA, 21 nt, synthetic construct
  source 1..21: mol_type = other RNA
taggtccaaatcttgtgataa

SEQ ID NO: 567 - RNA, 21 nt, synthetic construct
  source 1..21: mol_type = other RNA
aggtccaaatcttgtgataaa

SEQ ID NO: 568 - RNA, 21 nt, synthetic construct
  source 1..21: mol_type = other RNA
gtccaaatcttgtgataatga

SEQ ID NO: 569 - RNA, 21 nt, synthetic construct
  source 1..21: mol_type = other RNA
ccaaatcttgtgataatgaaa

SEQ ID NO: 570 - RNA, 21 nt, synthetic construct
  source 1..21: mol_type = other RNA
aaatcttgtgataatgaacaa

SEQ ID NO: 571 - RNA, 21 nt, synthetic construct
  source 1..21: mol_type = other RNA
tgtgataatgaacaccgtaaa

SEQ ID NO: 572 - RNA, 21 nt, synthetic construct
  source 1..21: mol_type = other RNA
ggttagctagcttcctactta

SEQ ID NO: 573 - RNA, 21 nt, synthetic construct
  source 1..21: mol_type = other RNA
gttagctagcttcctacttta

SEQ ID NO: 574 - RNA, 21 nt, synthetic construct
  source 1..21: mol_type = other RNA
agcttcctactttcccttgaa

SEQ ID NO: 575 - RNA, 21 nt, synthetic construct
  source 1..21: mol_type = other RNA
cctactttcccttgaatagta

SEQ ID NO: 576 - RNA, 21 nt, synthetic construct
  source 1..21: mol_type = other RNA
ctactttcccttgaatagtga

SEQ ID NO: 577 - RNA, 21 nt, synthetic construct
  source 1..21: mol_type = other RNA
tcccttgaatagtgcttttca

SEQ ID NO: 578 - RNA, 21 nt, synthetic construct
  source 1..21: mol_type = other RNA
cccttgaatagtgcttttcta

SEQ ID NO: 579 - RNA, 21 nt, synthetic construct
  source 1..21: mol_type = other RNA
ccttgaatagtgcttttctca

SEQ ID NO: 580 - RNA, 21 nt, synthetic construct
  source 1..21: mol_type = other RNA
cttgaatagtgcttttctcca

SEQ ID NO: 581 - RNA, 21 nt, synthetic construct
  source 1..21: mol_type = other RNA
tgaatagtgcttttctcccta

SEQ ID NO: 582 - RNA, 21 nt, synthetic construct
  source 1..21: mol_type = other RNA
gcttttctccctatgtaataa

SEQ ID NO: 583 - RNA, 21 nt, synthetic construct
  source 1..21: mol_type = other RNA
tgtggtttagaaggcatatta

SEQ ID NO: 584 - RNA, 21 nt, synthetic construct
  source 1..21: mol_type = other RNA
tttagaaggcatattgagtta

SEQ ID NO: 585 - RNA, 21 nt, synthetic construct
  source 1..21: mol_type = other RNA
tagaaggcatattgagttata

SEQ ID NO: 586 - RNA, 21 nt, synthetic construct
  source 1..21: mol_type = other RNA
agaaggcatattgagttatta

SEQ ID NO: 587 - RNA, 21 nt, synthetic construct
  source 1..21: mol_type = other RNA
catattgagttattttgcaga

SEQ ID NO: 588 - RNA, 21 nt, synthetic construct
  source 1..21: mol_type = other RNA
tattttgcagaatcataatga

SEQ ID NO: 589 - RNA, 21 nt, synthetic construct
  source 1..21: mol_type = other RNA
attttgcagaatcataatgga

SEQ ID NO: 590 - RNA, 21 nt, synthetic construct
  source 1..21: mol_type = other RNA
ttttgcagaatcataatggaa

SEQ ID NO: 591 - RNA, 21 nt, synthetic construct
  source 1..21: mol_type = other RNA
tttgcagaatcataatggaca

SEQ ID NO: 592 - RNA, 21 nt, synthetic construct
  source 1..21: mol_type = other RNA
ttgcagaatcataatggacca

SEQ ID NO: 593 - RNA, 21 nt, synthetic construct
  source 1..21: mol_type = other RNA
tgcagaatcataatggaccca

SEQ ID NO: 594 - RNA, 21 nt, synthetic construct
  source 1..21: mol_type = other RNA
gcagaatcataatggacccga

SEQ ID NO: 595 - RNA, 21 nt, synthetic construct
  source 1..21: mol_type = other RNA
cagaatcataatggacccgca

SEQ ID NO: 596 - RNA, 21 nt, synthetic construct
  source 1..21: mol_type = other RNA
agaatcataatggacccgcaa

SEQ ID NO: 597 - RNA, 21 nt, synthetic construct
  source 1..21: mol_type = other RNA
gaatcataatggacccgcaca

SEQ ID NO: 598 - RNA, 21 nt, synthetic construct
  source 1..21: mol_type = other RNA
aatcataatggacccgcacaa

SEQ ID NO: 599 - RNA, 21 nt, synthetic construct
  source 1..21: mol_type = other RNA
atcataatggacccgcacaaa

SEQ ID NO: 600 - RNA, 21 nt, synthetic construct
  source 1..21: mol_type = other RNA
tcataatggacccgcacaaaa

SEQ ID NO: 601 - RNA, 21 nt, synthetic construct
  source 1..21: mol_type = other RNA
cataatggacccgcacaaaaa

SEQ ID NO: 602 - RNA, 21 nt, synthetic construct
  source 1..21: mol_type = other RNA
ataatggacccgcacaaaata

SEQ ID NO: 603 - RNA, 21 nt, synthetic construct
  source 1..21: mol_type = other RNA
taatggacccgcacaaaatca

SEQ ID NO: 604 - RNA, 21 nt, synthetic construct
  source 1..21: mol_type = other RNA
aatggacccgcacaaaatcta

SEQ ID NO: 605 - RNA, 21 nt, synthetic construct
  source 1..21: mol_type = other RNA
atggacccgcacaaaatctca

SEQ ID NO: 606 - RNA, 21 nt, synthetic construct
  source 1..21: mol_type = other RNA
tggacccgcacaaaatctcaa

SEQ ID NO: 607 - RNA, 21 nt, synthetic construct
  source 1..21: mol_type = other RNA
ggacccgcacaaaatctcaga

SEQ ID NO: 608 - RNA, 21 nt, synthetic construct
  source 1..21: mol_type = other RNA
gacccgcacaaaatctcagaa

SEQ ID NO: 609 - RNA, 21 nt, synthetic construct
  source 1..21: mol_type = other RNA
acccgcacaaaatctcagaaa

SEQ ID NO: 610 - RNA, 21 nt, synthetic construct
  source 1..21: mol_type = other RNA
cccgcacaaaatctcagaaca

SEQ ID NO: 611 - RNA, 21 nt, synthetic construct
  source 1..21: mol_type = other RNA
ccgcacaaaatctcagaacca

SEQ ID NO: 612 - RNA, 21 nt, synthetic construct
  source 1..21: mol_type = other RNA
cgcacaaaatctcagaaccaa

SEQ ID NO: 613 - RNA, 21 nt, synthetic construct
  source 1..21: mol_type = other RNA
gcacaaaatctcagaaccata

SEQ ID NO: 614 - RNA, 21 nt, synthetic construct
  source 1..21: mol_type = other RNA
cacaaaatctcagaaccataa

SEQ ID NO: 615 - RNA, 21 nt, synthetic construct
  source 1..21: mol_type = other RNA
acaaaatctcagaaccatata

SEQ ID NO: 616 - RNA, 21 nt, synthetic construct
  source 1..21: mol_type = other RNA
caaaatctcagaaccatatca

SEQ ID NO: 617 - RNA, 21 nt, synthetic construct
  source 1..21: mol_type = other RNA
aaaatctcagaaccatatcta

SEQ ID NO: 618 - RNA, 21 nt, synthetic construct
  source 1..21: mol_type = other RNA
aaatctcagaaccatatctga

SEQ ID NO: 619 - RNA, 21 nt, synthetic construct
  source 1..21: mol_type = other RNA
aatctcagaaccatatctgta

SEQ ID NO: 620 - RNA, 21 nt, synthetic construct
  source 1..21: mol_type = other RNA
atctcagaaccatatctgtta

SEQ ID NO: 621 - RNA, 21 nt, synthetic construct
  source 1..21: mol_type = other RNA
tctcagaaccatatctgttga

SEQ ID NO: 622 - RNA, 21 nt, synthetic construct
  source 1..21: mol_type = other RNA
ctcagaaccatatctgttgaa

SEQ ID NO: 623 - RNA, 21 nt, synthetic construct
  source 1..21: mol_type = other RNA
tcagaaccatatctgttgaca

SEQ ID NO: 624 - RNA, 21 nt, synthetic construct
  source 1..21: mol_type = other RNA
cagaaccatatctgttgacaa

SEQ ID NO: 625 - RNA, 21 nt, synthetic construct
  source 1..21: mol_type = other RNA
agaaccatatctgttgacata

SEQ ID NO: 626 - RNA, 21 nt, synthetic construct
  source 1..21: mol_type = other RNA
gaaccatatctgttgacatta

SEQ ID NO: 627 - RNA, 21 nt, synthetic construct
  source 1..21: mol_type = other RNA
aaccatatctgttgacattta

SEQ ID NO: 628 - RNA, 21 nt, synthetic construct
  source 1..21: mol_type = other RNA
accatatctgttgacatttta

SEQ ID NO: 629 - RNA, 21 nt, synthetic construct
  source 1..21: mol_type = other RNA
ccatatctgttgacattttta

SEQ ID NO: 630 - RNA, 21 nt, synthetic construct
  source 1..21: mol_type = other RNA
catatctgttgacatttttta

SEQ ID NO: 631 - RNA, 21 nt, synthetic construct
  source 1..21: mol_type = other RNA
atatctgttgacattttttca

SEQ ID NO: 632 - RNA, 21 nt, synthetic construct
  source 1..21: mol_type = other RNA
tatctgttgacattttttcta

SEQ ID NO: 633 - RNA, 21 nt, synthetic construct
  source 1..21: mol_type = other RNA
atctgttgacattttttctca

SEQ ID NO: 634 - RNA, 21 nt, synthetic construct
  source 1..21: mol_type = other RNA
tctgttgacattttttctcaa

SEQ ID NO: 635 - RNA, 21 nt, synthetic construct
  source 1..21: mol_type = other RNA
ctgttgacattttttctcata

SEQ ID NO: 636 - RNA, 21 nt, synthetic construct
  source 1..21: mol_type = other RNA
tgttgacattttttctcataa

SEQ ID NO: 637 - RNA, 21 nt, synthetic construct
  source 1..21: mol_type = other RNA
gttgacattttttctcataga

SEQ ID NO: 638 - RNA, 21 nt, synthetic construct
  source 1..21: mol_type = other RNA
ttgacattttttctcatagaa

SEQ ID NO: 639 - RNA, 21 nt, synthetic construct
  source 1..21: mol_type = other RNA
tgacattttttctcatagaaa

SEQ ID NO: 640 - RNA, 21 nt, synthetic construct
  source 1..21: mol_type = other RNA
tctcatagaaatatcatggta

SEQ ID NO: 641 - RNA, 21 nt, synthetic construct
  source 1..21: mol_type = other RNA
ctcatagaaatatcatggtta

SEQ ID NO: 642 - RNA, 21 nt, synthetic construct
  source 1..21: mol_type = other RNA
tcatagaaatatcatggttaa

SEQ ID NO: 643 - RNA, 21 nt, synthetic construct
  source 1..21: mol_type = other RNA
catttgttaatgagcattaaa

SEQ ID NO: 644 - RNA, 21 nt, synthetic construct
  source 1..21: mol_type = other RNA
tttgttaatgagcattaatga

SEQ ID NO: 645 - RNA, 21 nt, synthetic construct
  source 1..21: mol_type = other RNA
taatgagcattaatgttttca

SEQ ID NO: 646 - RNA, 21 nt, synthetic construct
  source 1..21: mol_type = other RNA
atgagcattaatgttttctga

SEQ ID NO: 647 - RNA, 21 nt, synthetic construct
  source 1..21: mol_type = other RNA
tgagcattaatgttttctgaa

SEQ ID NO: 648 - RNA, 21 nt, synthetic construct
  source 1..21: mol_type = other RNA
gagcattaatgttttctgaaa

SEQ ID NO: 649 - RNA, 21 nt, synthetic construct
  source 1..21: mol_type = other RNA
agcattaatgttttctgaaca

SEQ ID NO: 650 - RNA, 21 nt, synthetic construct
  source 1..21: mol_type = other RNA
gcattaatgttttctgaacaa

SEQ ID NO: 651 - RNA, 21 nt, synthetic construct
  source 1..21: mol_type = other RNA
cattaatgttttctgaacaca

SEQ ID NO: 652 - RNA, 21 nt, synthetic construct
  source 1..21: mol_type = other RNA
attaatgttttctgaacacta

SEQ ID NO: 653 - RNA, 21 nt, synthetic construct
  source 1..21: mol_type = other RNA
ttaatgttttctgaacactta

SEQ ID NO: 654 - RNA, 21 nt, synthetic construct
  source 1..21: mol_type = other RNA
tctgaacacttccaaagatta

SEQ ID NO: 655 - RNA, 21 nt, synthetic construct
  source 1..21: mol_type = other RNA
ctgaacacttccaaagattaa

SEQ ID NO: 656 - RNA, 21 nt, synthetic construct
  source 1..21: mol_type = other RNA
tgaacacttccaaagattaaa

SEQ ID NO: 657 - RNA, 21 nt, synthetic construct
  source 1..21: mol_type = other RNA
gaacacttccaaagattaata

SEQ ID NO: 658 - RNA, 21 nt, synthetic construct
  source 1..21: mol_type = other RNA
aacacttccaaagattaatca

SEQ ID NO: 659 - RNA, 21 nt, synthetic construct
  source 1..21: mol_type = other RNA
acacttccaaagattaatcaa

SEQ ID NO: 660 - RNA, 21 nt, synthetic construct
  source 1..21: mol_type = other RNA
cacttccaaagattaatcaaa

SEQ ID NO: 661 - RNA, 21 nt, synthetic construct
  source 1..21: mol_type = other RNA
acttccaaagattaatcaaaa

SEQ ID NO: 662 - RNA, 21 nt, synthetic construct
  source 1..21: mol_type = other RNA
cttccaaagattaatcaaaca

SEQ ID NO: 663 - RNA, 21 nt, synthetic construct
  source 1..21: mol_type = other RNA
ttccaaagattaatcaaacaa

SEQ ID NO: 664 - RNA, 21 nt, synthetic construct
  source 1..21: mol_type = other RNA
tccaaagattaatcaaacata

SEQ ID NO: 665 - RNA, 21 nt, synthetic construct
  source 1..21: mol_type = other RNA
attcattgtctgaaaatgtca

SEQ ID NO: 666 - RNA, 21 nt, synthetic construct
  source 1..21: mol_type = other RNA
cattgtctgaaaatgtcttta

SEQ ID NO: 667 - RNA, 21 nt, synthetic construct
  source 1..21: mol_type = other RNA
attgtctgaaaatgtctttaa

SEQ ID NO: 668 - RNA, 21 nt, synthetic construct
  source 1..21: mol_type = other RNA
ttgtctgaaaatgtctttaaa

SEQ ID NO: 669 - RNA, 21 nt, synthetic construct
  source 1..21: mol_type = other RNA
gtctgaaaatgtctttaagaa

SEQ ID NO: 670 - RNA, 21 nt, synthetic construct
  source 1..21: mol_type = other RNA
ctgaaaatgtctttaagataa

SEQ ID NO: 671 - RNA, 21 nt, synthetic construct
  source 1..21: mol_type = other RNA
aggtccctatttcctttgtaa

SEQ ID NO: 672 - RNA, 21 nt, synthetic construct
  source 1..21: mol_type = other RNA
ggtccctatttcctttgtaca

SEQ ID NO: 673 - RNA, 21 nt, synthetic construct
  source 1..21: mol_type = other RNA
gtccctatttcctttgtacaa

SEQ ID NO: 674 - RNA, 21 nt, synthetic construct
  source 1..21: mol_type = other RNA
tccctatttcctttgtacata

SEQ ID NO: 675 - RNA, 21 nt, synthetic construct
  source 1..21: mol_type = other RNA
ccctatttcctttgtacataa

SEQ ID NO: 676 - RNA, 21 nt, synthetic construct
  source 1..21: mol_type = other RNA
cctatttcctttgtacataca

SEQ ID NO: 677 - RNA, 21 nt, synthetic construct
  source 1..21: mol_type = other RNA
ctatttcctttgtacatacaa

SEQ ID NO: 678 - RNA, 21 nt, synthetic construct
  source 1..21: mol_type = other RNA
tatttcctttgtacatacaca

SEQ ID NO: 679 - RNA, 21 nt, synthetic construct
  source 1..21: mol_type = other RNA
cacttagaaagaaaagacaga

SEQ ID NO: 680 - RNA, 21 nt, synthetic construct
  source 1..21: mol_type = other RNA
acttagaaagaaaagacagaa

SEQ ID NO: 681 - RNA, 21 nt, synthetic construct
  source 1..21: mol_type = other RNA
cttagaaagaaaagacagaaa

SEQ ID NO: 682 - RNA, 21 nt, synthetic construct
  source 1..21: mol_type = other RNA
ttagaaagaaaagacagaaaa

SEQ ID NO: 683 - RNA, 21 nt, synthetic construct
  source 1..21: mol_type = other RNA
tagaaagaaaagacagaaaaa

SEQ ID NO: 684 - RNA, 21 nt, synthetic construct
  source 1..21: mol_type = other RNA
gaggaaggaaggaaatattta

SEQ ID NO: 685 - RNA, 21 nt, synthetic construct
  source 1..21: mol_type = other RNA
aggaaggaaggaaatatttta

SEQ ID NO: 686 - RNA, 21 nt, synthetic construct
  source 1..21: mol_type = other RNA
ggaaggaaatattttgagaaa

SEQ ID NO: 687 - RNA, 21 nt, synthetic construct
  source 1..21: mol_type = other RNA
gaagaattaagaaaactctta

SEQ ID NO: 688 - RNA, 21 nt, synthetic construct
  source 1..21: mol_type = other RNA
aaactcttcaatgaagtgtta

SEQ ID NO: 689 - RNA, 21 nt, synthetic construct
  source 1..21: mol_type = other RNA
cttcaatgaagtgttaacaaa

SEQ ID NO: 690 - RNA, 21 nt, synthetic construct
  source 1..21: mol_type = other RNA
aatgaagtgttaacaaccaaa

SEQ ID NO: 691 - RNA, 21 nt, synthetic construct
  source 1..21: mol_type = other RNA
atgaagtgttaacaaccaaaa

SEQ ID NO: 692 - RNA, 21 nt, synthetic construct
  source 1..21: mol_type = other RNA
tacagacggtatcagaaacaa

SEQ ID NO: 693 - RNA, 21 nt, synthetic construct
  source 1..21: mol_type = other RNA
cggtatcagaaacagcaaata

SEQ ID NO: 694 - RNA, 21 nt, synthetic construct
  source 1..21: mol_type = other RNA
atcagaaacagcaaatagata

SEQ ID NO: 695 - RNA, 21 nt, synthetic construct
  source 1..21: mol_type = other RNA
cagaaacagcaaatagatata

SEQ ID NO: 696 - RNA, 21 nt, synthetic construct
  source 1..21: mol_type = other RNA
agaaacagcaaatagatatta

SEQ ID NO: 697 - RNA, 21 nt, synthetic construct
  source 1..21: mol_type = other RNA
gaaacagcaaatagatattca

SEQ ID NO: 698 - RNA, 21 nt, synthetic construct
  source 1..21: mol_type = other RNA
aacagcaaatagatattccta

SEQ ID NO: 699 - RNA, 21 nt, synthetic construct
  source 1..21: mol_type = other RNA
cagcaaatagatattcctcta

SEQ ID NO: 700 - RNA, 21 nt, synthetic construct
  source 1..21: mol_type = other RNA
agcaaatagatattcctctaa

SEQ ID NO: 701 - RNA, 21 nt, synthetic construct
  source 1..21: mol_type = other RNA
caaatagatattcctctacca

SEQ ID NO: 702 - RNA, 21 nt, synthetic construct
  source 1..21: mol_type = other RNA
tgagtacagaagaatgctcaa

SEQ ID NO: 703 - RNA, 21 nt, synthetic construct
  source 1..21: mol_type = other RNA
gtacagaagaatgctcatgaa

SEQ ID NO: 704 - RNA, 21 nt, synthetic construct
  source 1..21: mol_type = other RNA
tacagaagaatgctcatgata

SEQ ID NO: 705 - RNA, 21 nt, synthetic construct
  source 1..21: mol_type = other RNA
acagaagaatgctcatgataa

SEQ ID NO: 706 - RNA, 21 nt, synthetic construct
  source 1..21: mol_type = other RNA
aagaatgctcatgatagttta

SEQ ID NO: 707 - RNA, 21 nt, synthetic construct
  source 1..21: mol_type = other RNA
agaatgctcatgatagtttta

SEQ ID NO: 708 - RNA, 21 nt, synthetic construct
  source 1..21: mol_type = other RNA
aatgctcatgatagttttgca

SEQ ID NO: 709 - RNA, 21 nt, synthetic construct
  source 1..21: mol_type = other RNA
gctcatgatagttttgcctta

SEQ ID NO: 710 - RNA, 21 nt, synthetic construct
  source 1..21: mol_type = other RNA
tcatgatagttttgccttcaa

SEQ ID NO: 711 - RNA, 21 nt, synthetic construct
  source 1..21: mol_type = other RNA
atgatagttttgccttcatta

SEQ ID NO: 712 - RNA, 21 nt, synthetic construct
  source 1..21: mol_type = other RNA
tgatagttttgccttcattca

SEQ ID NO: 713 - RNA, 21 nt, synthetic construct
  source 1..21: mol_type = other RNA
atagttttgccttcattctaa

SEQ ID NO: 714 - RNA, 21 nt, synthetic construct
  source 1..21: mol_type = other RNA
tggacacagagtaatgaataa

SEQ ID NO: 715 - RNA, 21 nt, synthetic construct
  source 1..21: mol_type = other RNA
acacagagtaatgaatattta

SEQ ID NO: 716 - RNA, 21 nt, synthetic construct
  source 1..21: mol_type = other RNA
agtaatgaatatttaatggga

SEQ ID NO: 717 - RNA, 21 nt, synthetic construct
  source 1..21: mol_type = other RNA
aatgggacattaaatatgcca

SEQ ID NO: 718 - RNA, 21 nt, synthetic construct
  source 1..21: mol_type = other RNA
atgggacattaaatatgccca

SEQ ID NO: 719 - RNA, 21 nt, synthetic construct
  source 1..21: mol_type = other RNA
tgggacattaaatatgcccta

SEQ ID NO: 720 - RNA, 21 nt, synthetic construct
  source 1..21: mol_type = other RNA
gggacattaaatatgccctta

SEQ ID NO: 721 - RNA, 21 nt, synthetic construct
  source 1..21: mol_type = other RNA
ggacattaaatatgcccttca

SEQ ID NO: 722 - RNA, 21 nt, synthetic construct
  source 1..21: mol_type = other RNA
gacattaaatatgcccttcaa

SEQ ID NO: 723 - RNA, 21 nt, synthetic construct
  source 1..21: mol_type = other RNA
acattaaatatgcccttcaaa

SEQ ID NO: 724 - RNA, 21 nt, synthetic construct
  source 1..21: mol_type = other RNA
cattaaatatgcccttcaaaa

SEQ ID NO: 725 - RNA, 21 nt, synthetic construct
  source 1..21: mol_type = other RNA
attaaatatgcccttcaaata

SEQ ID NO: 726 - RNA, 21 nt, synthetic construct
  source 1..21: mol_type = other RNA
ttaaatatgcccttcaaatca

SEQ ID NO: 727 - RNA, 21 nt, synthetic construct
  source 1..21: mol_type = other RNA
taaatatgcccttcaaatcta

SEQ ID NO: 728 - RNA, 21 nt, synthetic construct
  source 1..21: mol_type = other RNA
gcccttcaaatctataattta

SEQ ID NO: 729 - RNA, 21 nt, synthetic construct
  source 1..21: mol_type = other RNA
cccttcaaatctataatttta

SEQ ID NO: 730 - RNA, 21 nt, synthetic construct
  source 1..21: mol_type = other RNA
attttactttggtaaacgaga

SEQ ID NO: 731 - RNA, 21 nt, synthetic construct
  source 1..21: mol_type = other RNA
ttttactttggtaaacgagaa

SEQ ID NO: 732 - RNA, 21 nt, synthetic construct
  source 1..21: mol_type = other RNA
tttactttggtaaacgagata

SEQ ID NO: 733 - RNA, 21 nt, synthetic construct
  source 1..21: mol_type = other RNA
ttactttggtaaacgagatta

SEQ ID NO: 734 - RNA, 21 nt, synthetic construct
  source 1..21: mol_type = other RNA
tactttggtaaacgagattta

SEQ ID NO: 735 - RNA, 21 nt, synthetic construct
  source 1..21: mol_type = other RNA
ctttggtaaacgagatttaaa

SEQ ID NO: 736 - RNA, 21 nt, synthetic construct
  source 1..21: mol_type = other RNA
ttggtaaacgagatttaacaa

SEQ ID NO: 737 - RNA, 21 nt, synthetic construct
  source 1..21: mol_type = other RNA
ggtaaacgagatttaacatga

SEQ ID NO: 738 - RNA, 21 nt, synthetic construct
  source 1..21: mol_type = other RNA
gagatttaacatgatgtctta

SEQ ID NO: 739 - RNA, 21 nt, synthetic construct
  source 1..21: mol_type = other RNA
gtcttttatgctcctaaaaca

SEQ ID NO: 740 - RNA, 21 nt, synthetic construct
  source 1..21: mol_type = other RNA
tcttttttcaaactccattca

SEQ ID NO: 741 - RNA, 21 nt, synthetic construct
  source 1..21: mol_type = other RNA
cttttttcaaactccattcca

SEQ ID NO: 742 - RNA, 21 nt, synthetic construct
  source 1..21: mol_type = other RNA
ttttttcaaactccattccta

SEQ ID NO: 743 - RNA, 21 nt, synthetic construct
  source 1..21: mol_type = other RNA
ttttcaaactccattccttaa

SEQ ID NO: 744 - RNA, 21 nt, synthetic construct
  source 1..21: mol_type = other RNA
tttcaaactccattccttaga

SEQ ID NO: 745 - RNA, 21 nt, synthetic construct
  source 1..21: mol_type = other RNA
tcaaactccattccttagaaa

SEQ ID NO: 746 - RNA, 21 nt, synthetic construct
  source 1..21: mol_type = other RNA
caaactccattccttagaaca

SEQ ID NO: 747 - RNA, 21 nt, synthetic construct
  source 1..21: mol_type = other RNA
aaactccattccttagaacaa

SEQ ID NO: 748 - RNA, 21 nt, synthetic construct
  source 1..21: mol_type = other RNA
aactccattccttagaacata

SEQ ID NO: 749 - RNA, 21 nt, synthetic construct
  source 1..21: mol_type = other RNA
actccattccttagaacatta

SEQ ID NO: 750 - RNA, 21 nt, synthetic construct
  source 1..21: mol_type = other RNA
ctccattccttagaacattca

SEQ ID NO: 751 - RNA, 21 nt, synthetic construct
  source 1..21: mol_type = other RNA
tccattccttagaacattcta

SEQ ID NO: 752 - RNA, 21 nt, synthetic construct
  source 1..21: mol_type = other RNA
ccattccttagaacattctta

SEQ ID NO: 753 - RNA, 21 nt, synthetic construct
  source 1..21: mol_type = other RNA
cattccttagaacattcttca

SEQ ID NO: 754 - RNA, 21 nt, synthetic construct
  source 1..21: mol_type = other RNA
attccttagaacattcttcta

SEQ ID NO: 755 - RNA, 21 nt, synthetic construct
  source 1..21: mol_type = other RNA
ttccttagaacattcttctaa

SEQ ID NO: 756 - RNA, 21 nt, synthetic construct
  source 1..21: mol_type = other RNA
tccttagaacattcttctaca

SEQ ID NO: 757 - RNA, 21 nt, synthetic construct
  source 1..21: mol_type = other RNA
ccttagaacattcttctacta

SEQ ID NO: 758 - RNA, 21 nt, synthetic construct
  source 1..21: mol_type = other RNA
cttagaacattcttctactga

SEQ ID NO: 759 - RNA, 21 nt, synthetic construct
  source 1..21: mol_type = other RNA
ttagaacattcttctactgaa

SEQ ID NO: 760 - RNA, 21 nt, synthetic construct
  source 1..21: mol_type = other RNA
tagaacattcttctactgaga

SEQ ID NO: 761 - RNA, 21 nt, synthetic construct
  source 1..21: mol_type = other RNA
agaacattcttctactgagaa

SEQ ID NO: 762 - RNA, 21 nt, synthetic construct
  source 1..21: mol_type = other RNA
gaacattcttctactgagata

SEQ ID NO: 763 - RNA, 21 nt, synthetic construct
  source 1..21: mol_type = other RNA
cattcttctactgagatgata

SEQ ID NO: 764 - RNA, 21 nt, synthetic construct
  source 1..21: mol_type = other RNA
attcttctactgagatgatca

SEQ ID NO: 765 - RNA, 21 nt, synthetic construct
  source 1..21: mol_type = other RNA
ttcttctactgagatgatcca

SEQ ID NO: 766 - RNA, 21 nt, synthetic construct
  source 1..21: mol_type = other RNA
tcttctactgagatgatccaa

SEQ ID NO: 767 - RNA, 21 nt, synthetic construct
  source 1..21: mol_type = other RNA
cttctactgagatgatccaaa

SEQ ID NO: 768 - RNA, 21 nt, synthetic construct
  source 1..21: mol_type = other RNA
ttctactgagatgatccaaga

SEQ ID NO: 769 - RNA, 21 nt, synthetic construct
  source 1..21: mol_type = other RNA
tctactgagatgatccaagaa

SEQ ID NO: 770 - RNA, 21 nt, synthetic construct
  source 1..21: mol_type = other RNA
ctactgagatgatccaagaca

SEQ ID NO: 771 - RNA, 21 nt, synthetic construct
  source 1..21: mol_type = other RNA
tactgagatgatccaagacca

SEQ ID NO: 772 - RNA, 21 nt, synthetic construct
  source 1..21: mol_type = other RNA
actgagatgatccaagaccaa

SEQ ID NO: 773 - RNA, 21 nt, synthetic construct
  source 1..21: mol_type = other RNA
ctgagatgatccaagaccaaa

SEQ ID NO: 774 - RNA, 21 nt, synthetic construct
  source 1..21: mol_type = other RNA
ccaagaccaaaagtgttctta

SEQ ID NO: 775 - RNA, 21 nt, synthetic construct
  source 1..21: mol_type = other RNA
caagaccaaaagtgttcttta

SEQ ID NO: 776 - RNA, 21 nt, synthetic construct
  source 1..21: mol_type = other RNA
aagaccaaaagtgttctttga

SEQ ID NO: 777 - RNA, 21 nt, synthetic construct
  source 1..21: mol_type = other RNA
agaccaaaagtgttctttgga

SEQ ID NO: 778 - RNA, 21 nt, synthetic construct
  source 1..21: mol_type = other RNA
gaccaaaagtgttctttggta

SEQ ID NO: 779 - RNA, 21 nt, synthetic construct
  source 1..21: mol_type = other RNA
accaaaagtgttctttggtaa

SEQ ID NO: 780 - RNA, 21 nt, synthetic construct
  source 1..21: mol_type = other RNA
ccaaaagtgttctttggtaca

SEQ ID NO: 781 - RNA, 21 nt, synthetic construct
  source 1..21: mol_type = other RNA
caaaagtgttctttggtacta

SEQ ID NO: 782 - RNA, 21 nt, synthetic construct
  source 1..21: mol_type = other RNA
aaaagtgttctttggtactta

SEQ ID NO: 783 - RNA, 21 nt, synthetic construct
  source 1..21: mol_type = other RNA
aaagtgttctttggtacttga

SEQ ID NO: 784 - RNA, 21 nt, synthetic construct
  source 1..21: mol_type = other RNA
aagtgttctttggtacttgca

SEQ ID NO: 785 - RNA, 21 nt, synthetic construct
  source 1..21: mol_type = other RNA
tctttggtacttgcttataaa

SEQ ID NO: 786 - RNA, 21 nt, synthetic construct
  source 1..21: mol_type = other RNA
ctttggtacttgcttataaaa

SEQ ID NO: 787 - RNA, 21 nt, synthetic construct
  source 1..21: mol_type = other RNA
ttggtacttgcttataaagta

SEQ ID NO: 788 - RNA, 21 nt, synthetic construct
  source 1..21: mol_type = other RNA
tggtacttgcttataaagtga

SEQ ID NO: 789 - RNA, 21 nt, synthetic construct
  source 1..21: mol_type = other RNA
tacttgcttataaagtgataa

SEQ ID NO: 790 - RNA, 21 nt, synthetic construct
  source 1..21: mol_type = other RNA
ttgcttataaagtgatagtaa

SEQ ID NO: 791 - RNA, 21 nt, synthetic construct
  source 1..21: mol_type = other RNA
cttataaagtgatagtacata

SEQ ID NO: 792 - RNA, 21 nt, synthetic construct
  source 1..21: mol_type = other RNA
ttataaagtgatagtacatga

SEQ ID NO: 793 - RNA, 21 nt, synthetic construct
  source 1..21: mol_type = other RNA
tataaagtgatagtacatgta

SEQ ID NO: 794 - RNA, 21 nt, synthetic construct
  source 1..21: mol_type = other RNA
aaagtgatagtacatgttaga

SEQ ID NO: 795 - RNA, 21 nt, synthetic construct
  source 1..21: mol_type = other RNA
aagtgatagtacatgttagca

SEQ ID NO: 796 - RNA, 21 nt, synthetic construct
  source 1..21: mol_type = other RNA
agtgatagtacatgttagcaa

SEQ ID NO: 797 - RNA, 21 nt, synthetic construct
  source 1..21: mol_type = other RNA
gtgatagtacatgttagcata

SEQ ID NO: 798 - RNA, 21 nt, synthetic construct
  source 1..21: mol_type = other RNA
tgatagtacatgttagcataa

SEQ ID NO: 799 - RNA, 21 nt, synthetic construct
  source 1..21: mol_type = other RNA
gatagtacatgttagcatata

SEQ ID NO: 800 - RNA, 21 nt, synthetic construct
  source 1..21: mol_type = other RNA
atagtacatgttagcatataa

SEQ ID NO: 801 - RNA, 21 nt, synthetic construct
  source 1..21: mol_type = other RNA
tagtacatgttagcatataaa

SEQ ID NO: 802 - RNA, 21 nt, synthetic construct
  source 1..21: mol_type = other RNA
gtacatgttagcatataatga

SEQ ID NO: 803 - RNA, 21 nt, synthetic construct
  source 1..21: mol_type = other RNA
tacatgttagcatataatgta

SEQ ID NO: 804 - RNA, 21 nt, synthetic construct
  source 1..21: mol_type = other RNA
acatgttagcatataatgtaa

SEQ ID NO: 805 - RNA, 21 nt, synthetic construct
  source 1..21: mol_type = other RNA
atataatgtattttgaagaga

SEQ ID NO: 806 - RNA, 21 nt, synthetic construct
  source 1..21: mol_type = other RNA
attttgaagagtgaagtaaaa

SEQ ID NO: 807 - RNA, 21 nt, synthetic construct
  source 1..21: mol_type = other RNA
tttgaagagtgaagtaaatga

SEQ ID NO: 808 - RNA, 21 nt, synthetic construct
  source 1..21: mol_type = other RNA
ttgaagagtgaagtaaatgca

SEQ ID NO: 809 - RNA, 21 nt, synthetic construct
  source 1..21: mol_type = other RNA
tgaagagtgaagtaaatgcta

SEQ ID NO: 810 - RNA, 21 nt, synthetic construct
  source 1..21: mol_type = other RNA
gaagagtgaagtaaatgctaa

SEQ ID NO: 811 - RNA, 21 nt, synthetic construct
  source 1..21: mol_type = other RNA
aagagtgaagtaaatgctata

SEQ ID NO: 812 - RNA, 21 nt, synthetic construct
  source 1..21: mol_type = other RNA
agagtgaagtaaatgctatta

SEQ ID NO: 813 - RNA, 21 nt, synthetic construct
  source 1..21: mol_type = other RNA
gagtgaagtaaatgctattga

SEQ ID NO: 814 - RNA, 21 nt, synthetic construct
  source 1..21: mol_type = other RNA
agtgaagtaaatgctattgaa

SEQ ID NO: 815 - RNA, 21 nt, synthetic construct
  source 1..21: mol_type = other RNA
gtgaagtaaatgctattgata

SEQ ID NO: 816 - RNA, 21 nt, synthetic construct
  source 1..21: mol_type = other RNA
tgaagtaaatgctattgataa

SEQ ID NO: 817 - RNA, 21 nt, synthetic construct
  source 1..21: mol_type = other RNA
gaagtaaatgctattgataaa

SEQ ID NO: 818 - RNA, 21 nt, synthetic construct
  source 1..21: mol_type = other RNA
taataacagtaaagaaatgca

SEQ ID NO: 819 - RNA, 21 nt, synthetic construct
  source 1..21: mol_type = other RNA
aataacagtaaagaaatgcta

SEQ ID NO: 820 - RNA, 21 nt, synthetic construct
  source 1..21: mol_type = other RNA
taacagtaaagaaatgctaca

SEQ ID NO: 821 - RNA, 21 nt, synthetic construct
  source 1..21: mol_type = other RNA
aacagtaaagaaatgctacta

SEQ ID NO: 822 - RNA, 21 nt, synthetic construct
  source 1..21: mol_type = other RNA
acagtaaagaaatgctactta

SEQ ID NO: 823 - RNA, 21 nt, synthetic construct
  source 1..21: mol_type = other RNA
cagtaaagaaatgctacttga

SEQ ID NO: 824 - RNA, 21 nt, synthetic construct
  source 1..21: mol_type = other RNA
agtaaagaaatgctacttgaa

SEQ ID NO: 825 - RNA, 21 nt, synthetic construct
  source 1..21: mol_type = other RNA
gtaaagaaatgctacttgata

SEQ ID NO: 826 - RNA, 21 nt, synthetic construct
  source 1..21: mol_type = other RNA
taaagaaatgctacttgatta

SEQ ID NO: 827 - RNA, 21 nt, synthetic construct
  source 1..21: mol_type = other RNA
aaagaaatgctacttgattta

SEQ ID NO: 828 - RNA, 21 nt, synthetic construct
  source 1..21: mol_type = other RNA
aactggattgctcagattaca

SEQ ID NO: 829 - RNA, 21 nt, synthetic construct
  source 1..21: mol_type = other RNA
attgctcagattacctgatca

SEQ ID NO: 830 - RNA, 21 nt, synthetic construct
  source 1..21: mol_type = other RNA
cagattacctgatcgtggtga

SEQ ID NO: 831 - RNA, 21 nt, synthetic construct
  source 1..21: mol_type = other RNA
agattacctgatcgtggtgga

SEQ ID NO: 832 - RNA, 21 nt, synthetic construct
  source 1..21: mol_type = other RNA
gattacctgatcgtggtggaa

SEQ ID NO: 833 - RNA, 21 nt, synthetic construct
  source 1..21: mol_type = other RNA
attacctgatcgtggtggaaa

SEQ ID NO: 834 - RNA, 21 nt, synthetic construct
  source 1..21: mol_type = other RNA
ttacctgatcgtggtggaaca

SEQ ID NO: 835 - RNA, 21 nt, synthetic construct
  source 1..21: mol_type = other RNA
tacctgatcgtggtggaacca

SEQ ID NO: 836 - RNA, 21 nt, synthetic construct
  source 1..21: mol_type = other RNA
acctgatcgtggtggaaccca

SEQ ID NO: 837 - RNA, 21 nt, synthetic construct
  source 1..21: mol_type = other RNA
cctgatcgtggtggaacccta

SEQ ID NO: 838 - RNA, 21 nt, synthetic construct
  source 1..21: mol_type = other RNA
tatcccatatttaactgttca

SEQ ID NO: 839 - RNA, 21 nt, synthetic construct
  source 1..21: mol_type = other RNA
atcccatatttaactgttcta

SEQ ID NO: 840 - RNA, 21 nt, synthetic construct
  source 1..21: mol_type = other RNA
tcccatatttaactgttctaa

SEQ ID NO: 841 - RNA, 21 nt, synthetic construct
  source 1..21: mol_type = other RNA
cccatatttaactgttctata

SEQ ID NO: 842 - RNA, 21 nt, synthetic construct
  source 1..21: mol_type = other RNA
ccatatttaactgttctataa

SEQ ID NO: 843 - RNA, 21 nt, synthetic construct
  source 1..21: mol_type = other RNA
catatttaactgttctataaa

SEQ ID NO: 844 - RNA, 21 nt, synthetic construct
  source 1..21: mol_type = other RNA
aactgttctataaagcaaaga

SEQ ID NO: 845 - RNA, 21 nt, synthetic construct
  source 1..21: mol_type = other RNA
actgttctataaagcaaagca

SEQ ID NO: 846 - RNA, 21 nt, synthetic construct
  source 1..21: mol_type = other RNA
ctgttctataaagcaaagcaa

SEQ ID NO: 847 - RNA, 21 nt, synthetic construct
  source 1..21: mol_type = other RNA
tgttctataaagcaaagcaca

SEQ ID NO: 848 - RNA, 21 nt, synthetic construct
  source 1..21: mol_type = other RNA
gttctataaagcaaagcacaa

SEQ ID NO: 849 - RNA, 21 nt, synthetic construct
  source 1..21: mol_type = other RNA
ttctataaagcaaagcacaga

SEQ ID NO: 850 - RNA, 21 nt, synthetic construct
  source 1..21: mol_type = other RNA
tctataaagcaaagcacagca

SEQ ID NO: 851 - RNA, 21 nt, synthetic construct
  source 1..21: mol_type = other RNA
ctataaagcaaagcacagcta

SEQ ID NO: 852 - RNA, 21 nt, synthetic construct
  source 1..21: mol_type = other RNA
tataaagcaaagcacagctta

SEQ ID NO: 853 - RNA, 21 nt, synthetic construct
  source 1..21: mol_type = other RNA
cagcttgggtaatagcgttca

SEQ ID NO: 854 - RNA, 21 nt, synthetic construct
  source 1..21: mol_type = other RNA
agcttgggtaatagcgttcta

SEQ ID NO: 855 - RNA, 21 nt, synthetic construct
  source 1..21: mol_type = other RNA
gcttgggtaatagcgttctga

SEQ ID NO: 856 - RNA, 21 nt, synthetic construct
  source 1..21: mol_type = other RNA
cttgggtaatagcgttctgaa

SEQ ID NO: 857 - RNA, 21 nt, synthetic construct
  source 1..21: mol_type = other RNA
ttgggtaatagcgttctgaaa

SEQ ID NO: 858 - RNA, 21 nt, synthetic construct
  source 1..21: mol_type = other RNA
tgggtaatagcgttctgaaga

SEQ ID NO: 859 - RNA, 21 nt, synthetic construct
  source 1..21: mol_type = other RNA
gggtaatagcgttctgaagga

SEQ ID NO: 860 - RNA, 21 nt, synthetic construct
  source 1..21: mol_type = other RNA
ggtaatagcgttctgaaggaa

SEQ ID NO: 861 - RNA, 21 nt, synthetic construct
  source 1..21: mol_type = other RNA
gtaatagcgttctgaaggata

SEQ ID NO: 862 - RNA, 21 nt, synthetic construct
  source 1..21: mol_type = other RNA
taatagcgttctgaaggataa

SEQ ID NO: 863 - RNA, 21 nt, synthetic construct
  source 1..21: mol_type = other RNA
aatagcgttctgaaggatata

SEQ ID NO: 864 - RNA, 21 nt, synthetic construct
  source 1..21: mol_type = other RNA
atagcgttctgaaggatataa

SEQ ID NO: 865 - RNA, 21 nt, synthetic construct
  source 1..21: mol_type = other RNA
tagcgttctgaaggatataca

SEQ ID NO: 866 - RNA, 21 nt, synthetic construct
  source 1..21: mol_type = other RNA
agcgttctgaaggatatacta

SEQ ID NO: 867 - RNA, 21 nt, synthetic construct
  source 1..21: mol_type = other RNA
gcgttctgaaggatatactta

SEQ ID NO: 868 - RNA, 21 nt, synthetic construct
  source 1..21: mol_type = other RNA
cgttctgaaggatatacttca

SEQ ID NO: 869 - RNA, 21 nt, synthetic construct
  source 1..21: mol_type = other RNA
gttctgaaggatatacttcta

SEQ ID NO: 870 - RNA, 21 nt, synthetic construct
  source 1..21: mol_type = other RNA
ttctgaaggatatacttctga

SEQ ID NO: 871 - RNA, 21 nt, synthetic construct
  source 1..21: mol_type = other RNA
tctgaaggatatacttctgta

SEQ ID NO: 872 - RNA, 21 nt, synthetic construct
  source 1..21: mol_type = other RNA
ctgaaggatatacttctgtaa

SEQ ID NO: 873 - RNA, 21 nt, synthetic construct
  source 1..21: mol_type = other RNA
tgaaggatatacttctgtata

SEQ ID NO: 874 - RNA, 21 nt, synthetic construct
  source 1..21: mol_type = other RNA
gaaggatatacttctgtatta

SEQ ID NO: 875 - RNA, 21 nt, synthetic construct
  source 1..21: mol_type = other RNA
aaggatatacttctgtattta

SEQ ID NO: 876 - RNA, 21 nt, synthetic construct
  source 1..21: mol_type = other RNA
aggatatacttctgtatttta

SEQ ID NO: 877 - RNA, 21 nt, synthetic construct
  source 1..21: mol_type = other RNA
ggatatacttctgtattttca

SEQ ID NO: 878 - RNA, 21 nt, synthetic construct
  source 1..21: mol_type = other RNA
gatatacttctgtattttcta

SEQ ID NO: 879 - RNA, 21 nt, synthetic construct
  source 1..21: mol_type = other RNA
atatacttctgtattttctca

SEQ ID NO: 880 - RNA, 21 nt, synthetic construct
  source 1..21: mol_type = other RNA
tatacttctgtattttctcaa

SEQ ID NO: 881 - RNA, 21 nt, synthetic construct
  source 1..21: mol_type = other RNA
acttctgtattttctcataga

SEQ ID NO: 882 - RNA, 21 nt, synthetic construct
  source 1..21: mol_type = other RNA
cttctgtattttctcatagaa

SEQ ID NO: 883 - RNA, 21 nt, synthetic construct
  source 1..21: mol_type = other RNA
ttctgtattttctcatagaga

SEQ ID NO: 884 - RNA, 21 nt, synthetic construct
  source 1..21: mol_type = other RNA
tctgtattttctcatagagta

SEQ ID NO: 885 - RNA, 21 nt, synthetic construct
  source 1..21: mol_type = other RNA
ctgtattttctcatagagtaa

SEQ ID NO: 886 - RNA, 21 nt, synthetic construct
  source 1..21: mol_type = other RNA
ctcatagagtacaatttagta

SEQ ID NO: 887 - RNA, 21 nt, synthetic construct
  source 1..21: mol_type = other RNA
tcatagagtacaatttagtga

SEQ ID NO: 888 - RNA, 21 nt, synthetic construct
  source 1..21: mol_type = other RNA
catagagtacaatttagtgaa

SEQ ID NO: 889 - RNA, 21 nt, synthetic construct
  source 1..21: mol_type = other RNA
atagagtacaatttagtgata

SEQ ID NO: 890 - RNA, 21 nt, synthetic construct
  source 1..21: mol_type = other RNA
tagagtacaatttagtgatta

SEQ ID NO: 891 - RNA, 21 nt, synthetic construct
  source 1..21: mol_type = other RNA
agtacaatttagtgattatga

SEQ ID NO: 892 - RNA, 21 nt, synthetic construct
  source 1..21: mol_type = other RNA
gtacaatttagtgattatgca

SEQ ID NO: 893 - RNA, 21 nt, synthetic construct
  source 1..21: mol_type = other RNA
tacaatttagtgattatgcta

SEQ ID NO: 894 - RNA, 21 nt, synthetic construct
  source 1..21: mol_type = other RNA
acaatttagtgattatgctta

SEQ ID NO: 895 - RNA, 21 nt, synthetic construct
  source 1..21: mol_type = other RNA
agtgattatgcttcatttcaa

SEQ ID NO: 896 - RNA, 21 nt, synthetic construct
  source 1..21: mol_type = other RNA
gtgattatgcttcatttcaca

SEQ ID NO: 897 - RNA, 21 nt, synthetic construct
  source 1..21: mol_type = other RNA
tgattatgcttcatttcacta

SEQ ID NO: 898 - RNA, 21 nt, synthetic construct
  source 1..21: mol_type = other RNA
gattatgcttcatttcactaa

SEQ ID NO: 899 - RNA, 21 nt, synthetic construct
  source 1..21: mol_type = other RNA
attatgcttcatttcactata

SEQ ID NO: 900 - RNA, 21 nt, synthetic construct
  source 1..21: mol_type = other RNA
ttatgcttcatttcactatga

SEQ ID NO: 901 - RNA, 21 nt, synthetic construct
  source 1..21: mol_type = other RNA
tatgcttcatttcactatgga

SEQ ID NO: 902 - RNA, 21 nt, synthetic construct
  source 1..21: mol_type = other RNA
atgcttcatttcactatggaa

SEQ ID NO: 903 - RNA, 21 nt, synthetic construct
  source 1..21: mol_type = other RNA
tgcttcatttcactatggaaa

SEQ ID NO: 904 - RNA, 21 nt, synthetic construct
  source 1..21: mol_type = other RNA
gcttcatttcactatggaaaa

SEQ ID NO: 905 - RNA, 21 nt, synthetic construct
  source 1..21: mol_type = other RNA
cttcatttcactatggaaata

SEQ ID NO: 906 - RNA, 21 nt, synthetic construct
  source 1..21: mol_type = other RNA
ttcatttcactatggaaataa

SEQ ID NO: 907 - RNA, 21 nt, synthetic construct
  source 1..21: mol_type = other RNA
tcatttcactatggaaatata

SEQ ID NO: 908 - RNA, 21 nt, synthetic construct
  source 1..21: mol_type = other RNA
tttcactatggaaatatgtta

SEQ ID NO: 909 - RNA, 21 nt, synthetic construct
  source 1..21: mol_type = other RNA
actatggaaatatgttactga

SEQ ID NO: 910 - RNA, 21 nt, synthetic construct
  source 1..21: mol_type = other RNA
ctatggaaatatgttactgaa

SEQ ID NO: 911 - RNA, 21 nt, synthetic construct
  source 1..21: mol_type = other RNA
tatggaaatatgttactgaaa

SEQ ID NO: 912 - RNA, 21 nt, synthetic construct
  source 1..21: mol_type = other RNA
atggaaatatgttactgaata

SEQ ID NO: 913 - RNA, 21 nt, synthetic construct
  source 1..21: mol_type = other RNA
actgacagctatggagtttga

SEQ ID NO: 914 - RNA, 21 nt, synthetic construct
  source 1..21: mol_type = other RNA
ctgacagctatggagtttgca

SEQ ID NO: 915 - RNA, 21 nt, synthetic construct
  source 1..21: mol_type = other RNA
tgacagctatggagtttgcga

SEQ ID NO: 916 - RNA, 21 nt, synthetic construct
  source 1..21: mol_type = other RNA
gacagctatggagtttgcgta

SEQ ID NO: 917 - RNA, 21 nt, synthetic construct
  source 1..21: mol_type = other RNA
acagctatggagtttgcgtga

SEQ ID NO: 918 - RNA, 21 nt, synthetic construct
  source 1..21: mol_type = other RNA
cagctatggagtttgcgtgta

SEQ ID NO: 919 - RNA, 21 nt, synthetic construct
  source 1..21: mol_type = other RNA
agctatggagtttgcgtgtaa

SEQ ID NO: 920 - RNA, 21 nt, synthetic construct
  source 1..21: mol_type = other RNA
gctatggagtttgcgtgtaca

SEQ ID NO: 921 - RNA, 21 nt, synthetic construct
  source 1..21: mol_type = other RNA
ctatggagtttgcgtgtacta

SEQ ID NO: 922 - RNA, 21 nt, synthetic construct
  source 1..21: mol_type = other RNA
tatggagtttgcgtgtactta

SEQ ID NO: 923 - RNA, 21 nt, synthetic construct
  source 1..21: mol_type = other RNA
atggagtttgcgtgtacttca

SEQ ID NO: 924 - RNA, 21 nt, synthetic construct
  source 1..21: mol_type = other RNA
tttgcgtgtacttccatacta

SEQ ID NO: 925 - RNA, 21 nt, synthetic construct
  source 1..21: mol_type = other RNA
tgcgtgtacttccatactcga

SEQ ID NO: 926 - RNA, 21 nt, synthetic construct
  source 1..21: mol_type = other RNA
gcgtgtacttccatactcgta

SEQ ID NO: 927 - RNA, 21 nt, synthetic construct
  source 1..21: mol_type = other RNA
cgtgtacttccatactcgtta

SEQ ID NO: 928 - RNA, 21 nt, synthetic construct
  source 1..21: mol_type = other RNA
gtgtacttccatactcgttaa

SEQ ID NO: 929 - RNA, 21 nt, synthetic construct
  source 1..21: mol_type = other RNA
tgtacttccatactcgttaaa

SEQ ID NO: 930 - RNA, 21 nt, synthetic construct
  source 1..21: mol_type = other RNA
gtacttccatactcgttaata

SEQ ID NO: 931 - RNA, 21 nt, synthetic construct
  source 1..21: mol_type = other RNA
tacttccatactcgttaatga

SEQ ID NO: 932 - RNA, 21 nt, synthetic construct
  source 1..21: mol_type = other RNA
acttccatactcgttaatgca

SEQ ID NO: 933 - RNA, 21 nt, synthetic construct
  source 1..21: mol_type = other RNA
cttccatactcgttaatgcta

SEQ ID NO: 934 - RNA, 21 nt, synthetic construct
  source 1..21: mol_type = other RNA
ttccatactcgttaatgctca

SEQ ID NO: 935 - RNA, 21 nt, synthetic construct
  source 1..21: mol_type = other RNA
tccatactcgttaatgctcta

SEQ ID NO: 936 - RNA, 21 nt, synthetic construct
  source 1..21: mol_type = other RNA
ccatactcgttaatgctctca

SEQ ID NO: 937 - RNA, 21 nt, synthetic construct
  source 1..21: mol_type = other RNA
catactcgttaatgctctcaa

SEQ ID NO: 938 - RNA, 21 nt, synthetic construct
  source 1..21: mol_type = other RNA
atactcgttaatgctctcata

SEQ ID NO: 939 - RNA, 21 nt, synthetic construct
  source 1..21: mol_type = other RNA
ctcgttaatgctctcatccaa

SEQ ID NO: 940 - RNA, 21 nt, synthetic construct
  source 1..21: mol_type = other RNA
tcgttaatgctctcatccaca

SEQ ID NO: 941 - RNA, 21 nt, synthetic construct
  source 1..21: mol_type = other RNA
cgttaatgctctcatccacta

SEQ ID NO: 942 - RNA, 21 nt, synthetic construct
  source 1..21: mol_type = other RNA
gttaatgctctcatccactta

SEQ ID NO: 943 - RNA, 21 nt, synthetic construct
  source 1..21: mol_type = other RNA
ttaatgctctcatccacttaa

SEQ ID NO: 944 - RNA, 21 nt, synthetic construct
  source 1..21: mol_type = other RNA
taatgctctcatccacttata

SEQ ID NO: 945 - RNA, 21 nt, synthetic construct
  source 1..21: mol_type = other RNA
aatgctctcatccacttatta

SEQ ID NO: 946 - RNA, 21 nt, synthetic construct
  source 1..21: mol_type = other RNA
atgctctcatccacttattaa

SEQ ID NO: 947 - RNA, 21 nt, synthetic construct
  source 1..21: mol_type = other RNA
tgctctcatccacttattaaa

SEQ ID NO: 948 - RNA, 21 nt, synthetic construct
  source 1..21: mol_type = other RNA
gctctcatccacttattaaaa

SEQ ID NO: 949 - RNA, 21 nt, synthetic construct
  source 1..21: mol_type = other RNA
ctctcatccacttattaaata

SEQ ID NO: 950 - RNA, 21 nt, synthetic construct
  source 1..21: mol_type = other RNA
tctcatccacttattaaataa

SEQ ID NO: 951 - RNA, 21 nt, synthetic construct
  source 1..21: mol_type = other RNA
ctcatccacttattaaataaa

SEQ ID NO: 952 - RNA, 21 nt, synthetic construct
  source 1..21: mol_type = other RNA
ttaaataatcatagagcacca

SEQ ID NO: 953 - RNA, 21 nt, synthetic construct
  source 1..21: mol_type = other RNA
taaataatcatagagcaccca

SEQ ID NO: 954 - RNA, 21 nt, synthetic construct
  source 1..21: mol_type = other RNA
aaataatcatagagcacccaa

SEQ ID NO: 955 - RNA, 21 nt, synthetic construct
  source 1..21: mol_type = other RNA
aataatcatagagcacccata

SEQ ID NO: 956 - RNA, 21 nt, synthetic construct
  source 1..21: mol_type = other RNA
ataatcatagagcacccataa

SEQ ID NO: 957 - RNA, 21 nt, synthetic construct
  source 1..21: mol_type = other RNA
taatcatagagcacccatata

SEQ ID NO: 958 - RNA, 21 nt, synthetic construct
  source 1..21: mol_type = other RNA
gagcacccatatcttgcttga

SEQ ID NO: 959 - RNA, 21 nt, synthetic construct
  source 1..21: mol_type = other RNA
atatcttgcttgccacaataa

SEQ ID NO: 960 - RNA, 21 nt, synthetic construct
  source 1..21: mol_type = other RNA
ataggtcctgccctcagggaa

SEQ ID NO: 961 - RNA, 21 nt, synthetic construct
  source 1..21: mol_type = other RNA
taggtcctgccctcagggata

SEQ ID NO: 962 - RNA, 21 nt, synthetic construct
  source 1..21: mol_type = other RNA
aggtcctgccctcagggatta

SEQ ID NO: 963 - RNA, 21 nt, synthetic construct
  source 1..21: mol_type = other RNA
ggtcctgccctcagggattta

SEQ ID NO: 964 - RNA, 21 nt, synthetic construct
  source 1..21: mol_type = other RNA
gtcctgccctcagggatttta

SEQ ID NO: 965 - RNA, 21 nt, synthetic construct
  source 1..21: mol_type = other RNA
tcctgccctcagggattttaa

SEQ ID NO: 966 - RNA, 21 nt, synthetic construct
  source 1..21: mol_type = other RNA
cctgccctcagggattttaaa

SEQ ID NO: 967 - RNA, 21 nt, synthetic construct
  source 1..21: mol_type = other RNA
ctgccctcagggattttaaaa

SEQ ID NO: 968 - RNA, 21 nt, synthetic construct
  source 1..21: mol_type = other RNA
tgccctcagggattttaaaga

SEQ ID NO: 969 - RNA, 21 nt, synthetic construct
  source 1..21: mol_type = other RNA
gccctcagggattttaaagta

SEQ ID NO: 970 - RNA, 21 nt, synthetic construct
  source 1..21: mol_type = other RNA
ccctcagggattttaaagtca

SEQ ID NO: 971 - RNA, 21 nt, synthetic construct
  source 1..21: mol_type = other RNA
agggattttaaagtctaatta

SEQ ID NO: 972 - RNA, 21 nt, synthetic construct
  source 1..21: mol_type = other RNA
gggattttaaagtctaattta

SEQ ID NO: 973 - RNA, 21 nt, synthetic construct
  source 1..21: mol_type = other RNA
gaagagattaaattgacagaa

SEQ ID NO: 974 - RNA, 21 nt, synthetic construct
  source 1..21: mol_type = other RNA
aagagattaaattgacagata

SEQ ID NO: 975 - RNA, 21 nt, synthetic construct
  source 1..21: mol_type = other RNA
agagattaaattgacagataa

SEQ ID NO: 976 - RNA, 21 nt, synthetic construct
  source 1..21: mol_type = other RNA
ttgacagataaaatacgaaga

SEQ ID NO: 977 - RNA, 21 nt, synthetic construct
  source 1..21: mol_type = other RNA
tgacagataaaatacgaagta

SEQ ID NO: 978 - RNA, 21 nt, synthetic construct
  source 1..21: mol_type = other RNA
gacagataaaatacgaagtga

SEQ ID NO: 979 - RNA, 21 nt, synthetic construct
  source 1..21: mol_type = other RNA
acagataaaatacgaagtgga

SEQ ID NO: 980 - RNA, 21 nt, synthetic construct
  source 1..21: mol_type = other RNA
gaagtgggatgtcttgagtta

SEQ ID NO: 981 - RNA, 21 nt, synthetic construct
  source 1..21: mol_type = other RNA
agtgggatgtcttgagttcta

SEQ ID NO: 982 - RNA, 21 nt, synthetic construct
  source 1..21: mol_type = other RNA
gatgtcttgagttctgcatga

SEQ ID NO: 983 - RNA, 21 nt, synthetic construct
  source 1..21: mol_type = other RNA
agtgggtttctaggataggta

SEQ ID NO: 984 - RNA, 21 nt, synthetic construct
  source 1..21: mol_type = other RNA
gtgggtttctaggataggtca

SEQ ID NO: 985 - RNA, 21 nt, synthetic construct
  source 1..21: mol_type = other RNA
tgggtttctaggataggtcta

SEQ ID NO: 986 - RNA, 21 nt, synthetic construct
  source 1..21: mol_type = other RNA
gggtttctaggataggtctga

SEQ ID NO: 987 - RNA, 21 nt, synthetic construct
  source 1..21: mol_type = other RNA
ggtttctaggataggtctgaa

SEQ ID NO: 988 - RNA, 21 nt, synthetic construct
  source 1..21: mol_type = other RNA
gtttctaggataggtctgaaa

SEQ ID NO: 989 - RNA, 21 nt, synthetic construct
  source 1..21: mol_type = other RNA
tttctaggataggtctgaaaa

SEQ ID NO: 990 - RNA, 21 nt, synthetic construct
  source 1..21: mol_type = other RNA
ttctaggataggtctgaaaaa

SEQ ID NO: 991 - RNA, 21 nt, synthetic construct
  source 1..21: mol_type = other RNA
tctaggataggtctgaaaata

SEQ ID NO: 992 - RNA, 21 nt, synthetic construct
  source 1..21: mol_type = other RNA
ctaggataggtctgaaaatta

SEQ ID NO: 993 - RNA, 21 nt, synthetic construct
  source 1..21: mol_type = other RNA
taggataggtctgaaaattga

SEQ ID NO: 994 - RNA, 21 nt, synthetic construct
  source 1..21: mol_type = other RNA
ctgaaaattgctttcatttga

SEQ ID NO: 995 - RNA, 21 nt, synthetic construct
  source 1..21: mol_type = other RNA
attgctttcatttgcaacaca

SEQ ID NO: 996 - RNA, 21 nt, synthetic construct
  source 1..21: mol_type = other RNA
ttgctttcatttgcaacacaa

SEQ ID NO: 997 - RNA, 21 nt, synthetic construct
  source 1..21: mol_type = other RNA
tgctttcatttgcaacacata

SEQ ID NO: 998 - RNA, 21 nt, synthetic construct
  source 1..21: mol_type = other RNA
gctttcatttgcaacacatta

SEQ ID NO: 999 - RNA, 21 nt, synthetic construct
  source 1..21: mol_type = other RNA
ctttcatttgcaacacattta

SEQ ID NO: 1000 - RNA, 21 nt, synthetic construct
  source 1..21: mol_type = other RNA
agaaagtagctttatttggaa

SEQ ID NO: 1001 - RNA, 21 nt, synthetic construct
  source 1..21: mol_type = other RNA
aagtagctttatttggatata

SEQ ID NO: 1002 - RNA, 21 nt, synthetic construct
  source 1..21: mol_type = other RNA
gacaatctaaatatatcatca

SEQ ID NO: 1003 - RNA, 21 nt, synthetic construct
  source 1..21: mol_type = other RNA
caatctaaatatatcatcaga

SEQ ID NO: 1004 - RNA, 21 nt, synthetic construct
  source 1..21: mol_type = other RNA
tcatcagtttttaaaagtgca

SEQ ID NO: 1005 - RNA, 21 nt, synthetic construct
  source 1..21: mol_type = other RNA
catcagtttttaaaagtgcca

SEQ ID NO: 1006 - RNA, 21 nt, synthetic construct
  source 1..21: mol_type = other RNA
atcagtttttaaaagtgccta

SEQ ID NO: 1007 - RNA, 21 nt, synthetic construct
  source 1..21: mol_type = other RNA
tcagtttttaaaagtgcctaa

SEQ ID NO: 1008 - RNA, 21 nt, synthetic construct
  source 1..21: mol_type = other RNA
cagtttttaaaagtgcctata

SEQ ID NO: 1009 - RNA, 21 nt, synthetic construct
  source 1..21: mol_type = other RNA
agtttttaaaagtgcctatga

SEQ ID NO: 1010 - RNA, 21 nt, synthetic construct
  source 1..21: mol_type = other RNA
gtttttaaaagtgcctatgta

SEQ ID NO: 1011 - RNA, 21 nt, synthetic construct
  source 1..21: mol_type = other RNA
tttttaaaagtgcctatgtga

SEQ ID NO: 1012 - RNA, 21 nt, synthetic construct
  source 1..21: mol_type = other RNA
aagtgcctatgtgaagtgata

SEQ ID NO: 1013 - RNA, 21 nt, synthetic construct
  source 1..21: mol_type = other RNA
agtgcctatgtgaagtgatta

SEQ ID NO: 1014 - RNA, 21 nt, synthetic construct
  source 1..21: mol_type = other RNA
gtgcctatgtgaagtgattta

SEQ ID NO: 1015 - RNA, 21 nt, synthetic construct
  source 1..21: mol_type = other RNA
tgcctatgtgaagtgatttta

SEQ ID NO: 1016 - RNA, 21 nt, synthetic construct
  source 1..21: mol_type = other RNA
gcctatgtgaagtgattttta

SEQ ID NO: 1017 - RNA, 21 nt, synthetic construct
  source 1..21: mol_type = other RNA
cctatgtgaagtgatttttaa

SEQ ID NO: 1018 - RNA, 21 nt, synthetic construct
  source 1..21: mol_type = other RNA
ctatgtgaagtgatttttaaa

SEQ ID NO: 1019 - RNA, 21 nt, synthetic construct
  source 1..21: mol_type = other RNA
tatgtgaagtgatttttaaaa

SEQ ID NO: 1020 - RNA, 21 nt, synthetic construct
  source 1..21: mol_type = other RNA
gaagtgatttttaaaaagaga

SEQ ID NO: 1021 - RNA, 21 nt, synthetic construct
  source 1..21: mol_type = other RNA
aagtgatttttaaaaagagca

SEQ ID NO: 1022 - RNA, 21 nt, synthetic construct
  source 1..21: mol_type = other RNA
tgatttttaaaaagagcctaa

SEQ ID NO: 1023 - RNA, 21 nt, synthetic construct
  source 1..21: mol_type = other RNA
gatttttaaaaagagcctata

SEQ ID NO: 1024 - RNA, 21 nt, synthetic construct
  source 1..21: mol_type = other RNA
atttttaaaaagagcctatga

SEQ ID NO: 1025 - RNA, 21 nt, synthetic construct
  source 1..21: mol_type = other RNA
tttttaaaaagagcctatgta

SEQ ID NO: 1026 - RNA, 21 nt, synthetic construct
  source 1..21: mol_type = other RNA
ttttaaaaagagcctatgtga

SEQ ID NO: 1027 - RNA, 21 nt, synthetic construct
  source 1..21: mol_type = other RNA
tttaaaaagagcctatgtgaa

SEQ ID NO: 1028 - RNA, 21 nt, synthetic construct
  source 1..21: mol_type = other RNA
ttaaaaagagcctatgtgaaa

SEQ ID NO: 1029 - RNA, 21 nt, synthetic construct
  source 1..21: mol_type = other RNA
taaaaagagcctatgtgaaga

SEQ ID NO: 1030 - RNA, 21 nt, synthetic construct
  source 1..21: mol_type = other RNA
aaaaagagcctatgtgaagga

SEQ ID NO: 1031 - RNA, 21 nt, synthetic construct
  source 1..21: mol_type = other RNA
gtaatcttgcttgttcttgta

SEQ ID NO: 1032 - RNA, 21 nt, synthetic construct
  source 1..21: mol_type = other RNA
taatcttgcttgttcttgtta

SEQ ID NO: 1033 - RNA, 21 nt, synthetic construct
  source 1..21: mol_type = other RNA
aatcttgcttgttcttgttaa

SEQ ID NO: 1034 - RNA, 21 nt, synthetic construct
  source 1..21: mol_type = other RNA
atcttgcttgttcttgttaca

SEQ ID NO: 1035 - RNA, 21 nt, synthetic construct
  source 1..21: mol_type = other RNA
tcttgcttgttcttgttacta

SEQ ID NO: 1036 - RNA, 21 nt, synthetic construct
  source 1..21: mol_type = other RNA
cttgcttgttcttgttactaa

SEQ ID NO: 1037 - RNA, 21 nt, synthetic construct
  source 1..21: mol_type = other RNA
ttgcttgttcttgttactaaa

SEQ ID NO: 1038 - RNA, 21 nt, synthetic construct
  source 1..21: mol_type = other RNA
tgcttgttcttgttactaata

SEQ ID NO: 1039 - RNA, 21 nt, synthetic construct
  source 1..21: mol_type = other RNA
gcttgttcttgttactaatta

SEQ ID NO: 1040 - RNA, 21 nt, synthetic construct
  source 1..21: mol_type = other RNA
cttgttcttgttactaattta

SEQ ID NO: 1041 - RNA, 21 nt, synthetic construct
  source 1..21: mol_type = other RNA
ttgttcttgttactaatttca

SEQ ID NO: 1042 - RNA, 21 nt, synthetic construct
  source 1..21: mol_type = other RNA
tctgcatatataagaacgaaa

SEQ ID NO: 1043 - RNA, 21 nt, synthetic construct
  source 1..21: mol_type = other RNA
ttgtacgtgcctcaaataaaa

SEQ ID NO: 1044 - RNA, 21 nt, synthetic construct
  source 1..21: mol_type = other RNA
tgcctcaaataaacaagaata

SEQ ID NO: 1045 - RNA, 21 nt, synthetic construct
  source 1..21: mol_type = other RNA
gcctcaaataaacaagaatga

SEQ ID NO: 1046 - RNA, 21 nt, synthetic construct
  source 1..21: mol_type = other RNA
cctcaaataaacaagaatgaa

SEQ ID NO: 1047 - RNA, 21 nt, synthetic construct
  source 1..21: mol_type = other RNA
ctcaaataaacaagaatgata

SEQ ID NO: 1048 - RNA, 21 nt, synthetic construct
  source 1..21: mol_type = other RNA
tcaaataaacaagaatgataa

SEQ ID NO: 1049 - RNA, 21 nt, synthetic construct
  source 1..21: mol_type = other RNA
aacaagaatgatatttcctga

SEQ ID NO: 1050 - RNA, 21 nt, synthetic construct
  source 1..21: mol_type = other RNA
acaagaatgatatttcctgta

SEQ ID NO: 1051 - RNA, 21 nt, synthetic construct
  source 1..21: mol_type = other RNA
caagaatgatatttcctgtta

SEQ ID NO: 1052 - RNA, 21 nt, synthetic construct
  source 1..21: mol_type = other RNA
aagaatgatatttcctgttta

SEQ ID NO: 1053 - RNA, 21 nt, synthetic construct
  source 1..21: mol_type = other RNA
agaatgatatttcctgtttta

SEQ ID NO: 1054 - RNA, 21 nt, synthetic construct
  source 1..21: mol_type = other RNA
acttatgttgggtaaatatga

SEQ ID NO: 1055 - RNA, 21 nt, synthetic construct
  source 1..21: mol_type = other RNA
cttatgttgggtaaatatgca

SEQ ID NO: 1056 - RNA, 21 nt, synthetic construct
  source 1..21: mol_type = other RNA
ttatgttgggtaaatatgcta

SEQ ID NO: 1057 - RNA, 21 nt, synthetic construct
  source 1..21: mol_type = other RNA
tatgttgggtaaatatgctta

SEQ ID NO: 1058 - RNA, 21 nt, synthetic construct
  source 1..21: mol_type = other RNA
atgttgggtaaatatgcttaa

SEQ ID NO: 1059 - RNA, 21 nt, synthetic construct
  source 1..21: mol_type = other RNA
tgttgggtaaatatgcttata

SEQ ID NO: 1060 - RNA, 21 nt, synthetic construct
  source 1..21: mol_type = other RNA
gttgggtaaatatgcttatta

SEQ ID NO: 1061 - RNA, 21 nt, synthetic construct
  source 1..21: mol_type = other RNA
ttggttcaactttcactctga

SEQ ID NO: 1062 - RNA, 21 nt, synthetic construct
  source 1..21: mol_type = other RNA
aactttcactctgaagaaata

SEQ ID NO: 1063 - RNA, 21 nt, synthetic construct
  source 1..21: mol_type = other RNA
ctctgaagaaatccgtatgta

SEQ ID NO: 1064 - RNA, 21 nt, synthetic construct
  source 1..21: mol_type = other RNA
ctgaagaaatccgtatgttaa

SEQ ID NO: 1065 - RNA, 21 nt, synthetic construct
  source 1..21: mol_type = other RNA
gtgttgtttaactatgactca

SEQ ID NO: 1066 - RNA, 21 nt, synthetic construct
  source 1..21: mol_type = other RNA
tgactcctaactgagtagtca

SEQ ID NO: 1067 - RNA, 21 nt, synthetic construct
  source 1..21: mol_type = other RNA
gactcctaactgagtagtcta

SEQ ID NO: 1068 - RNA, 21 nt, synthetic construct
  source 1..21: mol_type = other RNA
actcctaactgagtagtctta

SEQ ID NO: 1069 - RNA, 21 nt, synthetic construct
  source 1..21: mol_type = other RNA
ctcctaactgagtagtcttaa

SEQ ID NO: 1070 - RNA, 21 nt, synthetic construct
  source 1..21: mol_type = other RNA
tcctaactgagtagtcttata

SEQ ID NO: 1071 - RNA, 21 nt, synthetic construct
  source 1..21: mol_type = other RNA
cctaactgagtagtcttataa

SEQ ID NO: 1072 - RNA, 21 nt, synthetic construct
  source 1..21: mol_type = other RNA
ctaactgagtagtcttatata

SEQ ID NO: 1073 - RNA, 21 nt, synthetic construct
  source 1..21: mol_type = other RNA
taactgagtagtcttatatta

SEQ ID NO: 1074 - RNA, 21 nt, synthetic construct
  source 1..21: mol_type = other RNA
aactgagtagtcttatattta

SEQ ID NO: 1075 - RNA, 21 nt, synthetic construct
  source 1..21: mol_type = other RNA
actgagtagtcttatatttca

SEQ ID NO: 1076 - RNA, 21 nt, synthetic construct
  source 1..21: mol_type = other RNA
ctgagtagtcttatatttcaa

SEQ ID NO: 1077 - RNA, 21 nt, synthetic construct
  source 1..21: mol_type = other RNA
tgagtagtcttatatttcaaa

SEQ ID NO: 1078 - RNA, 21 nt, synthetic construct
  source 1..21: mol_type = other RNA
gagtagtcttatatttcaata

SEQ ID NO: 1079 - RNA, 21 nt, synthetic construct
  source 1..21: mol_type = other RNA
ttcctttactcttaacaggaa

SEQ ID NO: 1080 - RNA, 21 nt, synthetic construct
  source 1..21: mol_type = other RNA
tcctttactcttaacaggata

SEQ ID NO: 1081 - RNA, 21 nt, synthetic construct
  source 1..21: mol_type = other RNA
cctttactcttaacaggatta

SEQ ID NO: 1082 - RNA, 21 nt, synthetic construct
  source 1..21: mol_type = other RNA
ctttactcttaacaggattaa

SEQ ID NO: 1083 - RNA, 21 nt, synthetic construct
  source 1..21: mol_type = other RNA
tttactcttaacaggattata

SEQ ID NO: 1084 - RNA, 21 nt, synthetic construct
  source 1..21: mol_type = other RNA
ttactcttaacaggattataa

SEQ ID NO: 1085 - RNA, 21 nt, synthetic construct
  source 1..21: mol_type = other RNA
cttaacaggattatatataga

SEQ ID NO: 1086 - RNA, 21 nt, synthetic construct
  source 1..21: mol_type = other RNA
aggattatatatagaacatga

SEQ ID NO: 1087 - RNA, 21 nt, synthetic construct
  source 1..21: mol_type = other RNA
catgctcacttacaaaaataa

SEQ ID NO: 1088 - RNA, 21 nt, synthetic construct
  source 1..21: mol_type = other RNA
acttacaaaaataggatgata

SEQ ID NO: 1089 - RNA, 21 nt, synthetic construct
  source 1..21: mol_type = other RNA
ataaggcaggcttcttgtata

SEQ ID NO: 1090 - RNA, 21 nt, synthetic construct
  source 1..21: mol_type = other RNA
caggcttcttgtatatactta

SEQ ID NO: 1091 - RNA, 21 nt, synthetic construct
  source 1..21: mol_type = other RNA
tatatacttatgctgtcaaaa

SEQ ID NO: 1092 - RNA, 21 nt, synthetic construct
  source 1..21: mol_type = other RNA
atatacttatgctgtcaaata

SEQ ID NO: 1093 - RNA, 21 nt, synthetic construct
  source 1..21: mol_type = other RNA
tatacttatgctgtcaaatga

SEQ ID NO: 1094 - RNA, 21 nt, synthetic construct
  source 1..21: mol_type = other RNA
atacttatgctgtcaaatgta

SEQ ID NO: 1095 - RNA, 21 nt, synthetic construct
  source 1..21: mol_type = other RNA
tacttatgctgtcaaatgtta

SEQ ID NO: 1096 - RNA, 21 nt, synthetic construct
  source 1..21: mol_type = other RNA
acttatgctgtcaaatgttaa

SEQ ID NO: 1097 - RNA, 21 nt, synthetic construct
  source 1..21: mol_type = other RNA
cttatgctgtcaaatgttata

SEQ ID NO: 1098 - RNA, 21 nt, synthetic construct
  source 1..21: mol_type = other RNA
ttatgctgtcaaatgttataa

SEQ ID NO: 1099 - RNA, 21 nt, synthetic construct
  source 1..21: mol_type = other RNA
tatgctgtcaaatgttatata

SEQ ID NO: 1100 - RNA, 21 nt, synthetic construct
  source 1..21: mol_type = other RNA
tgctgtcaaatgttatattga

SEQ ID NO: 1101 - RNA, 21 nt, synthetic construct
  source 1..21: mol_type = other RNA
gctgtcaaatgttatattgta

SEQ ID NO: 1102 - RNA, 21 nt, synthetic construct
  source 1..21: mol_type = other RNA
ctgtcaaatgttatattgtta

SEQ ID NO: 1103 - RNA, 21 nt, synthetic construct
  source 1..21: mol_type = other RNA
tgtcaaatgttatattgttta

SEQ ID NO: 1104 - RNA, 21 nt, synthetic construct
  source 1..21: mol_type = other RNA
tatgttcagagtatcagtgta

SEQ ID NO: 1105 - RNA, 21 nt, synthetic construct
  source 1..21: mol_type = other RNA
atgttcagagtatcagtgtta

SEQ ID NO: 1106 - RNA, 21 nt, synthetic construct
  source 1..21: mol_type = other RNA
tgttcagagtatcagtgttca

SEQ ID NO: 1107 - RNA, 21 nt, synthetic construct
  source 1..21: mol_type = other RNA
gttcagagtatcagtgttcta

SEQ ID NO: 1108 - RNA, 21 nt, synthetic construct
  source 1..21: mol_type = other RNA
ttcagagtatcagtgttctta

SEQ ID NO: 1109 - RNA, 21 nt, synthetic construct
  source 1..21: mol_type = other RNA
tcagagtatcagtgttcttta

SEQ ID NO: 1110 - RNA, 21 nt, synthetic construct
  source 1..21: mol_type = other RNA
cagagtatcagtgttctttaa

SEQ ID NO: 1111 - RNA, 21 nt, synthetic construct
  source 1..21: mol_type = other RNA
agagtatcagtgttctttaca

SEQ ID NO: 1112 - RNA, 21 nt, synthetic construct
  source 1..21: mol_type = other RNA
gagtatcagtgttctttacta

SEQ ID NO: 1113 - RNA, 21 nt, synthetic construct
  source 1..21: mol_type = other RNA
agtatcagtgttctttactca

SEQ ID NO: 1114 - RNA, 21 nt, synthetic construct
  source 1..21: mol_type = other RNA
gtatcagtgttctttactcca

SEQ ID NO: 1115 - RNA, 21 nt, synthetic construct
  source 1..21: mol_type = other RNA
tctttactccttacagatata

SEQ ID NO: 1116 - RNA, 21 nt, synthetic construct
  source 1..21: mol_type = other RNA
ttactccttacagatatttta

SEQ ID NO: 1117 - RNA, 21 nt, synthetic construct
  source 1..21: mol_type = other RNA
taaatgcagcatcactttcta

SEQ ID NO: 1118 - RNA, 21 nt, synthetic construct
  source 1..21: mol_type = other RNA
gcatcactttctgaaaataaa

SEQ ID NO: 1119 - RNA, 21 nt, synthetic construct
  source 1..21: mol_type = other RNA
gagaaacattatttgttgtca

SEQ ID NO: 1120 - RNA, 21 nt, synthetic construct
  source 1..21: mol_type = other RNA
tgttgtcagtatttcagcata

SEQ ID NO: 1121 - RNA, 21 nt, synthetic construct
  source 1..21: mol_type = other RNA
gtatttcagcatgaacttgta

SEQ ID NO: 1122 - RNA, 21 nt, synthetic construct
  source 1..21: mol_type = other RNA
ttgtaattggtacagattcta

SEQ ID NO: 1123 - RNA, 21 nt, synthetic construct
  source 1..21: mol_type = other RNA
tgtaattggtacagattctga

SEQ ID NO: 1124 - RNA, 21 nt, synthetic construct
  source 1..21: mol_type = other RNA
gtaattggtacagattctgta

SEQ ID NO: 1125 - RNA, 21 nt, synthetic construct
  source 1..21: mol_type = other RNA
taattggtacagattctgtta

SEQ ID NO: 1126 - RNA, 21 nt, synthetic construct
  source 1..21: mol_type = other RNA
aattggtacagattctgttga

SEQ ID NO: 1127 - RNA, 21 nt, synthetic construct
  source 1..21: mol_type = other RNA
attggtacagattctgttgta

SEQ ID NO: 1128 - RNA, 21 nt, synthetic construct
  source 1..21: mol_type = other RNA
ttggtacagattctgttgtaa

SEQ ID NO: 1129 - RNA, 21 nt, synthetic construct
  source 1..21: mol_type = other RNA
tggtacagattctgttgtata

SEQ ID NO: 1130 - RNA, 21 nt, synthetic construct
  source 1..21: mol_type = other RNA
ggtacagattctgttgtatga

SEQ ID NO: 1131 - RNA, 21 nt, synthetic construct
  source 1..21: mol_type = other RNA
gtacagattctgttgtatgca

SEQ ID NO: 1132 - RNA, 21 nt, synthetic construct
  source 1..21: mol_type = other RNA
tacagattctgttgtatgcta

SEQ ID NO: 1133 - RNA, 21 nt, synthetic construct
  source 1..21: mol_type = other RNA
acagattctgttgtatgctta

SEQ ID NO: 1134 - RNA, 21 nt, synthetic construct
  source 1..21: mol_type = other RNA
cagattctgttgtatgcttta

SEQ ID NO: 1135 - RNA, 21 nt, synthetic construct
  source 1..21: mol_type = other RNA
agattctgttgtatgctttca

SEQ ID NO: 1136 - RNA, 21 nt, synthetic construct
  source 1..21: mol_type = other RNA
gattctgttgtatgctttcta

SEQ ID NO: 1137 - RNA, 21 nt, synthetic construct
  source 1..21: mol_type = other RNA
tggcatgtcacatctagaata

SEQ ID NO: 1138 - RNA, 21 nt, synthetic construct
  source 1..21: mol_type = other RNA
ggcatgtcacatctagaatta

SEQ ID NO: 1139 - RNA, 21 nt, synthetic construct
  source 1..21: mol_type = other RNA
gcatgtcacatctagaattca

SEQ ID NO: 1140 - RNA, 21 nt, synthetic construct
  source 1..21: mol_type = other RNA
catgtcacatctagaattcta

SEQ ID NO: 1141 - RNA, 21 nt, synthetic construct
  source 1..21: mol_type = other RNA
atgtcacatctagaattctta

SEQ ID NO: 1142 - RNA, 21 nt, synthetic construct
  source 1..21: mol_type = other RNA
tgtcacatctagaattcttaa

SEQ ID NO: 1143 - RNA, 21 nt, synthetic construct
  source 1..21: mol_type = other RNA
gtcacatctagaattcttaaa

SEQ ID NO: 1144 - RNA, 21 nt, synthetic construct
  source 1..21: mol_type = other RNA
tcacatctagaattcttaata

SEQ ID NO: 1145 - RNA, 21 nt, synthetic construct
  source 1..21: mol_type = other RNA
cacatctagaattcttaatta

SEQ ID NO: 1146 - RNA, 21 nt, synthetic construct
  source 1..21: mol_type = other RNA
tgacttgagagttaagtgaaa

SEQ ID NO: 1147 - RNA, 21 nt, synthetic construct
  source 1..21: mol_type = other RNA
ttgagagttaagtgaaacata

SEQ ID NO: 1148 - RNA, 21 nt, synthetic construct
  source 1..21: mol_type = other RNA
tagcacttgcttttcatctta

SEQ ID NO: 1149 - RNA, 21 nt, synthetic construct
  source 1..21: mol_type = other RNA
ttgcattttaaatttccatga

SEQ ID NO: 1150 - RNA, 21 nt, synthetic construct
  source 1..21: mol_type = other RNA
attttaaatttccatgattga

SEQ ID NO: 1151 - RNA, 21 nt, synthetic construct
  source 1..21: mol_type = other RNA
tggttgcagtatctgaaaaaa

SEQ ID NO: 1152 - RNA, 21 nt, synthetic construct
  source 1..21: mol_type = other RNA
ggttgcagtatctgaaaaaaa

SEQ ID NO: 1153 - RNA, 21 nt, synthetic construct
  source 1..21: mol_type = other RNA
gttgcagtatctgaaaaaata

SEQ ID NO: 1154 - RNA, 21 nt, synthetic construct
  source 1..21: mol_type = other RNA
ttgcagtatctgaaaaaatta

SEQ ID NO: 1155 - RNA, 21 nt, synthetic construct
  source 1..21: mol_type = other RNA
tgcagtatctgaaaaaattaa

SEQ ID NO: 1156 - RNA, 21 nt, synthetic construct
  source 1..21: mol_type = other RNA
attcattaggttagaagttca

SEQ ID NO: 1157 - RNA, 21 nt, synthetic construct
  source 1..21: mol_type = other RNA
tagaagttccagaataattta

SEQ ID NO: 1158 - RNA, 21 nt, synthetic construct
  source 1..21: mol_type = other RNA
acctactattgtagaattaca

SEQ ID NO: 1159 - RNA, 21 nt, synthetic construct
  source 1..21: mol_type = other RNA
aaacaaaacaaaactactcca

SEQ ID NO: 1160 - RNA, 21 nt, synthetic construct
  source 1..21: mol_type = other RNA
acaaaacaaaactactcctaa

SEQ ID NO: 1161 - RNA, 21 nt, synthetic construct
  source 1..21: mol_type = other RNA
caaaacaaaactactcctata

SEQ ID NO: 1162 - RNA, 21 nt, synthetic construct
  source 1..21: mol_type = other RNA
aaaacaaaactactcctatta

SEQ ID NO: 1163 - RNA, 21 nt, synthetic construct
  source 1..21: mol_type = other RNA
aaacaaaactactcctattta

SEQ ID NO: 1164 - RNA, 21 nt, synthetic construct
  source 1..21: mol_type = other RNA
acaaaactactcctattttca

SEQ ID NO: 1165 - RNA, 21 nt, synthetic construct
  source 1..21: mol_type = other RNA
caaaactactcctattttcca

SEQ ID NO: 1166 - RNA, 21 nt, synthetic construct
  source 1..21: mol_type = other RNA
aaaactactcctattttccta

SEQ ID NO: 1167 - RNA, 21 nt, synthetic construct
  source 1..21: mol_type = other RNA
attttcctggaattttgccaa

SEQ ID NO: 1168 - RNA, 21 nt, synthetic construct
  source 1..21: mol_type = other RNA
gatgtttgccattatacaaaa

SEQ ID NO: 1169 - RNA, 21 nt, synthetic construct
  source 1..21: mol_type = other RNA
caaagtttgagtaaacaacta

SEQ ID NO: 1170 - RNA, 21 nt, synthetic construct
  source 1..21: mol_type = other RNA
aaagtttgagtaaacaactta

SEQ ID NO: 1171 - RNA, 21 nt, synthetic construct
  source 1..21: mol_type = other RNA
aagtttgagtaaacaacttaa

SEQ ID NO: 1172 - RNA, 21 nt, synthetic construct
  source 1..21: mol_type = other RNA
agtaaacaacttaaaattgca

SEQ ID NO: 1173 - RNA, 21 nt, synthetic construct
  source 1..21: mol_type = other RNA
gtaaacaacttaaaattgcta

SEQ ID NO: 1174 - RNA, 21 nt, synthetic construct
  source 1..21: mol_type = other RNA
aaacaacttaaaattgcttga

SEQ ID NO: 1175 - RNA, 21 nt, synthetic construct
  source 1..21: mol_type = other RNA
atagtctttgattgaaataaa

SEQ ID NO: 1176 - RNA, 21 nt, synthetic construct
  source 1..21: mol_type = other RNA
gagaatgtatttggctaaata

SEQ ID NO: 1177 - RNA, 21 nt, synthetic construct
  source 1..21: mol_type = other RNA
ctggcagttgatgtcttcaaa

SEQ ID NO: 1178 - RNA, 21 nt, synthetic construct
  source 1..21: mol_type = other RNA
ggcagttgatgtcttcaataa

SEQ ID NO: 1179 - RNA, 21 nt, synthetic construct
  source 1..21: mol_type = other RNA
gcagttgatgtcttcaataaa

SEQ ID NO: 1180 - RNA, 21 nt, synthetic construct
  source 1..21: mol_type = other RNA
cagttgatgtcttcaataata

SEQ ID NO: 1181 - RNA, 21 nt, synthetic construct
  source 1..21: mol_type = other RNA
agttgatgtcttcaataatca

SEQ ID NO: 1182 - RNA, 21 nt, synthetic construct
  source 1..21: mol_type = other RNA
gttgatgtcttcaataatcaa

SEQ ID NO: 1183 - RNA, 21 nt, synthetic construct
  source 1..21: mol_type = other RNA
ttgatgtcttcaataatcata

SEQ ID NO: 1184 - RNA, 21 nt, synthetic construct
  source 1..21: mol_type = other RNA
tgatgtcttcaataatcatta

SEQ ID NO: 1185 - RNA, 21 nt, synthetic construct
  source 1..21: mol_type = other RNA
gatgtcttcaataatcattca

SEQ ID NO: 1186 - RNA, 21 nt, synthetic construct
  source 1..21: mol_type = other RNA
atgtcttcaataatcattcca

SEQ ID NO: 1187 - RNA, 21 nt, synthetic construct
  source 1..21: mol_type = other RNA
tgtcttcaataatcattccta

SEQ ID NO: 1188 - RNA, 21 nt, synthetic construct
  source 1..21: mol_type = other RNA
gtcttcaataatcattcctta

SEQ ID NO: 1189 - RNA, 21 nt, synthetic construct
  source 1..21: mol_type = other RNA
tcttcaataatcattccttta

SEQ ID NO: 1190 - RNA, 21 nt, synthetic construct
  source 1..21: mol_type = other RNA
cttcaataatcattcctttaa

SEQ ID NO: 1191 - RNA, 21 nt, synthetic construct
  source 1..21: mol_type = other RNA
attcacaaacacatcattaca

SEQ ID NO: 1192 - RNA, 21 nt, synthetic construct
  source 1..21: mol_type = other RNA
ttcacaaacacatcattacaa

SEQ ID NO: 1193 - RNA, 21 nt, synthetic construct
  source 1..21: mol_type = other RNA
tcacaaacacatcattacaaa

SEQ ID NO: 1194 - RNA, 21 nt, synthetic construct
  source 1..21: mol_type = other RNA
cacaaacacatcattacaaga

SEQ ID NO: 1195 - RNA, 21 nt, synthetic construct
  source 1..21: mol_type = other RNA
acaaacacatcattacaagca

SEQ ID NO: 1196 - RNA, 21 nt, synthetic construct
  source 1..21: mol_type = other RNA
caaacacatcattacaagcta

SEQ ID NO: 1197 - RNA, 21 nt, synthetic construct
  source 1..21: mol_type = other RNA
aaacacatcattacaagctaa

SEQ ID NO: 1198 - RNA, 21 nt, synthetic construct
  source 1..21: mol_type = other RNA
aacacatcattacaagctaca

SEQ ID NO: 1199 - RNA, 21 nt, synthetic construct
  source 1..21: mol_type = other RNA
acacatcattacaagctacta

SEQ ID NO: 1200 - RNA, 21 nt, synthetic construct
  source 1..21: mol_type = other RNA
cacatcattacaagctactta

SEQ ID NO: 1201 - RNA, 21 nt, synthetic construct
  source 1..21: mol_type = other RNA
tcattacaagctacttagaaa

SEQ ID NO: 1202 - RNA, 21 nt, synthetic construct
  source 1..21: mol_type = other RNA
acaagctacttagaaatgtta

SEQ ID NO: 1203 - RNA, 21 nt, synthetic construct
  source 1..21: mol_type = other RNA
aagctacttagaaatgtttaa

SEQ ID NO: 1204 - RNA, 21 nt, synthetic construct
  source 1..21: mol_type = other RNA
ctacttagaaatgtttagtaa

SEQ ID NO: 1205 - RNA, 21 nt, synthetic construct
  source 1..21: mol_type = other RNA
gaaacatactatttctgttta

SEQ ID NO: 1206 - RNA, 21 nt, synthetic construct
  source 1..21: mol_type = other RNA
ctgcttctaaataacaaaaaa

SEQ ID NO: 1207 - RNA, 21 nt, synthetic construct
  source 1..21: mol_type = other RNA
tgcttctaaataacaaaaaaa

SEQ ID NO: 1208 - RNA, 21 nt, synthetic construct
  source 1..21: mol_type = other RNA
tgggcatttttcaaaacatta

SEQ ID NO: 1209 - RNA, 21 nt, synthetic construct
  source 1..21: mol_type = other RNA
actttctttttttcatctaga

SEQ ID NO: 1210 - RNA, 21 nt, synthetic construct
  source 1..21: mol_type = other RNA
ctttctttttttcatctagca

SEQ ID NO: 1211 - RNA, 21 nt, synthetic construct
  source 1..21: mol_type = other RNA
tttctttttttcatctagcca

SEQ ID NO: 1212 - RNA, 21 nt, synthetic construct
  source 1..21: mol_type = other RNA
ttctttttttcatctagccta

SEQ ID NO: 1213 - RNA, 21 nt, synthetic construct
  source 1..21: mol_type = other RNA
tctttttttcatctagcctta

SEQ ID NO: 1214 - RNA, 21 nt, synthetic construct
  source 1..21: mol_type = other RNA
ctttttttcatctagccttga

SEQ ID NO: 1215 - RNA, 21 nt, synthetic construct
  source 1..21: mol_type = other RNA
tttttttcatctagccttgca

SEQ ID NO: 1216 - RNA, 21 nt, synthetic construct
  source 1..21: mol_type = other RNA
ttttttcatctagccttgcta

SEQ ID NO: 1217 - RNA, 21 nt, synthetic construct
  source 1..21: mol_type = other RNA
tttttcatctagccttgctta

SEQ ID NO: 1218 - RNA, 21 nt, synthetic construct
  source 1..21: mol_type = other RNA
ttttcatctagccttgcttta

SEQ ID NO: 1219 - RNA, 21 nt, synthetic construct
  source 1..21: mol_type = other RNA
ttcatctagccttgctttata

SEQ ID NO: 1220 - RNA, 21 nt, synthetic construct
  source 1..21: mol_type = other RNA
ccttagtactctcagagatta

SEQ ID NO: 1221 - RNA, 21 nt, synthetic construct
  source 1..21: mol_type = other RNA
tactctcagagattatataaa

SEQ ID NO: 1222 - RNA, 21 nt, synthetic construct
  source 1..21: mol_type = other RNA
actctcagagattatataaaa

SEQ ID NO: 1223 - RNA, 21 nt, synthetic construct
  source 1..21: mol_type = other RNA
agttactagcagaactcttaa

SEQ ID NO: 1224 - RNA, 21 nt, synthetic construct
  source 1..21: mol_type = other RNA
cagcactgttccctgccataa

SEQ ID NO: 1225 - RNA, 21 nt, synthetic construct
  source 1..21: mol_type = other RNA
agcactgttccctgccatata

SEQ ID NO: 1226 - RNA, 21 nt, synthetic construct
  source 1..21: mol_type = other RNA
gcactgttccctgccatatca

SEQ ID NO: 1227 - RNA, 21 nt, synthetic construct
  source 1..21: mol_type = other RNA
cactgttccctgccatatcca

SEQ ID NO: 1228 - RNA, 21 nt, synthetic construct
  source 1..21: mol_type = other RNA
caacttttactgattaaaaaa

SEQ ID NO: 1229 - RNA, 21 nt, synthetic construct
  source 1..21: mol_type = other RNA
gtaatgtgccattcaatgata

SEQ ID NO: 1230 - RNA, 21 nt, synthetic construct
  source 1..21: mol_type = other RNA
tgatgataaaatcccacttta

SEQ ID NO: 1231 - RNA, 21 nt, synthetic construct
  source 1..21: mol_type = other RNA
gatgataaaatcccactttta

SEQ ID NO: 1232 - RNA, 21 nt, synthetic construct
  source 1..21: mol_type = other RNA
ccacttttctttgggtttcta

SEQ ID NO: 1233 - RNA, 21 nt, synthetic construct
  source 1..21: mol_type = other RNA
cacttttctttgggtttctaa

SEQ ID NO: 1234 - RNA, 21 nt, synthetic construct
  source 1..21: mol_type = other RNA
acttttctttgggtttctaca

SEQ ID NO: 1235 - RNA, 21 nt, synthetic construct
  source 1..21: mol_type = other RNA
cttttctttgggtttctacta

SEQ ID NO: 1236 - RNA, 21 nt, synthetic construct
  source 1..21: mol_type = other RNA
ttttctttgggtttctactaa

SEQ ID NO: 1237 - RNA, 21 nt, synthetic construct
  source 1..21: mol_type = other RNA
tttctttgggtttctactaaa

SEQ ID NO: 1238 - RNA, 21 nt, synthetic construct
  source 1..21: mol_type = other RNA
ttctttgggtttctactaaaa

SEQ ID NO: 1239 - RNA, 21 nt, synthetic construct
  source 1..21: mol_type = other RNA
tctttgggtttctactaaaaa

SEQ ID NO: 1240 - RNA, 21 nt, synthetic construct
  source 1..21: mol_type = other RNA
ctttgggtttctactaaaata

SEQ ID NO: 1241 - RNA, 21 nt, synthetic construct
  source 1..21: mol_type = other RNA
tttgggtttctactaaaataa

SEQ ID NO: 1242 - RNA, 21 nt, synthetic construct
  source 1..21: mol_type = other RNA
ttgggtttctactaaaataaa

SEQ ID NO: 1243 - RNA, 21 nt, synthetic construct
  source 1..21: mol_type = other RNA
aaaataatttactcactcaga

SEQ ID NO: 1244 - RNA, 21 nt, synthetic construct
  source 1..21: mol_type = other RNA
aataatttactcactcagaga

SEQ ID NO: 1245 - RNA, 21 nt, synthetic construct
  source 1..21: mol_type = other RNA
ataatttactcactcagagta

SEQ ID NO: 1246 - RNA, 21 nt, synthetic construct
  source 1..21: mol_type = other RNA
taatttactcactcagagtga

SEQ ID NO: 1247 - RNA, 21 nt, synthetic construct
  source 1..21: mol_type = other RNA
aatttactcactcagagtgaa

SEQ ID NO: 1248 - RNA, 21 nt, synthetic construct
  source 1..21: mol_type = other RNA
atttactcactcagagtgaga

SEQ ID NO: 1249 - RNA, 21 nt, synthetic construct
  source 1..21: mol_type = other RNA
agtgaggtcaatgagaaaaaa

SEQ ID NO: 1250 - RNA, 21 nt, synthetic construct
  source 1..21: mol_type = other RNA
ctaagaaagagttgtagaata

SEQ ID NO: 1251 - RNA, 21 nt, synthetic construct
  source 1..21: mol_type = other RNA
gaaagagttgtagaatggtta

SEQ ID NO: 1252 - RNA, 21 nt, synthetic construct
  source 1..21: mol_type = other RNA
gtgctgataaaattaatggaa

SEQ ID NO: 1253 - RNA, 21 nt, synthetic construct
  source 1..21: mol_type = other RNA
tgctgataaaattaatggata

SEQ ID NO: 1254 - RNA, 21 nt, synthetic construct
  source 1..21: mol_type = other RNA
gctgataaaattaatggataa

SEQ ID NO: 1255 - RNA, 21 nt, synthetic construct
  source 1..21: mol_type = other RNA
ggaactgtgagagtatagaaa

SEQ ID NO: 1256 - RNA, 21 nt, synthetic construct
  source 1..21: mol_type = other RNA
gaactgtgagagtatagaata

SEQ ID NO: 1257 - RNA, 21 nt, synthetic construct
  source 1..21: mol_type = other RNA
aactgtgagagtatagaatta

SEQ ID NO: 1258 - RNA, 21 nt, synthetic construct
  source 1..21: mol_type = other RNA
actgtgagagtatagaattta

SEQ ID NO: 1259 - RNA, 21 nt, synthetic construct
  source 1..21: mol_type = other RNA
ctgtgagagtatagaatttca

SEQ ID NO: 1260 - RNA, 21 nt, synthetic construct
  source 1..21: mol_type = other RNA
tgtgagagtatagaatttcta

SEQ ID NO: 1261 - RNA, 21 nt, synthetic construct
  source 1..21: mol_type = other RNA
gtgagagtatagaatttctta

SEQ ID NO: 1262 - RNA, 21 nt, synthetic construct
  source 1..21: mol_type = other RNA
tgagagtatagaatttcttaa

SEQ ID NO: 1263 - RNA, 21 nt, synthetic construct
  source 1..21: mol_type = other RNA
gagagtatagaatttcttaga

SEQ ID NO: 1264 - RNA, 21 nt, synthetic construct
  source 1..21: mol_type = other RNA
agagtatagaatttcttagta

SEQ ID NO: 1265 - RNA, 21 nt, synthetic construct
  source 1..21: mol_type = other RNA
gagtatagaatttcttagtga

SEQ ID NO: 1266 - RNA, 21 nt, synthetic construct
  source 1..21: mol_type = other RNA
agtatagaatttcttagtgca

SEQ ID NO: 1267 - RNA, 21 nt, synthetic construct
  source 1..21: mol_type = other RNA
gtatagaatttcttagtgcaa

SEQ ID NO: 1268 - RNA, 21 nt, synthetic construct
  source 1..21: mol_type = other RNA
tgtaaggactgttctttctca

SEQ ID NO: 1269 - RNA, 21 nt, synthetic construct
  source 1..21: mol_type = other RNA
tgggatattatctaactttta

SEQ ID NO: 1270 - RNA, 21 nt, synthetic construct
  source 1..21: mol_type = other RNA
tgtctttggcattcatcttca

SEQ ID NO: 1271 - RNA, 21 nt, synthetic construct
  source 1..21: mol_type = other RNA
tttggcattcatcttctttta

SEQ ID NO: 1272 - RNA, 21 nt, synthetic construct
  source 1..21: mol_type = other RNA
gcattaaaaaatgtttggcaa

SEQ ID NO: 1273 - RNA, 21 nt, synthetic construct
  source 1..21: mol_type = other RNA
tcactctataattcctgtata

SEQ ID NO: 1274 - RNA, 21 nt, synthetic construct
  source 1..21: mol_type = other RNA
tagttgtcgtttaacctgtca

SEQ ID NO: 1275 - RNA, 21 nt, synthetic construct
  source 1..21: mol_type = other RNA
agttgtcgtttaacctgtcca

SEQ ID NO: 1276 - RNA, 21 nt, synthetic construct
  source 1..21: mol_type = other RNA
gttgtcgtttaacctgtccaa

SEQ ID NO: 1277 - RNA, 21 nt, synthetic construct
  source 1..21: mol_type = other RNA
ttgtcgtttaacctgtccaaa

SEQ ID NO: 1278 - RNA, 21 nt, synthetic construct
  source 1..21: mol_type = other RNA
tgtcgtttaacctgtccaaaa

SEQ ID NO: 1279 - RNA, 21 nt, synthetic construct
  source 1..21: mol_type = other RNA
gtcgtttaacctgtccaaaca

SEQ ID NO: 1280 - RNA, 21 nt, synthetic construct
  source 1..21: mol_type = other RNA
tcgtttaacctgtccaaacta

SEQ ID NO: 1281 - RNA, 21 nt, synthetic construct
  source 1..21: mol_type = other RNA
cgtttaacctgtccaaactta

SEQ ID NO: 1282 - RNA, 21 nt, synthetic construct
  source 1..21: mol_type = other RNA
gtttaacctgtccaaacttca

SEQ ID NO: 1283 - RNA, 21 nt, synthetic construct
  source 1..21: mol_type = other RNA
tttaacctgtccaaacttcta

SEQ ID NO: 1284 - RNA, 21 nt, synthetic construct
  source 1..21: mol_type = other RNA
ttaacctgtccaaacttctaa

SEQ ID NO: 1285 - RNA, 21 nt, synthetic construct
  source 1..21: mol_type = other RNA
taacctgtccaaacttctaca

SEQ ID NO: 1286 - RNA, 21 nt, synthetic construct
  source 1..21: mol_type = other RNA
aacctgtccaaacttctacaa

SEQ ID NO: 1287 - RNA, 21 nt, synthetic construct
  source 1..21: mol_type = other RNA
acctgtccaaacttctacaca

SEQ ID NO: 1288 - RNA, 21 nt, synthetic construct
  source 1..21: mol_type = other RNA
cctgtccaaacttctacacaa

SEQ ID NO: 1289 - RNA, 21 nt, synthetic construct
  source 1..21: mol_type = other RNA
ctgtccaaacttctacacaaa

SEQ ID NO: 1290 - RNA, 21 nt, synthetic construct
  source 1..21: mol_type = other RNA
tgtccaaacttctacacaata

SEQ ID NO: 1291 - RNA, 21 nt, synthetic construct
  source 1..21: mol_type = other RNA
gtccaaacttctacacaatga

SEQ ID NO: 1292 - RNA, 21 nt, synthetic construct
  source 1..21: mol_type = other RNA
tccaaacttctacacaatgaa

SEQ ID NO: 1293 - RNA, 21 nt, synthetic construct
  source 1..21: mol_type = other RNA
ccaaacttctacacaatgaaa

SEQ ID NO: 1294 - RNA, 21 nt, synthetic construct
  source 1..21: mol_type = other RNA
caaacttctacacaatgaaca

SEQ ID NO: 1295 - RNA, 21 nt, synthetic construct
  source 1..21: mol_type = other RNA
aaacttctacacaatgaacta

SEQ ID NO: 1296 - RNA, 21 nt, synthetic construct
  source 1..21: mol_type = other RNA
aacttctacacaatgaactta

SEQ ID NO: 1297 - RNA, 21 nt, synthetic construct
  source 1..21: mol_type = other RNA
acttctacacaatgaacttca

SEQ ID NO: 1298 - RNA, 21 nt, synthetic construct
  source 1..21: mol_type = other RNA
cttctacacaatgaacttcta

SEQ ID NO: 1299 - RNA, 21 nt, synthetic construct
  source 1..21: mol_type = other RNA
ttctacacaatgaacttctta

SEQ ID NO: 1300 - RNA, 21 nt, synthetic construct
  source 1..21: mol_type = other RNA
tctacacaatgaacttcttaa

SEQ ID NO: 1301 - RNA, 21 nt, synthetic construct
  source 1..21: mol_type = other RNA
ctacacaatgaacttcttaaa

SEQ ID NO: 1302 - RNA, 21 nt, synthetic construct
  source 1..21: mol_type = other RNA
tacacaatgaacttcttaaca

SEQ ID NO: 1303 - RNA, 21 nt, synthetic construct
  source 1..21: mol_type = other RNA
acacaatgaacttcttaacaa

SEQ ID NO: 1304 - RNA, 21 nt, synthetic construct
  source 1..21: mol_type = other RNA
cacaatgaacttcttaacaaa

SEQ ID NO: 1305 - RNA, 21 nt, synthetic construct
  source 1..21: mol_type = other RNA
acaatgaacttcttaacaaga

SEQ ID NO: 1306 - RNA, 21 nt, synthetic construct
  source 1..21: mol_type = other RNA
caatgaacttcttaacaagaa

SEQ ID NO: 1307 - RNA, 21 nt, synthetic construct
  source 1..21: mol_type = other RNA
aatgaacttcttaacaagata

SEQ ID NO: 1308 - RNA, 21 nt, synthetic construct
  source 1..21: mol_type = other RNA
atgaacttcttaacaagatta

SEQ ID NO: 1309 - RNA, 21 nt, synthetic construct
  source 1..21: mol_type = other RNA
taacaagattttaagttctca

SEQ ID NO: 1310 - RNA, 21 nt, synthetic construct
  source 1..21: mol_type = other RNA
acaagattttaagttctctga

SEQ ID NO: 1311 - RNA, 21 nt, synthetic construct
  source 1..21: mol_type = other RNA
agttctctgtataagaggtta

SEQ ID NO: 1312 - RNA, 21 nt, synthetic construct
  source 1..21: mol_type = other RNA
gtataagaggtttcacctcaa

SEQ ID NO: 1313 - RNA, 21 nt, synthetic construct
  source 1..21: mol_type = other RNA
atttggcactatagagtatta

SEQ ID NO: 1314 - RNA, 21 nt, synthetic construct
  source 1..21: mol_type = other RNA
tttggcactatagagtattta

SEQ ID NO: 1315 - RNA, 21 nt, synthetic construct
  source 1..21: mol_type = other RNA
ttggcactatagagtatttga

SEQ ID NO: 1316 - RNA, 21 nt, synthetic construct
  source 1..21: mol_type = other RNA
tggcactatagagtatttgta

SEQ ID NO: 1317 - RNA, 21 nt, synthetic construct
  source 1..21: mol_type = other RNA
ggcactatagagtatttgtta

SEQ ID NO: 1318 - RNA, 21 nt, synthetic construct
  source 1..21: mol_type = other RNA
gcactatagagtatttgttaa

SEQ ID NO: 1319 - RNA, 21 nt, synthetic construct
  source 1..21: mol_type = other RNA
cactatagagtatttgttaaa

SEQ ID NO: 1320 - RNA, 21 nt, synthetic construct
  source 1..21: mol_type = other RNA
actatagagtatttgttaata

SEQ ID NO: 1321 - RNA, 21 nt, synthetic construct
  source 1..21: mol_type = other RNA
ctatagagtatttgttaatga

SEQ ID NO: 1322 - RNA, 21 nt, synthetic construct
  source 1..21: mol_type = other RNA
tatagagtatttgttaatgga

SEQ ID NO: 1323 - RNA, 21 nt, synthetic construct
  source 1..21: mol_type = other RNA
atagagtatttgttaatggca

SEQ ID NO: 1324 - RNA, 21 nt, synthetic construct
  source 1..21: mol_type = other RNA
tagagtatttgttaatggcaa

SEQ ID NO: 1325 - RNA, 21 nt, synthetic construct
  source 1..21: mol_type = other RNA
agagtatttgttaatggcaga

SEQ ID NO: 1326 - RNA, 21 nt, synthetic construct
  source 1..21: mol_type = other RNA
gagtatttgttaatggcagaa

SEQ ID NO: 1327 - RNA, 21 nt, synthetic construct
  source 1..21: mol_type = other RNA
gcagagatgatttttctttta

SEQ ID NO: 1328 - RNA, 21 nt, synthetic construct
  source 1..21: mol_type = other RNA
cagagatgatttttcttttaa

SEQ ID NO: 1329 - RNA, 21 nt, synthetic construct
  source 1..21: mol_type = other RNA
agagatgatttttcttttaaa

SEQ ID NO: 1330 - RNA, 21 nt, synthetic construct
  source 1..21: mol_type = other RNA
agactagctgttatttgtata

SEQ ID NO: 1331 - RNA, 21 nt, synthetic construct
  source 1..21: mol_type = other RNA
gctaacatataaagaatgtca

SEQ ID NO: 1332 - RNA, 21 nt, synthetic construct
  source 1..21: mol_type = other RNA
aagaatgtctacttttgctta

SEQ ID NO: 1333 - RNA, 21 nt, synthetic construct
  source 1..21: mol_type = other RNA
aatgtctacttttgctttaaa

SEQ ID NO: 1334 - RNA, 21 nt, synthetic construct
  source 1..21: mol_type = other RNA
ctaagccattatgctattaga

SEQ ID NO: 1335 - RNA, 21 nt, synthetic construct
  source 1..21: mol_type = other RNA
ttaggtaacaatccctattta

SEQ ID NO: 1336 - RNA, 21 nt, synthetic construct
  source 1..21: mol_type = other RNA
taggtaacaatccctatttta

SEQ ID NO: 1337 - RNA, 21 nt, synthetic construct
  source 1..21: mol_type = other RNA
aggtaacaatccctattttaa

SEQ ID NO: 1338 - RNA, 21 nt, synthetic construct
  source 1..21: mol_type = other RNA
ggtaacaatccctattttaaa

SEQ ID NO: 1339 - RNA, 21 nt, synthetic construct
  source 1..21: mol_type = other RNA
gtaacaatccctattttaaaa

SEQ ID NO: 1340 - RNA, 21 nt, synthetic construct
  source 1..21: mol_type = other RNA
taacaatccctattttaaaaa

SEQ ID NO: 1341 - RNA, 21 nt, synthetic construct
  source 1..21: mol_type = other RNA
aatccctattttaaaattcca

SEQ ID NO: 1342 - RNA, 21 nt, synthetic construct
  source 1..21: mol_type = other RNA
ctaacaataatagaactgcca

SEQ ID NO: 1343 - RNA, 21 nt, synthetic construct
  source 1..21: mol_type = other RNA
taacaataatagaactgccaa

SEQ ID NO: 1344 - RNA, 21 nt, synthetic construct
  source 1..21: mol_type = other RNA
acaataatagaactgccagca

SEQ ID NO: 1345 - RNA, 21 nt, synthetic construct
  source 1..21: mol_type = other RNA
aactgccagcatacttttcta

SEQ ID NO: 1346 - RNA, 21 nt, synthetic construct
  source 1..21: mol_type = other RNA
actgccagcatacttttctca

SEQ ID NO: 1347 - RNA, 21 nt, synthetic construct
  source 1..21: mol_type = other RNA
ctgccagcatacttttctcta

SEQ ID NO: 1348 - RNA, 21 nt, synthetic construct
  source 1..21: mol_type = other RNA
tgccagcatacttttctctta

SEQ ID NO: 1349 - RNA, 21 nt, synthetic construct
  source 1..21: mol_type = other RNA
gccagcatacttttctcttta

SEQ ID NO: 1350 - RNA, 21 nt, synthetic construct
  source 1..21: mol_type = other RNA
ccagcatacttttctctttca

SEQ ID NO: 1351 - RNA, 21 nt, synthetic construct
  source 1..21: mol_type = other RNA
cagcatacttttctctttcaa

SEQ ID NO: 1352 - RNA, 21 nt, synthetic construct
  source 1..21: mol_type = other RNA
agcatacttttctctttcaga

SEQ ID NO: 1353 - RNA, 21 nt, synthetic construct
  source 1..21: mol_type = other RNA
gcatacttttctctttcagta

SEQ ID NO: 1354 - RNA, 21 nt, synthetic construct
  source 1..21: mol_type = other RNA
catacttttctctttcagtta

SEQ ID NO: 1355 - RNA, 21 nt, synthetic construct
  source 1..21: mol_type = other RNA
atacttttctctttcagttga

SEQ ID NO: 1356 - RNA, 21 nt, synthetic construct
  source 1..21: mol_type = other RNA
tacttttctctttcagttgta

SEQ ID NO: 1357 - RNA, 21 nt, synthetic construct
  source 1..21: mol_type = other RNA
acttttctctttcagttgtaa

SEQ ID NO: 1358 - RNA, 21 nt, synthetic construct
  source 1..21: mol_type = other RNA
tcagttgtagatgaatacata

SEQ ID NO: 1359 - RNA, 21 nt, synthetic construct
  source 1..21: mol_type = other RNA
cagttgtagatgaatacatta

SEQ ID NO: 1360 - RNA, 21 nt, synthetic construct
  source 1..21: mol_type = other RNA
ttttcagatgtgactgtatta

SEQ ID NO: 1361 - RNA, 21 nt, synthetic construct
  source 1..21: mol_type = other RNA
tttcagatgtgactgtattta

SEQ ID NO: 1362 - RNA, 21 nt, synthetic construct
  source 1..21: mol_type = other RNA
ttcagatgtgactgtatttca

SEQ ID NO: 1363 - RNA, 21 nt, synthetic construct
  source 1..21: mol_type = other RNA
tcagatgtgactgtatttcca

SEQ ID NO: 1364 - RNA, 21 nt, synthetic construct
  source 1..21: mol_type = other RNA
cagatgtgactgtatttccta

SEQ ID NO: 1365 - RNA, 21 nt, synthetic construct
  source 1..21: mol_type = other RNA
agatgtgactgtatttcctga

SEQ ID NO: 1366 - RNA, 21 nt, synthetic construct
  source 1..21: mol_type = other RNA
gatgtgactgtatttcctgaa

SEQ ID NO: 1367 - RNA, 21 nt, synthetic construct
  source 1..21: mol_type = other RNA
atgtgactgtatttcctgata

SEQ ID NO: 1368 - RNA, 21 nt, synthetic construct
  source 1..21: mol_type = other RNA
tgtgactgtatttcctgatca

SEQ ID NO: 1369 - RNA, 21 nt, synthetic construct
  source 1..21: mol_type = other RNA
gtgactgtatttcctgatcaa

SEQ ID NO: 1370 - RNA, 21 nt, synthetic construct
  source 1..21: mol_type = other RNA
tgactgtatttcctgatcata

SEQ ID NO: 1371 - RNA, 21 nt, synthetic construct
  source 1..21: mol_type = other RNA
gactgtatttcctgatcatta

SEQ ID NO: 1372 - RNA, 21 nt, synthetic construct
  source 1..21: mol_type = other RNA
actgtatttcctgatcattga

SEQ ID NO: 1373 - RNA, 21 nt, synthetic construct
  source 1..21: mol_type = other RNA
ctgtatttcctgatcattgga

SEQ ID NO: 1374 - RNA, 21 nt, synthetic construct
  source 1..21: mol_type = other RNA
tgtatttcctgatcattggta

SEQ ID NO: 1375 - RNA, 21 nt, synthetic construct
  source 1..21: mol_type = other RNA
gtatttcctgatcattggtca

SEQ ID NO: 1376 - RNA, 21 nt, synthetic construct
  source 1..21: mol_type = other RNA
ggagattacccttatacccaa

SEQ ID NO: 1377 - RNA, 21 nt, synthetic construct
  source 1..21: mol_type = other RNA
gtgcgggctaaaatccaacta

SEQ ID NO: 1378 - RNA, 21 nt, synthetic construct
  source 1..21: mol_type = other RNA
tgcgggctaaaatccaactga

SEQ ID NO: 1379 - RNA, 21 nt, synthetic construct
  source 1..21: mol_type = other RNA
gcgggctaaaatccaactgca

SEQ ID NO: 1380 - RNA, 21 nt, synthetic construct
  source 1..21: mol_type = other RNA
cgggctaaaatccaactgcaa

SEQ ID NO: 1381 - RNA, 21 nt, synthetic construct
  source 1..21: mol_type = other RNA
gggctaaaatccaactgcaaa

SEQ ID NO: 1382 - RNA, 21 nt, synthetic construct
  source 1..21: mol_type = other RNA
ggctaaaatccaactgcaata

SEQ ID NO: 1383 - RNA, 21 nt, synthetic construct
  source 1..21: mol_type = other RNA
gctaaaatccaactgcaatta

SEQ ID NO: 1384 - RNA, 21 nt, synthetic construct
  source 1..21: mol_type = other RNA
ctaaaatccaactgcaattga

SEQ ID NO: 1385 - RNA, 21 nt, synthetic construct
  source 1..21: mol_type = other RNA
taaaatccaactgcaattgga

SEQ ID NO: 1386 - RNA, 21 nt, synthetic construct
  source 1..21: mol_type = other RNA
aaaatccaactgcaattggca

SEQ ID NO: 1387 - RNA, 21 nt, synthetic construct
  source 1..21: mol_type = other RNA
aaatccaactgcaattggcta

SEQ ID NO: 1388 - RNA, 21 nt, synthetic construct
  source 1..21: mol_type = other RNA
aatccaactgcaattggctca

SEQ ID NO: 1389 - RNA, 21 nt, synthetic construct
  source 1..21: mol_type = other RNA
atccaactgcaattggctcca

SEQ ID NO: 1390 - RNA, 21 nt, synthetic construct
  source 1..21: mol_type = other RNA
tccaactgcaattggctccca

SEQ ID NO: 1391 - RNA, 21 nt, synthetic construct
  source 1..21: mol_type = other RNA
gagaagcatcttattggctta

SEQ ID NO: 1392 - RNA, 21 nt, synthetic construct
  source 1..21: mol_type = other RNA
aagcatcttattggcttataa

SEQ ID NO: 1393 - RNA, 21 nt, synthetic construct
  source 1..21: mol_type = other RNA
agcatcttattggcttatata

SEQ ID NO: 1394 - RNA, 21 nt, synthetic construct
  source 1..21: mol_type = other RNA
tacatcttcagaaaatgagaa

SEQ ID NO: 1395 - RNA, 21 nt, synthetic construct
  source 1..21: mol_type = other RNA
acatcttcagaaaatgagaaa

SEQ ID NO: 1396 - RNA, 21 nt, synthetic construct
  source 1..21: mol_type = other RNA
catcttcagaaaatgagaata

SEQ ID NO: 1397 - RNA, 21 nt, synthetic construct
  source 1..21: mol_type = other RNA
atcttcagaaaatgagaatta

SEQ ID NO: 1398 - RNA, 21 nt, synthetic construct
  source 1..21: mol_type = other RNA
tcttcagaaaatgagaattaa

SEQ ID NO: 1399 - RNA, 21 nt, synthetic construct
  source 1..21: mol_type = other RNA
acagattgaacaaagaactta

SEQ ID NO: 1400 - RNA, 21 nt, synthetic construct
  source 1..21: mol_type = other RNA
cagattgaacaaagaacttaa

SEQ ID NO: 1401 - RNA, 21 nt, synthetic construct
  source 1..21: mol_type = other RNA
agattgaacaaagaacttaga

SEQ ID NO: 1402 - RNA, 21 nt, synthetic construct
  source 1..21: mol_type = other RNA
gattgaacaaagaacttagaa

SEQ ID NO: 1403 - RNA, 21 nt, synthetic construct
  source 1..21: mol_type = other RNA
attgaacaaagaacttagaaa

SEQ ID NO: 1404 - RNA, 21 nt, synthetic construct
  source 1..21: mol_type = other RNA
ttgaacaaagaacttagaaga

SEQ ID NO: 1405 - RNA, 21 nt, synthetic construct
  source 1..21: mol_type = other RNA
tcctgagagaagagaaattga

SEQ ID NO: 1406 - RNA, 21 nt, synthetic construct
  source 1..21: mol_type = other RNA
cctgagagaagagaaattgaa

SEQ ID NO: 1407 - RNA, 21 nt, synthetic construct
  source 1..21: mol_type = other RNA
ctgagagaagagaaattgata

SEQ ID NO: 1408 - RNA, 21 nt, synthetic construct
  source 1..21: mol_type = other RNA
tgagagaagagaaattgatta

SEQ ID NO: 1409 - RNA, 21 nt, synthetic construct
  source 1..21: mol_type = other RNA
gagagaagagaaattgattga

SEQ ID NO: 1410 - RNA, 21 nt, synthetic construct
  source 1..21: mol_type = other RNA
agagaagagaaattgattgta

SEQ ID NO: 1411 - RNA, 21 nt, synthetic construct
  source 1..21: mol_type = other RNA
gagaagagaaattgattgtta

SEQ ID NO: 1412 - RNA, 21 nt, synthetic construct
  source 1..21: mol_type = other RNA
agaagagaaattgattgttta

SEQ ID NO: 1413 - RNA, 21 nt, synthetic construct
  source 1..21: mol_type = other RNA
gaagagaaattgattgtttaa

SEQ ID NO: 1414 - RNA, 21 nt, synthetic construct
  source 1..21: mol_type = other RNA
agagaaattgattgtttatca

SEQ ID NO: 1415 - RNA, 21 nt, synthetic construct
  source 1..21: mol_type = other RNA
tgttggtttaatttttcaaca

SEQ ID NO: 1416 - RNA, 21 nt, synthetic construct
  source 1..21: mol_type = other RNA
gttggtttaatttttcaacca

SEQ ID NO: 1417 - RNA, 21 nt, synthetic construct
  source 1..21: mol_type = other RNA
ttggtttaatttttcaaccca

SEQ ID NO: 1418 - RNA, 21 nt, synthetic construct
  source 1..21: mol_type = other RNA
tggtttaatttttcaacccaa

SEQ ID NO: 1419 - RNA, 21 nt, synthetic construct
  source 1..21: mol_type = other RNA
tcgtccatacagttttcatta

SEQ ID NO: 1420 - RNA, 21 nt, synthetic construct
  source 1..21: mol_type = other RNA
cgtccatacagttttcattca

SEQ ID NO: 1421 - RNA, 21 nt, synthetic construct
  source 1..21: mol_type = other RNA
gtccatacagttttcattcta

SEQ ID NO: 1422 - RNA, 21 nt, synthetic construct
  source 1..21: mol_type = other RNA
tccatacagttttcattctaa

SEQ ID NO: 1423 - RNA, 21 nt, synthetic construct
  source 1..21: mol_type = other RNA
ccatacagttttcattctata

SEQ ID NO: 1424 - RNA, 21 nt, synthetic construct
  source 1..21: mol_type = other RNA
catacagttttcattctatga

SEQ ID NO: 1425 - RNA, 21 nt, synthetic construct
  source 1..21: mol_type = other RNA
atacagttttcattctatgca

SEQ ID NO: 1426 - RNA, 21 nt, synthetic construct
  source 1..21: mol_type = other RNA
tacagttttcattctatgcaa

SEQ ID NO: 1427 - RNA, 21 nt, synthetic construct
  source 1..21: mol_type = other RNA
acagttttcattctatgcata

SEQ ID NO: 1428 - RNA, 21 nt, synthetic construct
  source 1..21: mol_type = other RNA
cagttttcattctatgcatga

SEQ ID NO: 1429 - RNA, 21 nt, synthetic construct
  source 1..21: mol_type = other RNA
agttttcattctatgcatgga

SEQ ID NO: 1430 - RNA, 21 nt, synthetic construct
  source 1..21: mol_type = other RNA
ggattgtgtgcctaaatttta

SEQ ID NO: 1431 - RNA, 21 nt, synthetic construct
  source 1..21: mol_type = other RNA
tgcctaaattttgtctaacaa

SEQ ID NO: 1432 - RNA, 21 nt, synthetic construct
  source 1..21: mol_type = other RNA
ctaaattttgtctaacaaata

SEQ ID NO: 1433 - RNA, 21 nt, synthetic construct
  source 1..21: mol_type = other RNA
taaattttgtctaacaaatga

SEQ ID NO: 1434 - RNA, 21 nt, synthetic construct
  source 1..21: mol_type = other RNA
aaattttgtctaacaaatgca

SEQ ID NO: 1435 - RNA, 21 nt, synthetic construct
  source 1..21: mol_type = other RNA
ttttgtctaacaaatgcaaga

SEQ ID NO: 1436 - RNA, 21 nt, synthetic construct
  source 1..21: mol_type = other RNA
tagaatgacatttactaataa

SEQ ID NO: 1437 - RNA, 21 nt, synthetic construct
  source 1..21: mol_type = other RNA
cttccataggctaaataataa

SEQ ID NO: 1438 - RNA, 21 nt, synthetic construct
  source 1..21: mol_type = other RNA
gccaaaatattaaattctaga

SEQ ID NO: 1439 - RNA, 21 nt, synthetic construct
  source 1..21: mol_type = other RNA
taaattctagttcttttccga

SEQ ID NO: 1440 - RNA, 21 nt, synthetic construct
  source 1..21: mol_type = other RNA
aaattctagttcttttccgca

SEQ ID NO: 1441 - RNA, 21 nt, synthetic construct
  source 1..21: mol_type = other RNA
aattctagttcttttccgcaa

SEQ ID NO: 1442 - RNA, 21 nt, synthetic construct
  source 1..21: mol_type = other RNA
attctagttcttttccgcaaa

SEQ ID NO: 1443 - RNA, 21 nt, synthetic construct
  source 1..21: mol_type = other RNA
ttctagttcttttccgcaata

SEQ ID NO: 1444 - RNA, 21 nt, synthetic construct
  source 1..21: mol_type = other RNA
tctagttcttttccgcaatga

SEQ ID NO: 1445 - RNA, 21 nt, synthetic construct
  source 1..21: mol_type = other RNA
ctagttcttttccgcaatgaa

SEQ ID NO: 1446 - RNA, 21 nt, synthetic construct
  source 1..21: mol_type = other RNA
tagttcttttccgcaatgaca

SEQ ID NO: 1447 - RNA, 21 nt, synthetic construct
  source 1..21: mol_type = other RNA
agttcttttccgcaatgacta

SEQ ID NO: 1448 - RNA, 21 nt, synthetic construct
  source 1..21: mol_type = other RNA
gttcttttccgcaatgactaa

SEQ ID NO: 1449 - RNA, 21 nt, synthetic construct
  source 1..21: mol_type = other RNA
ttcttttccgcaatgactaga

SEQ ID NO: 1450 - RNA, 21 nt, synthetic construct
  source 1..21: mol_type = other RNA
tcttttccgcaatgactagta

SEQ ID NO: 1451 - RNA, 21 nt, synthetic construct
  source 1..21: mol_type = other RNA
ctggagaagattattcaaaca

SEQ ID NO: 1452 - RNA, 21 nt, synthetic construct
  source 1..21: mol_type = other RNA
ggagaagattattcaaactta

SEQ ID NO: 1453 - RNA, 21 nt, synthetic construct
  source 1..21: mol_type = other RNA
cttgatctgtgtttcaggtta

SEQ ID NO: 1454 - RNA, 21 nt, synthetic construct
  source 1..21: mol_type = other RNA
tctgtgtttcaggtttttaaa

SEQ ID NO: 1455 - RNA, 21 nt, synthetic construct
  source 1..21: mol_type = other RNA
caggtttttaaatgtcctaaa

SEQ ID NO: 1456 - RNA, 21 nt, synthetic construct
  source 1..21: mol_type = other RNA
aaggaattttggattgactta

SEQ ID NO: 1457 - RNA, 21 nt, synthetic construct
  source 1..21: mol_type = other RNA
ttgactttcaaagtactaata

SEQ ID NO: 1458 - RNA, 21 nt, synthetic construct
  source 1..21: mol_type = other RNA
gactttcaaagtactaataca

SEQ ID NO: 1459 - RNA, 21 nt, synthetic construct
  source 1..21: mol_type = other RNA
tagcgtgactcttcttataca

SEQ ID NO: 1460 - RNA, 21 nt, synthetic construct
  source 1..21: mol_type = other RNA
gtgactcttcttatacctaaa

SEQ ID NO: 1461 - RNA, 21 nt, synthetic construct
  source 1..21: mol_type = other RNA
taagaacatattacaaatgta

SEQ ID NO: 1462 - RNA, 21 nt, synthetic construct
  source 1..21: mol_type = other RNA
caaaacatgccttgaactcta

SEQ ID NO: 1463 - RNA, 21 nt, synthetic construct
  source 1..21: mol_type = other RNA
aaaacatgccttgaactctta

SEQ ID NO: 1464 - RNA, 21 nt, synthetic construct
  source 1..21: mol_type = other RNA
tgccttgaactcttgaactaa

SEQ ID NO: 1465 - RNA, 21 nt, synthetic construct
  source 1..21: mol_type = other RNA
ctcttgaactactgtgaaaaa

SEQ ID NO: 1466 - RNA, 21 nt, synthetic construct
  source 1..21: mol_type = other RNA
ttgaactactgtgaaaagaaa

SEQ ID NO: 1467 - RNA, 21 nt, synthetic construct
  source 1..21: mol_type = other RNA
gaactactgtgaaaagaatca

SEQ ID NO: 1468 - RNA, 21 nt, synthetic construct
  source 1..21: mol_type = other RNA
cgttgtaaagactttttgtaa

SEQ ID NO: 1469 - RNA, 21 nt, synthetic construct
  source 1..21: mol_type = other RNA
gttgtaaagactttttgtaaa

SEQ ID NO: 1470 - RNA, 21 nt, synthetic construct
  source 1..21: mol_type = other RNA
aagctagctgatactcttaaa

SEQ ID NO: 1471 - RNA, 21 nt, synthetic construct
  source 1..21: mol_type = other RNA
ctagctgatactcttaagtaa

SEQ ID NO: 1472 - RNA, 21 nt, synthetic construct
  source 1..21: mol_type = other RNA
aattgggcaataaactgtata

SEQ ID NO: 1473 - RNA, 21 nt, synthetic construct
  source 1..21: mol_type = other RNA
attgggcaataaactgtatca

SEQ ID NO: 1474 - RNA, 21 nt, synthetic construct
  source 1..21: mol_type = other RNA
ttgggcaataaactgtatcaa

SEQ ID NO: 1475 - RNA, 21 nt, synthetic construct
  source 1..21: mol_type = other RNA
tgggcaataaactgtatcaaa

SEQ ID NO: 1476 - RNA, 21 nt, synthetic construct
  source 1..21: mol_type = other RNA
gggcaataaactgtatcaaaa

SEQ ID NO: 1477 - RNA, 21 nt, synthetic construct
  source 1..21: mol_type = other RNA
ggcaataaactgtatcaaaaa

SEQ ID NO: 1478 - RNA, 21 nt, synthetic construct
  source 1..21: mol_type = other RNA
gcaataaactgtatcaaaaaa

SEQ ID NO: 1479 - RNA, 21 nt, synthetic construct
  source 1..21: mol_type = other RNA
caataaactgtatcaaaaata

SEQ ID NO: 1480 - RNA, 21 nt, synthetic construct
  source 1..21: mol_type = other RNA
gtatcaaaaatatgtagatga

SEQ ID NO: 1481 - RNA, 21 nt, synthetic construct
  source 1..21: mol_type = other RNA
tatcaaaaatatgtagatgga

SEQ ID NO: 1482 - RNA, 21 nt, synthetic construct
  source 1..21: mol_type = other RNA
atcaaaaatatgtagatggaa

SEQ ID NO: 1483 - RNA, 21 nt, synthetic construct
  source 1..21: mol_type = other RNA
aaggtgaagagaatttcaaaa

SEQ ID NO: 1484 - RNA, 21 nt, synthetic construct
  source 1..21: mol_type = other RNA
ggtgaagagaatttcaaacta

SEQ ID NO: 1485 - RNA, 21 nt, synthetic construct
  source 1..21: mol_type = other RNA
gtgaagagaatttcaaactca

SEQ ID NO: 1486 - RNA, 21 nt, synthetic construct
  source 1..21: mol_type = other RNA
gatgtttcattaatttctaga

SEQ ID NO: 1487 - RNA, 21 nt, synthetic construct
  source 1..21: mol_type = other RNA
ttctagtctgtgaaaatatga

SEQ ID NO: 1488 - RNA, 21 nt, synthetic construct
  source 1..21: mol_type = other RNA
tctagtctgtgaaaatatgca

SEQ ID NO: 1489 - RNA, 21 nt, synthetic construct
  source 1..21: mol_type = other RNA
ctagtctgtgaaaatatgcaa

SEQ ID NO: 1490 - RNA, 21 nt, synthetic construct
  source 1..21: mol_type = other RNA
tagtctgtgaaaatatgcata

SEQ ID NO: 1491 - RNA, 21 nt, synthetic construct
  source 1..21: mol_type = other RNA
agtctgtgaaaatatgcatta

SEQ ID NO: 1492 - RNA, 21 nt, synthetic construct
  source 1..21: mol_type = other RNA
gtctgtgaaaatatgcattta

SEQ ID NO: 1493 - RNA, 21 nt, synthetic construct
  source 1..21: mol_type = other RNA
tctgtgaaaatatgcatttta

SEQ ID NO: 1494 - RNA, 21 nt, synthetic construct
  source 1..21: mol_type = other RNA
ctgtgaaaatatgcattttaa

SEQ ID NO: 1495 - RNA, 21 nt, synthetic construct
  source 1..21: mol_type = other RNA
gatagcctttataccaaaata

SEQ ID NO: 1496 - RNA, 21 nt, synthetic construct
  source 1..21: mol_type = other RNA
caacagcaagtcataaaagta

SEQ ID NO: 1497 - RNA, 21 nt, synthetic construct
  source 1..21: mol_type = other RNA
aacagcaagtcataaaagtaa

SEQ ID NO: 1498 - RNA, 21 nt, synthetic construct
  source 1..21: mol_type = other RNA
acagcaagtcataaaagtata

SEQ ID NO: 1499 - RNA, 21 nt, synthetic construct
  source 1..21: mol_type = other RNA
cagcaagtcataaaagtatta

SEQ ID NO: 1500 - RNA, 21 nt, synthetic construct
  source 1..21: mol_type = other RNA
agcaagtcataaaagtattta

SEQ ID NO: 1501 - RNA, 21 nt, synthetic construct
  source 1..21: mol_type = other RNA
gcaagtcataaaagtatttaa

SEQ ID NO: 1502 - RNA, 21 nt, synthetic construct
  source 1..21: mol_type = other RNA
gtcttcagatgtaaataatta

SEQ ID NO: 1503 - RNA, 21 nt, synthetic construct
  source 1..21: mol_type = other RNA
cattttctgaaaatgtattga

SEQ ID NO: 1504 - RNA, 21 nt, synthetic construct
  source 1..21: mol_type = other RNA
ctgtgaagcatatagaactca

SEQ ID NO: 1505 - RNA, 21 nt, synthetic construct
  source 1..21: mol_type = other RNA
tgtgaagcatatagaactcta

SEQ ID NO: 1506 - RNA, 21 nt, synthetic construct
  source 1..21: mol_type = other RNA
gtgaagcatatagaactctaa

SEQ ID NO: 1507 - RNA, 21 nt, synthetic construct
  source 1..21: mol_type = other RNA
tgaagcatatagaactctata

SEQ ID NO: 1508 - RNA, 21 nt, synthetic construct
  source 1..21: mol_type = other RNA
gaagcatatagaactctatta

SEQ ID NO: 1509 - RNA, 21 nt, synthetic construct
  source 1..21: mol_type = other RNA
aagcatatagaactctattta

SEQ ID NO: 1510 - RNA, 21 nt, synthetic construct
  source 1..21: mol_type = other RNA
agcatatagaactctatttta

SEQ ID NO: 1511 - RNA, 21 nt, synthetic construct
  source 1..21: mol_type = other RNA
taaataaaggaagatgtgtca

SEQ ID NO: 1512 - RNA, 23 nt, synthetic construct
  source 1..23: mol_type = other RNA
tttttgaagtgcgcggttggctc

SEQ ID NO: 1513 - RNA, 23 nt, synthetic construct
  source 1..23: mol_type = other RNA
tcttttgaagtgcgcggttggct

SEQ ID NO: 1514 - RNA, 23 nt, synthetic construct
  source 1..23: mol_type = other RNA
tccttttgaagtgcgcggttggc

SEQ ID NO: 1515 - RNA, 23 nt, synthetic construct
  source 1..23: mol_type = other RNA
tcccttttgaagtgcgcggttgg

SEQ ID NO: 1516 - RNA, 23 nt, synthetic construct
  source 1..23: mol_type = other RNA
tacccttttgaagtgcgcggttg

SEQ ID NO: 1517 - RNA, 23 nt, synthetic construct
  source 1..23: mol_type = other RNA
tcacccttttgaagtgcgcggtt

SEQ ID NO: 1518 - RNA, 23 nt, synthetic construct
  source 1..23: mol_type = other RNA
tacacccttttgaagtgcgcggt

SEQ ID NO: 1519 - RNA, 23 nt, synthetic construct
  source 1..23: mol_type = other RNA
tgacacccttttgaagtgcgcgg

SEQ ID NO: 1520 - RNA, 23 nt, synthetic construct
  source 1..23: mol_type = other RNA
tcgacacccttttgaagtgcgcg

SEQ ID NO: 1521 - RNA, 23 nt, synthetic construct
  source 1..23: mol_type = other RNA
tccgacacccttttgaagtgcgc

SEQ ID NO: 1522 - RNA, 23 nt, synthetic construct
  source 1..23: mol_type = other RNA
taccgacacccttttgaagtgcg

SEQ ID NO: 1523 - RNA, 23 nt, synthetic construct
  source 1..23: mol_type = other RNA
ttacacacttcagtcctggcgag

SEQ ID NO: 1524 - RNA, 23 nt, synthetic construct
  source 1..23: mol_type = other RNA
tatacacacttcagtcctggcga

SEQ ID NO: 1525 - RNA, 23 nt, synthetic construct
  source 1..23: mol_type = other RNA
tcatacacacttcagtcctggcg

SEQ ID NO: 1526 - RNA, 23 nt, synthetic construct
  source 1..23: mol_type = other RNA
tacatacacacttcagtcctggc

SEQ ID NO: 1527 - RNA, 23 nt, synthetic construct
  source 1..23: mol_type = other RNA
tgacatacacacttcagtcctgg

SEQ ID NO: 1528 - RNA, 23 nt, synthetic construct
  source 1..23: mol_type = other RNA
tagacatacacacttcagtcctg

SEQ ID NO: 1529 - RNA, 23 nt, synthetic construct
  source 1..23: mol_type = other RNA
taagacatacacacttcagtcct

SEQ ID NO: 1530 - RNA, 23 nt, synthetic construct
  source 1..23: mol_type = other RNA
taaagacatacacacttcagtcc

SEQ ID NO: 1531 - RNA, 23 nt, synthetic construct
  source 1..23: mol_type = other RNA
taaaagacatacacacttcagtc

SEQ ID NO: 1532 - RNA, 23 nt, synthetic construct
  source 1..23: mol_type = other RNA
tcaaaagacatacacacttcagt

SEQ ID NO: 1533 - RNA, 23 nt, synthetic construct
  source 1..23: mol_type = other RNA
tacaaaagacatacacacttcag

SEQ ID NO: 1534 - RNA, 23 nt, synthetic construct
  source 1..23: mol_type = other RNA
tcacaaaagacatacacacttca

SEQ ID NO: 1535 - RNA, 23 nt, synthetic construct
  source 1..23: mol_type = other RNA
tacacaaaagacatacacacttc

SEQ ID NO: 1536 - RNA, 23 nt, synthetic construct
  source 1..23: mol_type = other RNA
tcacacaaaagacatacacactt

SEQ ID NO: 1537 - RNA, 23 nt, synthetic construct
  source 1..23: mol_type = other RNA
ttcacacaaaagacatacacact

SEQ ID NO: 1538 - RNA, 23 nt, synthetic construct
  source 1..23: mol_type = other RNA
tatcacacaaaagacatacacac

SEQ ID NO: 1539 - RNA, 23 nt, synthetic construct
  source 1..23: mol_type = other RNA
taatcacacaaaagacatacaca

SEQ ID NO: 1540 - RNA, 23 nt, synthetic construct
  source 1..23: mol_type = other RNA
tgaatcacacaaaagacatacac

SEQ ID NO: 1541 - RNA, 23 nt, synthetic construct
  source 1..23: mol_type = other RNA
tagaatcacacaaaagacataca

SEQ ID NO: 1542 - RNA, 23 nt, synthetic construct
  source 1..23: mol_type = other RNA
taagaatcacacaaaagacatac

SEQ ID NO: 1543 - RNA, 23 nt, synthetic construct
  source 1..23: mol_type = other RNA
tgaagaatcacacaaaagacata

SEQ ID NO: 1544 - RNA, 23 nt, synthetic construct
  source 1..23: mol_type = other RNA
ttgaagaatcacacaaaagacat

SEQ ID NO: 1545 - RNA, 23 nt, synthetic construct
  source 1..23: mol_type = other RNA
tttgaagaatcacacaaaagaca

SEQ ID NO: 1546 - RNA, 23 nt, synthetic construct
  source 1..23: mol_type = other RNA
ttttgaagaatcacacaaaagac

SEQ ID NO: 1547 - RNA, 23 nt, synthetic construct
  source 1..23: mol_type = other RNA
tgtttgaagaatcacacaaaaga

SEQ ID NO: 1548 - RNA, 23 nt, synthetic construct
  source 1..23: mol_type = other RNA
tagtttgaagaatcacacaaaag

SEQ ID NO: 1549 - RNA, 23 nt, synthetic construct
  source 1..23: mol_type = other RNA
taagtttgaagaatcacacaaaa

SEQ ID NO: 1550 - RNA, 23 nt, synthetic construct
  source 1..23: mol_type = other RNA
taacatgctccttctgtttggca

SEQ ID NO: 1551 - RNA, 23 nt, synthetic construct
  source 1..23: mol_type = other RNA
tcaacatgctccttctgtttggc

SEQ ID NO: 1552 - RNA, 23 nt, synthetic construct
  source 1..23: mol_type = other RNA
tttagcatgactgatgcccaaca

SEQ ID NO: 1553 - RNA, 23 nt, synthetic construct
  source 1..23: mol_type = other RNA
ttggttagcatgactgatgccca

SEQ ID NO: 1554 - RNA, 23 nt, synthetic construct
  source 1..23: mol_type = other RNA
tcattggttagcatgactgatgc

SEQ ID NO: 1555 - RNA, 23 nt, synthetic construct
  source 1..23: mol_type = other RNA
ttttccattggttagcatgactg

SEQ ID NO: 1556 - RNA, 23 nt, synthetic construct
  source 1..23: mol_type = other RNA
ttcttttccattggttagcatga

SEQ ID NO: 1557 - RNA, 23 nt, synthetic construct
  source 1..23: mol_type = other RNA
tatttgatcacctgctcttttcc

SEQ ID NO: 1558 - RNA, 23 nt, synthetic construct
  source 1..23: mol_type = other RNA
tcattcagttctggaagggagac

SEQ ID NO: 1559 - RNA, 23 nt, synthetic construct
  source 1..23: mol_type = other RNA
tgcattcagttctggaagggaga

SEQ ID NO: 1560 - RNA, 23 nt, synthetic construct
  source 1..23: mol_type = other RNA
tagcattcagttctggaagggag

SEQ ID NO: 1561 - RNA, 23 nt, synthetic construct
  source 1..23: mol_type = other RNA
tgagcattcagttctggaaggga

SEQ ID NO: 1562 - RNA, 23 nt, synthetic construct
  source 1..23: mol_type = other RNA
ttgagcattcagttctggaaggg

SEQ ID NO: 1563 - RNA, 23 nt, synthetic construct
  source 1..23: mol_type = other RNA
tttgagcattcagttctggaagg

SEQ ID NO: 1564 - RNA, 23 nt, synthetic construct
  source 1..23: mol_type = other RNA
tcttgagcattcagttctggaag

SEQ ID NO: 1565 - RNA, 23 nt, synthetic construct
  source 1..23: mol_type = other RNA
tacttgagcattcagttctggaa

SEQ ID NO: 1566 - RNA, 23 nt, synthetic construct
  source 1..23: mol_type = other RNA
tgacttgagcattcagttctgga

SEQ ID NO: 1567 - RNA, 23 nt, synthetic construct
  source 1..23: mol_type = other RNA
tagacttgagcattcagttctgg

SEQ ID NO: 1568 - RNA, 23 nt, synthetic construct
  source 1..23: mol_type = other RNA
taagacttgagcattcagttctg

SEQ ID NO: 1569 - RNA, 23 nt, synthetic construct
  source 1..23: mol_type = other RNA
tgaagacttgagcattcagttct

SEQ ID NO: 1570 - RNA, 23 nt, synthetic construct
  source 1..23: mol_type = other RNA
tagaagacttgagcattcagttc

SEQ ID NO: 1571 - RNA, 23 nt, synthetic construct
  source 1..23: mol_type = other RNA
tcagaagacttgagcattcagtt

SEQ ID NO: 1572 - RNA, 23 nt, synthetic construct
  source 1..23: mol_type = other RNA
tacagaagacttgagcattcagt

SEQ ID NO: 1573 - RNA, 23 nt, synthetic construct
  source 1..23: mol_type = other RNA
tgacagaagacttgagcattcag

SEQ ID NO: 1574 - RNA, 23 nt, synthetic construct
  source 1..23: mol_type = other RNA
ttgacagaagacttgagcattca

SEQ ID NO: 1575 - RNA, 23 nt, synthetic construct
  source 1..23: mol_type = other RNA
tatgacagaagacttgagcattc

SEQ ID NO: 1576 - RNA, 23 nt, synthetic construct
  source 1..23: mol_type = other RNA
ttatgacagaagacttgagcatt

SEQ ID NO: 1577 - RNA, 23 nt, synthetic construct
  source 1..23: mol_type = other RNA
tctatgacagaagacttgagcat

SEQ ID NO: 1578 - RNA, 23 nt, synthetic construct
  source 1..23: mol_type = other RNA
tactatgacagaagacttgagca

SEQ ID NO: 1579 - RNA, 23 nt, synthetic construct
  source 1..23: mol_type = other RNA
taactatgacagaagacttgagc

SEQ ID NO: 1580 - RNA, 23 nt, synthetic construct
  source 1..23: mol_type = other RNA
tgaactatgacagaagacttgag

SEQ ID NO: 1581 - RNA, 23 nt, synthetic construct
  source 1..23: mol_type = other RNA
tggaactatgacagaagacttga

SEQ ID NO: 1582 - RNA, 23 nt, synthetic construct
  source 1..23: mol_type = other RNA
ttggaactatgacagaagacttg

SEQ ID NO: 1583 - RNA, 23 nt, synthetic construct
  source 1..23: mol_type = other RNA
tttggaactatgacagaagactt

SEQ ID NO: 1584 - RNA, 23 nt, synthetic construct
  source 1..23: mol_type = other RNA
tgttggaactatgacagaagact

SEQ ID NO: 1585 - RNA, 23 nt, synthetic construct
  source 1..23: mol_type = other RNA
ttgttggaactatgacagaagac

SEQ ID NO: 1586 - RNA, 23 nt, synthetic construct
  source 1..23: mol_type = other RNA
tttgttggaactatgacagaaga

SEQ ID NO: 1587 - RNA, 23 nt, synthetic construct
  source 1..23: mol_type = other RNA
tattgttggaactatgacagaag

SEQ ID NO: 1588 - RNA, 23 nt, synthetic construct
  source 1..23: mol_type = other RNA
tcattgttggaactatgacagaa

SEQ ID NO: 1589 - RNA, 23 nt, synthetic construct
  source 1..23: mol_type = other RNA
tacattgttggaactatgacaga

SEQ ID NO: 1590 - RNA, 23 nt, synthetic construct
  source 1..23: mol_type = other RNA
taacattgttggaactatgacag

SEQ ID NO: 1591 - RNA, 23 nt, synthetic construct
  source 1..23: mol_type = other RNA
ttaacattgttggaactatgaca

SEQ ID NO: 1592 - RNA, 23 nt, synthetic construct
  source 1..23: mol_type = other RNA
tgtaacattgttggaactatgac

SEQ ID NO: 1593 - RNA, 23 nt, synthetic construct
  source 1..23: mol_type = other RNA
tggtaacattgttggaactatga

SEQ ID NO: 1594 - RNA, 23 nt, synthetic construct
  source 1..23: mol_type = other RNA
ttggtaacattgttggaactatg

SEQ ID NO: 1595 - RNA, 23 nt, synthetic construct
  source 1..23: mol_type = other RNA
tttggtaacattgttggaactat

SEQ ID NO: 1596 - RNA, 23 nt, synthetic construct
  source 1..23: mol_type = other RNA
ttttggtaacattgttggaacta

SEQ ID NO: 1597 - RNA, 23 nt, synthetic construct
  source 1..23: mol_type = other RNA
tttttggtaacattgttggaact

SEQ ID NO: 1598 - RNA, 23 nt, synthetic construct
  source 1..23: mol_type = other RNA
tgttttggtaacattgttggaac

SEQ ID NO: 1599 - RNA, 23 nt, synthetic construct
  source 1..23: mol_type = other RNA
tggttttggtaacattgttggaa

SEQ ID NO: 1600 - RNA, 23 nt, synthetic construct
  source 1..23: mol_type = other RNA
tcggttttggtaacattgttgga

SEQ ID NO: 1601 - RNA, 23 nt, synthetic construct
  source 1..23: mol_type = other RNA
ttcggttttggtaacattgttgg

SEQ ID NO: 1602 - RNA, 23 nt, synthetic construct
  source 1..23: mol_type = other RNA
tttcggttttggtaacattgttg

SEQ ID NO: 1603 - RNA, 23 nt, synthetic construct
  source 1..23: mol_type = other RNA
tattcggttttggtaacattgtt

SEQ ID NO: 1604 - RNA, 23 nt, synthetic construct
  source 1..23: mol_type = other RNA
tcattcggttttggtaacattgt

SEQ ID NO: 1605 - RNA, 23 nt, synthetic construct
  source 1..23: mol_type = other RNA
tgcattcggttttggtaacattg

SEQ ID NO: 1606 - RNA, 23 nt, synthetic construct
  source 1..23: mol_type = other RNA
tagcattcggttttggtaacatt

SEQ ID NO: 1607 - RNA, 23 nt, synthetic construct
  source 1..23: mol_type = other RNA
tcagcattcggttttggtaacat

SEQ ID NO: 1608 - RNA, 23 nt, synthetic construct
  source 1..23: mol_type = other RNA
tgcagcattcggttttggtaaca

SEQ ID NO: 1609 - RNA, 23 nt, synthetic construct
  source 1..23: mol_type = other RNA
tagcagcattcggttttggtaac

SEQ ID NO: 1610 - RNA, 23 nt, synthetic construct
  source 1..23: mol_type = other RNA
taagcagcattcggttttggtaa

SEQ ID NO: 1611 - RNA, 23 nt, synthetic construct
  source 1..23: mol_type = other RNA
tgaagcagcattcggttttggta

SEQ ID NO: 1612 - RNA, 23 nt, synthetic construct
  source 1..23: mol_type = other RNA
ttgaagcagcattcggttttggt

SEQ ID NO: 1613 - RNA, 23 nt, synthetic construct
  source 1..23: mol_type = other RNA
tgtgaagcagcattcggttttgg

SEQ ID NO: 1614 - RNA, 23 nt, synthetic construct
  source 1..23: mol_type = other RNA
ttgtgaagcagcattcggttttg

SEQ ID NO: 1615 - RNA, 23 nt, synthetic construct
  source 1..23: mol_type = other RNA
tctgtgaagcagcattcggtttt

SEQ ID NO: 1616 - RNA, 23 nt, synthetic construct
  source 1..23: mol_type = other RNA
ttctgtgaagcagcattcggttt

SEQ ID NO: 1617 - RNA, 23 nt, synthetic construct
  source 1..23: mol_type = other RNA
taatctgtgaagcagcattcggt

SEQ ID NO: 1618 - RNA, 23 nt, synthetic construct
  source 1..23: mol_type = other RNA
taaaaatctgtgaagcagcattc

SEQ ID NO: 1619 - RNA, 23 nt, synthetic construct
  source 1..23: mol_type = other RNA
tcaaaaatctgtgaagcagcatt

SEQ ID NO: 1620 - RNA, 23 nt, synthetic construct
  source 1..23: mol_type = other RNA
tgcaaaaatctgtgaagcagcat

SEQ ID NO: 1621 - RNA, 23 nt, synthetic construct
  source 1..23: mol_type = other RNA
ttgcaaaaatctgtgaagcagca

SEQ ID NO: 1622 - RNA, 23 nt, synthetic construct
  source 1..23: mol_type = other RNA
tttgcaaaaatctgtgaagcagc

SEQ ID NO: 1623 - RNA, 23 nt, synthetic construct
  source 1..23: mol_type = other RNA
tgttgcaaaaatctgtgaagcag

SEQ ID NO: 1624 - RNA, 23 nt, synthetic construct
  source 1..23: mol_type = other RNA
ttgttgcaaaaatctgtgaagca

SEQ ID NO: 1625 - RNA, 23 nt, synthetic construct
  source 1..23: mol_type = other RNA
tttgttgcaaaaatctgtgaagc

SEQ ID NO: 1626 - RNA, 23 nt, synthetic construct
  source 1..23: mol_type = other RNA
tgttgttgcaaaaatctgtgaag

SEQ ID NO: 1627 - RNA, 23 nt, synthetic construct
  source 1..23: mol_type = other RNA
ttgttgttgcaaaaatctgtgaa

SEQ ID NO: 1628 - RNA, 23 nt, synthetic construct
  source 1..23: mol_type = other RNA
tatgttgttgcaaaaatctgtga

SEQ ID NO: 1629 - RNA, 23 nt, synthetic construct
  source 1..23: mol_type = other RNA
ttatgttgttgcaaaaatctgtg

SEQ ID NO: 1630 - RNA, 23 nt, synthetic construct
  source 1..23: mol_type = other RNA
tttatgttgttgcaaaaatctgt

SEQ ID NO: 1631 - RNA, 23 nt, synthetic construct
  source 1..23: mol_type = other RNA
tgttatgttgttgcaaaaatctg

SEQ ID NO: 1632 - RNA, 23 nt, synthetic construct
  source 1..23: mol_type = other RNA
ttgttatgttgttgcaaaaatct

SEQ ID NO: 1633 - RNA, 23 nt, synthetic construct
  source 1..23: mol_type = other RNA
tgtgttatgttgttgcaaaaatc

SEQ ID NO: 1634 - RNA, 23 nt, synthetic construct
  source 1..23: mol_type = other RNA
tagtgttatgttgttgcaaaaat

SEQ ID NO: 1635 - RNA, 23 nt, synthetic construct
  source 1..23: mol_type = other RNA
tcagtgttatgttgttgcaaaaa

SEQ ID NO: 1636 - RNA, 23 nt, synthetic construct
  source 1..23: mol_type = other RNA
tgcagtgttatgttgttgcaaaa

SEQ ID NO: 1637 - RNA, 23 nt, synthetic construct
  source 1..23: mol_type = other RNA
ttgcagtgttatgttgttgcaaa

SEQ ID NO: 1638 - RNA, 23 nt, synthetic construct
  source 1..23: mol_type = other RNA
tgtgcagtgttatgttgttgcaa

SEQ ID NO: 1639 - RNA, 23 nt, synthetic construct
  source 1..23: mol_type = other RNA
tggtgcagtgttatgttgttgca

SEQ ID NO: 1640 - RNA, 23 nt, synthetic construct
  source 1..23: mol_type = other RNA
taggtgcagtgttatgttgttgc

SEQ ID NO: 1641 - RNA, 23 nt, synthetic construct
  source 1..23: mol_type = other RNA
taaggtgcagtgttatgttgttg

SEQ ID NO: 1642 - RNA, 23 nt, synthetic construct
  source 1..23: mol_type = other RNA
tgaaggtgcagtgttatgttgtt

SEQ ID NO: 1643 - RNA, 23 nt, synthetic construct
  source 1..23: mol_type = other RNA
tggaaggtgcagtgttatgttgt

SEQ ID NO: 1644 - RNA, 23 nt, synthetic construct
  source 1..23: mol_type = other RNA
ttggaaggtgcagtgttatgttg

SEQ ID NO: 1645 - RNA, 23 nt, synthetic construct
  source 1..23: mol_type = other RNA
tttggaaggtgcagtgttatgtt

SEQ ID NO: 1646 - RNA, 23 nt, synthetic construct
  source 1..23: mol_type = other RNA
tgttggaaggtgcagtgttatgt

SEQ ID NO: 1647 - RNA, 23 nt, synthetic construct
  source 1..23: mol_type = other RNA
ttgttggaaggtgcagtgttatg

SEQ ID NO: 1648 - RNA, 23 nt, synthetic construct
  source 1..23: mol_type = other RNA
tctgttggaaggtgcagtgttat

SEQ ID NO: 1649 - RNA, 23 nt, synthetic construct
  source 1..23: mol_type = other RNA
tgctgttggaaggtgcagtgtta

SEQ ID NO: 1650 - RNA, 23 nt, synthetic construct
  source 1..23: mol_type = other RNA
ttgctgttggaaggtgcagtgtt

SEQ ID NO: 1651 - RNA, 23 nt, synthetic construct
  source 1..23: mol_type = other RNA
tatgctgttggaaggtgcagtgt

SEQ ID NO: 1652 - RNA, 23 nt, synthetic construct
  source 1..23: mol_type = other RNA
tgatgctgttggaaggtgcagtg

SEQ ID NO: 1653 - RNA, 23 nt, synthetic construct
  source 1..23: mol_type = other RNA
ttgatgctgttggaaggtgcagt

SEQ ID NO: 1654 - RNA, 23 nt, synthetic construct
  source 1..23: mol_type = other RNA
tgtgatgctgttggaaggtgcag

SEQ ID NO: 1655 - RNA, 23 nt, synthetic construct
  source 1..23: mol_type = other RNA
tggtgatgctgttggaaggtgca

SEQ ID NO: 1656 - RNA, 23 nt, synthetic construct
  source 1..23: mol_type = other RNA
ttggtgatgctgttggaaggtgc

SEQ ID NO: 1657 - RNA, 23 nt, synthetic construct
  source 1..23: mol_type = other RNA
tttggtgatgctgttggaaggtg

SEQ ID NO: 1658 - RNA, 23 nt, synthetic construct
  source 1..23: mol_type = other RNA
ttttggtgatgctgttggaaggt

SEQ ID NO: 1659 - RNA, 23 nt, synthetic construct
  source 1..23: mol_type = other RNA
tatttggtgatgctgttggaagg

SEQ ID NO: 1660 - RNA, 23 nt, synthetic construct
  source 1..23: mol_type = other RNA
tcatttggtgatgctgttggaag

SEQ ID NO: 1661 - RNA, 23 nt, synthetic construct
  source 1..23: mol_type = other RNA
tgcatttggtgatgctgttggaa

SEQ ID NO: 1662 - RNA, 23 nt, synthetic construct
  source 1..23: mol_type = other RNA
tggcatttggtgatgctgttgga

SEQ ID NO: 1663 - RNA, 23 nt, synthetic construct
  source 1..23: mol_type = other RNA
ttaataatgatggccagctccat

SEQ ID NO: 1664 - RNA, 23 nt, synthetic construct
  source 1..23: mol_type = other RNA
tcagtaataatgatggccagctc

SEQ ID NO: 1665 - RNA, 23 nt, synthetic construct
  source 1..23: mol_type = other RNA
tacagtaataatgatggccagct

SEQ ID NO: 1666 - RNA, 23 nt, synthetic construct
  source 1..23: mol_type = other RNA
tgcacagtaataatgatggccag

SEQ ID NO: 1667 - RNA, 23 nt, synthetic construct
  source 1..23: mol_type = other RNA
taaacaggcacagtaataatgat

SEQ ID NO: 1668 - RNA, 23 nt, synthetic construct
  source 1..23: mol_type = other RNA
taggcaaacaggcacagtaataa

SEQ ID NO: 1669 - RNA, 23 nt, synthetic construct
  source 1..23: mol_type = other RNA
ttggacaggaggcaaacaggcac

SEQ ID NO: 1670 - RNA, 23 nt, synthetic construct
  source 1..23: mol_type = other RNA
tatactgtcagcatcgcagctat

SEQ ID NO: 1671 - RNA, 23 nt, synthetic construct
  source 1..23: mol_type = other RNA
tttttcttcctgtaggagcactg

SEQ ID NO: 1672 - RNA, 23 nt, synthetic construct
  source 1..23: mol_type = other RNA
ttttttcttcctgtaggagcact

SEQ ID NO: 1673 - RNA, 23 nt, synthetic construct
  source 1..23: mol_type = other RNA
ttctttttcttcctgtaggagca

SEQ ID NO: 1674 - RNA, 23 nt, synthetic construct
  source 1..23: mol_type = other RNA
tgtctctttttcttcctgtagga

SEQ ID NO: 1675 - RNA, 23 nt, synthetic construct
  source 1..23: mol_type = other RNA
tcagattgcactcagagagtggt

SEQ ID NO: 1676 - RNA, 23 nt, synthetic construct
  source 1..23: mol_type = other RNA
tttaccagattgcactcagagag

SEQ ID NO: 1677 - RNA, 23 nt, synthetic construct
  source 1..23: mol_type = other RNA
tcatttaccagattgcactcaga

SEQ ID NO: 1678 - RNA, 23 nt, synthetic construct
  source 1..23: mol_type = other RNA
ttttccagcatttaccagattgc

SEQ ID NO: 1679 - RNA, 23 nt, synthetic construct
  source 1..23: mol_type = other RNA
tgtttttccagcatttaccagat

SEQ ID NO: 1680 - RNA, 23 nt, synthetic construct
  source 1..23: mol_type = other RNA
ttctttcagagtttttccagcat

SEQ ID NO: 1681 - RNA, 23 nt, synthetic construct
  source 1..23: mol_type = other RNA
tgatctttcagagtttttccagc

SEQ ID NO: 1682 - RNA, 23 nt, synthetic construct
  source 1..23: mol_type = other RNA
tagatctttcagagtttttccag

SEQ ID NO: 1683 - RNA, 23 nt, synthetic construct
  source 1..23: mol_type = other RNA
tcagatctttcagagtttttcca

SEQ ID NO: 1684 - RNA, 23 nt, synthetic construct
  source 1..23: mol_type = other RNA
ttcagatctttcagagtttttcc

SEQ ID NO: 1685 - RNA, 23 nt, synthetic construct
  source 1..23: mol_type = other RNA
tatcagatctttcagagtttttc

SEQ ID NO: 1686 - RNA, 23 nt, synthetic construct
  source 1..23: mol_type = other RNA
taatcagatctttcagagttttt

SEQ ID NO: 1687 - RNA, 23 nt, synthetic construct
  source 1..23: mol_type = other RNA
taaatcagatctttcagagtttt

SEQ ID NO: 1688 - RNA, 23 nt, synthetic construct
  source 1..23: mol_type = other RNA
ttaaatcagatctttcagagttt

SEQ ID NO: 1689 - RNA, 23 nt, synthetic construct
  source 1..23: mol_type = other RNA
tataaatcagatctttcagagtt

SEQ ID NO: 1690 - RNA, 23 nt, synthetic construct
  source 1..23: mol_type = other RNA
tcataaatcagatctttcagagt

SEQ ID NO: 1691 - RNA, 23 nt, synthetic construct
  source 1..23: mol_type = other RNA
ttcataaatcagatctttcagag

SEQ ID NO: 1692 - RNA, 23 nt, synthetic construct
  source 1..23: mol_type = other RNA
tatcataaatcagatctttcaga

SEQ ID NO: 1693 - RNA, 23 nt, synthetic construct
  source 1..23: mol_type = other RNA
tcatcataaatcagatctttcag

SEQ ID NO: 1694 - RNA, 23 nt, synthetic construct
  source 1..23: mol_type = other RNA
tacatcataaatcagatctttca

SEQ ID NO: 1695 - RNA, 23 nt, synthetic construct
  source 1..23: mol_type = other RNA
tcacatcataaatcagatctttc

SEQ ID NO: 1696 - RNA, 23 nt, synthetic construct
  source 1..23: mol_type = other RNA
ttcacatcataaatcagatcttt

SEQ ID NO: 1697 - RNA, 23 nt, synthetic construct
  source 1..23: mol_type = other RNA
tgtcacatcataaatcagatctt

SEQ ID NO: 1698 - RNA, 23 nt, synthetic construct
  source 1..23: mol_type = other RNA
tttgaaccaacagaggtagacca

SEQ ID NO: 1699 - RNA, 23 nt, synthetic construct
  source 1..23: mol_type = other RNA
ttttgaaccaacagaggtagacc

SEQ ID NO: 1700 - RNA, 23 nt, synthetic construct
  source 1..23: mol_type = other RNA
ttcctttgaaccaacagaggtag

SEQ ID NO: 1701 - RNA, 23 nt, synthetic construct
  source 1..23: mol_type = other RNA
tgtcctttgaaccaacagaggta

SEQ ID NO: 1702 - RNA, 23 nt, synthetic construct
  source 1..23: mol_type = other RNA
tattgtcctttgaaccaacagag

SEQ ID NO: 1703 - RNA, 23 nt, synthetic construct
  source 1..23: mol_type = other RNA
taattgtcctttgaaccaacaga

SEQ ID NO: 1704 - RNA, 23 nt, synthetic construct
  source 1..23: mol_type = other RNA
tttgcaattgtcctttgaaccaa

SEQ ID NO: 1705 - RNA, 23 nt, synthetic construct
  source 1..23: mol_type = other RNA
ttccttgcaattgtcctttgaac

SEQ ID NO: 1706 - RNA, 23 nt, synthetic construct
  source 1..23: mol_type = other RNA
taaatctaccttttcctactatt

SEQ ID NO: 1707 - RNA, 23 nt, synthetic construct
  source 1..23: mol_type = other RNA
taccaaatctaccttttcctact

SEQ ID NO: 1708 - RNA, 23 nt, synthetic construct
  source 1..23: mol_type = other RNA
tattttcacagccacatcttccc

SEQ ID NO: 1709 - RNA, 23 nt, synthetic construct
  source 1..23: mol_type = other RNA
ttattttcacagccacatcttcc

SEQ ID NO: 1710 - RNA, 23 nt, synthetic construct
  source 1..23: mol_type = other RNA
tatattttcacagccacatcttc

SEQ ID NO: 1711 - RNA, 23 nt, synthetic construct
  source 1..23: mol_type = other RNA
tatctttcatctctggaggagaa

SEQ ID NO: 1712 - RNA, 23 nt, synthetic construct
  source 1..23: mol_type = other RNA
tgatctttcatctctggaggaga

SEQ ID NO: 1713 - RNA, 23 nt, synthetic construct
  source 1..23: mol_type = other RNA
tagatctttcatctctggaggag

SEQ ID NO: 1714 - RNA, 23 nt, synthetic construct
  source 1..23: mol_type = other RNA
taagatctttcatctctggagga

SEQ ID NO: 1715 - RNA, 23 nt, synthetic construct
  source 1..23: mol_type = other RNA
tcaagatctttcatctctggagg

SEQ ID NO: 1716 - RNA, 23 nt, synthetic construct
  source 1..23: mol_type = other RNA
tccaagatctttcatctctggag

SEQ ID NO: 1717 - RNA, 23 nt, synthetic construct
  source 1..23: mol_type = other RNA
taaccaagatctttcatctctgg

SEQ ID NO: 1718 - RNA, 23 nt, synthetic construct
  source 1..23: mol_type = other RNA
taaaccaagatctttcatctctg

SEQ ID NO: 1719 - RNA, 23 nt, synthetic construct
  source 1..23: mol_type = other RNA
tacgaaaccaagatctttcatct

SEQ ID NO: 1720 - RNA, 23 nt, synthetic construct
  source 1..23: mol_type = other RNA
ttaaatttctgcctcacgaaacc

SEQ ID NO: 1721 - RNA, 23 nt, synthetic construct
  source 1..23: mol_type = other RNA
tatgttttcatgtcgcagcatga

SEQ ID NO: 1722 - RNA, 23 nt, synthetic construct
  source 1..23: mol_type = other RNA
taggatgttttcatgtcgcagca

SEQ ID NO: 1723 - RNA, 23 nt, synthetic construct
  source 1..23: mol_type = other RNA
taaggatgttttcatgtcgcagc

SEQ ID NO: 1724 - RNA, 23 nt, synthetic construct
  source 1..23: mol_type = other RNA
tcaaggatgttttcatgtcgcag

SEQ ID NO: 1725 - RNA, 23 nt, synthetic construct
  source 1..23: mol_type = other RNA
taccaaggatgttttcatgtcgc

SEQ ID NO: 1726 - RNA, 23 nt, synthetic construct
  source 1..23: mol_type = other RNA
taaccaaggatgttttcatgtcg

SEQ ID NO: 1727 - RNA, 23 nt, synthetic construct
  source 1..23: mol_type = other RNA
taaaccaaggatgttttcatgtc

SEQ ID NO: 1728 - RNA, 23 nt, synthetic construct
  source 1..23: mol_type = other RNA
tatgaaaccaaggatgttttcat

SEQ ID NO: 1729 - RNA, 23 nt, synthetic construct
  source 1..23: mol_type = other RNA
tcagcaatgaaaccaaggatgtt

SEQ ID NO: 1730 - RNA, 23 nt, synthetic construct
  source 1..23: mol_type = other RNA
ttcagcagcaatgaaaccaagga

SEQ ID NO: 1731 - RNA, 23 nt, synthetic construct
  source 1..23: mol_type = other RNA
tttgtcagcagcaatgaaaccaa

SEQ ID NO: 1732 - RNA, 23 nt, synthetic construct
  source 1..23: mol_type = other RNA
tttgttgtcagcagcaatgaaac

SEQ ID NO: 1733 - RNA, 23 nt, synthetic construct
  source 1..23: mol_type = other RNA
ttttgttgtcagcagcaatgaaa

SEQ ID NO: 1734 - RNA, 23 nt, synthetic construct
  source 1..23: mol_type = other RNA
tatctttgttgtcagcagcaatg

SEQ ID NO: 1735 - RNA, 23 nt, synthetic construct
  source 1..23: mol_type = other RNA
tcattatctttgttgtcagcagc

SEQ ID NO: 1736 - RNA, 23 nt, synthetic construct
  source 1..23: mol_type = other RNA
tccattatctttgttgtcagcag

SEQ ID NO: 1737 - RNA, 23 nt, synthetic construct
  source 1..23: mol_type = other RNA
tttccattatctttgttgtcagc

SEQ ID NO: 1738 - RNA, 23 nt, synthetic construct
  source 1..23: mol_type = other RNA
tgttccattatctttgttgtcag

SEQ ID NO: 1739 - RNA, 23 nt, synthetic construct
  source 1..23: mol_type = other RNA
tcaagttccattatctttgttgt

SEQ ID NO: 1740 - RNA, 23 nt, synthetic construct
  source 1..23: mol_type = other RNA
tattcagataccagccaaagttg

SEQ ID NO: 1741 - RNA, 23 nt, synthetic construct
  source 1..23: mol_type = other RNA
tatattcagataccagccaaagt

SEQ ID NO: 1742 - RNA, 23 nt, synthetic construct
  source 1..23: mol_type = other RNA
tgatattcagataccagccaaag

SEQ ID NO: 1743 - RNA, 23 nt, synthetic construct
  source 1..23: mol_type = other RNA
ttgatattcagataccagccaaa

SEQ ID NO: 1744 - RNA, 23 nt, synthetic construct
  source 1..23: mol_type = other RNA
tttcatgatattcagataccagc

SEQ ID NO: 1745 - RNA, 23 nt, synthetic construct
  source 1..23: mol_type = other RNA
ttgttcatgatattcagatacca

SEQ ID NO: 1746 - RNA, 23 nt, synthetic construct
  source 1..23: mol_type = other RNA
ttataaggagccctgttcatgat

SEQ ID NO: 1747 - RNA, 23 nt, synthetic construct
  source 1..23: mol_type = other RNA
tatataaggagccctgttcatga

SEQ ID NO: 1748 - RNA, 23 nt, synthetic construct
  source 1..23: mol_type = other RNA
tagtcatataaggagccctgttc

SEQ ID NO: 1749 - RNA, 23 nt, synthetic construct
  source 1..23: mol_type = other RNA
ttagtcatataaggagccctgtt

SEQ ID NO: 1750 - RNA, 23 nt, synthetic construct
  source 1..23: mol_type = other RNA
tatagtcatataaggagccctgt

SEQ ID NO: 1751 - RNA, 23 nt, synthetic construct
  source 1..23: mol_type = other RNA
taatagtcatataaggagccctg

SEQ ID NO: 1752 - RNA, 23 nt, synthetic construct
  source 1..23: mol_type = other RNA
taaatagtcatataaggagccct

SEQ ID NO: 1753 - RNA, 23 nt, synthetic construct
  source 1..23: mol_type = other RNA
tcaaatagtcatataaggagccc

SEQ ID NO: 1754 - RNA, 23 nt, synthetic construct
  source 1..23: mol_type = other RNA
ttcaaatagtcatataaggagcc

SEQ ID NO: 1755 - RNA, 23 nt, synthetic construct
  source 1..23: mol_type = other RNA
tttcaaatagtcatataaggagc

SEQ ID NO: 1756 - RNA, 23 nt, synthetic construct
  source 1..23: mol_type = other RNA
tattcaaatagtcatataaggag

SEQ ID NO: 1757 - RNA, 23 nt, synthetic construct
  source 1..23: mol_type = other RNA
tctattcaaatagtcatataagg

SEQ ID NO: 1758 - RNA, 23 nt, synthetic construct
  source 1..23: mol_type = other RNA
tatcattccagccacggtcacta

SEQ ID NO: 1759 - RNA, 23 nt, synthetic construct
  source 1..23: mol_type = other RNA
tgcttgatcattccagccacggt

SEQ ID NO: 1760 - RNA, 23 nt, synthetic construct
  source 1..23: mol_type = other RNA
tcagcttgatcattccagccacg

SEQ ID NO: 1761 - RNA, 23 nt, synthetic construct
  source 1..23: mol_type = other RNA
tcactagcaattgagagcgccag

SEQ ID NO: 1762 - RNA, 23 nt, synthetic construct
  source 1..23: mol_type = other RNA
tagaccactagcaattgagagcg

SEQ ID NO: 1763 - RNA, 23 nt, synthetic construct
  source 1..23: mol_type = other RNA
ttccatatgaaggtgtgccagac

SEQ ID NO: 1764 - RNA, 23 nt, synthetic construct
  source 1..23: mol_type = other RNA
tctccatatgaaggtgtgccaga

SEQ ID NO: 1765 - RNA, 23 nt, synthetic construct
  source 1..23: mol_type = other RNA
ttctccatatgaaggtgtgccag

SEQ ID NO: 1766 - RNA, 23 nt, synthetic construct
  source 1..23: mol_type = other RNA
tatctccatatgaaggtgtgcca

SEQ ID NO: 1767 - RNA, 23 nt, synthetic construct
  source 1..23: mol_type = other RNA
taatctccatatgaaggtgtgcc

SEQ ID NO: 1768 - RNA, 23 nt, synthetic construct
  source 1..23: mol_type = other RNA
tcaatctccatatgaaggtgtgc

SEQ ID NO: 1769 - RNA, 23 nt, synthetic construct
  source 1..23: mol_type = other RNA
tacaatctccatatgaaggtgtg

SEQ ID NO: 1770 - RNA, 23 nt, synthetic construct
  source 1..23: mol_type = other RNA
taacaatctccatatgaaggtgt

SEQ ID NO: 1771 - RNA, 23 nt, synthetic construct
  source 1..23: mol_type = other RNA
tcaacaatctccatatgaaggtg

SEQ ID NO: 1772 - RNA, 23 nt, synthetic construct
  source 1..23: mol_type = other RNA
tccaacaatctccatatgaaggt

SEQ ID NO: 1773 - RNA, 23 nt, synthetic construct
  source 1..23: mol_type = other RNA
taccaacaatctccatatgaagg

SEQ ID NO: 1774 - RNA, 23 nt, synthetic construct
  source 1..23: mol_type = other RNA
ttaccaacaatctccatatgaag

SEQ ID NO: 1775 - RNA, 23 nt, synthetic construct
  source 1..23: mol_type = other RNA
tgtaccaacaatctccatatgaa

SEQ ID NO: 1776 - RNA, 23 nt, synthetic construct
  source 1..23: mol_type = other RNA
ttgtaccaacaatctccatatga

SEQ ID NO: 1777 - RNA, 23 nt, synthetic construct
  source 1..23: mol_type = other RNA
tgtgtaccaacaatctccatatg

SEQ ID NO: 1778 - RNA, 23 nt, synthetic construct
  source 1..23: mol_type = other RNA
ttgtgtaccaacaatctccatat

SEQ ID NO: 1779 - RNA, 23 nt, synthetic construct
  source 1..23: mol_type = other RNA
tttgtgtaccaacaatctccata

SEQ ID NO: 1780 - RNA, 23 nt, synthetic construct
  source 1..23: mol_type = other RNA
tcttgtgtaccaacaatctccat

SEQ ID NO: 1781 - RNA, 23 nt, synthetic construct
  source 1..23: mol_type = other RNA
tccttgtgtaccaacaatctcca

SEQ ID NO: 1782 - RNA, 23 nt, synthetic construct
  source 1..23: mol_type = other RNA
tttaccttgtgtaccaacaatct

SEQ ID NO: 1783 - RNA, 23 nt, synthetic construct
  source 1..23: mol_type = other RNA
taggtttaccttgtgtaccaaca

SEQ ID NO: 1784 - RNA, 23 nt, synthetic construct
  source 1..23: mol_type = other RNA
tagcaggtttaccttgtgtacca

SEQ ID NO: 1785 - RNA, 23 nt, synthetic construct
  source 1..23: mol_type = other RNA
ttagcaggtttaccttgtgtacc

SEQ ID NO: 1786 - RNA, 23 nt, synthetic construct
  source 1..23: mol_type = other RNA
tatagcaggtttaccttgtgtac

SEQ ID NO: 1787 - RNA, 23 nt, synthetic construct
  source 1..23: mol_type = other RNA
taatagcaggtttaccttgtgta

SEQ ID NO: 1788 - RNA, 23 nt, synthetic construct
  source 1..23: mol_type = other RNA
tcaatagcaggtttaccttgtgt

SEQ ID NO: 1789 - RNA, 23 nt, synthetic construct
  source 1..23: mol_type = other RNA
tgcaatagcaggtttaccttgtg

SEQ ID NO: 1790 - RNA, 23 nt, synthetic construct
  source 1..23: mol_type = other RNA
tagcaatagcaggtttaccttgt

SEQ ID NO: 1791 - RNA, 23 nt, synthetic construct
  source 1..23: mol_type = other RNA
tgagcaatagcaggtttaccttg

SEQ ID NO: 1792 - RNA, 23 nt, synthetic construct
  source 1..23: mol_type = other RNA
ttgagcaatagcaggtttacctt

SEQ ID NO: 1793 - RNA, 23 nt, synthetic construct
  source 1..23: mol_type = other RNA
tatgagcaatagcaggtttacct

SEQ ID NO: 1794 - RNA, 23 nt, synthetic construct
  source 1..23: mol_type = other RNA
tgatgagcaatagcaggtttacc

SEQ ID NO: 1795 - RNA, 23 nt, synthetic construct
  source 1..23: mol_type = other RNA
tcgatgagcaatagcaggtttac

SEQ ID NO: 1796 - RNA, 23 nt, synthetic construct
  source 1..23: mol_type = other RNA
ttcgatgagcaatagcaggttta

SEQ ID NO: 1797 - RNA, 23 nt, synthetic construct
  source 1..23: mol_type = other RNA
tctcgatgagcaatagcaggttt

SEQ ID NO: 1798 - RNA, 23 nt, synthetic construct
  source 1..23: mol_type = other RNA
ttctcgatgagcaatagcaggtt

SEQ ID NO: 1799 - RNA, 23 nt, synthetic construct
  source 1..23: mol_type = other RNA
tgtctcgatgagcaatagcaggt

SEQ ID NO: 1800 - RNA, 23 nt, synthetic construct
  source 1..23: mol_type = other RNA
ttgtctcgatgagcaatagcagg

SEQ ID NO: 1801 - RNA, 23 nt, synthetic construct
  source 1..23: mol_type = other RNA
tatgtctcgatgagcaatagcag

SEQ ID NO: 1802 - RNA, 23 nt, synthetic construct
  source 1..23: mol_type = other RNA
ttatgtctcgatgagcaatagca

SEQ ID NO: 1803 - RNA, 23 nt, synthetic construct
  source 1..23: mol_type = other RNA
tttatgtctcgatgagcaatagc

SEQ ID NO: 1804 - RNA, 23 nt, synthetic construct
  source 1..23: mol_type = other RNA
ttttatgtctcgatgagcaatag

SEQ ID NO: 1805 - RNA, 23 nt, synthetic construct
  source 1..23: mol_type = other RNA
tttttatgtctcgatgagcaata

SEQ ID NO: 1806 - RNA, 23 nt, synthetic construct
  source 1..23: mol_type = other RNA
tattttatgtctcgatgagcaat

SEQ ID NO: 1807 - RNA, 23 nt, synthetic construct
  source 1..23: mol_type = other RNA
tgattttatgtctcgatgagcaa

SEQ ID NO: 1808 - RNA, 23 nt, synthetic construct
  source 1..23: mol_type = other RNA
ttgattttatgtctcgatgagca

SEQ ID NO: 1809 - RNA, 23 nt, synthetic construct
  source 1..23: mol_type = other RNA
tttgattttatgtctcgatgagc

SEQ ID NO: 1810 - RNA, 23 nt, synthetic construct
  source 1..23: mol_type = other RNA
ttttgattttatgtctcgatgag

SEQ ID NO: 1811 - RNA, 23 nt, synthetic construct
  source 1..23: mol_type = other RNA
tctttgattttatgtctcgatga

SEQ ID NO: 1812 - RNA, 23 nt, synthetic construct
  source 1..23: mol_type = other RNA
ttctttgattttatgtctcgatg

SEQ ID NO: 1813 - RNA, 23 nt, synthetic construct
  source 1..23: mol_type = other RNA
tttctttgattttatgtctcgat

SEQ ID NO: 1814 - RNA, 23 nt, synthetic construct
  source 1..23: mol_type = other RNA
tattctttgattttatgtctcga

SEQ ID NO: 1815 - RNA, 23 nt, synthetic construct
  source 1..23: mol_type = other RNA
ttattctttgattttatgtctcg

SEQ ID NO: 1816 - RNA, 23 nt, synthetic construct
  source 1..23: mol_type = other RNA
tcactttttcactaagatattct

SEQ ID NO: 1817 - RNA, 23 nt, synthetic construct
  source 1..23: mol_type = other RNA
tacactttttcactaagatattc

SEQ ID NO: 1818 - RNA, 23 nt, synthetic construct
  source 1..23: mol_type = other RNA
tcacactttttcactaagatatt

SEQ ID NO: 1819 - RNA, 23 nt, synthetic construct
  source 1..23: mol_type = other RNA
ttcacactttttcactaagatat

SEQ ID NO: 1820 - RNA, 23 nt, synthetic construct
  source 1..23: mol_type = other RNA
tttcacactttttcactaagata

SEQ ID NO: 1821 - RNA, 23 nt, synthetic construct
  source 1..23: mol_type = other RNA
ttttcacactttttcactaagat

SEQ ID NO: 1822 - RNA, 23 nt, synthetic construct
  source 1..23: mol_type = other RNA
tgtttcacactttttcactaaga

SEQ ID NO: 1823 - RNA, 23 nt, synthetic construct
  source 1..23: mol_type = other RNA
tagtttcacactttttcactaag

SEQ ID NO: 1824 - RNA, 23 nt, synthetic construct
  source 1..23: mol_type = other RNA
taagtttcacactttttcactaa

SEQ ID NO: 1825 - RNA, 23 nt, synthetic construct
  source 1..23: mol_type = other RNA
tcaagtttcacactttttcacta

SEQ ID NO: 1826 - RNA, 23 nt, synthetic construct
  source 1..23: mol_type = other RNA
tacaagtttcacactttttcact

SEQ ID NO: 1827 - RNA, 23 nt, synthetic construct
  source 1..23: mol_type = other RNA
tcacaagtttcacactttttcac

SEQ ID NO: 1828 - RNA, 23 nt, synthetic construct
  source 1..23: mol_type = other RNA
tgcacaagtttcacactttttca

SEQ ID NO: 1829 - RNA, 23 nt, synthetic construct
  source 1..23: mol_type = other RNA
tggcacaagtttcacactttttc

SEQ ID NO: 1830 - RNA, 23 nt, synthetic construct
  source 1..23: mol_type = other RNA
tatggcacaagtttcacactttt

SEQ ID NO: 1831 - RNA, 23 nt, synthetic construct
  source 1..23: mol_type = other RNA
ttatggcacaagtttcacacttt

SEQ ID NO: 1832 - RNA, 23 nt, synthetic construct
  source 1..23: mol_type = other RNA
tattgaatcatgcttcacagcca

SEQ ID NO: 1833 - RNA, 23 nt, synthetic construct
  source 1..23: mol_type = other RNA
ttattgaatcatgcttcacagcc

SEQ ID NO: 1834 - RNA, 23 nt, synthetic construct
  source 1..23: mol_type = other RNA
tagtattgaatcatgcttcacag

SEQ ID NO: 1835 - RNA, 23 nt, synthetic construct
  source 1..23: mol_type = other RNA
tcagtattgaatcatgcttcaca

SEQ ID NO: 1836 - RNA, 23 nt, synthetic construct
  source 1..23: mol_type = other RNA
ttgttcagtattgaatcatgctt

SEQ ID NO: 1837 - RNA, 23 nt, synthetic construct
  source 1..23: mol_type = other RNA
tagtgttcagtattgaatcatgc

SEQ ID NO: 1838 - RNA, 23 nt, synthetic construct
  source 1..23: mol_type = other RNA
ttagtgttcagtattgaatcatg

SEQ ID NO: 1839 - RNA, 23 nt, synthetic construct
  source 1..23: mol_type = other RNA
tatgtcgatagtgttcagtattg

SEQ ID NO: 1840 - RNA, 23 nt, synthetic construct
  source 1..23: mol_type = other RNA
tgtatgtcgatagtgttcagtat

SEQ ID NO: 1841 - RNA, 23 nt, synthetic construct
  source 1..23: mol_type = other RNA
tactttaggattctgaggtatgt

SEQ ID NO: 1842 - RNA, 23 nt, synthetic construct
  source 1..23: mol_type = other RNA
tagcatttcaggagccatatacc

SEQ ID NO: 1843 - RNA, 23 nt, synthetic construct
  source 1..23: mol_type = other RNA
tatcaagcatttcaggagccata

SEQ ID NO: 1844 - RNA, 23 nt, synthetic construct
  source 1..23: mol_type = other RNA
tcatcaagcatttcaggagccat

SEQ ID NO: 1845 - RNA, 23 nt, synthetic construct
  source 1..23: mol_type = other RNA
ttcatcaagcatttcaggagcca

SEQ ID NO: 1846 - RNA, 23 nt, synthetic construct
  source 1..23: mol_type = other RNA
tatcatcaagcatttcaggagcc

SEQ ID NO: 1847 - RNA, 23 nt, synthetic construct
  source 1..23: mol_type = other RNA
ttatcatcaagcatttcaggagc

SEQ ID NO: 1848 - RNA, 23 nt, synthetic construct
  source 1..23: mol_type = other RNA
tgtatcatcaagcatttcaggag

SEQ ID NO: 1849 - RNA, 23 nt, synthetic construct
  source 1..23: mol_type = other RNA
ttgtatcatcaagcatttcagga

SEQ ID NO: 1850 - RNA, 23 nt, synthetic construct
  source 1..23: mol_type = other RNA
tttgtatcatcaagcatttcagg

SEQ ID NO: 1851 - RNA, 23 nt, synthetic construct
  source 1..23: mol_type = other RNA
tattgtatcatcaagcatttcag

SEQ ID NO: 1852 - RNA, 23 nt, synthetic construct
  source 1..23: mol_type = other RNA
tcattgtatcatcaagcatttca

SEQ ID NO: 1853 - RNA, 23 nt, synthetic construct
  source 1..23: mol_type = other RNA
ttcattgtatcatcaagcatttc

SEQ ID NO: 1854 - RNA, 23 nt, synthetic construct
  source 1..23: mol_type = other RNA
tttcattgtatcatcaagcattt

SEQ ID NO: 1855 - RNA, 23 nt, synthetic construct
  source 1..23: mol_type = other RNA
tattcattgtatcatcaagcatt

SEQ ID NO: 1856 - RNA, 23 nt, synthetic construct
  source 1..23: mol_type = other RNA
tcattcattgtatcatcaagcat

SEQ ID NO: 1857 - RNA, 23 nt, synthetic construct
  source 1..23: mol_type = other RNA
tacattcattgtatcatcaagca

SEQ ID NO: 1858 - RNA, 23 nt, synthetic construct
  source 1..23: mol_type = other RNA
tcacattcattgtatcatcaagc

SEQ ID NO: 1859 - RNA, 23 nt, synthetic construct
  source 1..23: mol_type = other RNA
ttcacattcattgtatcatcaag

SEQ ID NO: 1860 - RNA, 23 nt, synthetic construct
  source 1..23: mol_type = other RNA
tttcacattcattgtatcatcaa

SEQ ID NO: 1861 - RNA, 23 nt, synthetic construct
  source 1..23: mol_type = other RNA
tattcacattcattgtatcatca

SEQ ID NO: 1862 - RNA, 23 nt, synthetic construct
  source 1..23: mol_type = other RNA
ttattcacattcattgtatcatc

SEQ ID NO: 1863 - RNA, 23 nt, synthetic construct
  source 1..23: mol_type = other RNA
tgatattcacattcattgtatca

SEQ ID NO: 1864 - RNA, 23 nt, synthetic construct
  source 1..23: mol_type = other RNA
tagatattcacattcattgtatc

SEQ ID NO: 1865 - RNA, 23 nt, synthetic construct
  source 1..23: mol_type = other RNA
tcaaagatattcacattcattgt

SEQ ID NO: 1866 - RNA, 23 nt, synthetic construct
  source 1..23: mol_type = other RNA
ttcaaagatattcacattcattg

SEQ ID NO: 1867 - RNA, 23 nt, synthetic construct
  source 1..23: mol_type = other RNA
tctcaaagatattcacattcatt

SEQ ID NO: 1868 - RNA, 23 nt, synthetic construct
  source 1..23: mol_type = other RNA
tactcaaagatattcacattcat

SEQ ID NO: 1869 - RNA, 23 nt, synthetic construct
  source 1..23: mol_type = other RNA
tgactcaaagatattcacattca

SEQ ID NO: 1870 - RNA, 23 nt, synthetic construct
  source 1..23: mol_type = other RNA
tggactcaaagatattcacattc

SEQ ID NO: 1871 - RNA, 23 nt, synthetic construct
  source 1..23: mol_type = other RNA
taggactcaaagatattcacatt

SEQ ID NO: 1872 - RNA, 23 nt, synthetic construct
  source 1..23: mol_type = other RNA
taaggactcaaagatattcacat

SEQ ID NO: 1873 - RNA, 23 nt, synthetic construct
  source 1..23: mol_type = other RNA
tgaaggactcaaagatattcaca

SEQ ID NO: 1874 - RNA, 23 nt, synthetic construct
  source 1..23: mol_type = other RNA
ttgaaggactcaaagatattcac

SEQ ID NO: 1875 - RNA, 23 nt, synthetic construct
  source 1..23: mol_type = other RNA
tttgaaggactcaaagatattca

SEQ ID NO: 1876 - RNA, 23 nt, synthetic construct
  source 1..23: mol_type = other RNA
ttttgaaggactcaaagatattc

SEQ ID NO: 1877 - RNA, 23 nt, synthetic construct
  source 1..23: mol_type = other RNA
tgtttgaaggactcaaagatatt

SEQ ID NO: 1878 - RNA, 23 nt, synthetic construct
  source 1..23: mol_type = other RNA
tcgtttgaaggactcaaagatat

SEQ ID NO: 1879 - RNA, 23 nt, synthetic construct
  source 1..23: mol_type = other RNA
ttcgtttgaaggactcaaagata

SEQ ID NO: 1880 - RNA, 23 nt, synthetic construct
  source 1..23: mol_type = other RNA
tctcgtttgaaggactcaaagat

SEQ ID NO: 1881 - RNA, 23 nt, synthetic construct
  source 1..23: mol_type = other RNA
ttagatgtcagctcgtttgaagg

SEQ ID NO: 1882 - RNA, 23 nt, synthetic construct
  source 1..23: mol_type = other RNA
tagaatagatgtcagctcgtttg

SEQ ID NO: 1883 - RNA, 23 nt, synthetic construct
  source 1..23: mol_type = other RNA
tcagaatagatgtcagctcgttt

SEQ ID NO: 1884 - RNA, 23 nt, synthetic construct
  source 1..23: mol_type = other RNA
tacagaatagatgtcagctcgtt

SEQ ID NO: 1885 - RNA, 23 nt, synthetic construct
  source 1..23: mol_type = other RNA
tcaacagaatagatgtcagctcg

SEQ ID NO: 1886 - RNA, 23 nt, synthetic construct
  source 1..23: mol_type = other RNA
tccaacagaatagatgtcagctc

SEQ ID NO: 1887 - RNA, 23 nt, synthetic construct
  source 1..23: mol_type = other RNA
tagaccaacagaatagatgtcag

SEQ ID NO: 1888 - RNA, 23 nt, synthetic construct
  source 1..23: mol_type = other RNA
ttaaaccagaccaacagaataga

SEQ ID NO: 1889 - RNA, 23 nt, synthetic construct
  source 1..23: mol_type = other RNA
ttatttcccagtaaaccagacca

SEQ ID NO: 1890 - RNA, 23 nt, synthetic construct
  source 1..23: mol_type = other RNA
taaggcaattggtactcctcaac

SEQ ID NO: 1891 - RNA, 23 nt, synthetic construct
  source 1..23: mol_type = other RNA
ttaaggcaattggtactcctcaa

SEQ ID NO: 1892 - RNA, 23 nt, synthetic construct
  source 1..23: mol_type = other RNA
tataaggcaattggtactcctca

SEQ ID NO: 1893 - RNA, 23 nt, synthetic construct
  source 1..23: mol_type = other RNA
taataaggcaattggtactcctc

SEQ ID NO: 1894 - RNA, 23 nt, synthetic construct
  source 1..23: mol_type = other RNA
ttaataaggcaattggtactcct

SEQ ID NO: 1895 - RNA, 23 nt, synthetic construct
  source 1..23: mol_type = other RNA
tataataaggcaattggtactcc

SEQ ID NO: 1896 - RNA, 23 nt, synthetic construct
  source 1..23: mol_type = other RNA
tcataataaggcaattggtactc

SEQ ID NO: 1897 - RNA, 23 nt, synthetic construct
  source 1..23: mol_type = other RNA
ttcataataaggcaattggtact

SEQ ID NO: 1898 - RNA, 23 nt, synthetic construct
  source 1..23: mol_type = other RNA
tgtcataataaggcaattggtac

SEQ ID NO: 1899 - RNA, 23 nt, synthetic construct
  source 1..23: mol_type = other RNA
ttgtcataataaggcaattggta

SEQ ID NO: 1900 - RNA, 23 nt, synthetic construct
  source 1..23: mol_type = other RNA
tatgtcataataaggcaattggt

SEQ ID NO: 1901 - RNA, 23 nt, synthetic construct
  source 1..23: mol_type = other RNA
tcatgtcataataaggcaattgg

SEQ ID NO: 1902 - RNA, 23 nt, synthetic construct
  source 1..23: mol_type = other RNA
tccatgtcataataaggcaattg

SEQ ID NO: 1903 - RNA, 23 nt, synthetic construct
  source 1..23: mol_type = other RNA
taccatgtcataataaggcaatt

SEQ ID NO: 1904 - RNA, 23 nt, synthetic construct
  source 1..23: mol_type = other RNA
tcaccatgtcataataaggcaat

SEQ ID NO: 1905 - RNA, 23 nt, synthetic construct
  source 1..23: mol_type = other RNA
tgcaccatgtcataataaggcaa

SEQ ID NO: 1906 - RNA, 23 nt, synthetic construct
  source 1..23: mol_type = other RNA
tggcaccatgtcataataaggca

SEQ ID NO: 1907 - RNA, 23 nt, synthetic construct
  source 1..23: mol_type = other RNA
taggcaccatgtcataataaggc

SEQ ID NO: 1908 - RNA, 23 nt, synthetic construct
  source 1..23: mol_type = other RNA
taaggcaccatgtcataataagg

SEQ ID NO: 1909 - RNA, 23 nt, synthetic construct
  source 1..23: mol_type = other RNA
tgaaggcaccatgtcataataag

SEQ ID NO: 1910 - RNA, 23 nt, synthetic construct
  source 1..23: mol_type = other RNA
ttgaaggcaccatgtcataataa

SEQ ID NO: 1911 - RNA, 23 nt, synthetic construct
  source 1..23: mol_type = other RNA
tacctttctcatttcctctatcg

SEQ ID NO: 1912 - RNA, 23 nt, synthetic construct
  source 1..23: mol_type = other RNA
tacaacctttctcatttcctcta

SEQ ID NO: 1913 - RNA, 23 nt, synthetic construct
  source 1..23: mol_type = other RNA
taacaacctttctcatttcctct

SEQ ID NO: 1914 - RNA, 23 nt, synthetic construct
  source 1..23: mol_type = other RNA
taaacaacctttctcatttcctc

SEQ ID NO: 1915 - RNA, 23 nt, synthetic construct
  source 1..23: mol_type = other RNA
tcaaacaacctttctcatttcct

SEQ ID NO: 1916 - RNA, 23 nt, synthetic construct
  source 1..23: mol_type = other RNA
tacaaacaacctttctcatttcc

SEQ ID NO: 1917 - RNA, 23 nt, synthetic construct
  source 1..23: mol_type = other RNA
tcacaaacaacctttctcatttc

SEQ ID NO: 1918 - RNA, 23 nt, synthetic construct
  source 1..23: mol_type = other RNA
ttcacaaacaacctttctcattt

SEQ ID NO: 1919 - RNA, 23 nt, synthetic construct
  source 1..23: mol_type = other RNA
tgtcacaaacaacctttctcatt

SEQ ID NO: 1920 - RNA, 23 nt, synthetic construct
  source 1..23: mol_type = other RNA
tggtcacaaacaacctttctcat

SEQ ID NO: 1921 - RNA, 23 nt, synthetic construct
  source 1..23: mol_type = other RNA
ttggtcacaaacaacctttctca

SEQ ID NO: 1922 - RNA, 23 nt, synthetic construct
  source 1..23: mol_type = other RNA
tctggtcacaaacaacctttctc

SEQ ID NO: 1923 - RNA, 23 nt, synthetic construct
  source 1..23: mol_type = other RNA
ttctggtcacaaacaacctttct

SEQ ID NO: 1924 - RNA, 23 nt, synthetic construct
  source 1..23: mol_type = other RNA
tttctggtcacaaacaacctttc

SEQ ID NO: 1925 - RNA, 23 nt, synthetic construct
  source 1..23: mol_type = other RNA
tcttctggtcacaaacaaccttt

SEQ ID NO: 1926 - RNA, 23 nt, synthetic construct
  source 1..23: mol_type = other RNA
tacttctggtcacaaacaacctt

SEQ ID NO: 1927 - RNA, 23 nt, synthetic construct
  source 1..23: mol_type = other RNA
taacttctggtcacaaacaacct

SEQ ID NO: 1928 - RNA, 23 nt, synthetic construct
  source 1..23: mol_type = other RNA
taaacttctggtcacaaacaacc

SEQ ID NO: 1929 - RNA, 23 nt, synthetic construct
  source 1..23: mol_type = other RNA
tatacttggtcgaaacttctggt

SEQ ID NO: 1930 - RNA, 23 nt, synthetic construct
  source 1..23: mol_type = other RNA
ttgcttcacaactttgccactgg

SEQ ID NO: 1931 - RNA, 23 nt, synthetic construct
  source 1..23: mol_type = other RNA
tagtgcttcacaactttgccact

SEQ ID NO: 1932 - RNA, 23 nt, synthetic construct
  source 1..23: mol_type = other RNA
tataccaacactcacgcattatt

SEQ ID NO: 1933 - RNA, 23 nt, synthetic construct
  source 1..23: mol_type = other RNA
taatacgaagagcagttaggcgg

SEQ ID NO: 1934 - RNA, 23 nt, synthetic construct
  source 1..23: mol_type = other RNA
ttaatacgaagagcagttaggcg

SEQ ID NO: 1935 - RNA, 23 nt, synthetic construct
  source 1..23: mol_type = other RNA
tttaatacgaagagcagttaggc

SEQ ID NO: 1936 - RNA, 23 nt, synthetic construct
  source 1..23: mol_type = other RNA
tttcttaatacgaagagcagtta

SEQ ID NO: 1937 - RNA, 23 nt, synthetic construct
  source 1..23: mol_type = other RNA
tgtcttcttaatacgaagagcag

SEQ ID NO: 1938 - RNA, 23 nt, synthetic construct
  source 1..23: mol_type = other RNA
tagtcttcttaatacgaagagca

SEQ ID NO: 1939 - RNA, 23 nt, synthetic construct
  source 1..23: mol_type = other RNA
ttgacacaaagttgagatatagt

SEQ ID NO: 1940 - RNA, 23 nt, synthetic construct
  source 1..23: mol_type = other RNA
tttgacacaaagttgagatatag

SEQ ID NO: 1941 - RNA, 23 nt, synthetic construct
  source 1..23: mol_type = other RNA
ttttgacacaaagttgagatata

SEQ ID NO: 1942 - RNA, 23 nt, synthetic construct
  source 1..23: mol_type = other RNA
tttctttgacacaaagttgagat

SEQ ID NO: 1943 - RNA, 23 nt, synthetic construct
  source 1..23: mol_type = other RNA
ttcatcattaggctttgcagtct

SEQ ID NO: 1944 - RNA, 23 nt, synthetic construct
  source 1..23: mol_type = other RNA
tatcatcattaggctttgcagtc

SEQ ID NO: 1945 - RNA, 23 nt, synthetic construct
  source 1..23: mol_type = other RNA
ttatcatcattaggctttgcagt

SEQ ID NO: 1946 - RNA, 23 nt, synthetic construct
  source 1..23: mol_type = other RNA
tttatcatcattaggctttgcag

SEQ ID NO: 1947 - RNA, 23 nt, synthetic construct
  source 1..23: mol_type = other RNA
tattatcatcattaggctttgca

SEQ ID NO: 1948 - RNA, 23 nt, synthetic construct
  source 1..23: mol_type = other RNA
taattatcatcattaggctttgc

SEQ ID NO: 1949 - RNA, 23 nt, synthetic construct
  source 1..23: mol_type = other RNA
ttaattatcatcattaggctttg

SEQ ID NO: 1950 - RNA, 23 nt, synthetic construct
  source 1..23: mol_type = other RNA
tcataattatcatcattaggctt

SEQ ID NO: 1951 - RNA, 23 nt, synthetic construct
  source 1..23: mol_type = other RNA
tacataattatcatcattaggct

SEQ ID NO: 1952 - RNA, 23 nt, synthetic construct
  source 1..23: mol_type = other RNA
taacataattatcatcattaggc

SEQ ID NO: 1953 - RNA, 23 nt, synthetic construct
  source 1..23: mol_type = other RNA
tctatgagagatttctttttaac

SEQ ID NO: 1954 - RNA, 23 nt, synthetic construct
  source 1..23: mol_type = other RNA
tgctatgagagatttctttttaa

SEQ ID NO: 1955 - RNA, 23 nt, synthetic construct
  source 1..23: mol_type = other RNA
taagaaagctatgagagatttct

SEQ ID NO: 1956 - RNA, 23 nt, synthetic construct
  source 1..23: mol_type = other RNA
taaaagaaagctatgagagattt

SEQ ID NO: 1957 - RNA, 23 nt, synthetic construct
  source 1..23: mol_type = other RNA
taatggaaaagaaagctatgaga

SEQ ID NO: 1958 - RNA, 23 nt, synthetic construct
  source 1..23: mol_type = other RNA
taaatggaaaagaaagctatgag

SEQ ID NO: 1959 - RNA, 23 nt, synthetic construct
  source 1..23: mol_type = other RNA
tgcaaaaacattcacataaaggg

SEQ ID NO: 1960 - RNA, 23 nt, synthetic construct
  source 1..23: mol_type = other RNA
taatggcaaaaacattcacataa

SEQ ID NO: 1961 - RNA, 23 nt, synthetic construct
  source 1..23: mol_type = other RNA
taaaatggcaaaaacattcacat

SEQ ID NO: 1962 - RNA, 23 nt, synthetic construct
  source 1..23: mol_type = other RNA
taaaaaatggcaaaaacattcac

SEQ ID NO: 1963 - RNA, 23 nt, synthetic construct
  source 1..23: mol_type = other RNA
taatactgtactgtcttatcttt

SEQ ID NO: 1964 - RNA, 23 nt, synthetic construct
  source 1..23: mol_type = other RNA
tttaaatactgtactgtcttatc

SEQ ID NO: 1965 - RNA, 23 nt, synthetic construct
  source 1..23: mol_type = other RNA
tacttaaatactgtactgtctta

SEQ ID NO: 1966 - RNA, 23 nt, synthetic construct
  source 1..23: mol_type = other RNA
tagagttatcttttcatgctgcc

SEQ ID NO: 1967 - RNA, 23 nt, synthetic construct
  source 1..23: mol_type = other RNA
ttaacatagagattggatgaagt

SEQ ID NO: 1968 - RNA, 23 nt, synthetic construct
  source 1..23: mol_type = other RNA
tgatgagttgaggtgttgctttc

SEQ ID NO: 1969 - RNA, 23 nt, synthetic construct
  source 1..23: mol_type = other RNA
taaagatgagttgaggtgttgct

SEQ ID NO: 1970 - RNA, 23 nt, synthetic construct
  source 1..23: mol_type = other RNA
ttaaaaagatgagttgaggtgtt

SEQ ID NO: 1971 - RNA, 23 nt, synthetic construct
  source 1..23: mol_type = other RNA
taataaaaagatgagttgaggtg

SEQ ID NO: 1972 - RNA, 23 nt, synthetic construct
  source 1..23: mol_type = other RNA
taaataaaaagatgagttgaggt

SEQ ID NO: 1973 - RNA, 23 nt, synthetic construct
  source 1..23: mol_type = other RNA
tgactataacatttttatagagc

SEQ ID NO: 1974 - RNA, 23 nt, synthetic construct
  source 1..23: mol_type = other RNA
tgctcttggttcaagtaaaataa

SEQ ID NO: 1975 - RNA, 23 nt, synthetic construct
  source 1..23: mol_type = other RNA
ttgctcttggttcaagtaaaata

SEQ ID NO: 1976 - RNA, 23 nt, synthetic construct
  source 1..23: mol_type = other RNA
tgtgctcttggttcaagtaaaat

SEQ ID NO: 1977 - RNA, 23 nt, synthetic construct
  source 1..23: mol_type = other RNA
ttgtgctcttggttcaagtaaaa

SEQ ID NO: 1978 - RNA, 23 nt, synthetic construct
  source 1..23: mol_type = other RNA
tatgtgctcttggttcaagtaaa

SEQ ID NO: 1979 - RNA, 23 nt, synthetic construct
  source 1..23: mol_type = other RNA
tcatgtgctcttggttcaagtaa

SEQ ID NO: 1980 - RNA, 23 nt, synthetic construct
  source 1..23: mol_type = other RNA
ttcatgtgctcttggttcaagta

SEQ ID NO: 1981 - RNA, 23 nt, synthetic construct
  source 1..23: mol_type = other RNA
tttcatgtgctcttggttcaagt

SEQ ID NO: 1982 - RNA, 23 nt, synthetic construct
  source 1..23: mol_type = other RNA
tattcatgtgctcttggttcaag

SEQ ID NO: 1983 - RNA, 23 nt, synthetic construct
  source 1..23: mol_type = other RNA
tcattcatgtgctcttggttcaa

SEQ ID NO: 1984 - RNA, 23 nt, synthetic construct
  source 1..23: mol_type = other RNA
ttcattcatgtgctcttggttca

SEQ ID NO: 1985 - RNA, 23 nt, synthetic construct
  source 1..23: mol_type = other RNA
tttcattcatgtgctcttggttc

SEQ ID NO: 1986 - RNA, 23 nt, synthetic construct
  source 1..23: mol_type = other RNA
tgttcattcatgtgctcttggtt

SEQ ID NO: 1987 - RNA, 23 nt, synthetic construct
  source 1..23: mol_type = other RNA
ttgttcattcatgtgctcttggt

SEQ ID NO: 1988 - RNA, 23 nt, synthetic construct
  source 1..23: mol_type = other RNA
tctgttcattcatgtgctcttgg

SEQ ID NO: 1989 - RNA, 23 nt, synthetic construct
  source 1..23: mol_type = other RNA
taatgtttttacatcttttcctg

SEQ ID NO: 1990 - RNA, 23 nt, synthetic construct
  source 1..23: mol_type = other RNA
tgttttcatctcagaaaaaaatg

SEQ ID NO: 1991 - RNA, 23 nt, synthetic construct
  source 1..23: mol_type = other RNA
ttagcatgctctaatttgcatgt

SEQ ID NO: 1992 - RNA, 23 nt, synthetic construct
  source 1..23: mol_type = other RNA
tatagcatgctctaatttgcatg

SEQ ID NO: 1993 - RNA, 23 nt, synthetic construct
  source 1..23: mol_type = other RNA
taagatagcatgctctaatttgc

SEQ ID NO: 1994 - RNA, 23 nt, synthetic construct
  source 1..23: mol_type = other RNA
tacctaaagatagcatgctctaa

SEQ ID NO: 1995 - RNA, 23 nt, synthetic construct
  source 1..23: mol_type = other RNA
tatcacctaaagatagcatgctc

SEQ ID NO: 1996 - RNA, 23 nt, synthetic construct
  source 1..23: mol_type = other RNA
ttagattgcatcacctaaagata

SEQ ID NO: 1997 - RNA, 23 nt, synthetic construct
  source 1..23: mol_type = other RNA
ttttaaaaagtcctgctaactta

SEQ ID NO: 1998 - RNA, 23 nt, synthetic construct
  source 1..23: mol_type = other RNA
tttttaaaaagtcctgctaactt

SEQ ID NO: 1999 - RNA, 23 nt, synthetic construct
  source 1..23: mol_type = other RNA
ttttttaaaaagtcctgctaact

SEQ ID NO: 2000 - RNA, 23 nt, synthetic construct
  source 1..23: mol_type = other RNA
tatttttaaaaagtcctgctaac

SEQ ID NO: 2001 - RNA, 23 nt, synthetic construct
  source 1..23: mol_type = other RNA
tcgatatattaaagtttagagca

SEQ ID NO: 2002 - RNA, 23 nt, synthetic construct
  source 1..23: mol_type = other RNA
ttcgatatattaaagtttagagc

SEQ ID NO: 2003 - RNA, 23 nt, synthetic construct
  source 1..23: mol_type = other RNA
tcgttcgatatattaaagtttag

SEQ ID NO: 2004 - RNA, 23 nt, synthetic construct
  source 1..23: mol_type = other RNA
tcacgttcgatatattaaagttt

SEQ ID NO: 2005 - RNA, 23 nt, synthetic construct
  source 1..23: mol_type = other RNA
ttcacgttcgatatattaaagtt

SEQ ID NO: 2006 - RNA, 23 nt, synthetic construct
  source 1..23: mol_type = other RNA
tctcacgttcgatatattaaagt

SEQ ID NO: 2007 - RNA, 23 nt, synthetic construct
  source 1..23: mol_type = other RNA
ttctcacgttcgatatattaaag

SEQ ID NO: 2008 - RNA, 23 nt, synthetic construct
  source 1..23: mol_type = other RNA
tctctcacgttcgatatattaaa

SEQ ID NO: 2009 - RNA, 23 nt, synthetic construct
  source 1..23: mol_type = other RNA
tactctcacgttcgatatattaa

SEQ ID NO: 2010 - RNA, 23 nt, synthetic construct
  source 1..23: mol_type = other RNA
tcactctcacgttcgatatatta

SEQ ID NO: 2011 - RNA, 23 nt, synthetic construct
  source 1..23: mol_type = other RNA
tccactctcacgttcgatatatt

SEQ ID NO: 2012 - RNA, 23 nt, synthetic construct
  source 1..23: mol_type = other RNA
tagtagtggattatgaagaacag

SEQ ID NO: 2013 - RNA, 23 nt, synthetic construct
  source 1..23: mol_type = other RNA
tggaacaagtttagtggttcagg

SEQ ID NO: 2014 - RNA, 23 nt, synthetic construct
  source 1..23: mol_type = other RNA
taggaacaagtttagtggttcag

SEQ ID NO: 2015 - RNA, 23 nt, synthetic construct
  source 1..23: mol_type = other RNA
taaggaacaagtttagtggttca

SEQ ID NO: 2016 - RNA, 23 nt, synthetic construct
  source 1..23: mol_type = other RNA
taaaggaacaagtttagtggttc

SEQ ID NO: 2017 - RNA, 23 nt, synthetic construct
  source 1..23: mol_type = other RNA
tgaaaggaacaagtttagtggtt

SEQ ID NO: 2018 - RNA, 23 nt, synthetic construct
  source 1..23: mol_type = other RNA
ttgaaaggaacaagtttagtggt

SEQ ID NO: 2019 - RNA, 23 nt, synthetic construct
  source 1..23: mol_type = other RNA
tatgaaaggaacaagtttagtgg

SEQ ID NO: 2020 - RNA, 23 nt, synthetic construct
  source 1..23: mol_type = other RNA
taatgaaaggaacaagtttagtg

SEQ ID NO: 2021 - RNA, 23 nt, synthetic construct
  source 1..23: mol_type = other RNA
taaatgaaaggaacaagtttagt

SEQ ID NO: 2022 - RNA, 23 nt, synthetic construct
  source 1..23: mol_type = other RNA
ttaaatgaaaggaacaagtttag

SEQ ID NO: 2023 - RNA, 23 nt, synthetic construct
  source 1..23: mol_type = other RNA
tgtaaatgaaaggaacaagttta

SEQ ID NO: 2024 - RNA, 23 nt, synthetic construct
  source 1..23: mol_type = other RNA
ttgtaaatgaaaggaacaagttt

SEQ ID NO: 2025 - RNA, 23 nt, synthetic construct
  source 1..23: mol_type = other RNA
tttgtaaatgaaaggaacaagtt

SEQ ID NO: 2026 - RNA, 23 nt, synthetic construct
  source 1..23: mol_type = other RNA
ttttgtaaatgaaaggaacaagt

SEQ ID NO: 2027 - RNA, 23 nt, synthetic construct
  source 1..23: mol_type = other RNA
tttttgtaaatgaaaggaacaag

SEQ ID NO: 2028 - RNA, 23 nt, synthetic construct
  source 1..23: mol_type = other RNA
tcttttgtaaatgaaaggaacaa

SEQ ID NO: 2029 - RNA, 23 nt, synthetic construct
  source 1..23: mol_type = other RNA
ttcttttgtaaatgaaaggaaca

SEQ ID NO: 2030 - RNA, 23 nt, synthetic construct
  source 1..23: mol_type = other RNA
tctcttttgtaaatgaaaggaac

SEQ ID NO: 2031 - RNA, 23 nt, synthetic construct
  source 1..23: mol_type = other RNA
ttctcttttgtaaatgaaaggaa

SEQ ID NO: 2032 - RNA, 23 nt, synthetic construct
  source 1..23: mol_type = other RNA
tatctcttttgtaaatgaaagga

SEQ ID NO: 2033 - RNA, 23 nt, synthetic construct
  source 1..23: mol_type = other RNA
ttatctcttttgtaaatgaaagg

SEQ ID NO: 2034 - RNA, 23 nt, synthetic construct
  source 1..23: mol_type = other RNA
tgtatctcttttgtaaatgaaag

SEQ ID NO: 2035 - RNA, 23 nt, synthetic construct
  source 1..23: mol_type = other RNA
tggtatctcttttgtaaatgaaa

SEQ ID NO: 2036 - RNA, 23 nt, synthetic construct
  source 1..23: mol_type = other RNA
taggtatctcttttgtaaatgaa

SEQ ID NO: 2037 - RNA, 23 nt, synthetic construct
  source 1..23: mol_type = other RNA
tcaggtatctcttttgtaaatga

SEQ ID NO: 2038 - RNA, 23 nt, synthetic construct
  source 1..23: mol_type = other RNA
ttcaggtatctcttttgtaaatg

SEQ ID NO: 2039 - RNA, 23 nt, synthetic construct
  source 1..23: mol_type = other RNA
tgtcaggtatctcttttgtaaat

SEQ ID NO: 2040 - RNA, 23 nt, synthetic construct
  source 1..23: mol_type = other RNA
ttgtcaggtatctcttttgtaaa

SEQ ID NO: 2041 - RNA, 23 nt, synthetic construct
  source 1..23: mol_type = other RNA
tatgtcaggtatctcttttgtaa

SEQ ID NO: 2042 - RNA, 23 nt, synthetic construct
  source 1..23: mol_type = other RNA
tgatgtcaggtatctcttttgta

SEQ ID NO: 2043 - RNA, 23 nt, synthetic construct
  source 1..23: mol_type = other RNA
tggatgtcaggtatctcttttgt

SEQ ID NO: 2044 - RNA, 23 nt, synthetic construct
  source 1..23: mol_type = other RNA
tcatttctcagtgtctcaggatg

SEQ ID NO: 2045 - RNA, 23 nt, synthetic construct
  source 1..23: mol_type = other RNA
tgacatttctcagtgtctcagga

SEQ ID NO: 2046 - RNA, 23 nt, synthetic construct
  source 1..23: mol_type = other RNA
taggacatttctcagtgtctcag

SEQ ID NO: 2047 - RNA, 23 nt, synthetic construct
  source 1..23: mol_type = other RNA
ttgtgacttcaggacatttctca

SEQ ID NO: 2048 - RNA, 23 nt, synthetic construct
  source 1..23: mol_type = other RNA
tattagctgtgtgacttcaggac

SEQ ID NO: 2049 - RNA, 23 nt, synthetic construct
  source 1..23: mol_type = other RNA
ttatcacaagatttggacctagt

SEQ ID NO: 2050 - RNA, 23 nt, synthetic construct
  source 1..23: mol_type = other RNA
tttatcacaagatttggacctag

SEQ ID NO: 2051 - RNA, 23 nt, synthetic construct
  source 1..23: mol_type = other RNA
tcattatcacaagatttggacct

SEQ ID NO: 2052 - RNA, 23 nt, synthetic construct
  source 1..23: mol_type = other RNA
tttcattatcacaagatttggac

SEQ ID NO: 2053 - RNA, 23 nt, synthetic construct
  source 1..23: mol_type = other RNA
ttgttcattatcacaagatttgg

SEQ ID NO: 2054 - RNA, 23 nt, synthetic construct
  source 1..23: mol_type = other RNA
tttacggtgttcattatcacaag

SEQ ID NO: 2055 - RNA, 23 nt, synthetic construct
  source 1..23: mol_type = other RNA
taagtaggaagctagctaacctt

SEQ ID NO: 2056 - RNA, 23 nt, synthetic construct
  source 1..23: mol_type = other RNA
taaagtaggaagctagctaacct

SEQ ID NO: 2057 - RNA, 23 nt, synthetic construct
  source 1..23: mol_type = other RNA
ttcaagggaaagtaggaagctag

SEQ ID NO: 2058 - RNA, 23 nt, synthetic construct
  source 1..23: mol_type = other RNA
tactattcaagggaaagtaggaa

SEQ ID NO: 2059 - RNA, 23 nt, synthetic construct
  source 1..23: mol_type = other RNA
tcactattcaagggaaagtagga

SEQ ID NO: 2060 - RNA, 23 nt, synthetic construct
  source 1..23: mol_type = other RNA
tgaaaagcactattcaagggaaa

SEQ ID NO: 2061 - RNA, 23 nt, synthetic construct
  source 1..23: mol_type = other RNA
tagaaaagcactattcaagggaa

SEQ ID NO: 2062 - RNA, 23 nt, synthetic construct
  source 1..23: mol_type = other RNA
tgagaaaagcactattcaaggga

SEQ ID NO: 2063 - RNA, 23 nt, synthetic construct
  source 1..23: mol_type = other RNA
tggagaaaagcactattcaaggg

SEQ ID NO: 2064 - RNA, 23 nt, synthetic construct
  source 1..23: mol_type = other RNA
tagggagaaaagcactattcaag

SEQ ID NO: 2065 - RNA, 23 nt, synthetic construct
  source 1..23: mol_type = other RNA
ttattacatagggagaaaagcac

SEQ ID NO: 2066 - RNA, 23 nt, synthetic construct
  source 1..23: mol_type = other RNA
taatatgccttctaaaccacaaa

SEQ ID NO: 2067 - RNA, 23 nt, synthetic construct
  source 1..23: mol_type = other RNA
taactcaatatgccttctaaacc

SEQ ID NO: 2068 - RNA, 23 nt, synthetic construct
  source 1..23: mol_type = other RNA
tataactcaatatgccttctaaa

SEQ ID NO: 2069 - RNA, 23 nt, synthetic construct
  source 1..23: mol_type = other RNA
taataactcaatatgccttctaa

SEQ ID NO: 2070 - RNA, 23 nt, synthetic construct
  source 1..23: mol_type = other RNA
tctgcaaaataactcaatatgcc

SEQ ID NO: 2071 - RNA, 23 nt, synthetic construct
  source 1..23: mol_type = other RNA
tcattatgattctgcaaaataac

SEQ ID NO: 2072 - RNA, 23 nt, synthetic construct
  source 1..23: mol_type = other RNA
tccattatgattctgcaaaataa

SEQ ID NO: 2073 - RNA, 23 nt, synthetic construct
  source 1..23: mol_type = other RNA
ttccattatgattctgcaaaata

SEQ ID NO: 2074 - RNA, 23 nt, synthetic construct
  source 1..23: mol_type = other RNA
tgtccattatgattctgcaaaat

SEQ ID NO: 2075 - RNA, 23 nt, synthetic construct
  source 1..23: mol_type = other RNA
tggtccattatgattctgcaaaa

SEQ ID NO: 2076 - RNA, 23 nt, synthetic construct
  source 1..23: mol_type = other RNA
tgggtccattatgattctgcaaa

SEQ ID NO: 2077 - RNA, 23 nt, synthetic construct
  source 1..23: mol_type = other RNA
tcgggtccattatgattctgcaa

SEQ ID NO: 2078 - RNA, 23 nt, synthetic construct
  source 1..23: mol_type = other RNA
tgcgggtccattatgattctgca

SEQ ID NO: 2079 - RNA, 23 nt, synthetic construct
  source 1..23: mol_type = other RNA
ttgcgggtccattatgattctgc

SEQ ID NO: 2080 - RNA, 23 nt, synthetic construct
  source 1..23: mol_type = other RNA
tgtgcgggtccattatgattctg

SEQ ID NO: 2081 - RNA, 23 nt, synthetic construct
  source 1..23: mol_type = other RNA
ttgtgcgggtccattatgattct

SEQ ID NO: 2082 - RNA, 23 nt, synthetic construct
  source 1..23: mol_type = other RNA
tttgtgcgggtccattatgattc

SEQ ID NO: 2083 - RNA, 23 nt, synthetic construct
  source 1..23: mol_type = other RNA
ttttgtgcgggtccattatgatt

SEQ ID NO: 2084 - RNA, 23 nt, synthetic construct
  source 1..23: mol_type = other RNA
tttttgtgcgggtccattatgat

SEQ ID NO: 2085 - RNA, 23 nt, synthetic construct
  source 1..23: mol_type = other RNA
tattttgtgcgggtccattatga

SEQ ID NO: 2086 - RNA, 23 nt, synthetic construct
  source 1..23: mol_type = other RNA
tgattttgtgcgggtccattatg

SEQ ID NO: 2087 - RNA, 23 nt, synthetic construct
  source 1..23: mol_type = other RNA
tagattttgtgcgggtccattat

SEQ ID NO: 2088 - RNA, 23 nt, synthetic construct
  source 1..23: mol_type = other RNA
tgagattttgtgcgggtccatta

SEQ ID NO: 2089 - RNA, 23 nt, synthetic construct
  source 1..23: mol_type = other RNA
ttgagattttgtgcgggtccatt

SEQ ID NO: 2090 - RNA, 23 nt, synthetic construct
  source 1..23: mol_type = other RNA
tctgagattttgtgcgggtccat

SEQ ID NO: 2091 - RNA, 23 nt, synthetic construct
  source 1..23: mol_type = other RNA
ttctgagattttgtgcgggtcca

SEQ ID NO: 2092 - RNA, 23 nt, synthetic construct
  source 1..23: mol_type = other RNA
tttctgagattttgtgcgggtcc

SEQ ID NO: 2093 - RNA, 23 nt, synthetic construct
  source 1..23: mol_type = other RNA
tgttctgagattttgtgcgggtc

SEQ ID NO: 2094 - RNA, 23 nt, synthetic construct
  source 1..23: mol_type = other RNA
tggttctgagattttgtgcgggt

SEQ ID NO: 2095 - RNA, 23 nt, synthetic construct
  source 1..23: mol_type = other RNA
ttggttctgagattttgtgcggg

SEQ ID NO: 2096 - RNA, 23 nt, synthetic construct
  source 1..23: mol_type = other RNA
tatggttctgagattttgtgcgg

SEQ ID NO: 2097 - RNA, 23 nt, synthetic construct
  source 1..23: mol_type = other RNA
ttatggttctgagattttgtgcg

SEQ ID NO: 2098 - RNA, 23 nt, synthetic construct
  source 1..23: mol_type = other RNA
tatatggttctgagattttgtgc

SEQ ID NO: 2099 - RNA, 23 nt, synthetic construct
  source 1..23: mol_type = other RNA
tgatatggttctgagattttgtg

SEQ ID NO: 2100 - RNA, 23 nt, synthetic construct
  source 1..23: mol_type = other RNA
tagatatggttctgagattttgt

SEQ ID NO: 2101 - RNA, 23 nt, synthetic construct
  source 1..23: mol_type = other RNA
tcagatatggttctgagattttg

SEQ ID NO: 2102 - RNA, 23 nt, synthetic construct
  source 1..23: mol_type = other RNA
tacagatatggttctgagatttt

SEQ ID NO: 2103 - RNA, 23 nt, synthetic construct
  source 1..23: mol_type = other RNA
taacagatatggttctgagattt

SEQ ID NO: 2104 - RNA, 23 nt, synthetic construct
  source 1..23: mol_type = other RNA
tcaacagatatggttctgagatt

SEQ ID NO: 2105 - RNA, 23 nt, synthetic construct
  source 1..23: mol_type = other RNA
ttcaacagatatggttctgagat

SEQ ID NO: 2106 - RNA, 23 nt, synthetic construct
  source 1..23: mol_type = other RNA
tgtcaacagatatggttctgaga

SEQ ID NO: 2107 - RNA, 23 nt, synthetic construct
  source 1..23: mol_type = other RNA
ttgtcaacagatatggttctgag

SEQ ID NO: 2108 - RNA, 23 nt, synthetic construct
  source 1..23: mol_type = other RNA
tatgtcaacagatatggttctga

SEQ ID NO: 2109 - RNA, 23 nt, synthetic construct
  source 1..23: mol_type = other RNA
taatgtcaacagatatggttctg

SEQ ID NO: 2110 - RNA, 23 nt, synthetic construct
  source 1..23: mol_type = other RNA
taaatgtcaacagatatggttct

SEQ ID NO: 2111 - RNA, 23 nt, synthetic construct
  source 1..23: mol_type = other RNA
taaaatgtcaacagatatggttc

SEQ ID NO: 2112 - RNA, 23 nt, synthetic construct
  source 1..23: mol_type = other RNA
taaaaatgtcaacagatatggtt

SEQ ID NO: 2113 - RNA, 23 nt, synthetic construct
  source 1..23: mol_type = other RNA
taaaaaatgtcaacagatatggt

SEQ ID NO: 2114 - RNA, 23 nt, synthetic construct
  source 1..23: mol_type = other RNA
tgaaaaaatgtcaacagatatgg

SEQ ID NO: 2115 - RNA, 23 nt, synthetic construct
  source 1..23: mol_type = other RNA
tagaaaaaatgtcaacagatatg

SEQ ID NO: 2116 - RNA, 23 nt, synthetic construct
  source 1..23: mol_type = other RNA
tgagaaaaaatgtcaacagatat

SEQ ID NO: 2117 - RNA, 23 nt, synthetic construct
  source 1..23: mol_type = other RNA
ttgagaaaaaatgtcaacagata

SEQ ID NO: 2118 - RNA, 23 nt, synthetic construct
  source 1..23: mol_type = other RNA
tatgagaaaaaatgtcaacagat

SEQ ID NO: 2119 - RNA, 23 nt, synthetic construct
  source 1..23: mol_type = other RNA
ttatgagaaaaaatgtcaacaga

SEQ ID NO: 2120 - RNA, 23 nt, synthetic construct
  source 1..23: mol_type = other RNA
tctatgagaaaaaatgtcaacag

SEQ ID NO: 2121 - RNA, 23 nt, synthetic construct
  source 1..23: mol_type = other RNA
ttctatgagaaaaaatgtcaaca

SEQ ID NO: 2122 - RNA, 23 nt, synthetic construct
  source 1..23: mol_type = other RNA
tttctatgagaaaaaatgtcaac

SEQ ID NO: 2123 - RNA, 23 nt, synthetic construct
  source 1..23: mol_type = other RNA
taccatgatatttctatgagaaa

SEQ ID NO: 2124 - RNA, 23 nt, synthetic construct
  source 1..23: mol_type = other RNA
taaccatgatatttctatgagaa

SEQ ID NO: 2125 - RNA, 23 nt, synthetic construct
  source 1..23: mol_type = other RNA
ttaaccatgatatttctatgaga

SEQ ID NO: 2126 - RNA, 23 nt, synthetic construct
  source 1..23: mol_type = other RNA
tttaatgctcattaacaaatggg

SEQ ID NO: 2127 - RNA, 23 nt, synthetic construct
  source 1..23: mol_type = other RNA
tcattaatgctcattaacaaatg

SEQ ID NO: 2128 - RNA, 23 nt, synthetic construct
  source 1..23: mol_type = other RNA
tgaaaacattaatgctcattaac

SEQ ID NO: 2129 - RNA, 23 nt, synthetic construct
  source 1..23: mol_type = other RNA
tcagaaaacattaatgctcatta

SEQ ID NO: 2130 - RNA, 23 nt, synthetic construct
  source 1..23: mol_type = other RNA
ttcagaaaacattaatgctcatt

SEQ ID NO: 2131 - RNA, 23 nt, synthetic construct
  source 1..23: mol_type = other RNA
tttcagaaaacattaatgctcat

SEQ ID NO: 2132 - RNA, 23 nt, synthetic construct
  source 1..23: mol_type = other RNA
tgttcagaaaacattaatgctca

SEQ ID NO: 2133 - RNA, 23 nt, synthetic construct
  source 1..23: mol_type = other RNA
ttgttcagaaaacattaatgctc

SEQ ID NO: 2134 - RNA, 23 nt, synthetic construct
  source 1..23: mol_type = other RNA
tgtgttcagaaaacattaatgct

SEQ ID NO: 2135 - RNA, 23 nt, synthetic construct
  source 1..23: mol_type = other RNA
tagtgttcagaaaacattaatgc

SEQ ID NO: 2136 - RNA, 23 nt, synthetic construct
  source 1..23: mol_type = other RNA
taagtgttcagaaaacattaatg

SEQ ID NO: 2137 - RNA, 23 nt, synthetic construct
  source 1..23: mol_type = other RNA
taatctttggaagtgttcagaaa

SEQ ID NO: 2138 - RNA, 23 nt, synthetic construct
  source 1..23: mol_type = other RNA
ttaatctttggaagtgttcagaa

SEQ ID NO: 2139 - RNA, 23 nt, synthetic construct
  source 1..23: mol_type = other RNA
tttaatctttggaagtgttcaga

SEQ ID NO: 2140 - RNA, 23 nt, synthetic construct
  source 1..23: mol_type = other RNA
tattaatctttggaagtgttcag

SEQ ID NO: 2141 - RNA, 23 nt, synthetic construct
  source 1..23: mol_type = other RNA
tgattaatctttggaagtgttca

SEQ ID NO: 2142 - RNA, 23 nt, synthetic construct
  source 1..23: mol_type = other RNA
ttgattaatctttggaagtgttc

SEQ ID NO: 2143 - RNA, 23 nt, synthetic construct
  source 1..23: mol_type = other RNA
tttgattaatctttggaagtgtt

SEQ ID NO: 2144 - RNA, 23 nt, synthetic construct
  source 1..23: mol_type = other RNA
ttttgattaatctttggaagtgt

SEQ ID NO: 2145 - RNA, 23 nt, synthetic construct
  source 1..23: mol_type = other RNA
tgtttgattaatctttggaagtg

SEQ ID NO: 2146 - RNA, 23 nt, synthetic construct
  source 1..23: mol_type = other RNA
ttgtttgattaatctttggaagt

SEQ ID NO: 2147 - RNA, 23 nt, synthetic construct
  source 1..23: mol_type = other RNA
tatgtttgattaatctttggaag

SEQ ID NO: 2148 - RNA, 23 nt, synthetic construct
  source 1..23: mol_type = other RNA
tgacattttcagacaatgaatat

SEQ ID NO: 2149 - RNA, 23 nt, synthetic construct
  source 1..23: mol_type = other RNA
taaagacattttcagacaatgaa

SEQ ID NO: 2150 - RNA, 23 nt, synthetic construct
  source 1..23: mol_type = other RNA
ttaaagacattttcagacaatga

SEQ ID NO: 2151 - RNA, 23 nt, synthetic construct
  source 1..23: mol_type = other RNA
tttaaagacattttcagacaatg

SEQ ID NO: 2152 - RNA, 23 nt, synthetic construct
  source 1..23: mol_type = other RNA
ttcttaaagacattttcagacaa

SEQ ID NO: 2153 - RNA, 23 nt, synthetic construct
  source 1..23: mol_type = other RNA
ttatcttaaagacattttcagac

SEQ ID NO: 2154 - RNA, 23 nt, synthetic construct
  source 1..23: mol_type = other RNA
ttacaaaggaaatagggacctct

SEQ ID NO: 2155 - RNA, 23 nt, synthetic construct
  source 1..23: mol_type = other RNA
tgtacaaaggaaatagggacctc

SEQ ID NO: 2156 - RNA, 23 nt, synthetic construct
  source 1..23: mol_type = other RNA
ttgtacaaaggaaatagggacct

SEQ ID NO: 2157 - RNA, 23 nt, synthetic construct
  source 1..23: mol_type = other RNA
tatgtacaaaggaaatagggacc

SEQ ID NO: 2158 - RNA, 23 nt, synthetic construct
  source 1..23: mol_type = other RNA
ttatgtacaaaggaaatagggac

SEQ ID NO: 2159 - RNA, 23 nt, synthetic construct
  source 1..23: mol_type = other RNA
tgtatgtacaaaggaaataggga

SEQ ID NO: 2160 - RNA, 23 nt, synthetic construct
  source 1..23: mol_type = other RNA
ttgtatgtacaaaggaaataggg

SEQ ID NO: 2161 - RNA, 23 nt, synthetic construct
  source 1..23: mol_type = other RNA
tgtgtatgtacaaaggaaatagg

SEQ ID NO: 2162 - RNA, 23 nt, synthetic construct
  source 1..23: mol_type = other RNA
tctgtcttttctttctaagtgtg

SEQ ID NO: 2163 - RNA, 23 nt, synthetic construct
  source 1..23: mol_type = other RNA
ttctgtcttttctttctaagtgt

SEQ ID NO: 2164 - RNA, 23 nt, synthetic construct
  source 1..23: mol_type = other RNA
tttctgtcttttctttctaagtg

SEQ ID NO: 2165 - RNA, 23 nt, synthetic construct
  source 1..23: mol_type = other RNA
ttttctgtcttttctttctaagt

SEQ ID NO: 2166 - RNA, 23 nt, synthetic construct
  source 1..23: mol_type = other RNA
tttttctgtcttttctttctaag

SEQ ID NO: 2167 - RNA, 23 nt, synthetic construct
  source 1..23: mol_type = other RNA
taaatatttccttccttcctctt

SEQ ID NO: 2168 - RNA, 23 nt, synthetic construct
  source 1..23: mol_type = other RNA
taaaatatttccttccttcctct

SEQ ID NO: 2169 - RNA, 23 nt, synthetic construct
  source 1..23: mol_type = other RNA
tttctcaaaatatttccttcctt

SEQ ID NO: 2170 - RNA, 23 nt, synthetic construct
  source 1..23: mol_type = other RNA
taagagttttcttaattcttctc

SEQ ID NO: 2171 - RNA, 23 nt, synthetic construct
  source 1..23: mol_type = other RNA
taacacttcattgaagagttttc

SEQ ID NO: 2172 - RNA, 23 nt, synthetic construct
  source 1..23: mol_type = other RNA
tttgttaacacttcattgaagag

SEQ ID NO: 2173 - RNA, 23 nt, synthetic construct
  source 1..23: mol_type = other RNA
tttggttgttaacacttcattga

SEQ ID NO: 2174 - RNA, 23 nt, synthetic construct
  source 1..23: mol_type = other RNA
ttttggttgttaacacttcattg

SEQ ID NO: 2175 - RNA, 23 nt, synthetic construct
  source 1..23: mol_type = other RNA
ttgtttctgataccgtctgtagg

SEQ ID NO: 2176 - RNA, 23 nt, synthetic construct
  source 1..23: mol_type = other RNA
tatttgctgtttctgataccgtc

SEQ ID NO: 2177 - RNA, 23 nt, synthetic construct
  source 1..23: mol_type = other RNA
tatctatttgctgtttctgatac

SEQ ID NO: 2178 - RNA, 23 nt, synthetic construct
  source 1..23: mol_type = other RNA
tatatctatttgctgtttctgat

SEQ ID NO: 2179 - RNA, 23 nt, synthetic construct
  source 1..23: mol_type = other RNA
taatatctatttgctgtttctga

SEQ ID NO: 2180 - RNA, 23 nt, synthetic construct
  source 1..23: mol_type = other RNA
tgaatatctatttgctgtttctg

SEQ ID NO: 2181 - RNA, 23 nt, synthetic construct
  source 1..23: mol_type = other RNA
taggaatatctatttgctgtttc

SEQ ID NO: 2182 - RNA, 23 nt, synthetic construct
  source 1..23: mol_type = other RNA
tagaggaatatctatttgctgtt

SEQ ID NO: 2183 - RNA, 23 nt, synthetic construct
  source 1..23: mol_type = other RNA
ttagaggaatatctatttgctgt

SEQ ID NO: 2184 - RNA, 23 nt, synthetic construct
  source 1..23: mol_type = other RNA
tggtagaggaatatctatttgct

SEQ ID NO: 2185 - RNA, 23 nt, synthetic construct
  source 1..23: mol_type = other RNA
ttgagcattcttctgtactcact

SEQ ID NO: 2186 - RNA, 23 nt, synthetic construct
  source 1..23: mol_type = other RNA
ttcatgagcattcttctgtactc

SEQ ID NO: 2187 - RNA, 23 nt, synthetic construct
  source 1..23: mol_type = other RNA
tatcatgagcattcttctgtact

SEQ ID NO: 2188 - RNA, 23 nt, synthetic construct
  source 1..23: mol_type = other RNA
ttatcatgagcattcttctgtac

SEQ ID NO: 2189 - RNA, 23 nt, synthetic construct
  source 1..23: mol_type = other RNA
taaactatcatgagcattcttct

SEQ ID NO: 2190 - RNA, 23 nt, synthetic construct
  source 1..23: mol_type = other RNA
taaaactatcatgagcattcttc

SEQ ID NO: 2191 - RNA, 23 nt, synthetic construct
  source 1..23: mol_type = other RNA
tgcaaaactatcatgagcattct

SEQ ID NO: 2192 - RNA, 23 nt, synthetic construct
  source 1..23: mol_type = other RNA
taaggcaaaactatcatgagcat

SEQ ID NO: 2193 - RNA, 23 nt, synthetic construct
  source 1..23: mol_type = other RNA
ttgaaggcaaaactatcatgagc

SEQ ID NO: 2194 - RNA, 23 nt, synthetic construct
  source 1..23: mol_type = other RNA
taatgaaggcaaaactatcatga

SEQ ID NO: 2195 - RNA, 23 nt, synthetic construct
  source 1..23: mol_type = other RNA
tgaatgaaggcaaaactatcatg

SEQ ID NO: 2196 - RNA, 23 nt, synthetic construct
  source 1..23: mol_type = other RNA
ttagaatgaaggcaaaactatca

SEQ ID NO: 2197 - RNA, 23 nt, synthetic construct
  source 1..23: mol_type = other RNA
ttattcattactctgtgtccaca

SEQ ID NO: 2198 - RNA, 23 nt, synthetic construct
  source 1..23: mol_type = other RNA
taaatattcattactctgtgtcc

SEQ ID NO: 2199 - RNA, 23 nt, synthetic construct
  source 1..23: mol_type = other RNA
tcccattaaatattcattactct

SEQ ID NO: 2200 - RNA, 23 nt, synthetic construct
  source 1..23: mol_type = other RNA
tggcatatttaatgtcccattaa

SEQ ID NO: 2201 - RNA, 23 nt, synthetic construct
  source 1..23: mol_type = other RNA
tgggcatatttaatgtcccatta

SEQ ID NO: 2202 - RNA, 23 nt, synthetic construct
  source 1..23: mol_type = other RNA
tagggcatatttaatgtcccatt

SEQ ID NO: 2203 - RNA, 23 nt, synthetic construct
  source 1..23: mol_type = other RNA
taagggcatatttaatgtcccat

SEQ ID NO: 2204 - RNA, 23 nt, synthetic construct
  source 1..23: mol_type = other RNA
tgaagggcatatttaatgtccca

SEQ ID NO: 2205 - RNA, 23 nt, synthetic construct
  source 1..23: mol_type = other RNA
ttgaagggcatatttaatgtccc

SEQ ID NO: 2206 - RNA, 23 nt, synthetic construct
  source 1..23: mol_type = other RNA
tttgaagggcatatttaatgtcc

SEQ ID NO: 2207 - RNA, 23 nt, synthetic construct
  source 1..23: mol_type = other RNA
ttttgaagggcatatttaatgtc

SEQ ID NO: 2208 - RNA, 23 nt, synthetic construct
  source 1..23: mol_type = other RNA
tatttgaagggcatatttaatgt

SEQ ID NO: 2209 - RNA, 23 nt, synthetic construct
  source 1..23: mol_type = other RNA
tgatttgaagggcatatttaatg

SEQ ID NO: 2210 - RNA, 23 nt, synthetic construct
  source 1..23: mol_type = other RNA
tagatttgaagggcatatttaat

SEQ ID NO: 2211 - RNA, 23 nt, synthetic construct
  source 1..23: mol_type = other RNA
taaattatagatttgaagggcat

SEQ ID NO: 2212 - RNA, 23 nt, synthetic construct
  source 1..23: mol_type = other RNA
taaaattatagatttgaagggca

SEQ ID NO: 2213 - RNA, 23 nt, synthetic construct
  source 1..23: mol_type = other RNA
tctcgtttaccaaagtaaaatta

SEQ ID NO: 2214 - RNA, 23 nt, synthetic construct
  source 1..23: mol_type = other RNA
ttctcgtttaccaaagtaaaatt

SEQ ID NO: 2215 - RNA, 23 nt, synthetic construct
  source 1..23: mol_type = other RNA
tatctcgtttaccaaagtaaaat

SEQ ID NO: 2216 - RNA, 23 nt, synthetic construct
  source 1..23: mol_type = other RNA
taatctcgtttaccaaagtaaaa

SEQ ID NO: 2217 - RNA, 23 nt, synthetic construct
  source 1..23: mol_type = other RNA
taaatctcgtttaccaaagtaaa

SEQ ID NO: 2218 - RNA, 23 nt, synthetic construct
  source 1..23: mol_type = other RNA
tttaaatctcgtttaccaaagta

SEQ ID NO: 2219 - RNA, 23 nt, synthetic construct
  source 1..23: mol_type = other RNA
ttgttaaatctcgtttaccaaag

SEQ ID NO: 2220 - RNA, 23 nt, synthetic construct
  source 1..23: mol_type = other RNA
tcatgttaaatctcgtttaccaa

SEQ ID NO: 2221 - RNA, 23 nt, synthetic construct
  source 1..23: mol_type = other RNA
taagacatcatgttaaatctcgt

SEQ ID NO: 2222 - RNA, 23 nt, synthetic construct
  source 1..23: mol_type = other RNA
tgttttaggagcataaaagacat

SEQ ID NO: 2223 - RNA, 23 nt, synthetic construct
  source 1..23: mol_type = other RNA
tgaatggagtttgaaaaaagatg

SEQ ID NO: 2224 - RNA, 23 nt, synthetic construct
  source 1..23: mol_type = other RNA
tggaatggagtttgaaaaaagat

SEQ ID NO: 2225 - RNA, 23 nt, synthetic construct
  source 1..23: mol_type = other RNA
taggaatggagtttgaaaaaaga

SEQ ID NO: 2226 - RNA, 23 nt, synthetic construct
  source 1..23: mol_type = other RNA
ttaaggaatggagtttgaaaaaa

SEQ ID NO: 2227 - RNA, 23 nt, synthetic construct
  source 1..23: mol_type = other RNA
tctaaggaatggagtttgaaaaa

SEQ ID NO: 2228 - RNA, 23 nt, synthetic construct
  source 1..23: mol_type = other RNA
tttctaaggaatggagtttgaaa

SEQ ID NO: 2229 - RNA, 23 nt, synthetic construct
  source 1..23: mol_type = other RNA
tgttctaaggaatggagtttgaa

SEQ ID NO: 2230 - RNA, 23 nt, synthetic construct
  source 1..23: mol_type = other RNA
ttgttctaaggaatggagtttga

SEQ ID NO: 2231 - RNA, 23 nt, synthetic construct
  source 1..23: mol_type = other RNA
tatgttctaaggaatggagtttg

SEQ ID NO: 2232 - RNA, 23 nt, synthetic construct
  source 1..23: mol_type = other RNA
taatgttctaaggaatggagttt

SEQ ID NO: 2233 - RNA, 23 nt, synthetic construct
  source 1..23: mol_type = other RNA
tgaatgttctaaggaatggagtt

SEQ ID NO: 2234 - RNA, 23 nt, synthetic construct
  source 1..23: mol_type = other RNA
tagaatgttctaaggaatggagt

SEQ ID NO: 2235 - RNA, 23 nt, synthetic construct
  source 1..23: mol_type = other RNA
taagaatgttctaaggaatggag

SEQ ID NO: 2236 - RNA, 23 nt, synthetic construct
  source 1..23: mol_type = other RNA
tgaagaatgttctaaggaatgga

SEQ ID NO: 2237 - RNA, 23 nt, synthetic construct
  source 1..23: mol_type = other RNA
tagaagaatgttctaaggaatgg

SEQ ID NO: 2238 - RNA, 23 nt, synthetic construct
  source 1..23: mol_type = other RNA
ttagaagaatgttctaaggaatg

SEQ ID NO: 2239 - RNA, 23 nt, synthetic construct
  source 1..23: mol_type = other RNA
tgtagaagaatgttctaaggaat

SEQ ID NO: 2240 - RNA, 23 nt, synthetic construct
  source 1..23: mol_type = other RNA
tagtagaagaatgttctaaggaa

SEQ ID NO: 2241 - RNA, 23 nt, synthetic construct
  source 1..23: mol_type = other RNA
tcagtagaagaatgttctaagga

SEQ ID NO: 2242 - RNA, 23 nt, synthetic construct
  source 1..23: mol_type = other RNA
ttcagtagaagaatgttctaagg

SEQ ID NO: 2243 - RNA, 23 nt, synthetic construct
  source 1..23: mol_type = other RNA
tctcagtagaagaatgttctaag

SEQ ID NO: 2244 - RNA, 23 nt, synthetic construct
  source 1..23: mol_type = other RNA
ttctcagtagaagaatgttctaa

SEQ ID NO: 2245 - RNA, 23 nt, synthetic construct
  source 1..23: mol_type = other RNA
tatctcagtagaagaatgttcta

SEQ ID NO: 2246 - RNA, 23 nt, synthetic construct
  source 1..23: mol_type = other RNA
tatcatctcagtagaagaatgtt

SEQ ID NO: 2247 - RNA, 23 nt, synthetic construct
  source 1..23: mol_type = other RNA
tgatcatctcagtagaagaatgt

SEQ ID NO: 2248 - RNA, 23 nt, synthetic construct
  source 1..23: mol_type = other RNA
tggatcatctcagtagaagaatg

SEQ ID NO: 2249 - RNA, 23 nt, synthetic construct
  source 1..23: mol_type = other RNA
ttggatcatctcagtagaagaat

SEQ ID NO: 2250 - RNA, 23 nt, synthetic construct
  source 1..23: mol_type = other RNA
tttggatcatctcagtagaagaa

SEQ ID NO: 2251 - RNA, 23 nt, synthetic construct
  source 1..23: mol_type = other RNA
tcttggatcatctcagtagaaga

SEQ ID NO: 2252 - RNA, 23 nt, synthetic construct
  source 1..23: mol_type = other RNA
ttcttggatcatctcagtagaag

SEQ ID NO: 2253 - RNA, 23 nt, synthetic construct
  source 1..23: mol_type = other RNA
tgtcttggatcatctcagtagaa

SEQ ID NO: 2254 - RNA, 23 nt, synthetic construct
  source 1..23: mol_type = other RNA
tggtcttggatcatctcagtaga

SEQ ID NO: 2255 - RNA, 23 nt, synthetic construct
  source 1..23: mol_type = other RNA
ttggtcttggatcatctcagtag

SEQ ID NO: 2256 - RNA, 23 nt, synthetic construct
  source 1..23: mol_type = other RNA
tttggtcttggatcatctcagta

SEQ ID NO: 2257 - RNA, 23 nt, synthetic construct
  source 1..23: mol_type = other RNA
taagaacacttttggtcttggat

SEQ ID NO: 2258 - RNA, 23 nt, synthetic construct
  source 1..23: mol_type = other RNA
taaagaacacttttggtcttgga

SEQ ID NO: 2259 - RNA, 23 nt, synthetic construct
  source 1..23: mol_type = other RNA
tcaaagaacacttttggtcttgg

SEQ ID NO: 2260 - RNA, 23 nt, synthetic construct
  source 1..23: mol_type = other RNA
tccaaagaacacttttggtcttg

SEQ ID NO: 2261 - RNA, 23 nt, synthetic construct
  source 1..23: mol_type = other RNA
taccaaagaacacttttggtctt

SEQ ID NO: 2262 - RNA, 23 nt, synthetic construct
  source 1..23: mol_type = other RNA
ttaccaaagaacacttttggtct

SEQ ID NO: 2263 - RNA, 23 nt, synthetic construct
  source 1..23: mol_type = other RNA
tgtaccaaagaacacttttggtc

SEQ ID NO: 2264 - RNA, 23 nt, synthetic construct
  source 1..23: mol_type = other RNA
tagtaccaaagaacacttttggt

SEQ ID NO: 2265 - RNA, 23 nt, synthetic construct
  source 1..23: mol_type = other RNA
taagtaccaaagaacacttttgg

SEQ ID NO: 2266 - RNA, 23 nt, synthetic construct
  source 1..23: mol_type = other RNA
tcaagtaccaaagaacacttttg

SEQ ID NO: 2267 - RNA, 23 nt, synthetic construct
  source 1..23: mol_type = other RNA
tgcaagtaccaaagaacactttt

SEQ ID NO: 2268 - RNA, 23 nt, synthetic construct
  source 1..23: mol_type = other RNA
tttataagcaagtaccaaagaac

SEQ ID NO: 2269 - RNA, 23 nt, synthetic construct
  source 1..23: mol_type = other RNA
ttttataagcaagtaccaaagaa

SEQ ID NO: 2270 - RNA, 23 nt, synthetic construct
  source 1..23: mol_type = other RNA
tactttataagcaagtaccaaag

SEQ ID NO: 2271 - RNA, 23 nt, synthetic construct
  source 1..23: mol_type = other RNA
tcactttataagcaagtaccaaa

SEQ ID NO: 2272 - RNA, 23 nt, synthetic construct
  source 1..23: mol_type = other RNA
ttatcactttataagcaagtacc

SEQ ID NO: 2273 - RNA, 23 nt, synthetic construct
  source 1..23: mol_type = other RNA
ttactatcactttataagcaagt

SEQ ID NO: 2274 - RNA, 23 nt, synthetic construct
  source 1..23: mol_type = other RNA
tatgtactatcactttataagca

SEQ ID NO: 2275 - RNA, 23 nt, synthetic construct
  source 1..23: mol_type = other RNA
tcatgtactatcactttataagc

SEQ ID NO: 2276 - RNA, 23 nt, synthetic construct
  source 1..23: mol_type = other RNA
tacatgtactatcactttataag

SEQ ID NO: 2277 - RNA, 23 nt, synthetic construct
  source 1..23: mol_type = other RNA
tctaacatgtactatcactttat

SEQ ID NO: 2278 - RNA, 23 nt, synthetic construct
  source 1..23: mol_type = other RNA
tgctaacatgtactatcacttta

SEQ ID NO: 2279 - RNA, 23 nt, synthetic construct
  source 1..23: mol_type = other RNA
ttgctaacatgtactatcacttt

SEQ ID NO: 2280 - RNA, 23 nt, synthetic construct
  source 1..23: mol_type = other RNA
tatgctaacatgtactatcactt

SEQ ID NO: 2281 - RNA, 23 nt, synthetic construct
  source 1..23: mol_type = other RNA
ttatgctaacatgtactatcact

SEQ ID NO: 2282 - RNA, 23 nt, synthetic construct
  source 1..23: mol_type = other RNA
tatatgctaacatgtactatcac

SEQ ID NO: 2283 - RNA, 23 nt, synthetic construct
  source 1..23: mol_type = other RNA
ttatatgctaacatgtactatca

SEQ ID NO: 2284 - RNA, 23 nt, synthetic construct
  source 1..23: mol_type = other RNA
tttatatgctaacatgtactatc

SEQ ID NO: 2285 - RNA, 23 nt, synthetic construct
  source 1..23: mol_type = other RNA
tcattatatgctaacatgtacta

SEQ ID NO: 2286 - RNA, 23 nt, synthetic construct
  source 1..23: mol_type = other RNA
tacattatatgctaacatgtact

SEQ ID NO: 2287 - RNA, 23 nt, synthetic construct
  source 1..23: mol_type = other RNA
ttacattatatgctaacatgtac

SEQ ID NO: 2288 - RNA, 23 nt, synthetic construct
  source 1..23: mol_type = other RNA
tctcttcaaaatacattatatgc

SEQ ID NO: 2289 - RNA, 23 nt, synthetic construct
  source 1..23: mol_type = other RNA
ttttacttcactcttcaaaatac

SEQ ID NO: 2290 - RNA, 23 nt, synthetic construct
  source 1..23: mol_type = other RNA
tcatttacttcactcttcaaaat

SEQ ID NO: 2291 - RNA, 23 nt, synthetic construct
  source 1..23: mol_type = other RNA
tgcatttacttcactcttcaaaa

SEQ ID NO: 2292 - RNA, 23 nt, synthetic construct
  source 1..23: mol_type = other RNA
tagcatttacttcactcttcaaa

SEQ ID NO: 2293 - RNA, 23 nt, synthetic construct
  source 1..23: mol_type = other RNA
ttagcatttacttcactcttcaa

SEQ ID NO: 2294 - RNA, 23 nt, synthetic construct
  source 1..23: mol_type = other RNA
tatagcatttacttcactcttca

SEQ ID NO: 2295 - RNA, 23 nt, synthetic construct
  source 1..23: mol_type = other RNA
taatagcatttacttcactcttc

SEQ ID NO: 2296 - RNA, 23 nt, synthetic construct
  source 1..23: mol_type = other RNA
tcaatagcatttacttcactctt

SEQ ID NO: 2297 - RNA, 23 nt, synthetic construct
  source 1..23: mol_type = other RNA
ttcaatagcatttacttcactct

SEQ ID NO: 2298 - RNA, 23 nt, synthetic construct
  source 1..23: mol_type = other RNA
tatcaatagcatttacttcactc

SEQ ID NO: 2299 - RNA, 23 nt, synthetic construct
  source 1..23: mol_type = other RNA
ttatcaatagcatttacttcact

SEQ ID NO: 2300 - RNA, 23 nt, synthetic construct
  source 1..23: mol_type = other RNA
tttatcaatagcatttacttcac

SEQ ID NO: 2301 - RNA, 23 nt, synthetic construct
  source 1..23: mol_type = other RNA
tgcatttctttactgttattagt

SEQ ID NO: 2302 - RNA, 23 nt, synthetic construct
  source 1..23: mol_type = other RNA
tagcatttctttactgttattag

SEQ ID NO: 2303 - RNA, 23 nt, synthetic construct
  source 1..23: mol_type = other RNA
tgtagcatttctttactgttatt

SEQ ID NO: 2304 - RNA, 23 nt, synthetic construct
  source 1..23: mol_type = other RNA
tagtagcatttctttactgttat

SEQ ID NO: 2305 - RNA, 23 nt, synthetic construct
  source 1..23: mol_type = other RNA
taagtagcatttctttactgtta

SEQ ID NO: 2306 - RNA, 23 nt, synthetic construct
  source 1..23: mol_type = other RNA
tcaagtagcatttctttactgtt

SEQ ID NO: 2307 - RNA, 23 nt, synthetic construct
  source 1..23: mol_type = other RNA
ttcaagtagcatttctttactgt

SEQ ID NO: 2308 - RNA, 23 nt, synthetic construct
  source 1..23: mol_type = other RNA
tatcaagtagcatttctttactg

SEQ ID NO: 2309 - RNA, 23 nt, synthetic construct
  source 1..23: mol_type = other RNA
taatcaagtagcatttctttact

SEQ ID NO: 2310 - RNA, 23 nt, synthetic construct
  source 1..23: mol_type = other RNA
taaatcaagtagcatttctttac

SEQ ID NO: 2311 - RNA, 23 nt, synthetic construct
  source 1..23: mol_type = other RNA
tgtaatctgagcaatccagttta

SEQ ID NO: 2312 - RNA, 23 nt, synthetic construct
  source 1..23: mol_type = other RNA
tgatcaggtaatctgagcaatcc

SEQ ID NO: 2313 - RNA, 23 nt, synthetic construct
  source 1..23: mol_type = other RNA
tcaccacgatcaggtaatctgag

SEQ ID NO: 2314 - RNA, 23 nt, synthetic construct
  source 1..23: mol_type = other RNA
tccaccacgatcaggtaatctga

SEQ ID NO: 2315 - RNA, 23 nt, synthetic construct
  source 1..23: mol_type = other RNA
ttccaccacgatcaggtaatctg

SEQ ID NO: 2316 - RNA, 23 nt, synthetic construct
  source 1..23: mol_type = other RNA
tttccaccacgatcaggtaatct

SEQ ID NO: 2317 - RNA, 23 nt, synthetic construct
  source 1..23: mol_type = other RNA
tgttccaccacgatcaggtaatc

SEQ ID NO: 2318 - RNA, 23 nt, synthetic construct
  source 1..23: mol_type = other RNA
tggttccaccacgatcaggtaat

SEQ ID NO: 2319 - RNA, 23 nt, synthetic construct
  source 1..23: mol_type = other RNA
tgggttccaccacgatcaggtaa

SEQ ID NO: 2320 - RNA, 23 nt, synthetic construct
  source 1..23: mol_type = other RNA
tagggttccaccacgatcaggta

SEQ ID NO: 2321 - RNA, 23 nt, synthetic construct
  source 1..23: mol_type = other RNA
tgaacagttaaatatgggatagt

SEQ ID NO: 2322 - RNA, 23 nt, synthetic construct
  source 1..23: mol_type = other RNA
tagaacagttaaatatgggatag

SEQ ID NO: 2323 - RNA, 23 nt, synthetic construct
  source 1..23: mol_type = other RNA
ttagaacagttaaatatgggata

SEQ ID NO: 2324 - RNA, 23 nt, synthetic construct
  source 1..23: mol_type = other RNA
tatagaacagttaaatatgggat

SEQ ID NO: 2325 - RNA, 23 nt, synthetic construct
  source 1..23: mol_type = other RNA
ttatagaacagttaaatatggga

SEQ ID NO: 2326 - RNA, 23 nt, synthetic construct
  source 1..23: mol_type = other RNA
tttatagaacagttaaatatggg

SEQ ID NO: 2327 - RNA, 23 nt, synthetic construct
  source 1..23: mol_type = other RNA
tctttgctttatagaacagttaa

SEQ ID NO: 2328 - RNA, 23 nt, synthetic construct
  source 1..23: mol_type = other RNA
tgctttgctttatagaacagtta

SEQ ID NO: 2329 - RNA, 23 nt, synthetic construct
  source 1..23: mol_type = other RNA
ttgctttgctttatagaacagtt

SEQ ID NO: 2330 - RNA, 23 nt, synthetic construct
  source 1..23: mol_type = other RNA
tgtgctttgctttatagaacagt

SEQ ID NO: 2331 - RNA, 23 nt, synthetic construct
  source 1..23: mol_type = other RNA
ttgtgctttgctttatagaacag

SEQ ID NO: 2332 - RNA, 23 nt, synthetic construct
  source 1..23: mol_type = other RNA
tctgtgctttgctttatagaaca

SEQ ID NO: 2333 - RNA, 23 nt, synthetic construct
  source 1..23: mol_type = other RNA
tgctgtgctttgctttatagaac

SEQ ID NO: 2334 - RNA, 23 nt, synthetic construct
  source 1..23: mol_type = other RNA
tagctgtgctttgctttatagaa

SEQ ID NO: 2335 - RNA, 23 nt, synthetic construct
  source 1..23: mol_type = other RNA
taagctgtgctttgctttataga

SEQ ID NO: 2336 - RNA, 23 nt, synthetic construct
  source 1..23: mol_type = other RNA
tgaacgctattacccaagctgtg

SEQ ID NO: 2337 - RNA, 23 nt, synthetic construct
  source 1..23: mol_type = other RNA
tagaacgctattacccaagctgt

SEQ ID NO: 2338 - RNA, 23 nt, synthetic construct
  source 1..23: mol_type = other RNA
tcagaacgctattacccaagctg

SEQ ID NO: 2339 - RNA, 23 nt, synthetic construct
  source 1..23: mol_type = other RNA
ttcagaacgctattacccaagct

SEQ ID NO: 2340 - RNA, 23 nt, synthetic construct
  source 1..23: mol_type = other RNA
tttcagaacgctattacccaagc

SEQ ID NO: 2341 - RNA, 23 nt, synthetic construct
  source 1..23: mol_type = other RNA
tcttcagaacgctattacccaag

SEQ ID NO: 2342 - RNA, 23 nt, synthetic construct
  source 1..23: mol_type = other RNA
tccttcagaacgctattacccaa

SEQ ID NO: 2343 - RNA, 23 nt, synthetic construct
  source 1..23: mol_type = other RNA
ttccttcagaacgctattaccca

SEQ ID NO: 2344 - RNA, 23 nt, synthetic construct
  source 1..23: mol_type = other RNA
tatccttcagaacgctattaccc

SEQ ID NO: 2345 - RNA, 23 nt, synthetic construct
  source 1..23: mol_type = other RNA
ttatccttcagaacgctattacc

SEQ ID NO: 2346 - RNA, 23 nt, synthetic construct
  source 1..23: mol_type = other RNA
tatatccttcagaacgctattac

SEQ ID NO: 2347 - RNA, 23 nt, synthetic construct
  source 1..23: mol_type = other RNA
ttatatccttcagaacgctatta

SEQ ID NO: 2348 - RNA, 23 nt, synthetic construct
  source 1..23: mol_type = other RNA
tgtatatccttcagaacgctatt

SEQ ID NO: 2349 - RNA, 23 nt, synthetic construct
  source 1..23: mol_type = other RNA
tagtatatccttcagaacgctat

SEQ ID NO: 2350 - RNA, 23 nt, synthetic construct
  source 1..23: mol_type = other RNA
taagtatatccttcagaacgcta

SEQ ID NO: 2351 - RNA, 23 nt, synthetic construct
  source 1..23: mol_type = other RNA
tgaagtatatccttcagaacgct

SEQ ID NO: 2352 - RNA, 23 nt, synthetic construct
  source 1..23: mol_type = other RNA
tagaagtatatccttcagaacgc

SEQ ID NO: 2353 - RNA, 23 nt, synthetic construct
  source 1..23: mol_type = other RNA
tcagaagtatatccttcagaacg

SEQ ID NO: 2354 - RNA, 23 nt, synthetic construct
  source 1..23: mol_type = other RNA
tacagaagtatatccttcagaac

SEQ ID NO: 2355 - RNA, 23 nt, synthetic construct
  source 1..23: mol_type = other RNA
ttacagaagtatatccttcagaa

SEQ ID NO: 2356 - RNA, 23 nt, synthetic construct
  source 1..23: mol_type = other RNA
tatacagaagtatatccttcaga

SEQ ID NO: 2357 - RNA, 23 nt, synthetic construct
  source 1..23: mol_type = other RNA
taatacagaagtatatccttcag

SEQ ID NO: 2358 - RNA, 23 nt, synthetic construct
  source 1..23: mol_type = other RNA
taaatacagaagtatatccttca

SEQ ID NO: 2359 - RNA, 23 nt, synthetic construct
  source 1..23: mol_type = other RNA
taaaatacagaagtatatccttc

SEQ ID NO: 2360 - RNA, 23 nt, synthetic construct
  source 1..23: mol_type = other RNA
tgaaaatacagaagtatatcctt

SEQ ID NO: 2361 - RNA, 23 nt, synthetic construct
  source 1..23: mol_type = other RNA
tagaaaatacagaagtatatcct

SEQ ID NO: 2362 - RNA, 23 nt, synthetic construct
  source 1..23: mol_type = other RNA
tgagaaaatacagaagtatatcc

SEQ ID NO: 2363 - RNA, 23 nt, synthetic construct
  source 1..23: mol_type = other RNA
ttgagaaaatacagaagtatatc

SEQ ID NO: 2364 - RNA, 23 nt, synthetic construct
  source 1..23: mol_type = other RNA
tctatgagaaaatacagaagtat

SEQ ID NO: 2365 - RNA, 23 nt, synthetic construct
  source 1..23: mol_type = other RNA
ttctatgagaaaatacagaagta

SEQ ID NO: 2366 - RNA, 23 nt, synthetic construct
  source 1..23: mol_type = other RNA
tctctatgagaaaatacagaagt

SEQ ID NO: 2367 - RNA, 23 nt, synthetic construct
  source 1..23: mol_type = other RNA
tactctatgagaaaatacagaag

SEQ ID NO: 2368 - RNA, 23 nt, synthetic construct
  source 1..23: mol_type = other RNA
ttactctatgagaaaatacagaa

SEQ ID NO: 2369 - RNA, 23 nt, synthetic construct
  source 1..23: mol_type = other RNA
tactaaattgtactctatgagaa

SEQ ID NO: 2370 - RNA, 23 nt, synthetic construct
  source 1..23: mol_type = other RNA
tcactaaattgtactctatgaga

SEQ ID NO: 2371 - RNA, 23 nt, synthetic construct
  source 1..23: mol_type = other RNA
ttcactaaattgtactctatgag

SEQ ID NO: 2372 - RNA, 23 nt, synthetic construct
  source 1..23: mol_type = other RNA
tatcactaaattgtactctatga

SEQ ID NO: 2373 - RNA, 23 nt, synthetic construct
  source 1..23: mol_type = other RNA
taatcactaaattgtactctatg

SEQ ID NO: 2374 - RNA, 23 nt, synthetic construct
  source 1..23: mol_type = other RNA
tcataatcactaaattgtactct

SEQ ID NO: 2375 - RNA, 23 nt, synthetic construct
  source 1..23: mol_type = other RNA
tgcataatcactaaattgtactc

SEQ ID NO: 2376 - RNA, 23 nt, synthetic construct
  source 1..23: mol_type = other RNA
tagcataatcactaaattgtact

SEQ ID NO: 2377 - RNA, 23 nt, synthetic construct
  source 1..23: mol_type = other RNA
taagcataatcactaaattgtac

SEQ ID NO: 2378 - RNA, 23 nt, synthetic construct
  source 1..23: mol_type = other RNA
ttgaaatgaagcataatcactaa

SEQ ID NO: 2379 - RNA, 23 nt, synthetic construct
  source 1..23: mol_type = other RNA
tgtgaaatgaagcataatcacta

SEQ ID NO: 2380 - RNA, 23 nt, synthetic construct
  source 1..23: mol_type = other RNA
tagtgaaatgaagcataatcact

SEQ ID NO: 2381 - RNA, 23 nt, synthetic construct
  source 1..23: mol_type = other RNA
ttagtgaaatgaagcataatcac

SEQ ID NO: 2382 - RNA, 23 nt, synthetic construct
  source 1..23: mol_type = other RNA
tatagtgaaatgaagcataatca

SEQ ID NO: 2383 - RNA, 23 nt, synthetic construct
  source 1..23: mol_type = other RNA
tcatagtgaaatgaagcataatc

SEQ ID NO: 2384 - RNA, 23 nt, synthetic construct
  source 1..23: mol_type = other RNA
tccatagtgaaatgaagcataat

SEQ ID NO: 2385 - RNA, 23 nt, synthetic construct
  source 1..23: mol_type = other RNA
ttccatagtgaaatgaagcataa

SEQ ID NO: 2386 - RNA, 23 nt, synthetic construct
  source 1..23: mol_type = other RNA
tttccatagtgaaatgaagcata

SEQ ID NO: 2387 - RNA, 23 nt, synthetic construct
  source 1..23: mol_type = other RNA
ttttccatagtgaaatgaagcat

SEQ ID NO: 2388 - RNA, 23 nt, synthetic construct
  source 1..23: mol_type = other RNA
tatttccatagtgaaatgaagca

SEQ ID NO: 2389 - RNA, 23 nt, synthetic construct
  source 1..23: mol_type = other RNA
ttatttccatagtgaaatgaagc

SEQ ID NO: 2390 - RNA, 23 nt, synthetic construct
  source 1..23: mol_type = other RNA
tatatttccatagtgaaatgaag

SEQ ID NO: 2391 - RNA, 23 nt, synthetic construct
  source 1..23: mol_type = other RNA
taacatatttccatagtgaaatg

SEQ ID NO: 2392 - RNA, 23 nt, synthetic construct
  source 1..23: mol_type = other RNA
tcagtaacatatttccatagtga

SEQ ID NO: 2393 - RNA, 23 nt, synthetic construct
  source 1..23: mol_type = other RNA
ttcagtaacatatttccatagtg

SEQ ID NO: 2394 - RNA, 23 nt, synthetic construct
  source 1..23: mol_type = other RNA
tttcagtaacatatttccatagt

SEQ ID NO: 2395 - RNA, 23 nt, synthetic construct
  source 1..23: mol_type = other RNA
tattcagtaacatatttccatag

SEQ ID NO: 2396 - RNA, 23 nt, synthetic construct
  source 1..23: mol_type = other RNA
tcaaactccatagctgtcagttt

SEQ ID NO: 2397 - RNA, 23 nt, synthetic construct
  source 1..23: mol_type = other RNA
tgcaaactccatagctgtcagtt

SEQ ID NO: 2398 - RNA, 23 nt, synthetic construct
  source 1..23: mol_type = other RNA
tcgcaaactccatagctgtcagt

SEQ ID NO: 2399 - RNA, 23 nt, synthetic construct
  source 1..23: mol_type = other RNA
tacgcaaactccatagctgtcag

SEQ ID NO: 2400 - RNA, 23 nt, synthetic construct
  source 1..23: mol_type = other RNA
tcacgcaaactccatagctgtca

SEQ ID NO: 2401 - RNA, 23 nt, synthetic construct
  source 1..23: mol_type = other RNA
tacacgcaaactccatagctgtc

SEQ ID NO: 2402 - RNA, 23 nt, synthetic construct
  source 1..23: mol_type = other RNA
ttacacgcaaactccatagctgt

SEQ ID NO: 2403 - RNA, 23 nt, synthetic construct
  source 1..23: mol_type = other RNA
tgtacacgcaaactccatagctg

SEQ ID NO: 2404 - RNA, 23 nt, synthetic construct
  source 1..23: mol_type = other RNA
tagtacacgcaaactccatagct

SEQ ID NO: 2405 - RNA, 23 nt, synthetic construct
  source 1..23: mol_type = other RNA
taagtacacgcaaactccatagc

SEQ ID NO: 2406 - RNA, 23 nt, synthetic construct
  source 1..23: mol_type = other RNA
tgaagtacacgcaaactccatag

SEQ ID NO: 2407 - RNA, 23 nt, synthetic construct
  source 1..23: mol_type = other RNA
tagtatggaagtacacgcaaact

SEQ ID NO: 2408 - RNA, 23 nt, synthetic construct
  source 1..23: mol_type = other RNA
tcgagtatggaagtacacgcaaa

SEQ ID NO: 2409 - RNA, 23 nt, synthetic construct
  source 1..23: mol_type = other RNA
tacgagtatggaagtacacgcaa

SEQ ID NO: 2410 - RNA, 23 nt, synthetic construct
  source 1..23: mol_type = other RNA
taacgagtatggaagtacacgca

SEQ ID NO: 2411 - RNA, 23 nt, synthetic construct
  source 1..23: mol_type = other RNA
ttaacgagtatggaagtacacgc

SEQ ID NO: 2412 - RNA, 23 nt, synthetic construct
  source 1..23: mol_type = other RNA
tttaacgagtatggaagtacacg

SEQ ID NO: 2413 - RNA, 23 nt, synthetic construct
  source 1..23: mol_type = other RNA
tattaacgagtatggaagtacac

SEQ ID NO: 2414 - RNA, 23 nt, synthetic construct
  source 1..23: mol_type = other RNA
tcattaacgagtatggaagtaca

SEQ ID NO: 2415 - RNA, 23 nt, synthetic construct
  source 1..23: mol_type = other RNA
tgcattaacgagtatggaagtac

SEQ ID NO: 2416 - RNA, 23 nt, synthetic construct
  source 1..23: mol_type = other RNA
tagcattaacgagtatggaagta

SEQ ID NO: 2417 - RNA, 23 nt, synthetic construct
  source 1..23: mol_type = other RNA
tgagcattaacgagtatggaagt

SEQ ID NO: 2418 - RNA, 23 nt, synthetic construct
  source 1..23: mol_type = other RNA
tagagcattaacgagtatggaag

SEQ ID NO: 2419 - RNA, 23 nt, synthetic construct
  source 1..23: mol_type = other RNA
tgagagcattaacgagtatggaa

SEQ ID NO: 2420 - RNA, 23 nt, synthetic construct
  source 1..23: mol_type = other RNA
ttgagagcattaacgagtatgga

SEQ ID NO: 2421 - RNA, 23 nt, synthetic construct
  source 1..23: mol_type = other RNA
tatgagagcattaacgagtatgg

SEQ ID NO: 2422 - RNA, 23 nt, synthetic construct
  source 1..23: mol_type = other RNA
ttggatgagagcattaacgagta

SEQ ID NO: 2423 - RNA, 23 nt, synthetic construct
  source 1..23: mol_type = other RNA
tgtggatgagagcattaacgagt

SEQ ID NO: 2424 - RNA, 23 nt, synthetic construct
  source 1..23: mol_type = other RNA
tagtggatgagagcattaacgag

SEQ ID NO: 2425 - RNA, 23 nt, synthetic construct
  source 1..23: mol_type = other RNA
taagtggatgagagcattaacga

SEQ ID NO: 2426 - RNA, 23 nt, synthetic construct
  source 1..23: mol_type = other RNA
ttaagtggatgagagcattaacg

SEQ ID NO: 2427 - RNA, 23 nt, synthetic construct
  source 1..23: mol_type = other RNA
tataagtggatgagagcattaac

SEQ ID NO: 2428 - RNA, 23 nt, synthetic construct
  source 1..23: mol_type = other RNA
taataagtggatgagagcattaa

SEQ ID NO: 2429 - RNA, 23 nt, synthetic construct
  source 1..23: mol_type = other RNA
ttaataagtggatgagagcatta

SEQ ID NO: 2430 - RNA, 23 nt, synthetic construct
  source 1..23: mol_type = other RNA
tttaataagtggatgagagcatt

SEQ ID NO: 2431 - RNA, 23 nt, synthetic construct
  source 1..23: mol_type = other RNA
ttttaataagtggatgagagcat

SEQ ID NO: 2432 - RNA, 23 nt, synthetic construct
  source 1..23: mol_type = other RNA
tatttaataagtggatgagagca

SEQ ID NO: 2433 - RNA, 23 nt, synthetic construct
  source 1..23: mol_type = other RNA
ttatttaataagtggatgagagc

SEQ ID NO: 2434 - RNA, 23 nt, synthetic construct
  source 1..23: mol_type = other RNA
tttatttaataagtggatgagag

SEQ ID NO: 2435 - RNA, 23 nt, synthetic construct
  source 1..23: mol_type = other RNA
tggtgctctatgattatttaata

SEQ ID NO: 2436 - RNA, 23 nt, synthetic construct
  source 1..23: mol_type = other RNA
tgggtgctctatgattatttaat

SEQ ID NO: 2437 - RNA, 23 nt, synthetic construct
  source 1..23: mol_type = other RNA
ttgggtgctctatgattatttaa

SEQ ID NO: 2438 - RNA, 23 nt, synthetic construct
  source 1..23: mol_type = other RNA
tatgggtgctctatgattattta

SEQ ID NO: 2439 - RNA, 23 nt, synthetic construct
  source 1..23: mol_type = other RNA
ttatgggtgctctatgattattt

SEQ ID NO: 2440 - RNA, 23 nt, synthetic construct
  source 1..23: mol_type = other RNA
tatatgggtgctctatgattatt

SEQ ID NO: 2441 - RNA, 23 nt, synthetic construct
  source 1..23: mol_type = other RNA
tcaagcaagatatgggtgctcta

SEQ ID NO: 2442 - RNA, 23 nt, synthetic construct
  source 1..23: mol_type = other RNA
ttattgtggcaagcaagatatgg

SEQ ID NO: 2443 - RNA, 23 nt, synthetic construct
  source 1..23: mol_type = other RNA
ttccctgagggcaggacctatct

SEQ ID NO: 2444 - RNA, 23 nt, synthetic construct
  source 1..23: mol_type = other RNA
tatccctgagggcaggacctatc

SEQ ID NO: 2445 - RNA, 23 nt, synthetic construct
  source 1..23: mol_type = other RNA
taatccctgagggcaggacctat

SEQ ID NO: 2446 - RNA, 23 nt, synthetic construct
  source 1..23: mol_type = other RNA
taaatccctgagggcaggaccta

SEQ ID NO: 2447 - RNA, 23 nt, synthetic construct
  source 1..23: mol_type = other RNA
taaaatccctgagggcaggacct

SEQ ID NO: 2448 - RNA, 23 nt, synthetic construct
  source 1..23: mol_type = other RNA
ttaaaatccctgagggcaggacc

SEQ ID NO: 2449 - RNA, 23 nt, synthetic construct
  source 1..23: mol_type = other RNA
tttaaaatccctgagggcaggac

SEQ ID NO: 2450 - RNA, 23 nt, synthetic construct
  source 1..23: mol_type = other RNA
ttttaaaatccctgagggcagga

SEQ ID NO: 2451 - RNA, 23 nt, synthetic construct
  source 1..23: mol_type = other RNA
tctttaaaatccctgagggcagg

SEQ ID NO: 2452 - RNA, 23 nt, synthetic construct
  source 1..23: mol_type = other RNA
tactttaaaatccctgagggcag

SEQ ID NO: 2453 - RNA, 23 nt, synthetic construct
  source 1..23: mol_type = other RNA
tgactttaaaatccctgagggca

SEQ ID NO: 2454 - RNA, 23 nt, synthetic construct
  source 1..23: mol_type = other RNA
taattagactttaaaatccctga

SEQ ID NO: 2455 - RNA, 23 nt, synthetic construct
  source 1..23: mol_type = other RNA
taaattagactttaaaatccctg

SEQ ID NO: 2456 - RNA, 23 nt, synthetic construct
  source 1..23: mol_type = other RNA
ttctgtcaatttaatctcttccc

SEQ ID NO: 2457 - RNA, 23 nt, synthetic construct
  source 1..23: mol_type = other RNA
tatctgtcaatttaatctcttcc

SEQ ID NO: 2458 - RNA, 23 nt, synthetic construct
  source 1..23: mol_type = other RNA
ttatctgtcaatttaatctcttc

SEQ ID NO: 2459 - RNA, 23 nt, synthetic construct
  source 1..23: mol_type = other RNA
tcttcgtattttatctgtcaatt

SEQ ID NO: 2460 - RNA, 23 nt, synthetic construct
  source 1..23: mol_type = other RNA
tacttcgtattttatctgtcaat

SEQ ID NO: 2461 - RNA, 23 nt, synthetic construct
  source 1..23: mol_type = other RNA
tcacttcgtattttatctgtcaa

SEQ ID NO: 2462 - RNA, 23 nt, synthetic construct
  source 1..23: mol_type = other RNA
tccacttcgtattttatctgtca

SEQ ID NO: 2463 - RNA, 23 nt, synthetic construct
  source 1..23: mol_type = other RNA
taactcaagacatcccacttcgt

SEQ ID NO: 2464 - RNA, 23 nt, synthetic construct
  source 1..23: mol_type = other RNA
tagaactcaagacatcccacttc

SEQ ID NO: 2465 - RNA, 23 nt, synthetic construct
  source 1..23: mol_type = other RNA
tcatgcagaactcaagacatccc

SEQ ID NO: 2466 - RNA, 23 nt, synthetic construct
  source 1..23: mol_type = other RNA
tacctatcctagaaacccactgt

SEQ ID NO: 2467 - RNA, 23 nt, synthetic construct
  source 1..23: mol_type = other RNA
tgacctatcctagaaacccactg

SEQ ID NO: 2468 - RNA, 23 nt, synthetic construct
  source 1..23: mol_type = other RNA
tagacctatcctagaaacccact

SEQ ID NO: 2469 - RNA, 23 nt, synthetic construct
  source 1..23: mol_type = other RNA
tcagacctatcctagaaacccac

SEQ ID NO: 2470 - RNA, 23 nt, synthetic construct
  source 1..23: mol_type = other RNA
ttcagacctatcctagaaaccca

SEQ ID NO: 2471 - RNA, 23 nt, synthetic construct
  source 1..23: mol_type = other RNA
tttcagacctatcctagaaaccc

SEQ ID NO: 2472 - RNA, 23 nt, synthetic construct
  source 1..23: mol_type = other RNA
ttttcagacctatcctagaaacc

SEQ ID NO: 2473 - RNA, 23 nt, synthetic construct
  source 1..23: mol_type = other RNA
tttttcagacctatcctagaaac

SEQ ID NO: 2474 - RNA, 23 nt, synthetic construct
  source 1..23: mol_type = other RNA
tattttcagacctatcctagaaa

SEQ ID NO: 2475 - RNA, 23 nt, synthetic construct
  source 1..23: mol_type = other RNA
taattttcagacctatcctagaa

SEQ ID NO: 2476 - RNA, 23 nt, synthetic construct
  source 1..23: mol_type = other RNA
tcaattttcagacctatcctaga

SEQ ID NO: 2477 - RNA, 23 nt, synthetic construct
  source 1..23: mol_type = other RNA
tcaaatgaaagcaattttcagac

SEQ ID NO: 2478 - RNA, 23 nt, synthetic construct
  source 1..23: mol_type = other RNA
tgtgttgcaaatgaaagcaattt

SEQ ID NO: 2479 - RNA, 23 nt, synthetic construct
  source 1..23: mol_type = other RNA
ttgtgttgcaaatgaaagcaatt

SEQ ID NO: 2480 - RNA, 23 nt, synthetic construct
  source 1..23: mol_type = other RNA
tatgtgttgcaaatgaaagcaat

SEQ ID NO: 2481 - RNA, 23 nt, synthetic construct
  source 1..23: mol_type = other RNA
taatgtgttgcaaatgaaagcaa

SEQ ID NO: 2482 - RNA, 23 nt, synthetic construct
  source 1..23: mol_type = other RNA
taaatgtgttgcaaatgaaagca

SEQ ID NO: 2483 - RNA, 23 nt, synthetic construct
  source 1..23: mol_type = other RNA
ttccaaataaagctactttctaa

SEQ ID NO: 2484 - RNA, 23 nt, synthetic construct
  source 1..23: mol_type = other RNA
tatatccaaataaagctactttc

SEQ ID NO: 2485 - RNA, 23 nt, synthetic construct
  source 1..23: mol_type = other RNA
tgatgatatatttagattgtctg

SEQ ID NO: 2486 - RNA, 23 nt, synthetic construct
  source 1..23: mol_type = other RNA
tctgatgatatatttagattgtc

SEQ ID NO: 2487 - RNA, 23 nt, synthetic construct
  source 1..23: mol_type = other RNA
tgcacttttaaaaactgatgata

SEQ ID NO: 2488 - RNA, 23 nt, synthetic construct
  source 1..23: mol_type = other RNA
tggcacttttaaaaactgatgat

SEQ ID NO: 2489 - RNA, 23 nt, synthetic construct
  source 1..23: mol_type = other RNA
taggcacttttaaaaactgatga

SEQ ID NO: 2490 - RNA, 23 nt, synthetic construct
  source 1..23: mol_type = other RNA
ttaggcacttttaaaaactgatg

SEQ ID NO: 2491 - RNA, 23 nt, synthetic construct
  source 1..23: mol_type = other RNA
tataggcacttttaaaaactgat

SEQ ID NO: 2492 - RNA, 23 nt, synthetic construct
  source 1..23: mol_type = other RNA
tcataggcacttttaaaaactga

SEQ ID NO: 2493 - RNA, 23 nt, synthetic construct
  source 1..23: mol_type = other RNA
tacataggcacttttaaaaactg

SEQ ID NO: 2494 - RNA, 23 nt, synthetic construct
  source 1..23: mol_type = other RNA
tcacataggcacttttaaaaact

SEQ ID NO: 2495 - RNA, 23 nt, synthetic construct
  source 1..23: mol_type = other RNA
tatcacttcacataggcactttt

SEQ ID NO: 2496 - RNA, 23 nt, synthetic construct
  source 1..23: mol_type = other RNA
taatcacttcacataggcacttt

SEQ ID NO: 2497 - RNA, 23 nt, synthetic construct
  source 1..23: mol_type = other RNA
taaatcacttcacataggcactt

SEQ ID NO: 2498 - RNA, 23 nt, synthetic construct
  source 1..23: mol_type = other RNA
taaaatcacttcacataggcact

SEQ ID NO: 2499 - RNA, 23 nt, synthetic construct
  source 1..23: mol_type = other RNA
taaaaatcacttcacataggcac

SEQ ID NO: 2500 - RNA, 23 nt, synthetic construct
  source 1..23: mol_type = other RNA
ttaaaaatcacttcacataggca

SEQ ID NO: 2501 - RNA, 23 nt, synthetic construct
  source 1..23: mol_type = other RNA
tttaaaaatcacttcacataggc

SEQ ID NO: 2502 - RNA, 23 nt, synthetic construct
  source 1..23: mol_type = other RNA
ttttaaaaatcacttcacatagg

SEQ ID NO: 2503 - RNA, 23 nt, synthetic construct
  source 1..23: mol_type = other RNA
tctctttttaaaaatcacttcac

SEQ ID NO: 2504 - RNA, 23 nt, synthetic construct
  source 1..23: mol_type = other RNA
tgctctttttaaaaatcacttca

SEQ ID NO: 2505 - RNA, 23 nt, synthetic construct
  source 1..23: mol_type = other RNA
ttaggctctttttaaaaatcact

SEQ ID NO: 2506 - RNA, 23 nt, synthetic construct
  source 1..23: mol_type = other RNA
tataggctctttttaaaaatcac

SEQ ID NO: 2507 - RNA, 23 nt, synthetic construct
  source 1..23: mol_type = other RNA
tcataggctctttttaaaaatca

SEQ ID NO: 2508 - RNA, 23 nt, synthetic construct
  source 1..23: mol_type = other RNA
tacataggctctttttaaaaatc

SEQ ID NO: 2509 - RNA, 23 nt, synthetic construct
  source 1..23: mol_type = other RNA
tcacataggctctttttaaaaat

SEQ ID NO: 2510 - RNA, 23 nt, synthetic construct
  source 1..23: mol_type = other RNA
ttcacataggctctttttaaaaa

SEQ ID NO: 2511 - RNA, 23 nt, synthetic construct
  source 1..23: mol_type = other RNA
tttcacataggctctttttaaaa

SEQ ID NO: 2512 - RNA, 23 nt, synthetic construct
  source 1..23: mol_type = other RNA
tcttcacataggctctttttaaa

SEQ ID NO: 2513 - RNA, 23 nt, synthetic construct
  source 1..23: mol_type = other RNA
tccttcacataggctctttttaa

SEQ ID NO: 2514 - RNA, 23 nt, synthetic construct
  source 1..23: mol_type = other RNA
tacaagaacaagcaagattaccc

SEQ ID NO: 2515 - RNA, 23 nt, synthetic construct
  source 1..23: mol_type = other RNA
taacaagaacaagcaagattacc

SEQ ID NO: 2516 - RNA, 23 nt, synthetic construct
  source 1..23: mol_type = other RNA
ttaacaagaacaagcaagattac

SEQ ID NO: 2517 - RNA, 23 nt, synthetic construct
  source 1..23: mol_type = other RNA
tgtaacaagaacaagcaagatta

SEQ ID NO: 2518 - RNA, 23 nt, synthetic construct
  source 1..23: mol_type = other RNA
tagtaacaagaacaagcaagatt

SEQ ID NO: 2519 - RNA, 23 nt, synthetic construct
  source 1..23: mol_type = other RNA
ttagtaacaagaacaagcaagat

SEQ ID NO: 2520 - RNA, 23 nt, synthetic construct
  source 1..23: mol_type = other RNA
tttagtaacaagaacaagcaaga

SEQ ID NO: 2521 - RNA, 23 nt, synthetic construct
  source 1..23: mol_type = other RNA
tattagtaacaagaacaagcaag

SEQ ID NO: 2522 - RNA, 23 nt, synthetic construct
  source 1..23: mol_type = other RNA
taattagtaacaagaacaagcaa

SEQ ID NO: 2523 - RNA, 23 nt, synthetic construct
  source 1..23: mol_type = other RNA
taaattagtaacaagaacaagca

SEQ ID NO: 2524 - RNA, 23 nt, synthetic construct
  source 1..23: mol_type = other RNA
tgaaattagtaacaagaacaagc

SEQ ID NO: 2525 - RNA, 23 nt, synthetic construct
  source 1..23: mol_type = other RNA
tttcgttcttatatatgcagaaa

SEQ ID NO: 2526 - RNA, 23 nt, synthetic construct
  source 1..23: mol_type = other RNA
ttttatttgaggcacgtacaacc

SEQ ID NO: 2527 - RNA, 23 nt, synthetic construct
  source 1..23: mol_type = other RNA
tattcttgtttatttgaggcacg

SEQ ID NO: 2528 - RNA, 23 nt, synthetic construct
  source 1..23: mol_type = other RNA
tcattcttgtttatttgaggcac

SEQ ID NO: 2529 - RNA, 23 nt, synthetic construct
  source 1..23: mol_type = other RNA
ttcattcttgtttatttgaggca

SEQ ID NO: 2530 - RNA, 23 nt, synthetic construct
  source 1..23: mol_type = other RNA
tatcattcttgtttatttgaggc

SEQ ID NO: 2531 - RNA, 23 nt, synthetic construct
  source 1..23: mol_type = other RNA
ttatcattcttgtttatttgagg

SEQ ID NO: 2532 - RNA, 23 nt, synthetic construct
  source 1..23: mol_type = other RNA
tcaggaaatatcattcttgttta

SEQ ID NO: 2533 - RNA, 23 nt, synthetic construct
  source 1..23: mol_type = other RNA
tacaggaaatatcattcttgttt

SEQ ID NO: 2534 - RNA, 23 nt, synthetic construct
  source 1..23: mol_type = other RNA
taacaggaaatatcattcttgtt

SEQ ID NO: 2535 - RNA, 23 nt, synthetic construct
  source 1..23: mol_type = other RNA
taaacaggaaatatcattcttgt

SEQ ID NO: 2536 - RNA, 23 nt, synthetic construct
  source 1..23: mol_type = other RNA
taaaacaggaaatatcattcttg

SEQ ID NO: 2537 - RNA, 23 nt, synthetic construct
  source 1..23: mol_type = other RNA
tcatatttacccaacataagtaa

SEQ ID NO: 2538 - RNA, 23 nt, synthetic construct
  source 1..23: mol_type = other RNA
tgcatatttacccaacataagta

SEQ ID NO: 2539 - RNA, 23 nt, synthetic construct
  source 1..23: mol_type = other RNA
tagcatatttacccaacataagt

SEQ ID NO: 2540 - RNA, 23 nt, synthetic construct
  source 1..23: mol_type = other RNA
taagcatatttacccaacataag

SEQ ID NO: 2541 - RNA, 23 nt, synthetic construct
  source 1..23: mol_type = other RNA
ttaagcatatttacccaacataa

SEQ ID NO: 2542 - RNA, 23 nt, synthetic construct
  source 1..23: mol_type = other RNA
tataagcatatttacccaacata

SEQ ID NO: 2543 - RNA, 23 nt, synthetic construct
  source 1..23: mol_type = other RNA
taataagcatatttacccaacat

SEQ ID NO: 2544 - RNA, 23 nt, synthetic construct
  source 1..23: mol_type = other RNA
tcagagtgaaagttgaaccaata

SEQ ID NO: 2545 - RNA, 23 nt, synthetic construct
  source 1..23: mol_type = other RNA
tatttcttcagagtgaaagttga

SEQ ID NO: 2546 - RNA, 23 nt, synthetic construct
  source 1..23: mol_type = other RNA
tacatacggatttcttcagagtg

SEQ ID NO: 2547 - RNA, 23 nt, synthetic construct
  source 1..23: mol_type = other RNA
ttaacatacggatttcttcagag

SEQ ID NO: 2548 - RNA, 23 nt, synthetic construct
  source 1..23: mol_type = other RNA
tgagtcatagttaaacaacacaa

SEQ ID NO: 2549 - RNA, 23 nt, synthetic construct
  source 1..23: mol_type = other RNA
tgactactcagttaggagtcata

SEQ ID NO: 2550 - RNA, 23 nt, synthetic construct
  source 1..23: mol_type = other RNA
tagactactcagttaggagtcat

SEQ ID NO: 2551 - RNA, 23 nt, synthetic construct
  source 1..23: mol_type = other RNA
taagactactcagttaggagtca

SEQ ID NO: 2552 - RNA, 23 nt, synthetic construct
  source 1..23: mol_type = other RNA
ttaagactactcagttaggagtc

SEQ ID NO: 2553 - RNA, 23 nt, synthetic construct
  source 1..23: mol_type = other RNA
tataagactactcagttaggagt

SEQ ID NO: 2554 - RNA, 23 nt, synthetic construct
  source 1..23: mol_type = other RNA
ttataagactactcagttaggag

SEQ ID NO: 2555 - RNA, 23 nt, synthetic construct
  source 1..23: mol_type = other RNA
tatataagactactcagttagga

SEQ ID NO: 2556 - RNA, 23 nt, synthetic construct
  source 1..23: mol_type = other RNA
taatataagactactcagttagg

SEQ ID NO: 2557 - RNA, 23 nt, synthetic construct
  source 1..23: mol_type = other RNA
taaatataagactactcagttag

SEQ ID NO: 2558 - RNA, 23 nt, synthetic construct
  source 1..23: mol_type = other RNA
tgaaatataagactactcagtta

SEQ ID NO: 2559 - RNA, 23 nt, synthetic construct
  source 1..23: mol_type = other RNA
ttgaaatataagactactcagtt

SEQ ID NO: 2560 - RNA, 23 nt, synthetic construct
  source 1..23: mol_type = other RNA
tttgaaatataagactactcagt

SEQ ID NO: 2561 - RNA, 23 nt, synthetic construct
  source 1..23: mol_type = other RNA
tattgaaatataagactactcag

SEQ ID NO: 2562 - RNA, 23 nt, synthetic construct
  source 1..23: mol_type = other RNA
ttcctgttaagagtaaaggaaat

SEQ ID NO: 2563 - RNA, 23 nt, synthetic construct
  source 1..23: mol_type = other RNA
tatcctgttaagagtaaaggaaa

SEQ ID NO: 2564 - RNA, 23 nt, synthetic construct
  source 1..23: mol_type = other RNA
taatcctgttaagagtaaaggaa

SEQ ID NO: 2565 - RNA, 23 nt, synthetic construct
  source 1..23: mol_type = other RNA
ttaatcctgttaagagtaaagga

SEQ ID NO: 2566 - RNA, 23 nt, synthetic construct
  source 1..23: mol_type = other RNA
tataatcctgttaagagtaaagg

SEQ ID NO: 2567 - RNA, 23 nt, synthetic construct
  source 1..23: mol_type = other RNA
ttataatcctgttaagagtaaag

SEQ ID NO: 2568 - RNA, 23 nt, synthetic construct
  source 1..23: mol_type = other RNA
tctatatataatcctgttaagag

SEQ ID NO: 2569 - RNA, 23 nt, synthetic construct
  source 1..23: mol_type = other RNA
tcatgttctatatataatcctgt

SEQ ID NO: 2570 - RNA, 23 nt, synthetic construct
  source 1..23: mol_type = other RNA
ttatttttgtaagtgagcatgtt

SEQ ID NO: 2571 - RNA, 23 nt, synthetic construct
  source 1..23: mol_type = other RNA
tatcatcctatttttgtaagtga

SEQ ID NO: 2572 - RNA, 23 nt, synthetic construct
  source 1..23: mol_type = other RNA
tatacaagaagcctgccttatgc

SEQ ID NO: 2573 - RNA, 23 nt, synthetic construct
  source 1..23: mol_type = other RNA
taagtatatacaagaagcctgcc

SEQ ID NO: 2574 - RNA, 23 nt, synthetic construct
  source 1..23: mol_type = other RNA
ttttgacagcataagtatataca

SEQ ID NO: 2575 - RNA, 23 nt, synthetic construct
  source 1..23: mol_type = other RNA
tatttgacagcataagtatatac

SEQ ID NO: 2576 - RNA, 23 nt, synthetic construct
  source 1..23: mol_type = other RNA
tcatttgacagcataagtatata

SEQ ID NO: 2577 - RNA, 23 nt, synthetic construct
  source 1..23: mol_type = other RNA
tacatttgacagcataagtatat

SEQ ID NO: 2578 - RNA, 23 nt, synthetic construct
  source 1..23: mol_type = other RNA
taacatttgacagcataagtata

SEQ ID NO: 2579 - RNA, 23 nt, synthetic construct
  source 1..23: mol_type = other RNA
ttaacatttgacagcataagtat

SEQ ID NO: 2580 - RNA, 23 nt, synthetic construct
  source 1..23: mol_type = other RNA
tataacatttgacagcataagta

SEQ ID NO: 2581 - RNA, 23 nt, synthetic construct
  source 1..23: mol_type = other RNA
ttataacatttgacagcataagt

SEQ ID NO: 2582 - RNA, 23 nt, synthetic construct
  source 1..23: mol_type = other RNA
tatataacatttgacagcataag

SEQ ID NO: 2583 - RNA, 23 nt, synthetic construct
  source 1..23: mol_type = other RNA
tcaatataacatttgacagcata

SEQ ID NO: 2584 - RNA, 23 nt, synthetic construct
  source 1..23: mol_type = other RNA
tacaatataacatttgacagcat

SEQ ID NO: 2585 - RNA, 23 nt, synthetic construct
  source 1..23: mol_type = other RNA
taacaatataacatttgacagca

SEQ ID NO: 2586 - RNA, 23 nt, synthetic construct
  source 1..23: mol_type = other RNA
taaacaatataacatttgacagc

SEQ ID NO: 2587 - RNA, 23 nt, synthetic construct
  source 1..23: mol_type = other RNA
tacactgatactctgaacataac

SEQ ID NO: 2588 - RNA, 23 nt, synthetic construct
  source 1..23: mol_type = other RNA
taacactgatactctgaacataa

SEQ ID NO: 2589 - RNA, 23 nt, synthetic construct
  source 1..23: mol_type = other RNA
tgaacactgatactctgaacata

SEQ ID NO: 2590 - RNA, 23 nt, synthetic construct
  source 1..23: mol_type = other RNA
tagaacactgatactctgaacat

SEQ ID NO: 2591 - RNA, 23 nt, synthetic construct
  source 1..23: mol_type = other RNA
taagaacactgatactctgaaca

SEQ ID NO: 2592 - RNA, 23 nt, synthetic construct
  source 1..23: mol_type = other RNA
taaagaacactgatactctgaac

SEQ ID NO: 2593 - RNA, 23 nt, synthetic construct
  source 1..23: mol_type = other RNA
ttaaagaacactgatactctgaa

SEQ ID NO: 2594 - RNA, 23 nt, synthetic construct
  source 1..23: mol_type = other RNA
tgtaaagaacactgatactctga

SEQ ID NO: 2595 - RNA, 23 nt, synthetic construct
  source 1..23: mol_type = other RNA
tagtaaagaacactgatactctg

SEQ ID NO: 2596 - RNA, 23 nt, synthetic construct
  source 1..23: mol_type = other RNA
tgagtaaagaacactgatactct

SEQ ID NO: 2597 - RNA, 23 nt, synthetic construct
  source 1..23: mol_type = other RNA
tggagtaaagaacactgatactc

SEQ ID NO: 2598 - RNA, 23 nt, synthetic construct
  source 1..23: mol_type = other RNA
tatatctgtaaggagtaaagaac

SEQ ID NO: 2599 - RNA, 23 nt, synthetic construct
  source 1..23: mol_type = other RNA
taaaatatctgtaaggagtaaag

SEQ ID NO: 2600 - RNA, 23 nt, synthetic construct
  source 1..23: mol_type = other RNA
tagaaagtgatgctgcatttaaa

SEQ ID NO: 2601 - RNA, 23 nt, synthetic construct
  source 1..23: mol_type = other RNA
tttattttcagaaagtgatgctg

SEQ ID NO: 2602 - RNA, 23 nt, synthetic construct
  source 1..23: mol_type = other RNA
tgacaacaaataatgtttctctt

SEQ ID NO: 2603 - RNA, 23 nt, synthetic construct
  source 1..23: mol_type = other RNA
tatgctgaaatactgacaacaaa

SEQ ID NO: 2604 - RNA, 23 nt, synthetic construct
  source 1..23: mol_type = other RNA
tacaagttcatgctgaaatactg

SEQ ID NO: 2605 - RNA, 23 nt, synthetic construct
  source 1..23: mol_type = other RNA
tagaatctgtaccaattacaaac

SEQ ID NO: 2606 - RNA, 23 nt, synthetic construct
  source 1..23: mol_type = other RNA
tcagaatctgtaccaattacaaa

SEQ ID NO: 2607 - RNA, 23 nt, synthetic construct
  source 1..23: mol_type = other RNA
tacagaatctgtaccaattacaa

SEQ ID NO: 2608 - RNA, 23 nt, synthetic construct
  source 1..23: mol_type = other RNA
taacagaatctgtaccaattaca

SEQ ID NO: 2609 - RNA, 23 nt, synthetic construct
  source 1..23: mol_type = other RNA
tcaacagaatctgtaccaattac

SEQ ID NO: 2610 - RNA, 23 nt, synthetic construct
  source 1..23: mol_type = other RNA
tacaacagaatctgtaccaatta

SEQ ID NO: 2611 - RNA, 23 nt, synthetic construct
  source 1..23: mol_type = other RNA
ttacaacagaatctgtaccaatt

SEQ ID NO: 2612 - RNA, 23 nt, synthetic construct
  source 1..23: mol_type = other RNA
tatacaacagaatctgtaccaat

SEQ ID NO: 2613 - RNA, 23 nt, synthetic construct
  source 1..23: mol_type = other RNA
tcatacaacagaatctgtaccaa

SEQ ID NO: 2614 - RNA, 23 nt, synthetic construct
  source 1..23: mol_type = other RNA
tgcatacaacagaatctgtacca

SEQ ID NO: 2615 - RNA, 23 nt, synthetic construct
  source 1..23: mol_type = other RNA
tagcatacaacagaatctgtacc

SEQ ID NO: 2616 - RNA, 23 nt, synthetic construct
  source 1..23: mol_type = other RNA
taagcatacaacagaatctgtac

SEQ ID NO: 2617 - RNA, 23 nt, synthetic construct
  source 1..23: mol_type = other RNA
taaagcatacaacagaatctgta

SEQ ID NO: 2618 - RNA, 23 nt, synthetic construct
  source 1..23: mol_type = other RNA
tgaaagcatacaacagaatctgt

SEQ ID NO: 2619 - RNA, 23 nt, synthetic construct
  source 1..23: mol_type = other RNA
tagaaagcatacaacagaatctg

SEQ ID NO: 2620 - RNA, 23 nt, synthetic construct
  source 1..23: mol_type = other RNA
tattctagatgtgacatgccaaa

SEQ ID NO: 2621 - RNA, 23 nt, synthetic construct
  source 1..23: mol_type = other RNA
taattctagatgtgacatgccaa

SEQ ID NO: 2622 - RNA, 23 nt, synthetic construct
  source 1..23: mol_type = other RNA
tgaattctagatgtgacatgcca

SEQ ID NO: 2623 - RNA, 23 nt, synthetic construct
  source 1..23: mol_type = other RNA
tagaattctagatgtgacatgcc

SEQ ID NO: 2624 - RNA, 23 nt, synthetic construct
  source 1..23: mol_type = other RNA
taagaattctagatgtgacatgc

SEQ ID NO: 2625 - RNA, 23 nt, synthetic construct
  source 1..23: mol_type = other RNA
ttaagaattctagatgtgacatg

SEQ ID NO: 2626 - RNA, 23 nt, synthetic construct
  source 1..23: mol_type = other RNA
tttaagaattctagatgtgacat

SEQ ID NO: 2627 - RNA, 23 nt, synthetic construct
  source 1..23: mol_type = other RNA
tattaagaattctagatgtgaca

SEQ ID NO: 2628 - RNA, 23 nt, synthetic construct
  source 1..23: mol_type = other RNA
taattaagaattctagatgtgac

SEQ ID NO: 2629 - RNA, 23 nt, synthetic construct
  source 1..23: mol_type = other RNA
tttcacttaactctcaagtcaga

SEQ ID NO: 2630 - RNA, 23 nt, synthetic construct
  source 1..23: mol_type = other RNA
tatgtttcacttaactctcaagt

SEQ ID NO: 2631 - RNA, 23 nt, synthetic construct
  source 1..23: mol_type = other RNA
taagatgaaaagcaagtgctatg

SEQ ID NO: 2632 - RNA, 23 nt, synthetic construct
  source 1..23: mol_type = other RNA
tcatggaaatttaaaatgcaaag

SEQ ID NO: 2633 - RNA, 23 nt, synthetic construct
  source 1..23: mol_type = other RNA
tcaatcatggaaatttaaaatgc

SEQ ID NO: 2634 - RNA, 23 nt, synthetic construct
  source 1..23: mol_type = other RNA
ttttttcagatactgcaaccagg

SEQ ID NO: 2635 - RNA, 23 nt, synthetic construct
  source 1..23: mol_type = other RNA
tttttttcagatactgcaaccag

SEQ ID NO: 2636 - RNA, 23 nt, synthetic construct
  source 1..23: mol_type = other RNA
tattttttcagatactgcaacca

SEQ ID NO: 2637 - RNA, 23 nt, synthetic construct
  source 1..23: mol_type = other RNA
taattttttcagatactgcaacc

SEQ ID NO: 2638 - RNA, 23 nt, synthetic construct
  source 1..23: mol_type = other RNA
ttaattttttcagatactgcaac

SEQ ID NO: 2639 - RNA, 23 nt, synthetic construct
  source 1..23: mol_type = other RNA
tgaacttctaacctaatgaatct

SEQ ID NO: 2640 - RNA, 23 nt, synthetic construct
  source 1..23: mol_type = other RNA
taaattattctggaacttctaac

SEQ ID NO: 2641 - RNA, 23 nt, synthetic construct
  source 1..23: mol_type = other RNA
tgtaattctacaatagtaggtgt

SEQ ID NO: 2642 - RNA, 23 nt, synthetic construct
  source 1..23: mol_type = other RNA
tggagtagttttgttttgtttta

SEQ ID NO: 2643 - RNA, 23 nt, synthetic construct
  source 1..23: mol_type = other RNA
ttaggagtagttttgttttgttt

SEQ ID NO: 2644 - RNA, 23 nt, synthetic construct
  source 1..23: mol_type = other RNA
tataggagtagttttgttttgtt

SEQ ID NO: 2645 - RNA, 23 nt, synthetic construct
  source 1..23: mol_type = other RNA
taataggagtagttttgttttgt

SEQ ID NO: 2646 - RNA, 23 nt, synthetic construct
  source 1..23: mol_type = other RNA
taaataggagtagttttgttttg

SEQ ID NO: 2647 - RNA, 23 nt, synthetic construct
  source 1..23: mol_type = other RNA
tgaaaataggagtagttttgttt

SEQ ID NO: 2648 - RNA, 23 nt, synthetic construct
  source 1..23: mol_type = other RNA
tggaaaataggagtagttttgtt

SEQ ID NO: 2649 - RNA, 23 nt, synthetic construct
  source 1..23: mol_type = other RNA
taggaaaataggagtagttttgt

SEQ ID NO: 2650 - RNA, 23 nt, synthetic construct
  source 1..23: mol_type = other RNA
ttggcaaaattccaggaaaatag

SEQ ID NO: 2651 - RNA, 23 nt, synthetic construct
  source 1..23: mol_type = other RNA
ttttgtataatggcaaacatcag

SEQ ID NO: 2652 - RNA, 23 nt, synthetic construct
  source 1..23: mol_type = other RNA
tagttgtttactcaaactttgta

SEQ ID NO: 2653 - RNA, 23 nt, synthetic construct
  source 1..23: mol_type = other RNA
taagttgtttactcaaactttgt

SEQ ID NO: 2654 - RNA, 23 nt, synthetic construct
  source 1..23: mol_type = other RNA
ttaagttgtttactcaaactttg

SEQ ID NO: 2655 - RNA, 23 nt, synthetic construct
  source 1..23: mol_type = other RNA
tgcaattttaagttgtttactca

SEQ ID NO: 2656 - RNA, 23 nt, synthetic construct
  source 1..23: mol_type = other RNA
tagcaattttaagttgtttactc

SEQ ID NO: 2657 - RNA, 23 nt, synthetic construct
  source 1..23: mol_type = other RNA
tcaagcaattttaagttgtttac

SEQ ID NO: 2658 - RNA, 23 nt, synthetic construct
  source 1..23: mol_type = other RNA
tttatttcaatcaaagactatgc

SEQ ID NO: 2659 - RNA, 23 nt, synthetic construct
  source 1..23: mol_type = other RNA
tatttagccaaatacattctcat

SEQ ID NO: 2660 - RNA, 23 nt, synthetic construct
  source 1..23: mol_type = other RNA
tttgaagacatcaactgccagct

SEQ ID NO: 2661 - RNA, 23 nt, synthetic construct
  source 1..23: mol_type = other RNA
ttattgaagacatcaactgccag

SEQ ID NO: 2662 - RNA, 23 nt, synthetic construct
  source 1..23: mol_type = other RNA
tttattgaagacatcaactgcca

SEQ ID NO: 2663 - RNA, 23 nt, synthetic construct
  source 1..23: mol_type = other RNA
tattattgaagacatcaactgcc

SEQ ID NO: 2664 - RNA, 23 nt, synthetic construct
  source 1..23: mol_type = other RNA
tgattattgaagacatcaactgc

SEQ ID NO: 2665 - RNA, 23 nt, synthetic construct
  source 1..23: mol_type = other RNA
ttgattattgaagacatcaactg

SEQ ID NO: 2666 - RNA, 23 nt, synthetic construct
  source 1..23: mol_type = other RNA
tatgattattgaagacatcaact

SEQ ID NO: 2667 - RNA, 23 nt, synthetic construct
  source 1..23: mol_type = other RNA
taatgattattgaagacatcaac

SEQ ID NO: 2668 - RNA, 23 nt, synthetic construct
  source 1..23: mol_type = other RNA
tgaatgattattgaagacatcaa

SEQ ID NO: 2669 - RNA, 23 nt, synthetic construct
  source 1..23: mol_type = other RNA
tggaatgattattgaagacatca

SEQ ID NO: 2670 - RNA, 23 nt, synthetic construct
  source 1..23: mol_type = other RNA
taggaatgattattgaagacatc

SEQ ID NO: 2671 - RNA, 23 nt, synthetic construct
  source 1..23: mol_type = other RNA
taaggaatgattattgaagacat

SEQ ID NO: 2672 - RNA, 23 nt, synthetic construct
  source 1..23: mol_type = other RNA
taaaggaatgattattgaagaca

SEQ ID NO: 2673 - RNA, 23 nt, synthetic construct
  source 1..23: mol_type = other RNA
ttaaaggaatgattattgaagac

SEQ ID NO: 2674 - RNA, 23 nt, synthetic construct
  source 1..23: mol_type = other RNA
tgtaatgatgtgtttgtgaattt

SEQ ID NO: 2675 - RNA, 23 nt, synthetic construct
  source 1..23: mol_type = other RNA
ttgtaatgatgtgtttgtgaatt

SEQ ID NO: 2676 - RNA, 23 nt, synthetic construct
  source 1..23: mol_type = other RNA
tttgtaatgatgtgtttgtgaat

SEQ ID NO: 2677 - RNA, 23 nt, synthetic construct
  source 1..23: mol_type = other RNA
tcttgtaatgatgtgtttgtgaa

SEQ ID NO: 2678 - RNA, 23 nt, synthetic construct
  source 1..23: mol_type = other RNA
tgcttgtaatgatgtgtttgtga

SEQ ID NO: 2679 - RNA, 23 nt, synthetic construct
  source 1..23: mol_type = other RNA
tagcttgtaatgatgtgtttgtg

SEQ ID NO: 2680 - RNA, 23 nt, synthetic construct
  source 1..23: mol_type = other RNA
ttagcttgtaatgatgtgtttgt

SEQ ID NO: 2681 - RNA, 23 nt, synthetic construct
  source 1..23: mol_type = other RNA
tgtagcttgtaatgatgtgtttg

SEQ ID NO: 2682 - RNA, 23 nt, synthetic construct
  source 1..23: mol_type = other RNA
tagtagcttgtaatgatgtgttt

SEQ ID NO: 2683 - RNA, 23 nt, synthetic construct
  source 1..23: mol_type = other RNA
taagtagcttgtaatgatgtgtt

SEQ ID NO: 2684 - RNA, 23 nt, synthetic construct
  source 1..23: mol_type = other RNA
tttctaagtagcttgtaatgatg

SEQ ID NO: 2685 - RNA, 23 nt, synthetic construct
  source 1..23: mol_type = other RNA
taacatttctaagtagcttgtaa

SEQ ID NO: 2686 - RNA, 23 nt, synthetic construct
  source 1..23: mol_type = other RNA
ttaaacatttctaagtagcttgt

SEQ ID NO: 2687 - RNA, 23 nt, synthetic construct
  source 1..23: mol_type = other RNA
ttactaaacatttctaagtagct

SEQ ID NO: 2688 - RNA, 23 nt, synthetic construct
  source 1..23: mol_type = other RNA
taaacagaaatagtatgtttcac

SEQ ID NO: 2689 - RNA, 23 nt, synthetic construct
  source 1..23: mol_type = other RNA
ttttttgttatttagaagcagct

SEQ ID NO: 2690 - RNA, 23 nt, synthetic construct
  source 1..23: mol_type = other RNA
tttttttgttatttagaagcagc

SEQ ID NO: 2691 - RNA, 23 nt, synthetic construct
  source 1..23: mol_type = other RNA
taatgttttgaaaaatgcccata

SEQ ID NO: 2692 - RNA, 23 nt, synthetic construct
  source 1..23: mol_type = other RNA
tctagatgaaaaaaagaaagtca

SEQ ID NO: 2693 - RNA, 23 nt, synthetic construct
  source 1..23: mol_type = other RNA
tgctagatgaaaaaaagaaagtc

SEQ ID NO: 2694 - RNA, 23 nt, synthetic construct
  source 1..23: mol_type = other RNA
tggctagatgaaaaaaagaaagt

SEQ ID NO: 2695 - RNA, 23 nt, synthetic construct
  source 1..23: mol_type = other RNA
taggctagatgaaaaaaagaaag

SEQ ID NO: 2696 - RNA, 23 nt, synthetic construct
  source 1..23: mol_type = other RNA
taaggctagatgaaaaaaagaaa

SEQ ID NO: 2697 - RNA, 23 nt, synthetic construct
  source 1..23: mol_type = other RNA
tcaaggctagatgaaaaaaagaa

SEQ ID NO: 2698 - RNA, 23 nt, synthetic construct
  source 1..23: mol_type = other RNA
tgcaaggctagatgaaaaaaaga

SEQ ID NO: 2699 - RNA, 23 nt, synthetic construct
  source 1..23: mol_type = other RNA
tagcaaggctagatgaaaaaaag

SEQ ID NO: 2700 - RNA, 23 nt, synthetic construct
  source 1..23: mol_type = other RNA
taagcaaggctagatgaaaaaaa

SEQ ID NO: 2701 - RNA, 23 nt, synthetic construct
  source 1..23: mol_type = other RNA
taaagcaaggctagatgaaaaaa

SEQ ID NO: 2702 - RNA, 23 nt, synthetic construct
  source 1..23: mol_type = other RNA
tataaagcaaggctagatgaaaa

SEQ ID NO: 2703 - RNA, 23 nt, synthetic construct
  source 1..23: mol_type = other RNA
taatctctgagagtactaaggga

SEQ ID NO: 2704 - RNA, 23 nt, synthetic construct
  source 1..23: mol_type = other RNA
tttatataatctctgagagtact

SEQ ID NO: 2705 - RNA, 23 nt, synthetic construct
  source 1..23: mol_type = other RNA
ttttatataatctctgagagtac

SEQ ID NO: 2706 - RNA, 23 nt, synthetic construct
  source 1..23: mol_type = other RNA
ttaagagttctgctagtaactag

SEQ ID NO: 2707 - RNA, 23 nt, synthetic construct
  source 1..23: mol_type = other RNA
ttatggcagggaacagtgctggg

SEQ ID NO: 2708 - RNA, 23 nt, synthetic construct
  source 1..23: mol_type = other RNA
tatatggcagggaacagtgctgg

SEQ ID NO: 2709 - RNA, 23 nt, synthetic construct
  source 1..23: mol_type = other RNA
tgatatggcagggaacagtgctg

SEQ ID NO: 2710 - RNA, 23 nt, synthetic construct
  source 1..23: mol_type = other RNA
tggatatggcagggaacagtgct

SEQ ID NO: 2711 - RNA, 23 nt, synthetic construct
  source 1..23: mol_type = other RNA
ttttttaatcagtaaaagttggg

SEQ ID NO: 2712 - RNA, 23 nt, synthetic construct
  source 1..23: mol_type = other RNA
tatcattgaatggcacattacgt

SEQ ID NO: 2713 - RNA, 23 nt, synthetic construct
  source 1..23: mol_type = other RNA
taaagtgggattttatcatcatc

SEQ ID NO: 2714 - RNA, 23 nt, synthetic construct
  source 1..23: mol_type = other RNA
taaaagtgggattttatcatcat

SEQ ID NO: 2715 - RNA, 23 nt, synthetic construct
  source 1..23: mol_type = other RNA
tagaaacccaaagaaaagtggga

SEQ ID NO: 2716 - RNA, 23 nt, synthetic construct
  source 1..23: mol_type = other RNA
ttagaaacccaaagaaaagtggg

SEQ ID NO: 2717 - RNA, 23 nt, synthetic construct
  source 1..23: mol_type = other RNA
tgtagaaacccaaagaaaagtgg

SEQ ID NO: 2718 - RNA, 23 nt, synthetic construct
  source 1..23: mol_type = other RNA
tagtagaaacccaaagaaaagtg

SEQ ID NO: 2719 - RNA, 23 nt, synthetic construct
  source 1..23: mol_type = other RNA
ttagtagaaacccaaagaaaagt

SEQ ID NO: 2720 - RNA, 23 nt, synthetic construct
  source 1..23: mol_type = other RNA
tttagtagaaacccaaagaaaag

SEQ ID NO: 2721 - RNA, 23 nt, synthetic construct
  source 1..23: mol_type = other RNA
ttttagtagaaacccaaagaaaa

SEQ ID NO: 2722 - RNA, 23 nt, synthetic construct
  source 1..23: mol_type = other RNA
tttttagtagaaacccaaagaaa

SEQ ID NO: 2723 - RNA, 23 nt, synthetic construct
  source 1..23: mol_type = other RNA
tattttagtagaaacccaaagaa

SEQ ID NO: 2724 - RNA, 23 nt, synthetic construct
  source 1..23: mol_type = other RNA
ttattttagtagaaacccaaaga

SEQ ID NO: 2725 - RNA, 23 nt, synthetic construct
  source 1..23: mol_type = other RNA
tttattttagtagaaacccaaag

SEQ ID NO: 2726 - RNA, 23 nt, synthetic construct
  source 1..23: mol_type = other RNA
tctgagtgagtaaattattttag

SEQ ID NO: 2727 - RNA, 23 nt, synthetic construct
  source 1..23: mol_type = other RNA
tctctgagtgagtaaattatttt

SEQ ID NO: 2728 - RNA, 23 nt, synthetic construct
  source 1..23: mol_type = other RNA
tactctgagtgagtaaattattt

SEQ ID NO: 2729 - RNA, 23 nt, synthetic construct
  source 1..23: mol_type = other RNA
tcactctgagtgagtaaattatt

SEQ ID NO: 2730 - RNA, 23 nt, synthetic construct
  source 1..23: mol_type = other RNA
ttcactctgagtgagtaaattat

SEQ ID NO: 2731 - RNA, 23 nt, synthetic construct
  source 1..23: mol_type = other RNA
tctcactctgagtgagtaaatta

SEQ ID NO: 2732 - RNA, 23 nt, synthetic construct
  source 1..23: mol_type = other RNA
ttttttctcattgacctcactct

SEQ ID NO: 2733 - RNA, 23 nt, synthetic construct
  source 1..23: mol_type = other RNA
tattctacaactctttcttagcc

SEQ ID NO: 2734 - RNA, 23 nt, synthetic construct
  source 1..23: mol_type = other RNA
taaccattctacaactctttctt

SEQ ID NO: 2735 - RNA, 23 nt, synthetic construct
  source 1..23: mol_type = other RNA
ttccattaattttatcagcaccc

SEQ ID NO: 2736 - RNA, 23 nt, synthetic construct
  source 1..23: mol_type = other RNA
tatccattaattttatcagcacc

SEQ ID NO: 2737 - RNA, 23 nt, synthetic construct
  source 1..23: mol_type = other RNA
ttatccattaattttatcagcac

SEQ ID NO: 2738 - RNA, 23 nt, synthetic construct
  source 1..23: mol_type = other RNA
tttctatactctcacagttccta

SEQ ID NO: 2739 - RNA, 23 nt, synthetic construct
  source 1..23: mol_type = other RNA
tattctatactctcacagttcct

SEQ ID NO: 2740 - RNA, 23 nt, synthetic construct
  source 1..23: mol_type = other RNA
taattctatactctcacagttcc

SEQ ID NO: 2741 - RNA, 23 nt, synthetic construct
  source 1..23: mol_type = other RNA
taaattctatactctcacagttc

SEQ ID NO: 2742 - RNA, 23 nt, synthetic construct
  source 1..23: mol_type = other RNA
tgaaattctatactctcacagtt

SEQ ID NO: 2743 - RNA, 23 nt, synthetic construct
  source 1..23: mol_type = other RNA
tagaaattctatactctcacagt

SEQ ID NO: 2744 - RNA, 23 nt, synthetic construct
  source 1..23: mol_type = other RNA
taagaaattctatactctcacag

SEQ ID NO: 2745 - RNA, 23 nt, synthetic construct
  source 1..23: mol_type = other RNA
ttaagaaattctatactctcaca

SEQ ID NO: 2746 - RNA, 23 nt, synthetic construct
  source 1..23: mol_type = other RNA
tctaagaaattctatactctcac

SEQ ID NO: 2747 - RNA, 23 nt, synthetic construct
  source 1..23: mol_type = other RNA
tactaagaaattctatactctca

SEQ ID NO: 2748 - RNA, 23 nt, synthetic construct
  source 1..23: mol_type = other RNA
tcactaagaaattctatactctc

SEQ ID NO: 2749 - RNA, 23 nt, synthetic construct
  source 1..23: mol_type = other RNA
tgcactaagaaattctatactct

SEQ ID NO: 2750 - RNA, 23 nt, synthetic construct
  source 1..23: mol_type = other RNA
ttgcactaagaaattctatactc

SEQ ID NO: 2751 - RNA, 23 nt, synthetic construct
  source 1..23: mol_type = other RNA
tgagaaagaacagtccttacaga

SEQ ID NO: 2752 - RNA, 23 nt, synthetic construct
  source 1..23: mol_type = other RNA
taaaagttagataatatcccact

SEQ ID NO: 2753 - RNA, 23 nt, synthetic construct
  source 1..23: mol_type = other RNA
tgaagatgaatgccaaagacaaa

SEQ ID NO: 2754 - RNA, 23 nt, synthetic construct
  source 1..23: mol_type = other RNA
taaaagaagatgaatgccaaaga

SEQ ID NO: 2755 - RNA, 23 nt, synthetic construct
  source 1..23: mol_type = other RNA
ttgccaaacattttttaatgcac

SEQ ID NO: 2756 - RNA, 23 nt, synthetic construct
  source 1..23: mol_type = other RNA
tatacaggaattatagagtgact

SEQ ID NO: 2757 - RNA, 23 nt, synthetic construct
  source 1..23: mol_type = other RNA
tgacaggttaaacgacaactaaa

SEQ ID NO: 2758 - RNA, 23 nt, synthetic construct
  source 1..23: mol_type = other RNA
tggacaggttaaacgacaactaa

SEQ ID NO: 2759 - RNA, 23 nt, synthetic construct
  source 1..23: mol_type = other RNA
ttggacaggttaaacgacaacta

SEQ ID NO: 2760 - RNA, 23 nt, synthetic construct
  source 1..23: mol_type = other RNA
tttggacaggttaaacgacaact

SEQ ID NO: 2761 - RNA, 23 nt, synthetic construct
  source 1..23: mol_type = other RNA
ttttggacaggttaaacgacaac

SEQ ID NO: 2762 - RNA, 23 nt, synthetic construct
  source 1..23: mol_type = other RNA
tgtttggacaggttaaacgacaa

SEQ ID NO: 2763 - RNA, 23 nt, synthetic construct
  source 1..23: mol_type = other RNA
tagtttggacaggttaaacgaca

SEQ ID NO: 2764 - RNA, 23 nt, synthetic construct
  source 1..23: mol_type = other RNA
taagtttggacaggttaaacgac

SEQ ID NO: 2765 - RNA, 23 nt, synthetic construct
  source 1..23: mol_type = other RNA
tgaagtttggacaggttaaacga

SEQ ID NO: 2766 - RNA, 23 nt, synthetic construct
  source 1..23: mol_type = other RNA
tagaagtttggacaggttaaacg

SEQ ID NO: 2767 - RNA, 23 nt, synthetic construct
  source 1..23: mol_type = other RNA
ttagaagtttggacaggttaaac

SEQ ID NO: 2768 - RNA, 23 nt, synthetic construct
  source 1..23: mol_type = other RNA
tgtagaagtttggacaggttaaa

SEQ ID NO: 2769 - RNA, 23 nt, synthetic construct
  source 1..23: mol_type = other RNA
ttgtagaagtttggacaggttaa

SEQ ID NO: 2770 - RNA, 23 nt, synthetic construct
  source 1..23: mol_type = other RNA
tgtgtagaagtttggacaggtta

SEQ ID NO: 2771 - RNA, 23 nt, synthetic construct
  source 1..23: mol_type = other RNA
ttgtgtagaagtttggacaggtt

SEQ ID NO: 2772 - RNA, 23 nt, synthetic construct
  source 1..23: mol_type = other RNA
tttgtgtagaagtttggacaggt

SEQ ID NO: 2773 - RNA, 23 nt, synthetic construct
  source 1..23: mol_type = other RNA
tattgtgtagaagtttggacagg

SEQ ID NO: 2774 - RNA, 23 nt, synthetic construct
  source 1..23: mol_type = other RNA
tcattgtgtagaagtttggacag

SEQ ID NO: 2775 - RNA, 23 nt, synthetic construct
  source 1..23: mol_type = other RNA
ttcattgtgtagaagtttggaca

SEQ ID NO: 2776 - RNA, 23 nt, synthetic construct
  source 1..23: mol_type = other RNA
tttcattgtgtagaagtttggac

SEQ ID NO: 2777 - RNA, 23 nt, synthetic construct
  source 1..23: mol_type = other RNA
tgttcattgtgtagaagtttgga

SEQ ID NO: 2778 - RNA, 23 nt, synthetic construct
  source 1..23: mol_type = other RNA
tagttcattgtgtagaagtttgg

SEQ ID NO: 2779 - RNA, 23 nt, synthetic construct
  source 1..23: mol_type = other RNA
taagttcattgtgtagaagtttg

SEQ ID NO: 2780 - RNA, 23 nt, synthetic construct
  source 1..23: mol_type = other RNA
tgaagttcattgtgtagaagttt

SEQ ID NO: 2781 - RNA, 23 nt, synthetic construct
  source 1..23: mol_type = other RNA
tagaagttcattgtgtagaagtt

SEQ ID NO: 2782 - RNA, 23 nt, synthetic construct
  source 1..23: mol_type = other RNA
taagaagttcattgtgtagaagt

SEQ ID NO: 2783 - RNA, 23 nt, synthetic construct
  source 1..23: mol_type = other RNA
ttaagaagttcattgtgtagaag

SEQ ID NO: 2784 - RNA, 23 nt, synthetic construct
  source 1..23: mol_type = other RNA
tttaagaagttcattgtgtagaa

SEQ ID NO: 2785 - RNA, 23 nt, synthetic construct
  source 1..23: mol_type = other RNA
tgttaagaagttcattgtgtaga

SEQ ID NO: 2786 - RNA, 23 nt, synthetic construct
  source 1..23: mol_type = other RNA
ttgttaagaagttcattgtgtag

SEQ ID NO: 2787 - RNA, 23 nt, synthetic construct
  source 1..23: mol_type = other RNA
tttgttaagaagttcattgtgta

SEQ ID NO: 2788 - RNA, 23 nt, synthetic construct
  source 1..23: mol_type = other RNA
tcttgttaagaagttcattgtgt

SEQ ID NO: 2789 - RNA, 23 nt, synthetic construct
  source 1..23: mol_type = other RNA
ttcttgttaagaagttcattgtg

SEQ ID NO: 2790 - RNA, 23 nt, synthetic construct
  source 1..23: mol_type = other RNA
tatcttgttaagaagttcattgt

SEQ ID NO: 2791 - RNA, 23 nt, synthetic construct
  source 1..23: mol_type = other RNA
taatcttgttaagaagttcattg

SEQ ID NO: 2792 - RNA, 23 nt, synthetic construct
  source 1..23: mol_type = other RNA
tgagaacttaaaatcttgttaag

SEQ ID NO: 2793 - RNA, 23 nt, synthetic construct
  source 1..23: mol_type = other RNA
tcagagaacttaaaatcttgtta

SEQ ID NO: 2794 - RNA, 23 nt, synthetic construct
  source 1..23: mol_type = other RNA
taacctcttatacagagaactta

SEQ ID NO: 2795 - RNA, 23 nt, synthetic construct
  source 1..23: mol_type = other RNA
ttgaggtgaaacctcttatacag

SEQ ID NO: 2796 - RNA, 23 nt, synthetic construct
  source 1..23: mol_type = other RNA
taatactctatagtgccaaatga

SEQ ID NO: 2797 - RNA, 23 nt, synthetic construct
  source 1..23: mol_type = other RNA
taaatactctatagtgccaaatg

SEQ ID NO: 2798 - RNA, 23 nt, synthetic construct
  source 1..23: mol_type = other RNA
tcaaatactctatagtgccaaat

SEQ ID NO: 2799 - RNA, 23 nt, synthetic construct
  source 1..23: mol_type = other RNA
tacaaatactctatagtgccaaa

SEQ ID NO: 2800 - RNA, 23 nt, synthetic construct
  source 1..23: mol_type = other RNA
taacaaatactctatagtgccaa

SEQ ID NO: 2801 - RNA, 23 nt, synthetic construct
  source 1..23: mol_type = other RNA
ttaacaaatactctatagtgcca

SEQ ID NO: 2802 - RNA, 23 nt, synthetic construct
  source 1..23: mol_type = other RNA
tttaacaaatactctatagtgcc

SEQ ID NO: 2803 - RNA, 23 nt, synthetic construct
  source 1..23: mol_type = other RNA
tattaacaaatactctatagtgc

SEQ ID NO: 2804 - RNA, 23 nt, synthetic construct
  source 1..23: mol_type = other RNA
tcattaacaaatactctatagtg

SEQ ID NO: 2805 - RNA, 23 nt, synthetic construct
  source 1..23: mol_type = other RNA
tccattaacaaatactctatagt

SEQ ID NO: 2806 - RNA, 23 nt, synthetic construct
  source 1..23: mol_type = other RNA
tgccattaacaaatactctatag

SEQ ID NO: 2807 - RNA, 23 nt, synthetic construct
  source 1..23: mol_type = other RNA
ttgccattaacaaatactctata

SEQ ID NO: 2808 - RNA, 23 nt, synthetic construct
  source 1..23: mol_type = other RNA
tctgccattaacaaatactctat

SEQ ID NO: 2809 - RNA, 23 nt, synthetic construct
  source 1..23: mol_type = other RNA
ttctgccattaacaaatactcta

SEQ ID NO: 2810 - RNA, 23 nt, synthetic construct
  source 1..23: mol_type = other RNA
taaaagaaaaatcatctctgcca

SEQ ID NO: 2811 - RNA, 23 nt, synthetic construct
  source 1..23: mol_type = other RNA
ttaaaagaaaaatcatctctgcc

SEQ ID NO: 2812 - RNA, 23 nt, synthetic construct
  source 1..23: mol_type = other RNA
tttaaaagaaaaatcatctctgc

SEQ ID NO: 2813 - RNA, 23 nt, synthetic construct
  source 1..23: mol_type = other RNA
tatacaaataacagctagtcttt

SEQ ID NO: 2814 - RNA, 23 nt, synthetic construct
  source 1..23: mol_type = other RNA
tgacattctttatatgttagcta

SEQ ID NO: 2815 - RNA, 23 nt, synthetic construct
  source 1..23: mol_type = other RNA
taagcaaaagtagacattcttta

SEQ ID NO: 2816 - RNA, 23 nt, synthetic construct
  source 1..23: mol_type = other RNA
tttaaagcaaaagtagacattct

SEQ ID NO: 2817 - RNA, 23 nt, synthetic construct
  source 1..23: mol_type = other RNA
tctaatagcataatggcttagtt

SEQ ID NO: 2818 - RNA, 23 nt, synthetic construct
  source 1..23: mol_type = other RNA
taaatagggattgttacctaatt

SEQ ID NO: 2819 - RNA, 23 nt, synthetic construct
  source 1..23: mol_type = other RNA
taaaatagggattgttacctaat

SEQ ID NO: 2820 - RNA, 23 nt, synthetic construct
  source 1..23: mol_type = other RNA
ttaaaatagggattgttacctaa

SEQ ID NO: 2821 - RNA, 23 nt, synthetic construct
  source 1..23: mol_type = other RNA
tttaaaatagggattgttaccta

SEQ ID NO: 2822 - RNA, 23 nt, synthetic construct
  source 1..23: mol_type = other RNA
ttttaaaatagggattgttacct

SEQ ID NO: 2823 - RNA, 23 nt, synthetic construct
  source 1..23: mol_type = other RNA
tttttaaaatagggattgttacc

SEQ ID NO: 2824 - RNA, 23 nt, synthetic construct
  source 1..23: mol_type = other RNA
tggaattttaaaatagggattgt

SEQ ID NO: 2825 - RNA, 23 nt, synthetic construct
  source 1..23: mol_type = other RNA
tggcagttctattattgttaggg

SEQ ID NO: 2826 - RNA, 23 nt, synthetic construct
  source 1..23: mol_type = other RNA
ttggcagttctattattgttagg

SEQ ID NO: 2827 - RNA, 23 nt, synthetic construct
  source 1..23: mol_type = other RNA
tgctggcagttctattattgtta

SEQ ID NO: 2828 - RNA, 23 nt, synthetic construct
  source 1..23: mol_type = other RNA
tagaaaagtatgctggcagttct

SEQ ID NO: 2829 - RNA, 23 nt, synthetic construct
  source 1..23: mol_type = other RNA
tgagaaaagtatgctggcagttc

SEQ ID NO: 2830 - RNA, 23 nt, synthetic construct
  source 1..23: mol_type = other RNA
tagagaaaagtatgctggcagtt

SEQ ID NO: 2831 - RNA, 23 nt, synthetic construct
  source 1..23: mol_type = other RNA
taagagaaaagtatgctggcagt

SEQ ID NO: 2832 - RNA, 23 nt, synthetic construct
  source 1..23: mol_type = other RNA
taaagagaaaagtatgctggcag

SEQ ID NO: 2833 - RNA, 23 nt, synthetic construct
  source 1..23: mol_type = other RNA
tgaaagagaaaagtatgctggca

SEQ ID NO: 2834 - RNA, 23 nt, synthetic construct
  source 1..23: mol_type = other RNA
ttgaaagagaaaagtatgctggc

SEQ ID NO: 2835 - RNA, 23 nt, synthetic construct
  source 1..23: mol_type = other RNA
tctgaaagagaaaagtatgctgg

SEQ ID NO: 2836 - RNA, 23 nt, synthetic construct
  source 1..23: mol_type = other RNA
tactgaaagagaaaagtatgctg

SEQ ID NO: 2837 - RNA, 23 nt, synthetic construct
  source 1..23: mol_type = other RNA
taactgaaagagaaaagtatgct

SEQ ID NO: 2838 - RNA, 23 nt, synthetic construct
  source 1..23: mol_type = other RNA
tcaactgaaagagaaaagtatgc

SEQ ID NO: 2839 - RNA, 23 nt, synthetic construct
  source 1..23: mol_type = other RNA
tacaactgaaagagaaaagtatg

SEQ ID NO: 2840 - RNA, 23 nt, synthetic construct
  source 1..23: mol_type = other RNA
ttacaactgaaagagaaaagtat

SEQ ID NO: 2841 - RNA, 23 nt, synthetic construct
  source 1..23: mol_type = other RNA
tatgtattcatctacaactgaaa

SEQ ID NO: 2842 - RNA, 23 nt, synthetic construct
  source 1..23: mol_type = other RNA
taatgtattcatctacaactgaa

SEQ ID NO: 2843 - RNA, 23 nt, synthetic construct
  source 1..23: mol_type = other RNA
taatacagtcacatctgaaaata

SEQ ID NO: 2844 - RNA, 23 nt, synthetic construct
  source 1..23: mol_type = other RNA
taaatacagtcacatctgaaaat

SEQ ID NO: 2845 - RNA, 23 nt, synthetic construct
  source 1..23: mol_type = other RNA
tgaaatacagtcacatctgaaaa

SEQ ID NO: 2846 - RNA, 23 nt, synthetic construct
  source 1..23: mol_type = other RNA
tggaaatacagtcacatctgaaa

SEQ ID NO: 2847 - RNA, 23 nt, synthetic construct
  source 1..23: mol_type = other RNA
taggaaatacagtcacatctgaa

SEQ ID NO: 2848 - RNA, 23 nt, synthetic construct
  source 1..23: mol_type = other RNA
tcaggaaatacagtcacatctga

SEQ ID NO: 2849 - RNA, 23 nt, synthetic construct
  source 1..23: mol_type = other RNA
ttcaggaaatacagtcacatctg

SEQ ID NO: 2850 - RNA, 23 nt, synthetic construct
  source 1..23: mol_type = other RNA
tatcaggaaatacagtcacatct

SEQ ID NO: 2851 - RNA, 23 nt, synthetic construct
  source 1..23: mol_type = other RNA
tgatcaggaaatacagtcacatc

SEQ ID NO: 2852 - RNA, 23 nt, synthetic construct
  source 1..23: mol_type = other RNA
ttgatcaggaaatacagtcacat

SEQ ID NO: 2853 - RNA, 23 nt, synthetic construct
  source 1..23: mol_type = other RNA
tatgatcaggaaatacagtcaca

SEQ ID NO: 2854 - RNA, 23 nt, synthetic construct
  source 1..23: mol_type = other RNA
taatgatcaggaaatacagtcac

SEQ ID NO: 2855 - RNA, 23 nt, synthetic construct
  source 1..23: mol_type = other RNA
tcaatgatcaggaaatacagtca

SEQ ID NO: 2856 - RNA, 23 nt, synthetic construct
  source 1..23: mol_type = other RNA
tccaatgatcaggaaatacagtc

SEQ ID NO: 2857 - RNA, 23 nt, synthetic construct
  source 1..23: mol_type = other RNA
taccaatgatcaggaaatacagt

SEQ ID NO: 2858 - RNA, 23 nt, synthetic construct
  source 1..23: mol_type = other RNA
tgaccaatgatcaggaaatacag

SEQ ID NO: 2859 - RNA, 23 nt, synthetic construct
  source 1..23: mol_type = other RNA
ttgggtataagggtaatctccta

SEQ ID NO: 2860 - RNA, 23 nt, synthetic construct
  source 1..23: mol_type = other RNA
tagttggattttagcccgcacct

SEQ ID NO: 2861 - RNA, 23 nt, synthetic construct
  source 1..23: mol_type = other RNA
tcagttggattttagcccgcacc

SEQ ID NO: 2862 - RNA, 23 nt, synthetic construct
  source 1..23: mol_type = other RNA
tgcagttggattttagcccgcac

SEQ ID NO: 2863 - RNA, 23 nt, synthetic construct
  source 1..23: mol_type = other RNA
ttgcagttggattttagcccgca

SEQ ID NO: 2864 - RNA, 23 nt, synthetic construct
  source 1..23: mol_type = other RNA
tttgcagttggattttagcccgc

SEQ ID NO: 2865 - RNA, 23 nt, synthetic construct
  source 1..23: mol_type = other RNA
tattgcagttggattttagcccg

SEQ ID NO: 2866 - RNA, 23 nt, synthetic construct
  source 1..23: mol_type = other RNA
taattgcagttggattttagccc

SEQ ID NO: 2867 - RNA, 23 nt, synthetic construct
  source 1..23: mol_type = other RNA
tcaattgcagttggattttagcc

SEQ ID NO: 2868 - RNA, 23 nt, synthetic construct
  source 1..23: mol_type = other RNA
tccaattgcagttggattttagc

SEQ ID NO: 2869 - RNA, 23 nt, synthetic construct
  source 1..23: mol_type = other RNA
tgccaattgcagttggattttag

SEQ ID NO: 2870 - RNA, 23 nt, synthetic construct
  source 1..23: mol_type = other RNA
tagccaattgcagttggatttta

SEQ ID NO: 2871 - RNA, 23 nt, synthetic construct
  source 1..23: mol_type = other RNA
tgagccaattgcagttggatttt

SEQ ID NO: 2872 - RNA, 23 nt, synthetic construct
  source 1..23: mol_type = other RNA
tggagccaattgcagttggattt

SEQ ID NO: 2873 - RNA, 23 nt, synthetic construct
  source 1..23: mol_type = other RNA
tgggagccaattgcagttggatt

SEQ ID NO: 2874 - RNA, 23 nt, synthetic construct
  source 1..23: mol_type = other RNA
taagccaataagatgcttctctg

SEQ ID NO: 2875 - RNA, 23 nt, synthetic construct
  source 1..23: mol_type = other RNA
ttataagccaataagatgcttct

SEQ ID NO: 2876 - RNA, 23 nt, synthetic construct
  source 1..23: mol_type = other RNA
tatataagccaataagatgcttc

SEQ ID NO: 2877 - RNA, 23 nt, synthetic construct
  source 1..23: mol_type = other RNA
ttctcattttctgaagatgtata

SEQ ID NO: 2878 - RNA, 23 nt, synthetic construct
  source 1..23: mol_type = other RNA
tttctcattttctgaagatgtat

SEQ ID NO: 2879 - RNA, 23 nt, synthetic construct
  source 1..23: mol_type = other RNA
tattctcattttctgaagatgta

SEQ ID NO: 2880 - RNA, 23 nt, synthetic construct
  source 1..23: mol_type = other RNA
taattctcattttctgaagatgt

SEQ ID NO: 2881 - RNA, 23 nt, synthetic construct
  source 1..23: mol_type = other RNA
ttaattctcattttctgaagatg

SEQ ID NO: 2882 - RNA, 23 nt, synthetic construct
  source 1..23: mol_type = other RNA
taagttctttgttcaatctgtag

SEQ ID NO: 2883 - RNA, 23 nt, synthetic construct
  source 1..23: mol_type = other RNA
ttaagttctttgttcaatctgta

SEQ ID NO: 2884 - RNA, 23 nt, synthetic construct
  source 1..23: mol_type = other RNA
tctaagttctttgttcaatctgt

SEQ ID NO: 2885 - RNA, 23 nt, synthetic construct
  source 1..23: mol_type = other RNA
ttctaagttctttgttcaatctg

SEQ ID NO: 2886 - RNA, 23 nt, synthetic construct
  source 1..23: mol_type = other RNA
tttctaagttctttgttcaatct

SEQ ID NO: 2887 - RNA, 23 nt, synthetic construct
  source 1..23: mol_type = other RNA
tcttctaagttctttgttcaatc

SEQ ID NO: 2888 - RNA, 23 nt, synthetic construct
  source 1..23: mol_type = other RNA
tcaatttctcttctctcaggaat

SEQ ID NO: 2889 - RNA, 23 nt, synthetic construct
  source 1..23: mol_type = other RNA
ttcaatttctcttctctcaggaa

SEQ ID NO: 2890 - RNA, 23 nt, synthetic construct
  source 1..23: mol_type = other RNA
tatcaatttctcttctctcagga

SEQ ID NO: 2891 - RNA, 23 nt, synthetic construct
  source 1..23: mol_type = other RNA
taatcaatttctcttctctcagg

SEQ ID NO: 2892 - RNA, 23 nt, synthetic construct
  source 1..23: mol_type = other RNA
tcaatcaatttctcttctctcag

SEQ ID NO: 2893 - RNA, 23 nt, synthetic construct
  source 1..23: mol_type = other RNA
tacaatcaatttctcttctctca

SEQ ID NO: 2894 - RNA, 23 nt, synthetic construct
  source 1..23: mol_type = other RNA
taacaatcaatttctcttctctc

SEQ ID NO: 2895 - RNA, 23 nt, synthetic construct
  source 1..23: mol_type = other RNA
taaacaatcaatttctcttctct

SEQ ID NO: 2896 - RNA, 23 nt, synthetic construct
  source 1..23: mol_type = other RNA
ttaaacaatcaatttctcttctc

SEQ ID NO: 2897 - RNA, 23 nt, synthetic construct
  source 1..23: mol_type = other RNA
tgataaacaatcaatttctcttc

SEQ ID NO: 2898 - RNA, 23 nt, synthetic construct
  source 1..23: mol_type = other RNA
tgttgaaaaattaaaccaacatg

SEQ ID NO: 2899 - RNA, 23 nt, synthetic construct
  source 1..23: mol_type = other RNA
tggttgaaaaattaaaccaacat

SEQ ID NO: 2900 - RNA, 23 nt, synthetic construct
  source 1..23: mol_type = other RNA
tgggttgaaaaattaaaccaaca

SEQ ID NO: 2901 - RNA, 23 nt, synthetic construct
  source 1..23: mol_type = other RNA
ttgggttgaaaaattaaaccaac

SEQ ID NO: 2902 - RNA, 23 nt, synthetic construct
  source 1..23: mol_type = other RNA
taatgaaaactgtatggacgata

SEQ ID NO: 2903 - RNA, 23 nt, synthetic construct
  source 1..23: mol_type = other RNA
tgaatgaaaactgtatggacgat

SEQ ID NO: 2904 - RNA, 23 nt, synthetic construct
  source 1..23: mol_type = other RNA
tagaatgaaaactgtatggacga

SEQ ID NO: 2905 - RNA, 23 nt, synthetic construct
  source 1..23: mol_type = other RNA
ttagaatgaaaactgtatggacg

SEQ ID NO: 2906 - RNA, 23 nt, synthetic construct
  source 1..23: mol_type = other RNA
tatagaatgaaaactgtatggac

SEQ ID NO: 2907 - RNA, 23 nt, synthetic construct
  source 1..23: mol_type = other RNA
tcatagaatgaaaactgtatgga

SEQ ID NO: 2908 - RNA, 23 nt, synthetic construct
  source 1..23: mol_type = other RNA
tgcatagaatgaaaactgtatgg

SEQ ID NO: 2909 - RNA, 23 nt, synthetic construct
  source 1..23: mol_type = other RNA
ttgcatagaatgaaaactgtatg

SEQ ID NO: 2910 - RNA, 23 nt, synthetic construct
  source 1..23: mol_type = other RNA
tatgcatagaatgaaaactgtat

SEQ ID NO: 2911 - RNA, 23 nt, synthetic construct
  source 1..23: mol_type = other RNA
tcatgcatagaatgaaaactgta

SEQ ID NO: 2912 - RNA, 23 nt, synthetic construct
  source 1..23: mol_type = other RNA
tccatgcatagaatgaaaactgt

SEQ ID NO: 2913 - RNA, 23 nt, synthetic construct
  source 1..23: mol_type = other RNA
taaaatttaggcacacaatcctc

SEQ ID NO: 2914 - RNA, 23 nt, synthetic construct
  source 1..23: mol_type = other RNA
ttgttagacaaaatttaggcaca

SEQ ID NO: 2915 - RNA, 23 nt, synthetic construct
  source 1..23: mol_type = other RNA
tatttgttagacaaaatttaggc

SEQ ID NO: 2916 - RNA, 23 nt, synthetic construct
  source 1..23: mol_type = other RNA
tcatttgttagacaaaatttagg

SEQ ID NO: 2917 - RNA, 23 nt, synthetic construct
  source 1..23: mol_type = other RNA
tgcatttgttagacaaaatttag

SEQ ID NO: 2918 - RNA, 23 nt, synthetic construct
  source 1..23: mol_type = other RNA
tcttgcatttgttagacaaaatt

SEQ ID NO: 2919 - RNA, 23 nt, synthetic construct
  source 1..23: mol_type = other RNA
ttattagtaaatgtcattctacg

SEQ ID NO: 2920 - RNA, 23 nt, synthetic construct
  source 1..23: mol_type = other RNA
ttattatttagcctatggaagaa

SEQ ID NO: 2921 - RNA, 23 nt, synthetic construct
  source 1..23: mol_type = other RNA
tctagaatttaatattttggctc

SEQ ID NO: 2922 - RNA, 23 nt, synthetic construct
  source 1..23: mol_type = other RNA
tcggaaaagaactagaatttaat

SEQ ID NO: 2923 - RNA, 23 nt, synthetic construct
  source 1..23: mol_type = other RNA
tgcggaaaagaactagaatttaa

SEQ ID NO: 2924 - RNA, 23 nt, synthetic construct
  source 1..23: mol_type = other RNA
ttgcggaaaagaactagaattta

SEQ ID NO: 2925 - RNA, 23 nt, synthetic construct
  source 1..23: mol_type = other RNA
tttgcggaaaagaactagaattt

SEQ ID NO: 2926 - RNA, 23 nt, synthetic construct
  source 1..23: mol_type = other RNA
tattgcggaaaagaactagaatt

SEQ ID NO: 2927 - RNA, 23 nt, synthetic construct
  source 1..23: mol_type = other RNA
tcattgcggaaaagaactagaat

SEQ ID NO: 2928 - RNA, 23 nt, synthetic construct
  source 1..23: mol_type = other RNA
ttcattgcggaaaagaactagaa

SEQ ID NO: 2929 - RNA, 23 nt, synthetic construct
  source 1..23: mol_type = other RNA
tgtcattgcggaaaagaactaga

SEQ ID NO: 2930 - RNA, 23 nt, synthetic construct
  source 1..23: mol_type = other RNA
tagtcattgcggaaaagaactag

SEQ ID NO: 2931 - RNA, 23 nt, synthetic construct
  source 1..23: mol_type = other RNA
ttagtcattgcggaaaagaacta

SEQ ID NO: 2932 - RNA, 23 nt, synthetic construct
  source 1..23: mol_type = other RNA
tctagtcattgcggaaaagaact

SEQ ID NO: 2933 - RNA, 23 nt, synthetic construct
  source 1..23: mol_type = other RNA
tactagtcattgcggaaaagaac

SEQ ID NO: 2934 - RNA, 23 nt, synthetic construct
  source 1..23: mol_type = other RNA
tgtttgaataatcttctccagtc

SEQ ID NO: 2935 - RNA, 23 nt, synthetic construct
  source 1..23: mol_type = other RNA
taagtttgaataatcttctccag

SEQ ID NO: 2936 - RNA, 23 nt, synthetic construct
  source 1..23: mol_type = other RNA
taacctgaaacacagatcaagtt

SEQ ID NO: 2937 - RNA, 23 nt, synthetic construct
  source 1..23: mol_type = other RNA
tttaaaaacctgaaacacagatc

SEQ ID NO: 2938 - RNA, 23 nt, synthetic construct
  source 1..23: mol_type = other RNA
tttaggacatttaaaaacctgaa

SEQ ID NO: 2939 - RNA, 23 nt, synthetic construct
  source 1..23: mol_type = other RNA
taagtcaatccaaaattcctttt

SEQ ID NO: 2940 - RNA, 23 nt, synthetic construct
  source 1..23: mol_type = other RNA
tattagtactttgaaagtcaatc

SEQ ID NO: 2941 - RNA, 23 nt, synthetic construct
  source 1..23: mol_type = other RNA
tgtattagtactttgaaagtcaa

SEQ ID NO: 2942 - RNA, 23 nt, synthetic construct
  source 1..23: mol_type = other RNA
tgtataagaagagtcacgctacc

SEQ ID NO: 2943 - RNA, 23 nt, synthetic construct
  source 1..23: mol_type = other RNA
tttaggtataagaagagtcacgc

SEQ ID NO: 2944 - RNA, 23 nt, synthetic construct
  source 1..23: mol_type = other RNA
tacatttgtaatatgttcttagg

SEQ ID NO: 2945 - RNA, 23 nt, synthetic construct
  source 1..23: mol_type = other RNA
tagagttcaaggcatgttttgca

SEQ ID NO: 2946 - RNA, 23 nt, synthetic construct
  source 1..23: mol_type = other RNA
taagagttcaaggcatgttttgc

SEQ ID NO: 2947 - RNA, 23 nt, synthetic construct
  source 1..23: mol_type = other RNA
ttagttcaagagttcaaggcatg

SEQ ID NO: 2948 - RNA, 23 nt, synthetic construct
  source 1..23: mol_type = other RNA
tttttcacagtagttcaagagtt

SEQ ID NO: 2949 - RNA, 23 nt, synthetic construct
  source 1..23: mol_type = other RNA
tttcttttcacagtagttcaaga

SEQ ID NO: 2950 - RNA, 23 nt, synthetic construct
  source 1..23: mol_type = other RNA
tgattcttttcacagtagttcaa

SEQ ID NO: 2951 - RNA, 23 nt, synthetic construct
  source 1..23: mol_type = other RNA
ttacaaaaagtctttacaacggt

SEQ ID NO: 2952 - RNA, 23 nt, synthetic construct
  source 1..23: mol_type = other RNA
tttacaaaaagtctttacaacgg

SEQ ID NO: 2953 - RNA, 23 nt, synthetic construct
  source 1..23: mol_type = other RNA
tttaagagtatcagctagcttac

SEQ ID NO: 2954 - RNA, 23 nt, synthetic construct
  source 1..23: mol_type = other RNA
ttacttaagagtatcagctagct

SEQ ID NO: 2955 - RNA, 23 nt, synthetic construct
  source 1..23: mol_type = other RNA
tatacagtttattgcccaattcc

SEQ ID NO: 2956 - RNA, 23 nt, synthetic construct
  source 1..23: mol_type = other RNA
tgatacagtttattgcccaattc

SEQ ID NO: 2957 - RNA, 23 nt, synthetic construct
  source 1..23: mol_type = other RNA
ttgatacagtttattgcccaatt

SEQ ID NO: 2958 - RNA, 23 nt, synthetic construct
  source 1..23: mol_type = other RNA
tttgatacagtttattgcccaat

SEQ ID NO: 2959 - RNA, 23 nt, synthetic construct
  source 1..23: mol_type = other RNA
ttttgatacagtttattgcccaa

SEQ ID NO: 2960 - RNA, 23 nt, synthetic construct
  source 1..23: mol_type = other RNA
tttttgatacagtttattgccca

SEQ ID NO: 2961 - RNA, 23 nt, synthetic construct
  source 1..23: mol_type = other RNA
ttttttgatacagtttattgccc

SEQ ID NO: 2962 - RNA, 23 nt, synthetic construct
  source 1..23: mol_type = other RNA
tatttttgatacagtttattgcc

SEQ ID NO: 2963 - RNA, 23 nt, synthetic construct
  source 1..23: mol_type = other RNA
tcatctacatatttttgatacag

SEQ ID NO: 2964 - RNA, 23 nt, synthetic construct
  source 1..23: mol_type = other RNA
tccatctacatatttttgataca

SEQ ID NO: 2965 - RNA, 23 nt, synthetic construct
  source 1..23: mol_type = other RNA
ttccatctacatatttttgatac

SEQ ID NO: 2966 - RNA, 23 nt, synthetic construct
  source 1..23: mol_type = other RNA
ttttgaaattctcttcaccttcc

SEQ ID NO: 2967 - RNA, 23 nt, synthetic construct
  source 1..23: mol_type = other RNA
tagtttgaaattctcttcacctt

SEQ ID NO: 2968 - RNA, 23 nt, synthetic construct
  source 1..23: mol_type = other RNA
tgagtttgaaattctcttcacct

SEQ ID NO: 2969 - RNA, 23 nt, synthetic construct
  source 1..23: mol_type = other RNA
tctagaaattaatgaaacatctg

SEQ ID NO: 2970 - RNA, 23 nt, synthetic construct
  source 1..23: mol_type = other RNA
tcatattttcacagactagaaat

SEQ ID NO: 2971 - RNA, 23 nt, synthetic construct
  source 1..23: mol_type = other RNA
tgcatattttcacagactagaaa

SEQ ID NO: 2972 - RNA, 23 nt, synthetic construct
  source 1..23: mol_type = other RNA
ttgcatattttcacagactagaa

SEQ ID NO: 2973 - RNA, 23 nt, synthetic construct
  source 1..23: mol_type = other RNA
tatgcatattttcacagactaga

SEQ ID NO: 2974 - RNA, 23 nt, synthetic construct
  source 1..23: mol_type = other RNA
taatgcatattttcacagactag

SEQ ID NO: 2975 - RNA, 23 nt, synthetic construct
  source 1..23: mol_type = other RNA
taaatgcatattttcacagacta

SEQ ID NO: 2976 - RNA, 23 nt, synthetic construct
  source 1..23: mol_type = other RNA
taaaatgcatattttcacagact

SEQ ID NO: 2977 - RNA, 23 nt, synthetic construct
  source 1..23: mol_type = other RNA
ttaaaatgcatattttcacagac

SEQ ID NO: 2978 - RNA, 23 nt, synthetic construct
  source 1..23: mol_type = other RNA
tattttggtataaaggctatcac

SEQ ID NO: 2979 - RNA, 23 nt, synthetic construct
  source 1..23: mol_type = other RNA
tacttttatgacttgctgttggt

SEQ ID NO: 2980 - RNA, 23 nt, synthetic construct
  source 1..23: mol_type = other RNA
ttacttttatgacttgctgttgg

SEQ ID NO: 2981 - RNA, 23 nt, synthetic construct
  source 1..23: mol_type = other RNA
tatacttttatgacttgctgttg

SEQ ID NO: 2982 - RNA, 23 nt, synthetic construct
  source 1..23: mol_type = other RNA
taatacttttatgacttgctgtt

SEQ ID NO: 2983 - RNA, 23 nt, synthetic construct
  source 1..23: mol_type = other RNA
taaatacttttatgacttgctgt

SEQ ID NO: 2984 - RNA, 23 nt, synthetic construct
  source 1..23: mol_type = other RNA
ttaaatacttttatgacttgctg

SEQ ID NO: 2985 - RNA, 23 nt, synthetic construct
  source 1..23: mol_type = other RNA
taattatttacatctgaagacag

SEQ ID NO: 2986 - RNA, 23 nt, synthetic construct
  source 1..23: mol_type = other RNA
tcaatacattttcagaaaatgca

SEQ ID NO: 2987 - RNA, 23 nt, synthetic construct
  source 1..23: mol_type = other RNA
tgagttctatatgcttcacagaa

SEQ ID NO: 2988 - RNA, 23 nt, synthetic construct
  source 1..23: mol_type = other RNA
tagagttctatatgcttcacaga

SEQ ID NO: 2989 - RNA, 23 nt, synthetic construct
  source 1..23: mol_type = other RNA
ttagagttctatatgcttcacag

SEQ ID NO: 2990 - RNA, 23 nt, synthetic construct
  source 1..23: mol_type = other RNA
tatagagttctatatgcttcaca

SEQ ID NO: 2991 - RNA, 23 nt, synthetic construct
  source 1..23: mol_type = other RNA
taatagagttctatatgcttcac

SEQ ID NO: 2992 - RNA, 23 nt, synthetic construct
  source 1..23: mol_type = other RNA
taaatagagttctatatgcttca

SEQ ID NO: 2993 - RNA, 23 nt, synthetic construct
  source 1..23: mol_type = other RNA
taaaatagagttctatatgcttc

SEQ ID NO: 2994 - RNA, 23 nt, synthetic construct
  source 1..23: mol_type = other RNA
tgacacatcttcctttatttaaa

SEQ ID NO: 2995 - RNA, 21 nt, synthetic construct
  source 1..21: mol_type = other RNA
  modified_base 1: mod_base = OTHER; note = 2'-O-methylguanosine-3'-phosphate
  modified_base 2: mod_base = OTHER; note = 2'-O-methylcytidine-3'-phosphate
  modified_base 3: mod_base = OTHER; note = 2'-O-methylcytidine-3'-phosphate
  modified_base 4: mod_base = OTHER; note = 2'-O-methyladenosine-3'-phosphate
  modified_base 5: mod_base = OTHER; note = 2'-O-methyladenosine-3'-phosphate
  modified_base 6: mod_base = OTHER; note = 2'-O-methylcytidine-3'-phosphate
  modified_base 7: mod_base = OTHER; note = 2'-deoxy-2'-fluorocytidine-3'-phosphate
  modified_base 8: mod_base = OTHER; note = 2'-O-methylguanosine-3'-phosphate
  modified_base 9: mod_base = OTHER; note = 2'-deoxy-2'-fluorocytidine-3'-phosphate
  modified_base 10: mod_base = OTHER; note = 2'-deoxy-2'-fluoroguanosine-3'-phosphate
  modified_base 11: mod_base = OTHER; note = 2'-deoxy-2'-fluorocytidine-3'-phosphate
  modified_base 12: mod_base = OTHER; note = 2'-O-methyladenosine-3'-phosphate
  modified_base 13: mod_base = OTHER; note = 2'-O-methylcytidine-3'-phosphate
  modified_base 14: mod_base = OTHER; note = 2'-O-methyluridine-3'-phosphate
  modified_base 15: mod_base = OTHER; note = 2'-O-methyluridine-3'-phosphate
  modified_base 16: mod_base = OTHER; note = 2'-O-methylcytidine-3'-phosphate
  modified_base 17: mod_base = OTHER; note = 2'-O-methyladenosine-3'-phosphate
  modified_base 18: mod_base = OTHER; note = 2'-O-methyladenosine-3'-phosphate
  modified_base 19: mod_base = OTHER; note = 2'-O-methyladenosine-3'-phosphate
  modified_base 20: mod_base = OTHER; note = 2'-O-methyladenosine-3'-phosphate
  modified_base 21: mod_base = OTHER; note = 2'-O-methyladenosine
gccaaccgcgcacttcaaaaa

SEQ ID NO: 2996 - RNA, 21 nt, synthetic construct
  source 1..21: mol_type = other RNA
  modified_base 1: mod_base = OTHER; note = 2'-O-methylcytidine-3'-phosphate
  modified_base 2: mod_base = OTHER; note = 2'-O-methylcytidine-3'-phosphate
  modified_base 3: mod_base = OTHER; note = 2'-O-methyladenosine-3'-phosphate
  modified_base 4: mod_base = OTHER; note = 2'-O-methyladenosine-3'-phosphate
  modified_base 5: mod_base = OTHER; note = 2'-O-methylcytidine-3'-phosphate
  modified_base 6: mod_base = OTHER; note = 2'-O-methylcytidine-3'-phosphate
  modified_base 7: mod_base = OTHER; note = 2'-deoxy-2'-fluoroguanosine-3'-phosphate
  modified_base 8: mod_base = OTHER; note = 2'-O-methylcytidine-3'-phosphate
  modified_base 9: mod_base = OTHER; note = 2'-deoxy-2'-fluoroguanosine-3'-phosphate
  modified_base 10: mod_base = OTHER; note = 2'-deoxy-2'-fluorocytidine-3'-phosphate
  modified_base 11: mod_base = OTHER; note = 2'-deoxy-2'-fluoroadenosine-3'-phosphate
  modified_base 12: mod_base = OTHER; note = 2'-O-methylcytidine-3'-phosphate
  modified_base 13: mod_base = OTHER; note = 2'-O-methyluridine-3'-phosphate
  modified_base 14: mod_base = OTHER; note = 2'-O-methyluridine-3'-phosphate
  modified_base 15: mod_base = OTHER; note = 2'-O-methylcytidine-3'-phosphate
  modified_base 16: mod_base = OTHER; note = 2'-O-methyladenosine-3'-phosphate
  modified_base 17: mod_base = OTHER; note = 2'-O-methyladenosine-3'-phosphate
  modified_base 18: mod_base = OTHER; note = 2'-O-methyladenosine-3'-phosphate
  modified_base 19: mod_base = OTHER; note = 2'-O-methyladenosine-3'-phosphate
  modified_base 20: mod_base = OTHER; note = 2'-O-methylguanosine-3'-phosphate
  modified_base 21: mod_base = OTHER; note = 2'-O-methyladenosine
ccaaccgcgcacttcaaaaga

SEQ ID NO: 2997 - RNA, 21 nt, synthetic construct
  source 1..21: mol_type = other RNA
  modified_base 1: mod_base = OTHER; note = 2'-O-methylcytidine-3'-phosphate
  modified_base 2: mod_base = OTHER; note = 2'-O-methyladenosine-3'-phosphate
  modified_base 3: mod_base = OTHER; note = 2'-O-methyladenosine-3'-phosphate
  modified_base 4: mod_base = OTHER; note = 2'-O-methylcytidine-3'-phosphate
  modified_base 5: mod_base = OTHER; note = 2'-O-methylcytidine-3'-phosphate
  modified_base 6: mod_base = OTHER; note = 2'-O-methylguanosine-3'-phosphate
  modified_base 7: mod_base = OTHER; note = 2'-deoxy-2'-fluorocytidine-3'-phosphate
  modified_base 8: mod_base = OTHER; note = 2'-O-methylguanosine-3'-phosphate
  modified_base 9: mod_base = OTHER; note = 2'-deoxy-2'-fluorocytidine-3'-phosphate
  modified_base 10: mod_base = OTHER; note = 2'-deoxy-2'-fluoroadenosine-3'-phosphate
  modified_base 11: mod_base = OTHER; note = 2'-deoxy-2'-fluorocytidine-3'-phosphate
  modified_base 12: mod_base = OTHER; note = 2'-O-methyluridine-3'-phosphate
  modified_base 13: mod_base = OTHER; note = 2'-O-methyluridine-3'-phosphate
  modified_base 14: mod_base = OTHER; note = 2'-O-methylcytidine-3'-phosphate
  modified_base 15: mod_base = OTHER; note = 2'-O-methyladenosine-3'-phosphate
  modified_base 16: mod_base = OTHER; note = 2'-O-methyladenosine-3'-phosphate
  modified_base 17: mod_base = OTHER; note = 2'-O-methyladenosine-3'-phosphate
  modified_base 18: mod_base = OTHER; note = 2'-O-methyladenosine-3'-phosphate
  modified_base 19: mod_base = OTHER; note = 2'-O-methylguanosine-3'-phosphate
  modified_base 20: mod_base = OTHER; note = 2'-O-methylguanosine-3'-phosphate
  modified_base 21: mod_base = OTHER; note = 2'-O-methyladenosine
caaccgcgcacttcaaaagga

SEQ ID NO: 2998 - RNA, 21 nt, synthetic construct
  source 1..21: mol_type = other RNA
  modified_base 1: mod_base = OTHER; note = 2'-O-methyladenosine-3'-phosphate
  modified_base 2: mod_base = OTHER; note = 2'-O-methyladenosine-3'-phosphate
  modified_base 3: mod_base = OTHER; note = 2'-O-methylcytidine-3'-phosphate
  modified_base 4: mod_base = OTHER; note = 2'-O-methylcytidine-3'-phosphate
  modified_base 5: mod_base = OTHER; note = 2'-O-methylguanosine-3'-phosphate
  modified_base 6: mod_base = OTHER; note = 2'-O-methylcytidine-3'-phosphate
  modified_base 7: mod_base = OTHER; note = 2'-deoxy-2'-fluoroguanosine-3'-phosphate
  modified_base 8: mod_base = OTHER; note = 2'-O-methylcytidine-3'-phosphate
  modified_base 9: mod_base = OTHER; note = 2'-deoxy-2'-fluoroadenosine-3'-phosphate
  modified_base 10: mod_base = OTHER; note = 2'-deoxy-2'-fluorocytidine-3'-phosphate
  modified_base 11: mod_base = OTHER; note = 2'-deoxy-2'-fluorouridine-3'-phosphate
  modified_base 12: mod_base = OTHER; note = 2'-O-methyluridine-3'-phosphate
  modified_base 13: mod_base = OTHER; note = 2'-O-methylcytidine-3'-phosphate
  modified_base 14: mod_base = OTHER; note = 2'-O-methyladenosine-3'-phosphate
  modified_base 15: mod_base = OTHER; note = 2'-O-methyladenosine-3'-phosphate
  modified_base 16: mod_base = OTHER; note = 2'-O-methyladenosine-3'-phosphate
  modified_base 17: mod_base = OTHER; note = 2'-O-methyladenosine-3'-phosphate
  modified_base 18: mod_base = OTHER; note = 2'-O-methylguanosine-3'-phosphate
  modified_base 19: mod_base = OTHER; note = 2'-O-methylguanosine-3'-phosphate
  modified_base 20: mod_base = OTHER; note = 2'-O-methylguanosine-3'-phosphate
  modified_base 21: mod_base = OTHER; note = 2'-O-methyladenosine
aaccgcgcacttcaaaaggga

SEQ ID NO: 2999 - RNA, 21 nt, synthetic construct
  source 1..21: mol_type = other RNA
  modified_base 1: mod_base = OTHER; note = 2'-O-methyladenosine-3'-phosphate
  modified_base 2: mod_base = OTHER; note = 2'-O-methylcytidine-3'-phosphate
  modified_base 3: mod_base = OTHER; note = 2'-O-methylcytidine-3'-phosphate
  modified_base 4: mod_base = OTHER; note = 2'-O-methylguanosine-3'-phosphate
  modified_base 5: mod_base = OTHER; note = 2'-O-methylcytidine-3'-phosphate
  modified_base 6: mod_base = OTHER; note = 2'-O-methylguanosine-3'-phosphate
  modified_base 7: mod_base = OTHER; note = 2'-deoxy-2'-fluorocytidine-3'-phosphate
  modified_base 8: mod_base = OTHER; note = 2'-O-methyladenosine-3'-phosphate
  modified_base 9: mod_base = OTHER; note = 2'-deoxy-2'-fluorocytidine-3'-phosphate
  modified_base 10: mod_base = OTHER; note = 2'-deoxy-2'-fluorouridine-3'-phosphate
  modified_base 11: mod_base = OTHER; note = 2'-deoxy-2'-fluorouridine-3'-phosphate
  modified_base 12: mod_base = OTHER; note = 2'-O-methylcytidine-3'-phosphate
  modified_base 13: mod_base = OTHER; note = 2'-O-methyladenosine-3'-phosphate
  modified_base 14: mod_base = OTHER; note = 2'-O-methyladenosine-3'-phosphate
  modified_base 15: mod_base = OTHER; note = 2'-O-methyladenosine-3'-phosphate
  modified_base 16: mod_base = OTHER; note = 2'-O-methyladenosine-3'-phosphate
  modified_base 17: mod_base = OTHER; note = 2'-O-methylguanosine-3'-phosphate
  modified_base 18: mod_base = OTHER; note = 2'-O-methylguanosine-3'-phosphate
  modified_base 19: mod_base = OTHER; note = 2'-O-methylguanosine-3'-phosphate
  modified_base 20: mod_base = OTHER; note = 2'-O-methyluridine-3'-phosphate
  modified_base 21: mod_base = OTHER; note = 2'-O-methyladenosine
accgcgcacttcaaaagggta

SEQ ID NO: 3000 - RNA, 21 nt, synthetic construct
  source 1..21: mol_type = other RNA
  modified_base 1: mod_base = OTHER; note = 2'-O-methylcytidine-3'-phosphate
  modified_base 2: mod_base = OTHER; note = 2'-O-methylcytidine-3'-phosphate
  modified_base 3: mod_base = OTHER; note = 2'-O-methylguanosine-3'-phosphate
  modified_base 4: mod_base = OTHER; note = 2'-O-methylcytidine-3'-phosphate
  modified_base 5: mod_base = OTHER; note = 2'-O-methylguanosine-3'-phosphate
  modified_base 6: mod_base = OTHER; note = 2'-O-methylcytidine-3'-phosphate
  modified_base 7: mod_base = OTHER; note = 2'-deoxy-2'-fluoroadenosine-3'-phosphate
  modified_base 8: mod_base = OTHER; note = 2'-O-methylcytidine-3'-phosphate
  modified_base 9: mod_base = OTHER; note = 2'-deoxy-2'-fluorouridine-3'-phosphate
  modified_base 10: mod_base = OTHER; note = 2'-deoxy-2'-fluorouridine-3'-phosphate
  modified_base 11: mod_base = OTHER; note = 2'-deoxy-2'-fluorocytidine-3'-phosphate
  modified_base 12: mod_base = OTHER; note = 2'-O-methyladenosine-3'-phosphate
  modified_base 13: mod_base = OTHER; note = 2'-O-methyladenosine-3'-phosphate
  modified_base 14: mod_base = OTHER; note = 2'-O-methyladenosine-3'-phosphate
  modified_base 15: mod_base = OTHER; note = 2'-O-methyladenosine-3'-phosphate
  modified_base 16: mod_base = OTHER; note = 2'-O-methylguanosine-3'-phosphate
  modified_base 17: mod_base = OTHER; note = 2'-O-methylguanosine-3'-phosphate
  modified_base 18: mod_base = OTHER; note = 2'-O-methylguanosine-3'-phosphate
  modified_base 19: mod_base = OTHER; note = 2'-O-methyluridine-3'-phosphate
  modified_base 20: mod_base = OTHER; note = 2'-O-methylguanosine-3'-phosphate
  modified_base 21: mod_base = OTHER; note = 2'-O-methyladenosine
ccgcgcacttcaaaagggtga

SEQ ID NO: 3001 - RNA, 21 nt, synthetic construct
  source 1..21: mol_type = other RNA
  modified_base 1: mod_base = OTHER; note = 2'-O-methylcytidine-3'-phosphate
  modified_base 2: mod_base = OTHER; note = 2'-O-methylguanosine-3'-phosphate
  modified_base 3: mod_base = OTHER; note = 2'-O-methylcytidine-3'-phosphate
  modified_base 4: mod_base = OTHER; note = 2'-O-methylguanosine-3'-phosphate
  modified_base 5: mod_base = OTHER; note = 2'-O-methylcytidine-3'-phosphate
  modified_base 6: mod_base = OTHER; note = 2'-O-methyladenosine-3'-phosphate
  modified_base 7: mod_base = OTHER; note = 2'-deoxy-2'-fluorocytidine-3'-phosphate
  modified_base 8: mod_base = OTHER; note = 2'-O-methyluridine-3'-phosphate
  modified_base 9: mod_base = OTHER; note = 2'-deoxy-2'-fluorouridine-3'-phosphate
  modified_base 10: mod_base = OTHER; note = 2'-deoxy-2'-fluorocytidine-3'-phosphate
  modified_base 11: mod_base = OTHER; note = 2'-deoxy-2'-fluoroadenosine-3'-phosphate
  modified_base 12: mod_base = OTHER; note = 2'-O-methyladenosine-3'-phosphate
  modified_base 13: mod_base = OTHER; note = 2'-O-methyladenosine-3'-phosphate
  modified_base 14: mod_base = OTHER; note = 2'-O-methyladenosine-3'-phosphate
  modified_base 15: mod_base = OTHER; note = 2'-O-methylguanosine-3'-phosphate
  modified_base 16: mod_base = OTHER; note = 2'-O-methylguanosine-3'-phosphate
  modified_base 17: mod_base = OTHER; note = 2'-O-methylguanosine-3'-phosphate
  modified_base 18: mod_base = OTHER; note = 2'-O-methyluridine-3'-phosphate
  modified_base 19: mod_base = OTHER; note = 2'-O-methylguanosine-3'-phosphate
  modified_base 20: mod_base = OTHER; note = 2'-O-methyluridine-3'-phosphate
  modified_base 21: mod_base = OTHER; note = 2'-O-methyladenosine
cgcgcacttcaaaagggtgta

SEQ ID NO: 3002 - RNA, 21 nt, synthetic construct
  source 1..21: mol_type = other RNA
  modified_base 1: mod_base = OTHER; note = 2'-O-methylguanosine-3'-phosphate
  modified_base 2: mod_base = OTHER; note = 2'-O-methylcytidine-3'-phosphate
  modified_base 3: mod_base = OTHER; note = 2'-O-methylguanosine-3'-phosphate
  modified_base 4: mod_base = OTHER; note = 2'-O-methylcytidine-3'-phosphate
  modified_base 5: mod_base = OTHER; note = 2'-O-methyladenosine-3'-phosphate
  modified_base 6: mod_base = OTHER; note = 2'-O-methylcytidine-3'-phosphate
  modified_base 7: mod_base = OTHER; note = 2'-deoxy-2'-fluorouridine-3'-phosphate
  modified_base 8: mod_base = OTHER; note = 2'-O-methyluridine-3'-phosphate
  modified_base 9: mod_base = OTHER; note = 2'-deoxy-2'-fluorocytidine-3'-phosphate
  modified_base 10: mod_base = OTHER; note = 2'-deoxy-2'-fluoroadenosine-3'-phosphate
  modified_base 11: mod_base = OTHER; note = 2'-deoxy-2'-fluoroadenosine-3'-phosphate
  modified_base 12: mod_base = OTHER; note = 2'-O-methyladenosine-3'-phosphate
  modified_base 13: mod_base = OTHER; note = 2'-O-methyladenosine-3'-phosphate
  modified_base 14: mod_base = OTHER; note = 2'-O-methylguanosine-3'-phosphate
  modified_base 15: mod_base = OTHER; note = 2'-O-methylguanosine-3'-phosphate
  modified_base 16: mod_base = OTHER; note = 2'-O-methylguanosine-3'-phosphate
  modified_base 17: mod_base = OTHER; note = 2'-O-methyluridine-3'-phosphate
  modified_base 18: mod_base = OTHER; note = 2'-O-methylguanosine-3'-phosphate
  modified_base 19: mod_base = OTHER; note = 2'-O-methyluridine-3'-phosphate
  modified_base 20: mod_base = OTHER; note = 2'-O-methylcytidine-3'-phosphate
  modified_base 21: mod_base = OTHER; note = 2'-O-methyladenosine
gcgcacttcaaaagggtgtca

SEQ ID NO: 3003 - RNA, 21 nt, synthetic construct
  source 1..21: mol_type = other RNA
  modified_base 1: mod_base = OTHER; note = 2'-O-methylcytidine-3'-phosphate
  modified_base 2: mod_base = OTHER; note = 2'-O-methylguanosine-3'-phosphate
  modified_base 3: mod_base = OTHER; note = 2'-O-methylcytidine-3'-phosphate
  modified_base 4: mod_base = OTHER; note = 2'-O-methyladenosine-3'-phosphate
  modified_base 5: mod_base = OTHER; note = 2'-O-methylcytidine-3'-phosphate
  modified_base 6: mod_base = OTHER; note = 2'-O-methyluridine-3'-phosphate
  modified_base 7: mod_base = OTHER; note = 2'-deoxy-2'-fluorouridine-3'-phosphate
  modified_base 8: mod_base = OTHER; note = 2'-O-methylcytidine-3'-phosphate
  modified_base 9: mod_base = OTHER; note = 2'-deoxy-2'-fluoroadenosine-3'-phosphate
  modified_base 10: mod_base = OTHER; note = 2'-deoxy-2'-fluoroadenosine-3'-phosphate
  modified_base 11: mod_base = OTHER; note = 2'-deoxy-2'-fluoroadenosine-3'-phosphate
  modified_base 12: mod_base = OTHER; note = 2'-O-methyladenosine-3'-phosphate
  modified_base 13: mod_base = OTHER; note = 2'-O-methylguanosine-3'-phosphate
  modified_base 14: mod_base = OTHER; note = 2'-O-methylguanosine-3'-phosphate
  modified_base 15: mod_base = OTHER; note = 2'-O-methylguanosine-3'-phosphate
  modified_base 16: mod_base = OTHER; note = 2'-O-methyluridine-3'-phosphate
  modified_base 17: mod_base = OTHER; note = 2'-O-methylguanosine-3'-phosphate
  modified_base 18: mod_base = OTHER; note = 2'-O-methyluridine-3'-phosphate
  modified_base 19: mod_base = OTHER; note = 2'-O-methylcytidine-3'-phosphate
  modified_base 20: mod_base = OTHER; note = 2'-O-methylguanosine-3'-phosphate
  modified_base 21: mod_base = OTHER; note = 2'-O-methyladenosine
cgcacttcaaaagggtgtcga

SEQ ID NO: 3004 - RNA, 21 nt, synthetic construct
  source 1..21: mol_type = other RNA
  modified_base 1: mod_base = OTHER; note = 2'-O-methylguanosine-3'-phosphate
  modified_base 2: mod_base = OTHER; note = 2'-O-methylcytidine-3'-phosphate
  modified_base 3: mod_base = OTHER; note = 2'-O-methyladenosine-3'-phosphate
  modified_base 4: mod_base = OTHER; note = 2'-O-methylcytidine-3'-phosphate
  modified_base 5: mod_base = OTHER; note = 2'-O-methyluridine-3'-phosphate
  modified_base 6: mod_base = OTHER; note = 2'-O-methyluridine-3'-phosphate
  modified_base 7: mod_base = OTHER; note = 2'-deoxy-2'-fluorocytidine-3'-phosphate
  modified_base 8: mod_base = OTHER; note = 2'-O-methyladenosine-3'-phosphate
  modified_base 9: mod_base = OTHER; note = 2'-deoxy-2'-fluoroadenosine-3'-phosphate
  modified_base 10: mod_base = OTHER; note = 2'-deoxy-2'-fluoroadenosine-3'-phosphate
  modified_base 11: mod_base = OTHER; note = 2'-deoxy-2'-fluoroadenosine-3'-phosphate
  modified_base 12: mod_base = OTHER; note = 2'-O-methylguanosine-3'-phosphate
  modified_base 13: mod_base = OTHER; note = 2'-O-methylguanosine-3'-phosphate
  modified_base 14: mod_base = OTHER; note = 2'-O-methylguanosine-3'-phosphate
  modified_base 15: mod_base = OTHER; note = 2'-O-methyluridine-3'-phosphate
  modified_base 16: mod_base = OTHER; note = 2'-O-methylguanosine-3'-phosphate
  modified_base 17: mod_base = OTHER; note = 2'-O-methyluridine-3'-phosphate
  modified_base 18: mod_base = OTHER; note = 2'-O-methylcytidine-3'-phosphate
  modified_base 19: mod_base = OTHER; note = 2'-O-methylguanosine-3'-phosphate
  modified_base 20: mod_base = OTHER; note = 2'-O-methylguanosine-3'-phosphate
  modified_base 21: mod_base = OTHER; note = 2'-O-methyladenosine
gcacttcaaaagggtgtcgga

SEQ ID NO: 3005 - RNA, 21 nt, synthetic construct
  source 1..21: mol_type = other RNA
  modified_base 1: mod_base = OTHER; note = 2'-O-methylcytidine-3'-phosphate
  modified_base 2: mod_base = OTHER; note = 2'-O-methyladenosine-3'-phosphate
  modified_base 3: mod_base = OTHER; note = 2'-O-methylcytidine-3'-phosphate
  modified_base 4: mod_base = OTHER; note = 2'-O-methyluridine-3'-phosphate
  modified_base 5: mod_base = OTHER; note = 2'-O-methyluridine-3'-phosphate
  modified_base 6: mod_base = OTHER; note = 2'-O-methylcytidine-3'-phosphate
  modified_base 7: mod_base = OTHER; note = 2'-deoxy-2'-fluoroadenosine-3'-phosphate
  modified_base 8: mod_base = OTHER; note = 2'-O-methyladenosine-3'-phosphate
  modified_base 9: mod_base = OTHER; note = 2'-deoxy-2'-fluoroadenosine-3'-phosphate
  modified_base 10: mod_base = OTHER; note = 2'-deoxy-2'-fluoroadenosine-3'-phosphate
  modified_base 11: mod_base = OTHER; note = 2'-deoxy-2'-fluoroguanosine-3'-phosphate
  modified_base 12: mod_base = OTHER; note = 2'-O-methylguanosine-3'-phosphate
  modified_base 13: mod_base = OTHER; note = 2'-O-methylguanosine-3'-phosphate
  modified_base 14: mod_base = OTHER; note = 2'-O-methyluridine-3'-phosphate
  modified_base 15: mod_base = OTHER; note = 2'-O-methylguanosine-3'-phosphate
  modified_base 16: mod_base = OTHER; note = 2'-O-methyluridine-3'-phosphate
  modified_base 17: mod_base = OTHER; note = 2'-O-methylcytidine-3'-phosphate
  modified_base 18: mod_base = OTHER; note = 2'-O-methylguanosine-3'-phosphate
  modified_base 19: mod_base = OTHER; note = 2'-O-methylguanosine-3'-phosphate
  modified_base 20: mod_base = OTHER; note = 2'-O-methyluridine-3'-phosphate
  modified_base 21: mod_base = OTHER; note = 2'-O-methyladenosine
cacttcaaaagggtgtcggta

SEQ ID NO: 3006 - RNA, 21 nt, synthetic construct
  source 1..21: mol_type = other RNA
  modified_base 1: mod_base = OTHER; note = 2'-O-methylcytidine-3'-phosphate
  modified_base 2: mod_base = OTHER; note = 2'-O-methylguanosine-3'-phosphate
  modified_base 3: mod_base = OTHER; note = 2'-O-methylcytidine-3'-phosphate
  modified_base 4: mod_base = OTHER; note = 2'-O-methylcytidine-3'-phosphate
  modified_base 5: mod_base = OTHER; note = 2'-O-methyladenosine-3'-phosphate
  modified_base 6: mod_base = OTHER; note = 2'-O-methylguanosine-3'-phosphate
  modified_base 7: mod_base = OTHER; note = 2'-deoxy-2'-fluoroguanosine-3'-phosphate
  modified_base 8: mod_base = OTHER; note = 2'-O-methyladenosine-3'-phosphate
  modified_base 9: mod_base = OTHER; note = 2'-deoxy-2'-fluorocytidine-3'-phosphate
  modified_base 10: mod_base = OTHER; note = 2'-deoxy-2'-fluorouridine-3'-phosphate
  modified_base 11: mod_base = OTHER; note = 2'-deoxy-2'-fluoroguanosine-3'-phosphate
  modified_base 12: mod_base = OTHER; note = 2'-O-methyladenosine-3'-phosphate
  modified_base 13: mod_base = OTHER; note = 2'-O-methyladenosine-3'-phosphate
  modified_base 14: mod_base = OTHER; note = 2'-O-methylguanosine-3'-phosphate
  modified_base 15: mod_base = OTHER; note = 2'-O-methyluridine-3'-phosphate
  modified_base 16: mod_base = OTHER; note = 2'-O-methylguanosine-3'-phosphate
  modified_base 17: mod_base = OTHER; note = 2'-O-methyluridine-3'-phosphate
  modified_base 18: mod_base = OTHER; note = 2'-O-methylguanosine-3'-phosphate
  modified_base 19: mod_base = OTHER; note = 2'-O-methyluridine-3'-phosphate
  modified_base 20: mod_base = OTHER; note = 2'-O-methyladenosine-3'-phosphate
  modified_base 21: mod_base = OTHER; note = 2'-O-methyladenosine
cgccaggactgaagtgtgtaa

SEQ ID NO: 3007 - RNA, 21 nt, synthetic construct
  source 1..21: mol_type = other RNA
  modified_base 1: mod_base = OTHER; note = 2'-O-methylguanosine-3'-phosphate
  modified_base 2: mod_base = OTHER; note = 2'-O-methylcytidine-3'-phosphate
  modified_base 3: mod_base = OTHER; note = 2'-O-methylcytidine-3'-phosphate
  modified_base 4: mod_base = OTHER; note = 2'-O-methyladenosine-3'-phosphate
  modified_base 5: mod_base = OTHER; note = 2'-O-methylguanosine-3'-phosphate
  modified_base 6: mod_base = OTHER; note = 2'-O-methylguanosine-3'-phosphate
  modified_base 7: mod_base = OTHER; note = 2'-deoxy-2'-fluoroadenosine-3'-phosphate
  modified_base 8: mod_base = OTHER; note = 2'-O-methylcytidine-3'-phosphate
  modified_base 9: mod_base = OTHER; note = 2'-deoxy-2'-fluorouridine-3'-phosphate
  modified_base 10: mod_base = OTHER; note = 2'-deoxy-2'-fluoroguanosine-3'-phosphate
  modified_base 11: mod_base = OTHER; note = 2'-deoxy-2'-fluoroadenosine-3'-phosphate
  modified_base 12: mod_base = OTHER; note = 2'-O-methyladenosine-3'-phosphate
  modified_base 13: mod_base = OTHER; note = 2'-O-methylguanosine-3'-phosphate
  modified_base 14: mod_base = OTHER; note = 2'-O-methyluridine-3'-phosphate
  modified_base 15: mod_base = OTHER; note = 2'-O-methylguanosine-3'-phosphate
  modified_base 16: mod_base = OTHER; note = 2'-O-methyluridine-3'-phosphate
  modified_base 17: mod_base = OTHER; note = 2'-O-methylguanosine-3'-phosphate
  modified_base 18: mod_base = OTHER; note = 2'-O-methyluridine-3'-phosphate
  modified_base 19: mod_base = OTHER; note = 2'-O-methyladenosine-3'-phosphate
  modified_base 20: mod_base = OTHER; note = 2'-O-methyluridine-3'-phosphate
  modified_base 21: mod_base = OTHER; note = 2'-O-methyladenosine
gccaggactgaagtgtgtata

SEQ ID NO: 3008 - RNA, 21 nt, synthetic construct
  source 1..21: mol_type = other RNA
  modified_base 1: mod_base = OTHER; note = 2'-O-methylcytidine-3'-phosphate
  modified_base 2: mod_base = OTHER; note = 2'-O-methylcytidine-3'-phosphate
  modified_base 3: mod_base = OTHER; note = 2'-O-methyladenosine-3'-phosphate
  modified_base 4: mod_base = OTHER; note = 2'-O-methylguanosine-3'-phosphate
  modified_base 5: mod_base = OTHER; note = 2'-O-methylguanosine-3'-phosphate
  modified_base 6: mod_base = OTHER; note = 2'-O-methyladenosine-3'-phosphate
  modified_base 7: mod_base = OTHER; note = 2'-deoxy-2'-fluorocytidine-3'-phosphate
  modified_base 8: mod_base = OTHER; note = 2'-O-methyluridine-3'-phosphate
  modified_base 9: mod_base = OTHER; note = 2'-deoxy-2'-fluoroguanosine-3'-phosphate
  modified_base 10: mod_base = OTHER; note = 2'-deoxy-2'-fluoroadenosine-3'-phosphate
  modified_base 11: mod_base = OTHER; note = 2'-deoxy-2'-fluoroadenosine-3'-phosphate
  modified_base 12: mod_base = OTHER; note = 2'-O-methylguanosine-3'-phosphate
  modified_base 13: mod_base = OTHER; note = 2'-O-methyluridine-3'-phosphate
  modified_base 14: mod_base = OTHER; note = 2'-O-methylguanosine-3'-phosphate
  modified_base 15: mod_base = OTHER; note = 2'-O-methyluridine-3'-phosphate
  modified_base 16: mod_base = OTHER; note = 2'-O-methylguanosine-3'-phosphate
  modified_base 17: mod_base = OTHER; note = 2'-O-methyluridine-3'-phosphate
  modified_base 18: mod_base = OTHER; note = 2'-O-methyladenosine-3'-phosphate
  modified_base 19: mod_base = OTHER; note = 2'-O-methyluridine-3'-phosphate
  modified_base 20: mod_base = OTHER; note = 2'-O-methylguanosine-3'-phosphate
  modified_base 21: mod_base = OTHER; note = 2'-O-methyladenosine
ccaggactgaagtgtgtatga

SEQ ID NO: 3009 - RNA, 21 nt, synthetic construct
  source 1..21: mol_type = other RNA
  modified_base 1: mod_base = OTHER; note = 2'-O-methylcytidine-3'-phosphate
  modified_base 2: mod_base = OTHER; note = 2'-O-methyladenosine-3'-phosphate
  modified_base 3: mod_base = OTHER; note = 2'-O-methylguanosine-3'-phosphate
  modified_base 4: mod_base = OTHER; note = 2'-O-methylguanosine-3'-phosphate
  modified_base 5: mod_base = OTHER; note = 2'-O-methyladenosine-3'-phosphate
  modified_base 6: mod_base = OTHER; note = 2'-O-methylcytidine-3'-phosphate
  modified_base 7: mod_base = OTHER; note = 2'-deoxy-2'-fluorouridine-3'-phosphate
  modified_base 8: mod_base = OTHER; note = 2'-O-methylguanosine-3'-phosphate
  modified_base 9: mod_base = OTHER; note = 2'-deoxy-2'-fluoroadenosine-3'-phosphate
  modified_base 10: mod_base = OTHER; note = 2'-deoxy-2'-fluoroadenosine-3'-phosphate
  modified_base 11: mod_base = OTHER; note = 2'-deoxy-2'-fluoroguanosine-3'-phosphate
  modified_base 12: mod_base = OTHER; note = 2'-O-methyluridine-3'-phosphate
  modified_base 13: mod_base = OTHER; note = 2'-O-methylguanosine-3'-phosphate
  modified_base 14: mod_base = OTHER; note = 2'-O-methyluridine-3'-phosphate
  modified_base 15: mod_base = OTHER; note = 2'-O-methylguanosine-3'-phosphate
  modified_base 16: mod_base = OTHER; note = 2'-O-methyluridine-3'-phosphate
  modified_base 17: mod_base = OTHER; note = 2'-O-methyladenosine-3'-phosphate
  modified_base 18: mod_base = OTHER; note = 2'-O-methyluridine-3'-phosphate
  modified_base 19: mod_base = OTHER; note = 2'-O-methylguanosine-3'-phosphate
  modified_base 20: mod_base = OTHER; note = 2'-O-methyluridine-3'-phosphate
  modified_base 21: mod_base = OTHER; note = 2'-O-methyladenosine
caggactgaagtgtgtatgta

SEQ ID NO: 3010 - RNA, 21 nt, synthetic construct
  source 1..21: mol_type = other RNA
  modified_base 1: mod_base = OTHER; note = 2'-O-methyladenosine-3'-phosphate
  modified_base 2: mod_base = OTHER; note = 2'-O-methylguanosine-3'-phosphate
  modified_base 3: mod_base = OTHER; note = 2'-O-methylguanosine-3'-phosphate
  modified_base 4: mod_base = OTHER; note = 2'-O-methyladenosine-3'-phosphate
  modified_base 5: mod_base = OTHER; note = 2'-O-methylcytidine-3'-phosphate
  modified_base 6: mod_base = OTHER; note = 2'-O-methyluridine-3'-phosphate
  modified_base 7: mod_base = OTHER; note = 2'-deoxy-2'-fluoroguanosine-3'-phosphate
  modified_base 8: mod_base = OTHER; note = 2'-O-methyladenosine-3'-phosphate
  modified_base 9: mod_base = OTHER; note = 2'-deoxy-2'-fluoroadenosine-3'-phosphate
  modified_base 10: mod_base = OTHER; note = 2'-deoxy-2'-fluoroguanosine-3'-phosphate
  modified_base 11: mod_base = OTHER; note = 2'-deoxy-2'-fluorouridine-3'-phosphate
  modified_base 12: mod_base = OTHER; note = 2'-O-methylguanosine-3'-phosphate
  modified_base 13: mod_base = OTHER; note = 2'-O-methyluridine-3'-phosphate
  modified_base 14: mod_base = OTHER; note = 2'-O-methylguanosine-3'-phosphate
  modified_base 15: mod_base = OTHER; note = 2'-O-methyluridine-3'-phosphate
  modified_base 16: mod_base = OTHER; note = 2'-O-methyladenosine-3'-phosphate
  modified_base 17: mod_base = OTHER; note = 2'-O-methyluridine-3'-phosphate
  modified_base 18: mod_base = OTHER; note = 2'-O-methylguanosine-3'-phosphate
  modified_base 19: mod_base = OTHER; note = 2'-O-methyluridine-3'-phosphate
  modified_base 20: mod_base = OTHER; note = 2'-O-methylcytidine-3'-phosphate
  modified_base 21: mod_base = OTHER; note = 2'-O-methyladenosine
aggactgaagtgtgtatgtca

SEQ ID NO: 3011 - RNA, 21 nt, synthetic construct
  source 1..21: mol_type = other RNA
  modified_base 1: mod_base = OTHER; note = 2'-O-methylguanosine-3'-phosphate
  modified_base 2: mod_base = OTHER; note = 2'-O-methylguanosine-3'-phosphate
  modified_base 3: mod_base = OTHER; note = 2'-O-methyladenosine-3'-phosphate
  modified_base 4: mod_base = OTHER; note = 2'-O-methylcytidine-3'-phosphate
  modified_base 5: mod_base = OTHER; note = 2'-O-methyluridine-3'-phosphate
  modified_base 6: mod_base = OTHER; note = 2'-O-methylguanosine-3'-phosphate
  modified_base 7: mod_base = OTHER; note = 2'-deoxy-2'-fluoroadenosine-3'-phosphate
  modified_base 8: mod_base = OTHER; note = 2'-O-methyladenosine-3'-phosphate
  modified_base 9: mod_base = OTHER; note = 2'-deoxy-2'-fluoroguanosine-3'-phosphate
  modified_base 10: mod_base = OTHER; note = 2'-deoxy-2'-fluorouridine-3'-phosphate
  modified_base 11: mod_base = OTHER; note = 2'-deoxy-2'-fluoroguanosine-3'-phosphate
  modified_base 12: mod_base = OTHER; note = 2'-O-methyluridine-3'-phosphate
  modified_base 13: mod_base = OTHER; note = 2'-O-methylguanosine-3'-phosphate
  modified_base 14: mod_base = OTHER; note = 2'-O-methyluridine-3'-phosphate
  modified_base 15: mod_base = OTHER; note = 2'-O-methyladenosine-3'-phosphate
  modified_base 16: mod_base = OTHER; note = 2'-O-methyluridine-3'-phosphate
  modified_base 17: mod_base = OTHER; note = 2'-O-methylguanosine-3'-phosphate
  modified_base 18: mod_base = OTHER; note = 2'-O-methyluridine-3'-phosphate
  modified_base 19: mod_base = OTHER; note = 2'-O-methylcytidine-3'-phosphate
  modified_base 20: mod_base = OTHER; note = 2'-O-methyluridine-3'-phosphate
  modified_base 21: mod_base = OTHER; note = 2'-O-methyladenosine
ggactgaagtgtgtatgtcta

SEQ ID NO: 3012 - RNA, 21 nt, synthetic construct
  source 1..21: mol_type = other RNA
  modified_base 1: mod_base = OTHER; note = 2'-O-methylguanosine-3'-phosphate
  modified_base 2: mod_base = OTHER; note = 2'-O-methyladenosine-3'-phosphate
  modified_base 3: mod_base = OTHER; note = 2'-O-methylcytidine-3'-phosphate
  modified_base 4: mod_base = OTHER; note = 2'-O-methyluridine-3'-phosphate
  modified_base 5: mod_base = OTHER; note = 2'-O-methylguanosine-3'-phosphate
  modified_base 6: mod_base = OTHER; note = 2'-O-methyladenosine-3'-phosphate
  modified_base 7: mod_base = OTHER; note = 2'-deoxy-2'-fluoroadenosine-3'-phosphate
  modified_base 8: mod_base = OTHER; note = 2'-O-methylguanosine-3'-phosphate
  modified_base 9: mod_base = OTHER; note = 2'-deoxy-2'-fluorouridine-3'-phosphate
  modified_base 10: mod_base = OTHER; note = 2'-deoxy-2'-fluoroguanosine-3'-phosphate
  modified_base 11: mod_base = OTHER; note = 2'-deoxy-2'-fluorouridine-3'-phosphate
  modified_base 12: mod_base = OTHER; note = 2'-O-methylguanosine-3'-phosphate
  modified_base 13: mod_base = OTHER; note = 2'-O-methyluridine-3'-phosphate
  modified_base 14: mod_base = OTHER; note = 2'-O-methyladenosine-3'-phosphate
  modified_base 15: mod_base = OTHER; note = 2'-O-methyluridine-3'-phosphate
  modified_base 16: mod_base = OTHER; note = 2'-O-methylguanosine-3'-phosphate
  modified_base 17: mod_base = OTHER; note = 2'-O-methyluridine-3'-phosphate
  modified_base 18: mod_base = OTHER; note = 2'-O-methylcytidine-3'-phosphate
  modified_base 19: mod_base = OTHER; note = 2'-O-methyluridine-3'-phosphate
  modified_base 20: mod_base = OTHER; note = 2'-O-methyluridine-3'-phosphate
  modified_base 21: mod_base = OTHER; note = 2'-O-methyladenosine
gactgaagtgtgtatgtctta

SEQ ID NO: 3013 - RNA, 21 nt, synthetic construct
  source 1..21: mol_type = other RNA
  modified_base 1: mod_base = OTHER; note = 2'-O-methyladenosine-3'-phosphate
  modified_base 2: mod_base = OTHER; note = 2'-O-methylcytidine-3'-phosphate
  modified_base 3: mod_base = OTHER; note = 2'-O-methyluridine-3'-phosphate
  modified_base 4: mod_base = OTHER; note = 2'-O-methylguanosine-3'-phosphate
  modified_base 5: mod_base = OTHER; note = 2'-O-methyladenosine-3'-phosphate
  modified_base 6: mod_base = OTHER; note = 2'-O-methyladenosine-3'-phosphate
  modified_base 7: mod_base = OTHER; note = 2'-deoxy-2'-fluoroguanosine-3'-phosphate
  modified_base 8: mod_base = OTHER; note = 2'-O-methyluridine-3'-phosphate
  modified_base 9: mod_base = OTHER; note = 2'-deoxy-2'-fluoroguanosine-3'-phosphate
  modified_base 10: mod_base = OTHER; note = 2'-deoxy-2'-fluorouridine-3'-phosphate
  modified_base 11: mod_base = OTHER; note = 2'-deoxy-2'-fluoroguanosine-3'-phosphate
  modified_base 12: mod_base = OTHER; note = 2'-O-methyluridine-3'-phosphate
  modified_base 13: mod_base = OTHER; note = 2'-O-methyladenosine-3'-phosphate
  modified_base 14: mod_base = OTHER; note = 2'-O-methyluridine-3'-phosphate
  modified_base 15: mod_base = OTHER; note = 2'-O-methylguanosine-3'-phosphate
  modified_base 16: mod_base = OTHER; note = 2'-O-methyluridine-3'-phosphate
  modified_base 17: mod_base = OTHER; note = 2'-O-methylcytidine-3'-phosphate
  modified_base 18: mod_base = OTHER; note = 2'-O-methyluridine-3'-phosphate
  modified_base 19: mod_base = OTHER; note = 2'-O-methyluridine-3'-phosphate
  modified_base 20: mod_base = OTHER; note = 2'-O-methyluridine-3'-phosphate
  modified_base 21: mod_base = OTHER; note = 2'-O-methyladenosine
actgaagtgtgtatgtcttta

SEQ ID NO: 3014 - RNA, 21 nt, synthetic construct
  source 1..21: mol_type = other RNA
  modified_base 1: mod_base = OTHER; note = 2'-O-methylcytidine-3'-phosphate
  modified_base 2: mod_base = OTHER; note = 2'-O-methyluridine-3'-phosphate
  modified_base 3: mod_base = OTHER; note = 2'-O-methylguanosine-3'-phosphate
  modified_base 4: mod_base = OTHER; note = 2'-O-methyladenosine-3'-phosphate
  modified_base 5: mod_base = OTHER; note = 2'-O-methyladenosine-3'-phosphate
  modified_base 6: mod_base = OTHER; note = 2'-O-methylguanosine-3'-phosphate
  modified_base 7: mod_base = OTHER; note = 2'-deoxy-2'-fluorouridine-3'-phosphate
  modified_base 8: mod_base = OTHER; note = 2'-O-methylguanosine-3'-phosphate
  modified_base 9: mod_base = OTHER; note = 2'-deoxy-2'-fluorouridine-3'-phosphate
  modified_base 10: mod_base = OTHER; note = 2'-deoxy-2'-fluoroguanosine-3'-phosphate
  modified_base 11: mod_base = OTHER; note = 2'-deoxy-2'-fluorouridine-3'-phosphate
  modified_base 12: mod_base = OTHER; note = 2'-O-methyladenosine-3'-phosphate
  modified_base 13: mod_base = OTHER; note = 2'-O-methyluridine-3'-phosphate
  modified_base 14: mod_base = OTHER; note = 2'-O-methylguanosine-3'-phosphate
  modified_base 15: mod_base = OTHER; note = 2'-O-methyluridine-3'-phosphate
  modified_base 16: mod_base = OTHER; note = 2'-O-methylcytidine-3'-phosphate
  modified_base 17: mod_base = OTHER; note = 2'-O-methyluridine-3'-phosphate
  modified_base 18: mod_base = OTHER; note = 2'-O-methyluridine-3'-phosphate
  modified_base 19: mod_base = OTHER; note = 2'-O-methyluridine-3'-phosphate
  modified_base 20: mod_base = OTHER; note = 2'-O-methyluridine-3'-phosphate
  modified_base 21: mod_base = OTHER; note = 2'-O-methyladenosine
ctgaagtgtgtatgtctttta

SEQ ID NO: 3015 - RNA, 21 nt, synthetic construct
  source 1..21: mol_type = other RNA
  modified_base 1: mod_base = OTHER; note = 2'-O-methyluridine-3'-phosphate
  modified_base 2: mod_base = OTHER; note = 2'-O-methylguanosine-3'-phosphate
  modified_base 3: mod_base = OTHER; note = 2'-O-methyladenosine-3'-phosphate
  modified_base 4: mod_base = OTHER; note = 2'-O-methyladenosine-3'-phosphate
  modified_base 5: mod_base = OTHER; note = 2'-O-methylguanosine-3'-phosphate
  modified_base 6: mod_base = OTHER; note = 2'-O-methyluridine-3'-phosphate
  modified_base 7: mod_base = OTHER; note = 2'-deoxy-2'-fluoroguanosine-3'-phosphate
  modified_base 8: mod_base = OTHER; note = 2'-O-methyluridine-3'-phosphate
  modified_base 9: mod_base = OTHER; note = 2'-deoxy-2'-fluoroguanosine-3'-phosphate
  modified_base 10: mod_base = OTHER; note = 2'-deoxy-2'-fluorouridine-3'-phosphate
  modified_base 11: mod_base = OTHER; note = 2'-deoxy-2'-fluoroadenosine-3'-phosphate
  modified_base 12: mod_base = OTHER; note = 2'-O-methyluridine-3'-phosphate
  modified_base 13: mod_base = OTHER; note = 2'-O-methylguanosine-3'-phosphate
  modified_base 14: mod_base = OTHER; note = 2'-O-methyluridine-3'-phosphate
  modified_base 15: mod_base = OTHER; note = 2'-O-methylcytidine-3'-phosphate
  modified_base 16: mod_base = OTHER; note = 2'-O-methyluridine-3'-phosphate
  modified_base 17: mod_base = OTHER; note = 2'-O-methyluridine-3'-phosphate
  modified_base 18: mod_base = OTHER; note = 2'-O-methyluridine-3'-phosphate
  modified_base 19: mod_base = OTHER; note = 2'-O-methyluridine-3'-phosphate
  modified_base 20: mod_base = OTHER; note = 2'-O-methylguanosine-3'-phosphate
  modified_base 21: mod_base = OTHER; note = 2'-O-methyladenosine
tgaagtgtgtatgtcttttga

SEQ ID NO: 3016 - RNA, 21 nt, synthetic construct
  source 1..21: mol_type = other RNA
  modified_base 1: mod_base = OTHER; note = 2'-O-methylguanosine-3'-phosphate
  modified_base 2: mod_base = OTHER; note = 2'-O-methyladenosine-3'-phosphate
  modified_base 3: mod_base = OTHER; note = 2'-O-methyladenosine-3'-phosphate
  modified_base 4: mod_base = OTHER; note = 2'-O-methylguanosine-3'-phosphate
  modified_base 5: mod_base = OTHER; note = 2'-O-methyluridine-3'-phosphate
  modified_base 6: mod_base = OTHER; note = 2'-O-methylguanosine-3'-phosphate
  modified_base 7: mod_base = OTHER; note = 2'-deoxy-2'-fluorouridine-3'-phosphate
  modified_base 8: mod_base = OTHER; note = 2'-O-methylguanosine-3'-phosphate
  modified_base 9: mod_base = OTHER; note = 2'-deoxy-2'-fluorouridine-3'-phosphate
  modified_base 10: mod_base = OTHER; note = 2'-deoxy-2'-fluoroadenosine-3'-phosphate
  modified_base 11: mod_base = OTHER; note = 2'-deoxy-2'-fluorouridine-3'-phosphate
  modified_base 12: mod_base = OTHER; note = 2'-O-methylguanosine-3'-phosphate
  modified_base 13: mod_base = OTHER; note = 2'-O-methyluridine-3'-phosphate
  modified_base 14: mod_base = OTHER; note = 2'-O-methylcytidine-3'-phosphate
  modified_base 15: mod_base = OTHER; note = 2'-O-methyluridine-3'-phosphate
  modified_base 16: mod_base = OTHER; note = 2'-O-methyluridine-3'-phosphate
  modified_base 17: mod_base = OTHER; note = 2'-O-methyluridine-3'-phosphate
  modified_base 18: mod_base = OTHER; note = 2'-O-methyluridine-3'-phosphate
  modified_base 19: mod_base = OTHER; note = 2'-O-methylguanosine-3'-phosphate
  modified_base 20: mod_base = OTHER; note = 2'-O-methyluridine-3'-phosphate
  modified_base 21: mod_base = OTHER; note = 2'-O-methyladenosine
gaagtgtgtatgtcttttgta

SEQ ID NO: 3017 - RNA, 21 nt, synthetic construct
  source 1..21: mol_type = other RNA
  modified_base 1: mod_base = OTHER; note = 2'-O-methyladenosine-3'-phosphate
  modified_base 2: mod_base = OTHER; note = 2'-O-methyladenosine-3'-phosphate
  modified_base 3: mod_base = OTHER; note = 2'-O-methylguanosine-3'-phosphate
  modified_base 4: mod_base = OTHER; note = 2'-O-methyluridine-3'-phosphate
  modified_base 5: mod_base = OTHER; note = 2'-O-methylguanosine-3'-phosphate
  modified_base 6: mod_base = OTHER; note = 2'-O-methyluridine-3'-phosphate
  modified_base 7: mod_base = OTHER; note = 2'-deoxy-2'-fluoroguanosine-3'-phosphate
  modified_base 8: mod_base = OTHER; note = 2'-O-methyluridine-3'-phosphate
  modified_base 9: mod_base = OTHER; note = 2'-deoxy-2'-fluoroadenosine-3'-phosphate
  modified_base 10: mod_base = OTHER; note = 2'-deoxy-2'-fluorouridine-3'-phosphate
  modified_base 11: mod_base = OTHER; note = 2'-deoxy-2'-fluoroguanosine-3'-phosphate
  modified_base 12: mod_base = OTHER; note = 2'-O-methyluridine-3'-phosphate
  modified_base 13: mod_base = OTHER; note = 2'-O-methylcytidine-3'-phosphate
  modified_base 14: mod_base = OTHER; note = 2'-O-methyluridine-3'-phosphate
  modified_base 15: mod_base = OTHER; note = 2'-O-methyluridine-3'-phosphate
  modified_base 16: mod_base = OTHER; note = 2'-O-methyluridine-3'-phosphate
  modified_base 17: mod_base = OTHER; note = 2'-O-methyluridine-3'-phosphate
  modified_base 18: mod_base = OTHER; note = 2'-O-methylguanosine-3'-phosphate
  modified_base 19: mod_base = OTHER; note = 2'-O-methyluridine-3'-phosphate
  modified_base 20: mod_base = OTHER; note = 2'-O-methylguanosine-3'-phosphate
  modified_base 21: mod_base = OTHER; note = 2'-O-methyladenosine
aagtgtgtatgtcttttgtga

SEQ ID NO: 3018 - RNA, 21 nt, synthetic construct
  source 1..21: mol_type = other RNA
  modified_base 1: mod_base = OTHER; note = 2'-O-methyladenosine-3'-phosphate
  modified_base 2: mod_base = OTHER; note = 2'-O-methylguanosine-3'-phosphate
  modified_base 3: mod_base = OTHER; note = 2'-O-methyluridine-3'-phosphate
  modified_base 4: mod_base = OTHER; note = 2'-O-methylguanosine-3'-phosphate
  modified_base 5: mod_base = OTHER; note = 2'-O-methyluridine-3'-phosphate
  modified_base 6: mod_base = OTHER; note = 2'-O-methylguanosine-3'-phosphate
  modified_base 7: mod_base = OTHER; note = 2'-deoxy-2'-fluorouridine-3'-phosphate
  modified_base 8: mod_base = OTHER; note = 2'-O-methyladenosine-3'-phosphate
  modified_base 9: mod_base = OTHER; note = 2'-deoxy-2'-fluorouridine-3'-phosphate
  modified_base 10: mod_base = OTHER; note = 2'-deoxy-2'-fluoroguanosine-3'-phosphate
  modified_base 11: mod_base = OTHER; note = 2'-deoxy-2'-fluorouridine-3'-phosphate
  modified_base 12: mod_base = OTHER; note = 2'-O-methylcytidine-3'-phosphate
  modified_base 13: mod_base = OTHER; note = 2'-O-methyluridine-3'-phosphate
  modified_base 14: mod_base = OTHER; note = 2'-O-methyluridine-3'-phosphate
  modified_base 15: mod_base = OTHER; note = 2'-O-methyluridine-3'-phosphate
  modified_base 16: mod_base = OTHER; note = 2'-O-methyluridine-3'-phosphate
  modified_base 17: mod_base = OTHER; note = 2'-O-methylguanosine-3'-phosphate
  modified_base 18: mod_base = OTHER; note = 2'-O-methyluridine-3'-phosphate
  modified_base 19: mod_base = OTHER; note = 2'-O-methylguanosine-3'-phosphate
  modified_base 20: mod_base = OTHER; note = 2'-O-methyluridine-3'-phosphate
  modified_base 21: mod_base = OTHER; note = 2'-O-methyladenosine
agtgtgtatgtcttttgtgta

SEQ ID NO: 3019 - RNA, 21 nt, synthetic construct
  source 1..21: mol_type = other RNA
  modified_base 1: mod_base = OTHER; note = 2'-O-methylguanosine-3'-phosphate
  modified_base 2: mod_base = OTHER; note = 2'-O-methyluridine-3'-phosphate
  modified_base 3: mod_base = OTHER; note = 2'-O-methylguanosine-3'-phosphate
  modified_base 4: mod_base = OTHER; note = 2'-O-methyluridine-3'-phosphate
  modified_base 5: mod_base = OTHER; note = 2'-O-methylguanosine-3'-phosphate
  modified_base 6: mod_base = OTHER; note = 2'-O-methyluridine-3'-phosphate
  modified_base 7: mod_base = OTHER; note = 2'-deoxy-2'-fluoroadenosine-3'-phosphate
  modified_base 8: mod_base = OTHER; note = 2'-O-methyluridine-3'-phosphate
  modified_base 9: mod_base = OTHER; note = 2'-deoxy-2'-fluoroguanosine-3'-phosphate
  modified_base 10: mod_base = OTHER; note = 2'-deoxy-2'-fluorouridine-3'-phosphate
  modified_base 11: mod_base = OTHER; note = 2'-deoxy-2'-fluorocytidine-3'-phosphate
  modified_base 12: mod_base = OTHER; note = 2'-O-methyluridine-3'-phosphate
  modified_base 13: mod_base = OTHER; note = 2'-O-methyluridine-3'-phosphate
  modified_base 14: mod_base = OTHER; note = 2'-O-methyluridine-3'-phosphate
  modified_base 15: mod_base = OTHER; note = 2'-O-methyluridine-3'-phosphate
  modified_base 16: mod_base = OTHER; note = 2'-O-methylguanosine-3'-phosphate
  modified_base 17: mod_base = OTHER; note = 2'-O-methyluridine-3'-phosphate
  modified_base 18: mod_base = OTHER; note = 2'-O-methylguanosine-3'-phosphate
  modified_base 19: mod_base = OTHER; note = 2'-O-methyluridine-3'-phosphate
  modified_base 20: mod_base = OTHER; note = 2'-O-methylguanosine-3'-phosphate
  modified_base 21: mod_base = OTHER; note = 2'-O-methyladenosine
gtgtgtatgtcttttgtgtga

SEQ ID NO: 3020 - RNA, 21 nt, synthetic construct
  source 1..21: mol_type = other RNA
  modified_base 1: mod_base = OTHER; note = 2'-O-methyluridine-3'-phosphate
  modified_base 2: mod_base = OTHER; note = 2'-O-methylguanosine-3'-phosphate
  modified_base 3: mod_base = OTHER; note = 2'-O-methyluridine-3'-phosphate
  modified_base 4: mod_base = OTHER; note = 2'-O-methylguanosine-3'-phosphate
  modified_base 5: mod_base = OTHER; note = 2'-O-methyluridine-3'-phosphate
  modified_base 6: mod_base = OTHER; note = 2'-O-methyladenosine-3'-phosphate
  modified_base 7: mod_base = OTHER; note = 2'-deoxy-2'-fluorouridine-3'-phosphate
  modified_base 8: mod_base = OTHER; note = 2'-O-methylguanosine-3'-phosphate
  modified_base 9: mod_base = OTHER; note = 2'-deoxy-2'-fluorouridine-3'-phosphate
  modified_base 10: mod_base = OTHER; note = 2'-deoxy-2'-fluorocytidine-3'-phosphate
  modified_base 11: mod_base = OTHER; note = 2'-deoxy-2'-fluorouridine-3'-phosphate
  modified_base 12: mod_base = OTHER; note = 2'-O-methyluridine-3'-phosphate
  modified_base 13: mod_base = OTHER; note = 2'-O-methyluridine-3'-phosphate
  modified_base 14: mod_base = OTHER; note = 2'-O-methyluridine-3'-phosphate
  modified_base 15: mod_base = OTHER; note = 2'-O-methylguanosine-3'-phosphate
  modified_base 16: mod_base = OTHER; note = 2'-O-methyluridine-3'-phosphate
  modified_base 17: mod_base = OTHER; note = 2'-O-methylguanosine-3'-phosphate
  modified_base 18: mod_base = OTHER; note = 2'-O-methyluridine-3'-phosphate
  modified_base 19: mod_base = OTHER; note = 2'-O-methylguanosine-3'-phosphate
  modified_base 20: mod_base = OTHER; note = 2'-O-methyladenosine-3'-phosphate
  modified_base 21: mod_base = OTHER; note = 2'-O-methyladenosine
tgtgtatgtcttttgtgtgaa

SEQ ID NO: 3021 - RNA, 21 nt, synthetic construct
  source 1..21: mol_type = other RNA
  modified_base 1: mod_base = OTHER; note = 2'-O-methylguanosine-3'-phosphate
  modified_base 2: mod_base = OTHER; note = 2'-O-methyluridine-3'-phosphate
  modified_base 3: mod_base = OTHER; note = 2'-O-methylguanosine-3'-phosphate
  modified_base 4: mod_base = OTHER; note = 2'-O-methyluridine-3'-phosphate
  modified_base 5: mod_base = OTHER; note = 2'-O-methyladenosine-3'-phosphate
  modified_base 6: mod_base = OTHER; note = 2'-O-methyluridine-3'-phosphate
  modified_base 7: mod_base = OTHER; note = 2'-deoxy-2'-fluoroguanosine-3'-phosphate
  modified_base 8: mod_base = OTHER; note = 2'-O-methyluridine-3'-phosphate
  modified_base 9: mod_base = OTHER; note = 2'-deoxy-2'-fluorocytidine-3'-phosphate
  modified_base 10: mod_base = OTHER; note = 2'-deoxy-2'-fluorouridine-3'-phosphate
  modified_base 11: mod_base = OTHER; note = 2'-deoxy-2'-fluorouridine-3'-phosphate
  modified_base 12: mod_base = OTHER; note = 2'-O-methyluridine-3'-phosphate
  modified_base 13: mod_base = OTHER; note = 2'-O-methyluridine-3'-phosphate
  modified_base 14: mod_base = OTHER; note = 2'-O-methylguanosine-3'-phosphate
  modified_base 15: mod_base = OTHER; note = 2'-O-methyluridine-3'-phosphate
  modified_base 16: mod_base = OTHER; note = 2'-O-methylguanosine-3'-phosphate
  modified_base 17: mod_base = OTHER; note = 2'-O-methyluridine-3'-phosphate
  modified_base 18: mod_base = OTHER; note = 2'-O-methylguanosine-3'-phosphate
  modified_base 19: mod_base = OTHER; note = 2'-O-methyladenosine-3'-phosphate
  modified_base 20: mod_base = OTHER; note = 2'-O-methyluridine-3'-phosphate
  modified_base 21: mod_base = OTHER; note = 2'-O-methyladenosine
gtgtatgtcttttgtgtgata

SEQ ID NO: 3022 - RNA, 21 nt, synthetic construct
  source 1..21: mol_type = other RNA
  modified_base 1: mod_base = OTHER; note = 2'-O-methyluridine-3'-phosphate
  modified_base 2: mod_base = OTHER; note = 2'-O-methylguanosine-3'-phosphate
  modified_base 3: mod_base = OTHER; note = 2'-O-methyluridine-3'-phosphate
  modified_base 4: mod_base = OTHER; note = 2'-O-methyladenosine-3'-phosphate
  modified_base 5: mod_base = OTHER; note = 2'-O-methyluridine-3'-phosphate
  modified_base 6: mod_base = OTHER; note = 2'-O-methylguanosine-3'-phosphate
  modified_base 7: mod_base = OTHER; note = 2'-deoxy-2'-fluorouridine-3'-phosphate
  modified_base 8: mod_base = OTHER; note = 2'-O-methylcytidine-3'-phosphate
  modified_base 9: mod_base = OTHER; note = 2'-deoxy-2'-fluorouridine-3'-phosphate
  modified_base 10: mod_base = OTHER; note = 2'-deoxy-2'-fluorouridine-3'-phosphate
  modified_base 11: mod_base = OTHER; note = 2'-deoxy-2'-fluorouridine-3'-phosphate
  modified_base 12: mod_base = OTHER; note = 2'-O-methyluridine-3'-phosphate
  modified_base 13: mod_base = OTHER; note = 2'-O-methylguanosine-3'-phosphate
  modified_base 14: mod_base = OTHER; note = 2'-O-methyluridine-3'-phosphate
  modified_base 15: mod_base = OTHER; note = 2'-O-methylguanosine-3'-phosphate
  modified_base 16: mod_base = OTHER; note = 2'-O-methyluridine-3'-phosphate
  modified_base 17: mod_base = OTHER; note = 2'-O-methylguanosine-3'-phosphate
  modified_base 18: mod_base = OTHER; note = 2'-O-methyladenosine-3'-phosphate
  modified_base 19: mod_base = OTHER; note = 2'-O-methyluridine-3'-phosphate
  modified_base 20: mod_base = OTHER; note = 2'-O-methyluridine-3'-phosphate
  modified_base 21: mod_base = OTHER; note = 2'-O-methyladenosine
tgtatgtcttttgtgtgatta

SEQ ID NO: 3023 - RNA, 21 nt, synthetic construct
  source 1..21: mol_type = other RNA
  modified_base 1: mod_base = OTHER; note = 2'-O-methylguanosine-3'-phosphate
  modified_base 2: mod_base = OTHER; note = 2'-O-methyluridine-3'-phosphate
  modified_base 3: mod_base = OTHER; note = 2'-O-methyladenosine-3'-phosphate
  modified_base 4: mod_base = OTHER; note = 2'-O-methyluridine-3'-phosphate
  modified_base 5: mod_base = OTHER; note = 2'-O-methylguanosine-3'-phosphate
  modified_base 6: mod_base = OTHER; note = 2'-O-methyluridine-3'-phosphate
  modified_base 7: mod_base = OTHER; note = 2'-deoxy-2'-fluorocytidine-3'-phosphate
  modified_base 8: mod_base = OTHER; note = 2'-O-methyluridine-3'-phosphate
  modified_base 9: mod_base = OTHER; note = 2'-deoxy-2'-fluorouridine-3'-phosphate
  modified_base 10: mod_base = OTHER; note = 2'-deoxy-2'-fluorouridine-3'-phosphate
  modified_base 11: mod_base = OTHER; note = 2'-deoxy-2'-fluorouridine-3'-phosphate
  modified_base 12: mod_base = OTHER; note = 2'-O-methylguanosine-3'-phosphate
  modified_base 13: mod_base = OTHER; note = 2'-O-methyluridine-3'-phosphate
  modified_base 14: mod_base = OTHER; note = 2'-O-methylguanosine-3'-phosphate
  modified_base 15: mod_base = OTHER; note = 2'-O-methyluridine-3'-phosphate
  modified_base 16: mod_base = OTHER; note = 2'-O-methylguanosine-3'-phosphate
  modified_base 17: mod_base = OTHER; note = 2'-O-methyladenosine-3'-phosphate
  modified_base 18: mod_base = OTHER; note = 2'-O-methyluridine-3'-phosphate
  modified_base 19: mod_base = OTHER; note = 2'-O-methyluridine-3'-phosphate
  modified_base 20: mod_base = OTHER; note = 2'-O-methylcytidine-3'-phosphate
  modified_base 21: mod_base = OTHER; note = 2'-O-methyladenosine
gtatgtcttttgtgtgattca

SEQ ID NO: 3024 - RNA, 21 nt, synthetic construct
  source 1..21: mol_type = other RNA
  modified_base 1: mod_base = OTHER; note = 2'-O-methyluridine-3'-phosphate
  modified_base 2: mod_base = OTHER; note = 2'-O-methyladenosine-3'-phosphate
  modified_base 3: mod_base = OTHER; note = 2'-O-methyluridine-3'-phosphate
  modified_base 4: mod_base = OTHER; note = 2'-O-methylguanosine-3'-phosphate
  modified_base 5: mod_base = OTHER; note = 2'-O-methyluridine-3'-phosphate
  modified_base 6: mod_base = OTHER; note = 2'-O-methylcytidine-3'-phosphate
  modified_base 7: mod_base = OTHER; note = 2'-deoxy-2'-fluorouridine-3'-phosphate
  modified_base 8: mod_base = OTHER; note = 2'-O-methyluridine-3'-phosphate
  modified_base 9: mod_base = OTHER; note = 2'-deoxy-2'-fluorouridine-3'-phosphate
  modified_base 10: mod_base = OTHER; note = 2'-deoxy-2'-fluorouridine-3'-phosphate
  modified_base 11: mod_base = OTHER; note = 2'-deoxy-2'-fluoroguanosine-3'-phosphate
  modified_base 12: mod_base = OTHER; note = 2'-O-methyluridine-3'-phosphate
  modified_base 13: mod_base = OTHER; note = 2'-O-methylguanosine-3'-phosphate
  modified_base 14: mod_base = OTHER; note = 2'-O-methyluridine-3'-phosphate
  modified_base 15: mod_base = OTHER; note = 2'-O-methylguanosine-3'-phosphate
  modified_base 16: mod_base = OTHER; note = 2'-O-methyladenosine-3'-phosphate
  modified_base 17: mod_base = OTHER; note = 2'-O-methyluridine-3'-phosphate
  modified_base 18: mod_base = OTHER; note = 2'-O-methyluridine-3'-phosphate
  modified_base 19: mod_base = OTHER; note = 2'-O-methylcytidine-3'-phosphate
  modified_base 20: mod_base = OTHER; note = 2'-O-methyluridine-3'-phosphate
  modified_base 21: mod_base = OTHER; note = 2'-O-methyladenosine
tatgtcttttgtgtgattcta

SEQ ID NO: 3025 - RNA, 21 nt, synthetic construct
  source 1..21: mol_type = other RNA
  modified_base 1: mod_base = OTHER; note = 2'-O-methyladenosine-3'-phosphate
  modified_base 2: mod_base = OTHER; note = 2'-O-methyluridine-3'-phosphate
  modified_base 3: mod_base = OTHER; note = 2'-O-methylguanosine-3'-phosphate
  modified_base 4: mod_base = OTHER; note = 2'-O-methyluridine-3'-phosphate
  modified_base 5: mod_base = OTHER; note = 2'-O-methylcytidine-3'-phosphate
  modified_base 6: mod_base = OTHER; note = 2'-O-methyluridine-3'-phosphate
  modified_base 7: mod_base = OTHER; note = 2'-deoxy-2'-fluorouridine-3'-phosphate
  modified_base 8: mod_base = OTHER; note = 2'-O-methyluridine-3'-phosphate
  modified_base 9: mod_base = OTHER; note = 2'-deoxy-2'-fluorouridine-3'-phosphate
  modified_base 10: mod_base = OTHER; note = 2'-deoxy-2'-fluoroguanosine-3'-phosphate
  modified_base 11: mod_base = OTHER; note = 2'-deoxy-2'-fluorouridine-3'-phosphate
  modified_base 12: mod_base = OTHER; note = 2'-O-methylguanosine-3'-phosphate
  modified_base 13: mod_base = OTHER; note = 2'-O-methyluridine-3'-phosphate
  modified_base 14: mod_base = OTHER; note = 2'-O-methylguanosine-3'-phosphate
  modified_base 15: mod_base = OTHER; note = 2'-O-methyladenosine-3'-phosphate
  modified_base 16: mod_base = OTHER; note = 2'-O-methyluridine-3'-phosphate
  modified_base 17: mod_base = OTHER; note = 2'-O-methyluridine-3'-phosphate
  modified_base 18: mod_base = OTHER; note = 2'-O-methylcytidine-3'-phosphate
  modified_base 19: mod_base = OTHER; note = 2'-O-methyluridine-3'-phosphate
  modified_base 20: mod_base = OTHER; note = 2'-O-methyluridine-3'-phosphate
  modified_base 21: mod_base = OTHER; note = 2'-O-methyladenosine
atgtcttttgtgtgattctta

SEQ ID NO: 3026 - RNA, 21 nt, synthetic construct
  source 1..21: mol_type = other RNA
  modified_base 1: mod_base = OTHER; note = 2'-O-methyluridine-3'-phosphate
  modified_base 2: mod_base = OTHER; note = 2'-O-methylguanosine-3'-phosphate
  modified_base 3: mod_base = OTHER; note = 2'-O-methyluridine-3'-phosphate
  modified_base 4: mod_base = OTHER; note = 2'-O-methylcytidine-3'-phosphate
  modified_base 5: mod_base = OTHER; note = 2'-O-methyluridine-3'-phosphate
  modified_base 6: mod_base = OTHER; note = 2'-O-methyluridine-3'-phosphate
  modified_base 7: mod_base = OTHER; note = 2'-deoxy-2'-fluorouridine-3'-phosphate
  modified_base 8: mod_base = OTHER; note = 2'-O-methyluridine-3'-phosphate
  modified_base 9: mod_base = OTHER; note = 2'-deoxy-2'-fluoroguanosine-3'-phosphate
  modified_base 10: mod_base = OTHER; note = 2'-deoxy-2'-fluorouridine-3'-phosphate
  modified_base 11: mod_base = OTHER; note = 2'-deoxy-2'-fluoroguanosine-3'-phosphate
  modified_base 12: mod_base = OTHER; note = 2'-O-methyluridine-3'-phosphate
  modified_base 13: mod_base = OTHER; note = 2'-O-methylguanosine-3'-phosphate
  modified_base 14: mod_base = OTHER; note = 2'-O-methyladenosine-3'-phosphate
  modified_base 15: mod_base = OTHER; note = 2'-O-methyluridine-3'-phosphate
  modified_base 16: mod_base = OTHER; note = 2'-O-methyluridine-3'-phosphate
  modified_base 17: mod_base = OTHER; note = 2'-O-methylcytidine-3'-phosphate
  modified_base 18: mod_base = OTHER; note = 2'-O-methyluridine-3'-phosphate
  modified_base 19: mod_base = OTHER; note = 2'-O-methyluridine-3'-phosphate
  modified_base 20: mod_base = OTHER; note = 2'-O-methylcytidine-3'-phosphate
  modified_base 21: mod_base = OTHER; note = 2'-O-methyladenosine
tgtcttttgtgtgattcttca

SEQ ID NO: 3027 - RNA, 21 nt, synthetic construct
  source 1..21: mol_type = other RNA
  modified_base 1: mod_base = OTHER; note = 2'-O-methylguanosine-3'-phosphate
  modified_base 2: mod_base = OTHER; note = 2'-O-methyluridine-3'-phosphate
  modified_base 3: mod_base = OTHER; note = 2'-O-methylcytidine-3'-phosphate
  modified_base 4: mod_base = OTHER; note = 2'-O-methyluridine-3'-phosphate
  modified_base 5: mod_base = OTHER; note = 2'-O-methyluridine-3'-phosphate
  modified_base 6: mod_base = OTHER; note = 2'-O-methyluridine-3'-phosphate
  modified_base 7: mod_base = OTHER; note = 2'-deoxy-2'-fluorouridine-3'-phosphate
  modified_base 8: mod_base = OTHER; note = 2'-O-methylguanosine-3'-phosphate
  modified_base 9: mod_base = OTHER; note = 2'-deoxy-2'-fluorouridine-3'-phosphate
  modified_base 10: mod_base = OTHER; note = 2'-deoxy-2'-fluoroguanosine-3'-phosphate
  modified_base 11: mod_base = OTHER; note = 2'-deoxy-2'-fluorouridine-3'-phosphate
  modified_base 12: mod_base = OTHER; note = 2'-O-methylguanosine-3'-phosphate
  modified_base 13: mod_base = OTHER; note = 2'-O-methyladenosine-3'-phosphate
  modified_base 14: mod_base = OTHER; note = 2'-O-methyluridine-3'-phosphate
  modified_base 15: mod_base = OTHER; note = 2'-O-methyluridine-3'-phosphate
  modified_base 16: mod_base = OTHER; note = 2'-O-methylcytidine-3'-phosphate
  modified_base 17: mod_base = OTHER; note = 2'-O-methyluridine-3'-phosphate
  modified_base 18: mod_base = OTHER; note = 2'-O-methyluridine-3'-phosphate
  modified_base 19: mod_base = OTHER; note = 2'-O-methylcytidine-3'-phosphate
  modified_base 20: mod_base = OTHER; note = 2'-O-methyladenosine-3'-phosphate
  modified_base 21: mod_base = OTHER; note = 2'-O-methyladenosine
gtcttttgtgtgattcttcaa

SEQ ID NO: 3028 - RNA, 21 nt, synthetic construct
  source 1..21: mol_type = other RNA
  modified_base 1: mod_base = OTHER; note = 2'-O-methyluridine-3'-phosphate
  modified_base 2: mod_base = OTHER; note = 2'-O-methylcytidine-3'-phosphate
  modified_base 3: mod_base = OTHER; note = 2'-O-methyluridine-3'-phosphate
  modified_base 4: mod_base = OTHER; note = 2'-O-methyluridine-3'-phosphate
  modified_base 5: mod_base = OTHER; note = 2'-O-methyluridine-3'-phosphate
  modified_base 6: mod_base = OTHER; note = 2'-O-methyluridine-3'-phosphate
  modified_base 7: mod_base = OTHER; note = 2'-deoxy-2'-fluoroguanosine-3'-phosphate
  modified_base 8: mod_base = OTHER; note = 2'-O-methyluridine-3'-phosphate
  modified_base 9: mod_base = OTHER; note = 2'-deoxy-2'-fluoroguanosine-3'-phosphate
  modified_base 10: mod_base = OTHER; note = 2'-deoxy-2'-fluorouridine-3'-phosphate
  modified_base 11: mod_base = OTHER; note = 2'-deoxy-2'-fluoroguanosine-3'-phosphate
  modified_base 12: mod_base = OTHER; note = 2'-O-methyladenosine-3'-phosphate
  modified_base 13: mod_base = OTHER; note = 2'-O-methyluridine-3'-phosphate
  modified_base 14: mod_base = OTHER; note = 2'-O-methyluridine-3'-phosphate
  modified_base 15: mod_base = OTHER; note = 2'-O-methylcytidine-3'-phosphate
  modified_base 16: mod_base = OTHER; note = 2'-O-methyluridine-3'-phosphate
  modified_base 17: mod_base = OTHER; note = 2'-O-methyluridine-3'-phosphate
  modified_base 18: mod_base = OTHER; note = 2'-O-methylcytidine-3'-phosphate
  modified_base 19: mod_base = OTHER; note = 2'-O-methyladenosine-3'-phosphate
  modified_base 20: mod_base = OTHER; note = 2'-O-methyladenosine-3'-phosphate
  modified_base 21: mod_base = OTHER; note = 2'-O-methyladenosine
tcttttgtgtgattcttcaaa

SEQ ID NO: 3029 - RNA, 21 nt, synthetic construct
  source 1..21: mol_type = other RNA
  modified_base 1: mod_base = OTHER; note = 2'-O-methylcytidine-3'-phosphate
  modified_base 2: mod_base = OTHER; note = 2'-O-methyluridine-3'-phosphate
  modified_base 3: mod_base = OTHER; note = 2'-O-methyluridine-3'-phosphate
  modified_base 4: mod_base = OTHER; note = 2'-O-methyluridine-3'-phosphate
  modified_base 5: mod_base = OTHER; note = 2'-O-methyluridine-3'-phosphate
  modified_base 6: mod_base = OTHER; note = 2'-O-methylguanosine-3'-phosphate
  modified_base 7: mod_base = OTHER; note = 2'-deoxy-2'-fluorouridine-3'-phosphate
  modified_base 8: mod_base = OTHER; note = 2'-O-methylguanosine-3'-phosphate
  modified_base 9: mod_base = OTHER; note = 2'-deoxy-2'-fluorouridine-3'-phosphate
  modified_base 10: mod_base = OTHER; note = 2'-deoxy-2'-fluoroguanosine-3'-phosphate
  modified_base 11: mod_base = OTHER; note = 2'-deoxy-2'-fluoroadenosine-3'-phosphate
  modified_base 12: mod_base = OTHER; note = 2'-O-methyluridine-3'-phosphate
  modified_base 13: mod_base = OTHER; note = 2'-O-methyluridine-3'-phosphate
  modified_base 14: mod_base = OTHER; note = 2'-O-methylcytidine-3'-phosphate
  modified_base 15: mod_base = OTHER; note = 2'-O-methyluridine-3'-phosphate
  modified_base 16: mod_base = OTHER; note = 2'-O-methyluridine-3'-phosphate
  modified_base 17: mod_base = OTHER; note = 2'-O-methylcytidine-3'-phosphate
  modified_base 18: mod_base = OTHER; note = 2'-O-methyladenosine-3'-phosphate
  modified_base 19: mod_base = OTHER; note = 2'-O-methyladenosine-3'-phosphate
  modified_base 20: mod_base = OTHER; note = 2'-O-methyladenosine-3'-phosphate
  modified_base 21: mod_base = OTHER; note = 2'-O-methyladenosine
cttttgtgtgattcttcaaaa

SEQ ID NO: 3030 - RNA, 21 nt, synthetic construct
  source 1..21: mol_type = other RNA
  modified_base 1: mod_base = OTHER; note = 2'-O-methyluridine-3'-phosphate
  modified_base 2: mod_base = OTHER; note = 2'-O-methyluridine-3'-phosphate
  modified_base 3: mod_base = OTHER; note = 2'-O-methyluridine-3'-phosphate
  modified_base 4: mod_base = OTHER; note = 2'-O-methyluridine-3'-phosphate
  modified_base 5: mod_base = OTHER; note = 2'-O-methylguanosine-3'-phosphate
  modified_base 6: mod_base = OTHER; note = 2'-O-methyluridine-3'-phosphate
  modified_base 7: mod_base = OTHER; note = 2'-deoxy-2'-fluoroguanosine-3'-phosphate
  modified_base 8: mod_base = OTHER; note = 2'-O-methyluridine-3'-phosphate
  modified_base 9: mod_base = OTHER; note = 2'-deoxy-2'-fluoroguanosine-3'-phosphate
  modified_base 10: mod_base = OTHER; note = 2'-deoxy-2'-fluoroadenosine-3'-phosphate
  modified_base 11: mod_base = OTHER; note = 2'-deoxy-2'-fluorouridine-3'-phosphate
  modified_base 12: mod_base = OTHER; note = 2'-O-methyluridine-3'-phosphate
  modified_base 13: mod_base = OTHER; note = 2'-O-methylcytidine-3'-phosphate
  modified_base 14: mod_base = OTHER; note = 2'-O-methyluridine-3'-phosphate
  modified_base 15: mod_base = OTHER; note = 2'-O-methyluridine-3'-phosphate
  modified_base 16: mod_base = OTHER; note = 2'-O-methylcytidine-3'-phosphate
  modified_base 17: mod_base = OTHER; note = 2'-O-methyladenosine-3'-phosphate
  modified_base 18: mod_base = OTHER; note = 2'-O-methyladenosine-3'-phosphate
  modified_base 19: mod_base = OTHER; note = 2'-O-methyladenosine-3'-phosphate
  modified_base 20: mod_base = OTHER; note = 2'-O-methylcytidine-3'-phosphate
  modified_base 21: mod_base = OTHER; note = 2'-O-methyladenosine
ttttgtgtgattcttcaaaca

SEQ ID NO: 3031 - RNA, 21 nt, synthetic construct
  source 1..21: mol_type = other RNA
  modified_base 1: mod_base = OTHER; note = 2'-O-methyluridine-3'-phosphate
  modified_base 2: mod_base = OTHER; note = 2'-O-methyluridine-3'-phosphate
  modified_base 3: mod_base = OTHER; note = 2'-O-methyluridine-3'-phosphate
  modified_base 4: mod_base = OTHER; note = 2'-O-methylguanosine-3'-phosphate
  modified_base 5: mod_base = OTHER; note = 2'-O-methyluridine-3'-phosphate
  modified_base 6: mod_base = OTHER; note = 2'-O-methylguanosine-3'-phosphate
  modified_base 7: mod_base = OTHER; note = 2'-deoxy-2'-fluorouridine-3'-phosphate
  modified_base 8: mod_base = OTHER; note = 2'-O-methylguanosine-3'-phosphate
  modified_base 9: mod_base = OTHER; note = 2'-deoxy-2'-fluoroadenosine-3'-phosphate
  modified_base 10: mod_base = OTHER; note = 2'-deoxy-2'-fluorouridine-3'-phosphate
  modified_base 11: mod_base = OTHER; note = 2'-deoxy-2'-fluorouridine-3'-phosphate
  modified_base 12: mod_base = OTHER; note = 2'-O-methylcytidine-3'-phosphate
  modified_base 13: mod_base = OTHER; note = 2'-O-methyluridine-3'-phosphate
  modified_base 14: mod_base = OTHER; note = 2'-O-methyluridine-3'-phosphate
  modified_base 15: mod_base = OTHER; note = 2'-O-methylcytidine-3'-phosphate
  modified_base 16: mod_base = OTHER; note = 2'-O-methyladenosine-3'-phosphate
  modified_base 17: mod_base = OTHER; note = 2'-O-methyladenosine-3'-phosphate
  modified_base 18: mod_base = OTHER; note = 2'-O-methyladenosine-3'-phosphate
  modified_base 19: mod_base = OTHER; note = 2'-O-methylcytidine-3'-phosphate
  modified_base 20: mod_base = OTHER; note = 2'-O-methyluridine-3'-phosphate
  modified_base 21: mod_base = OTHER; note = 2'-O-methyladenosine
tttgtgtgattcttcaaacta

SEQ ID NO: 3032 - RNA, 21 nt, synthetic construct
  source 1..21: mol_type = other RNA
  modified_base 1: mod_base = OTHER; note = 2'-O-methyluridine-3'-phosphate
  modified_base 2: mod_base = OTHER; note = 2'-O-methyluridine-3'-phosphate
  modified_base 3: mod_base = OTHER; note = 2'-O-methylguanosine-3'-phosphate
  modified_base 4: mod_base = OTHER; note = 2'-O-methyluridine-3'-phosphate
  modified_base 5: mod_base = OTHER; note = 2'-O-methylguanosine-3'-phosphate
  modified_base 6: mod_base = OTHER; note = 2'-O-methyluridine-3'-phosphate
  modified_base 7: mod_base = OTHER; note = 2'-deoxy-2'-fluoroguanosine-3'-phosphate
  modified_base 8: mod_base = OTHER; note = 2'-O-methyladenosine-3'-phosphate
  modified_base 9: mod_base = OTHER; note = 2'-deoxy-2'-fluorouridine-3'-phosphate
  modified_base 10: mod_base = OTHER; note = 2'-deoxy-2'-fluorouridine-3'-phosphate
  modified_base 11: mod_base = OTHER; note = 2'-deoxy-2'-fluorocytidine-3'-phosphate
  modified_base 12: mod_base = OTHER; note = 2'-O-methyluridine-3'-phosphate
  modified_base 13: mod_base = OTHER; note = 2'-O-methyluridine-3'-phosphate
  modified_base 14: mod_base = OTHER; note = 2'-O-methylcytidine-3'-phosphate
  modified_base 15: mod_base = OTHER; note = 2'-O-methyladenosine-3'-phosphate
  modified_base 16: mod_base = OTHER; note = 2'-O-methyladenosine-3'-phosphate
  modified_base 17: mod_base = OTHER; note = 2'-O-methyladenosine-3'-phosphate
  modified_base 18: mod_base = OTHER; note = 2'-O-methylcytidine-3'-phosphate
  modified_base 19: mod_base = OTHER; note = 2'-O-methyluridine-3'-phosphate
  modified_base 20: mod_base = OTHER; note = 2'-O-methyluridine-3'-phosphate
  modified_base 21: mod_base = OTHER; note = 2'-O-methyladenosine
ttgtgtgattcttcaaactta

SEQ ID NO: 3033 - RNA, 21 nt, synthetic construct
  source 1..21: mol_type = other RNA
  modified_base 1: mod_base = OTHER; note = 2'-O-methylcytidine-3'-phosphate
  modified_base 2: mod_base = OTHER; note = 2'-O-methylcytidine-3'-phosphate
  modified_base 3: mod_base = OTHER; note = 2'-O-methyladenosine-3'-phosphate
  modified_base 4: mod_base = OTHER; note = 2'-O-methyladenosine-3'-phosphate
  modified_base 5: mod_base = OTHER; note = 2'-O-methyladenosine-3'-phosphate
  modified_base 6: mod_base = OTHER; note = 2'-O-methylcytidine-3'-phosphate
  modified_base 7: mod_base = OTHER; note = 2'-deoxy-2'-fluoroadenosine-3'-phosphate
  modified_base 8: mod_base = OTHER; note = 2'-O-methylguanosine-3'-phosphate
  modified_base 9: mod_base = OTHER; note = 2'-deoxy-2'-fluoroadenosine-3'-phosphate
  modified_base 10: mod_base = OTHER; note = 2'-deoxy-2'-fluoroadenosine-3'-phosphate
  modified_base 11: mod_base = OTHER; note = 2'-deoxy-2'-fluoroguanosine-3'-phosphate
  modified_base 12: mod_base = OTHER; note = 2'-O-methylguanosine-3'-phosphate
  modified_base 13: mod_base = OTHER; note = 2'-O-methyladenosine-3'-phosphate
  modified_base 14: mod_base = OTHER; note = 2'-O-methylguanosine-3'-phosphate
  modified_base 15: mod_base = OTHER; note = 2'-O-methylcytidine-3'-phosphate
  modified_base 16: mod_base = OTHER; note = 2'-O-methyladenosine-3'-phosphate
  modified_base 17: mod_base = OTHER; note = 2'-O-methyluridine-3'-phosphate
  modified_base 18: mod_base = OTHER; note = 2'-O-methylguanosine-3'-phosphate
  modified_base 19: mod_base = OTHER; note = 2'-O-methyluridine-3'-phosphate
  modified_base 20: mod_base = OTHER; note = 2'-O-methyluridine-3'-phosphate
  modified_base 21: mod_base = OTHER; note = 2'-O-methyladenosine
ccaaacagaaggagcatgtta

SEQ ID NO: 3034 - RNA, 21 nt, synthetic construct
  source 1..21: mol_type = other RNA
  modified_base 1: mod_base = OTHER; note = 2'-O-methylcytidine-3'-phosphate
  modified_base 2: mod_base = OTHER; note = 2'-O-methyladenosine-3'-phosphate
  modified_base 3: mod_base = OTHER; note = 2'-O-methyladenosine-3'-phosphate
  modified_base 4: mod_base = OTHER; note = 2'-O-methyladenosine-3'-phosphate
  modified_base 5: mod_base = OTHER; note = 2'-O-methylcytidine-3'-phosphate
  modified_base 6: mod_base = OTHER; note = 2'-O-methyladenosine-3'-phosphate
  modified_base 7: mod_base = OTHER; note = 2'-deoxy-2'-fluoroguanosine-3'-phosphate
  modified_base 8: mod_base = OTHER; note = 2'-O-methyladenosine-3'-phosphate
  modified_base 9: mod_base = OTHER; note = 2'-deoxy-2'-fluoroadenosine-3'-phosphate
  modified_base 10: mod_base = OTHER; note = 2'-deoxy-2'-fluoroguanosine-3'-phosphate
  modified_base 11: mod_base = OTHER; note = 2'-deoxy-2'-fluoroguanosine-3'-phosphate
  modified_base 12: mod_base = OTHER; note = 2'-O-methyladenosine-3'-phosphate
  modified_base 13: mod_base = OTHER; note = 2'-O-methylguanosine-3'-phosphate
  modified_base 14: mod_base = OTHER; note = 2'-O-methylcytidine-3'-phosphate
  modified_base 15: mod_base = OTHER; note = 2'-O-methyladenosine-3'-phosphate
  modified_base 16: mod_base = OTHER; note = 2'-O-methyluridine-3'-phosphate
  modified_base 17: mod_base = OTHER; note = 2'-O-methylguanosine-3'-phosphate
  modified_base 18: mod_base = OTHER; note = 2'-O-methyluridine-3'-phosphate
  modified_base 19: mod_base = OTHER; note = 2'-O-methyluridine-3'-phosphate
  modified_base 20: mod_base = OTHER; note = 2'-O-methylguanosine-3'-phosphate
  modified_base 21: mod_base = OTHER; note = 2'-O-methyladenosine
caaacagaaggagcatgttga

SEQ ID NO: 3035 - RNA, 21 nt, synthetic construct
  source 1..21: mol_type = other RNA
  modified_base 1: mod_base = OTHER; note = 2'-O-methyluridine-3'-phosphate
  modified_base 2: mod_base = OTHER; note = 2'-O-methyluridine-3'-phosphate
  modified_base 3: mod_base = OTHER; note = 2'-O-methylguanosine-3'-phosphate
  modified_base 4: mod_base = OTHER; note = 2'-O-methylguanosine-3'-phosphate
  modified_base 5: mod_base = OTHER; note = 2'-O-methylguanosine-3'-phosphate
  modified_base 6: mod_base = OTHER; note = 2'-O-methylcytidine-3'-phosphate
  modified_base 7: mod_base = OTHER; note = 2'-deoxy-2'-fluoroadenosine-3'-phosphate
  modified_base 8: mod_base = OTHER; note = 2'-O-methyluridine-3'-phosphate
  modified_base 9: mod_base = OTHER; note = 2'-deoxy-2'-fluorocytidine-3'-phosphate
  modified_base 10: mod_base = OTHER; note = 2'-deoxy-2'-fluoroadenosine-3'-phosphate
  modified_base 11: mod_base = OTHER; note = 2'-deoxy-2'-fluoroguanosine-3'-phosphate
  modified_base 12: mod_base = OTHER; note = 2'-O-methyluridine-3'-phosphate
  modified_base 13: mod_base = OTHER; note = 2'-O-methylcytidine-3'-phosphate
  modified_base 14: mod_base = OTHER; note = 2'-O-methyladenosine-3'-phosphate
  modified_base 15: mod_base = OTHER; note = 2'-O-methyluridine-3'-phosphate
  modified_base 16: mod_base = OTHER; note = 2'-O-methylguanosine-3'-phosphate
  modified_base 17: mod_base = OTHER; note = 2'-O-methylcytidine-3'-phosphate
  modified_base 18: mod_base = OTHER; note = 2'-O-methyluridine-3'-phosphate
  modified_base 19: mod_base = OTHER; note = 2'-O-methyladenosine-3'-phosphate
  modified_base 20: mod_base = OTHER; note = 2'-O-methyladenosine-3'-phosphate
  modified_base 21: mod_base = OTHER; note = 2'-O-methyladenosine
ttgggcatcagtcatgctaaa

SEQ ID NO: 3036 - RNA, 21 nt, synthetic construct
  source 1..21: mol_type = other RNA
  modified_base 1: mod_base = OTHER; note = 2'-O-methylguanosine-3'-phosphate
  modified_base 2: mod_base = OTHER; note = 2'-O-methylguanosine-3'-phosphate
  modified_base 3: mod_base = OTHER; note = 2'-O-methylcytidine-3'-phosphate
  modified_base 4: mod_base = OTHER; note = 2'-O-methyladenosine-3'-phosphate
  modified_base 5: mod_base = OTHER; note = 2'-O-methyluridine-3'-phosphate
  modified_base 6: mod_base = OTHER; note = 2'-O-methylcytidine-3'-phosphate
  modified_base 7: mod_base = OTHER; note = 2'-deoxy-2'-fluoroadenosine-3'-phosphate
  modified_base 8: mod_base = OTHER; note = 2'-O-methylguanosine-3'-phosphate
  modified_base 9: mod_base = OTHER; note = 2'-deoxy-2'-fluorouridine-3'-phosphate
  modified_base 10: mod_base = OTHER; note = 2'-deoxy-2'-fluorocytidine-3'-phosphate
  modified_base 11: mod_base = OTHER; note = 2'-deoxy-2'-fluoroadenosine-3'-phosphate
  modified_base 12: mod_base = OTHER; note = 2'-O-methyluridine-3'-phosphate
  modified_base 13: mod_base = OTHER; note = 2'-O-methylguanosine-3'-phosphate
  modified_base 14: mod_base = OTHER; note = 2'-O-methylcytidine-3'-phosphate
  modified_base 15: mod_base = OTHER; note = 2'-O-methyluridine-3'-phosphate
  modified_base 16: mod_base = OTHER; note = 2'-O-methyladenosine-3'-phosphate
  modified_base 17: mod_base = OTHER; note = 2'-O-methyladenosine-3'-phosphate
  modified_base 18: mod_base = OTHER; note = 2'-O-methylcytidine-3'-phosphate
  modified_base 19: mod_base = OTHER; note = 2'-O-methylcytidine-3'-phosphate
  modified_base 20: mod_base = OTHER; note = 2'-O-methyladenosine-3'-phosphate
  modified_base 21: mod_base = OTHER; note = 2'-O-methyladenosine
ggcatcagtcatgctaaccaa

SEQ ID NO: 3037 - RNA, 21 nt, synthetic construct
  source 1..21: mol_type = other RNA
  modified_base 1: mod_base = OTHER; note = 2'-O-methyladenosine-3'-phosphate
  modified_base 2: mod_base = OTHER; note = 2'-O-methyluridine-3'-phosphate
  modified_base 3: mod_base = OTHER; note = 2'-O-methylcytidine-3'-phosphate
  modified_base 4: mod_base = OTHER; note = 2'-O-methyladenosine-3'-phosphate
  modified_base 5: mod_base = OTHER; note = 2'-O-methylguanosine-3'-phosphate
  modified_base 6: mod_base = OTHER; note = 2'-O-methyluridine-3'-phosphate
  modified_base 7: mod_base = OTHER; note = 2'-deoxy-2'-fluorocytidine-3'-phosphate
  modified_base 8: mod_base = OTHER; note = 2'-O-methyladenosine-3'-phosphate
  modified_base 9: mod_base = OTHER; note = 2'-deoxy-2'-fluorouridine-3'-phosphate
  modified_base 10: mod_base = OTHER; note = 2'-deoxy-2'-fluoroguanosine-3'-phosphate
  modified_base 11: mod_base = OTHER; note = 2'-deoxy-2'-fluorocytidine-3'-phosphate
  modified_base 12: mod_base = OTHER; note = 2'-O-methyluridine-3'-phosphate
  modified_base 13: mod_base = OTHER; note = 2'-O-methyladenosine-3'-phosphate
  modified_base 14: mod_base = OTHER; note = 2'-O-methyladenosine-3'-phosphate
  modified_base 15: mod_base = OTHER; note = 2'-O-methylcytidine-3'-phosphate
  modified_base 16: mod_base = OTHER; note = 2'-O-methylcytidine-3'-phosphate
  modified_base 17: mod_base = OTHER; note = 2'-O-methyladenosine-3'-phosphate
  modified_base 18: mod_base = OTHER; note = 2'-O-methyladenosine-3'-phosphate
  modified_base 19: mod_base = OTHER; note = 2'-O-methyluridine-3'-phosphate
  modified_base 20: mod_base = OTHER; note = 2'-O-methylguanosine-3'-phosphate
  modified_base 21: mod_base = OTHER; note = 2'-O-methyladenosine
atcagtcatgctaaccaatga

SEQ ID NO: 3038 - RNA, 21 nt, synthetic construct
  source 1..21: mol_type = other RNA
  modified_base 1: mod_base = OTHER; note = 2'-O-methylguanosine-3'-phosphate
  modified_base 2: mod_base = OTHER; note = 2'-O-methyluridine-3'-phosphate
  modified_base 3: mod_base = OTHER; note = 2'-O-methylcytidine-3'-phosphate
  modified_base 4: mod_base = OTHER; note = 2'-O-methyladenosine-3'-phosphate
  modified_base 5: mod_base = OTHER; note = 2'-O-methyluridine-3'-phosphate
  modified_base 6: mod_base = OTHER; note = 2'-O-methylguanosine-3'-phosphate
  modified_base 7: mod_base = OTHER; note = 2'-deoxy-2'-fluorocytidine-3'-phosphate
  modified_base 8: mod_base = OTHER; note = 2'-O-methyluridine-3'-phosphate
  modified_base 9: mod_base = OTHER; note = 2'-deoxy-2'-fluoroadenosine-3'-phosphate
  modified_base 10: mod_base = OTHER; note = 2'-deoxy-2'-fluoroadenosine-3'-phosphate
  modified_base 11: mod_base = OTHER; note = 2'-deoxy-2'-fluorocytidine-3'-phosphate
  modified_base 12: mod_base = OTHER; note = 2'-O-methylcytidine-3'-phosphate
  modified_base 13: mod_base = OTHER; note = 2'-O-methyladenosine-3'-phosphate
  modified_base 14: mod_base = OTHER; note = 2'-O-methyladenosine-3'-phosphate
  modified_base 15: mod_base = OTHER; note = 2'-O-methyluridine-3'-phosphate
  modified_base 16: mod_base = OTHER; note = 2'-O-methylguanosine-3'-phosphate
  modified_base 17: mod_base = OTHER; note = 2'-O-methylguanosine-3'-phosphate
  modified_base 18: mod_base = OTHER; note = 2'-O-methyladenosine-3'-phosphate
  modified_base 19: mod_base = OTHER; note = 2'-O-methyladenosine-3'-phosphate
  modified_base 20: mod_base = OTHER; note = 2'-O-methyladenosine-3'-phosphate
  modified_base 21: mod_base = OTHER; note = 2'-O-methyladenosine
gtcatgctaaccaatggaaaa

SEQ ID NO: 3039 - RNA, 21 nt, synthetic construct
  source 1..21: mol_type = other RNA
  modified_base 1: mod_base = OTHER; note = 2'-O-methyladenosine-3'-phosphate
  modified_base 2: mod_base = OTHER; note = 2'-O-methyluridine-3'-phosphate
  modified_base 3: mod_base = OTHER; note = 2'-O-methylguanosine-3'-phosphate
  modified_base 4: mod_base = OTHER; note = 2'-O-methylcytidine-3'-phosphate
  modified_base 5: mod_base = OTHER; note = 2'-O-methyluridine-3'-phosphate
  modified_base 6: mod_base = OTHER; note = 2'-O-methyladenosine-3'-phosphate
  modified_base 7: mod_base = OTHER; note = 2'-deoxy-2'-fluoroadenosine-3'-phosphate
  modified_base 8: mod_base = OTHER; note = 2'-O-methylcytidine-3'-phosphate
  modified_base 9: mod_base = OTHER; note = 2'-deoxy-2'-fluorocytidine-3'-phosphate
  modified_base 10: mod_base = OTHER; note = 2'-deoxy-2'-fluoroadenosine-3'-phosphate
  modified_base 11: mod_base = OTHER; note = 2'-deoxy-2'-fluoroadenosine-3'-phosphate
  modified_base 12: mod_base = OTHER; note = 2'-O-methyluridine-3'-phosphate
  modified_base 13: mod_base = OTHER; note = 2'-O-methylguanosine-3'-phosphate
  modified_base 14: mod_base = OTHER; note = 2'-O-methylguanosine-3'-phosphate
  modified_base 15: mod_base = OTHER; note = 2'-O-methyladenosine-3'-phosphate
  modified_base 16: mod_base = OTHER; note = 2'-O-methyladenosine-3'-phosphate
  modified_base 17: mod_base = OTHER; note = 2'-O-methyladenosine-3'-phosphate
  modified_base 18: mod_base = OTHER; note = 2'-O-methyladenosine-3'-phosphate
  modified_base 19: mod_base = OTHER; note = 2'-O-methylguanosine-3'-phosphate
  modified_base 20: mod_base = OTHER; note = 2'-O-methyladenosine-3'-phosphate
  modified_base 21: mod_base = OTHER; note = 2'-O-methyladenosine
atgctaaccaatggaaaagaa

SEQ ID NO: 3040 - RNA, 21 nt, synthetic construct
  source 1..21: mol_type = other RNA
  modified_base 1: mod_base = OTHER; note = 2'-O-methyladenosine-3'-phosphate
  modified_base 2: mod_base = OTHER; note = 2'-O-methyladenosine-3'-phosphate
  modified_base 3: mod_base = OTHER; note = 2'-O-methyladenosine-3'-phosphate
  modified_base 4: mod_base = OTHER; note = 2'-O-methyladenosine-3'-phosphate
  modified_base 5: mod_base = OTHER; note = 2'-O-methylguanosine-3'-phosphate
  modified_base 6: mod_base = OTHER; note = 2'-O-methyladenosine-3'-phosphate
  modified_base 7: mod_base = OTHER; note = 2'-deoxy-2'-fluoroguanosine-3'-phosphate
  modified_base 8: mod_base = OTHER; note = 2'-O-methylcytidine-3'-phosphate
  modified_base 9: mod_base = OTHER; note = 2'-deoxy-2'-fluoroadenosine-3'-phosphate
  modified_base 10: mod_base = OTHER; note = 2'-deoxy-2'-fluoroguanosine-3'-phosphate
  modified_base 11: mod_base = OTHER; note = 2'-deoxy-2'-fluoroguanosine-3'-phosphate
  modified_base 12: mod_base = OTHER; note = 2'-O-methyluridine-3'-phosphate
  modified_base 13: mod_base = OTHER; note = 2'-O-methylguanosine-3'-phosphate
  modified_base 14: mod_base = OTHER; note = 2'-O-methyladenosine-3'-phosphate
  modified_base 15: mod_base = OTHER; note = 2'-O-methyluridine-3'-phosphate
  modified_base 16: mod_base = OTHER; note = 2'-O-methylcytidine-3'-phosphate
  modified_base 17: mod_base = OTHER; note = 2'-O-methyladenosine-3'-phosphate
  modified_base 18: mod_base = OTHER; note = 2'-O-methyladenosine-3'-phosphate
  modified_base 19: mod_base = OTHER; note = 2'-O-methyladenosine-3'-phosphate
  modified_base 20: mod_base = OTHER; note = 2'-O-methyluridine-3'-phosphate
  modified_base 21: mod_base = OTHER; note = 2'-O-methyladenosine
aaaagagcaggtgatcaaata

SEQ ID NO: 3041 - RNA, 21 nt, synthetic construct
  source 1..21: mol_type = other RNA
  modified_base 1: mod_base = OTHER; note = 2'-O-methylcytidine-3'-phosphate
  modified_base 2: mod_base = OTHER; note = 2'-O-methyluridine-3'-phosphate
  modified_base 3: mod_base = OTHER; note = 2'-O-methylcytidine-3'-phosphate
  modified_base 4: mod_base = OTHER; note = 2'-O-methylcytidine-3'-phosphate
  modified_base 5: mod_base = OTHER; note = 2'-O-methylcytidine-3'-phosphate
  modified_base 6: mod_base = OTHER; note = 2'-O-methyluridine-3'-phosphate
  modified_base 7: mod_base = OTHER; note = 2'-deoxy-2'-fluorouridine-3'-phosphate
  modified_base 8: mod_base = OTHER; note = 2'-O-methylcytidine-3'-phosphate
  modified_base 9: mod_base = OTHER; note = 2'-deoxy-2'-fluorocytidine-3'-phosphate
  modified_base 10: mod_base = OTHER; note = 2'-deoxy-2'-fluoroadenosine-3'-phosphate
  modified_base 11: mod_base = OTHER; note = 2'-deoxy-2'-fluoroguanosine-3'-phosphate
  modified_base 12: mod_base = OTHER; note = 2'-O-methyladenosine-3'-phosphate
  modified_base 13: mod_base = OTHER; note = 2'-O-methyladenosine-3'-phosphate
  modified_base 14: mod_base = OTHER; note = 2'-O-methylcytidine-3'-phosphate
  modified_base 15: mod_base = OTHER; note = 2'-O-methyluridine-3'-phosphate
  modified_base 16: mod_base = OTHER; note = 2'-O-methylguanosine-3'-phosphate
  modified_base 17: mod_base = OTHER; note = 2'-O-methyladenosine-3'-phosphate
  modified_base 18: mod_base = OTHER; note = 2'-O-methyladenosine-3'-phosphate
  modified_base 19: mod_base = OTHER; note = 2'-O-methyluridine-3'-phosphate
  modified_base 20: mod_base = OTHER; note = 2'-O-methylguanosine-3'-phosphate
  modified_base 21: mod_base = OTHER; note = 2'-O-methyladenosine
ctcccttccagaactgaatga

SEQ ID NO: 3042 - RNA, 21 nt, synthetic construct
  source 1..21: mol_type = other RNA
  modified_base 1: mod_base = OTHER; note = 2'-O-methyluridine-3'-phosphate
  modified_base 2: mod_base = OTHER; note = 2'-O-methylcytidine-3'-phosphate
  modified_base 3: mod_base = OTHER; note = 2'-O-methylcytidine-3'-phosphate
  modified_base 4: mod_base = OTHER; note = 2'-O-methylcytidine-3'-phosphate
  modified_base 5: mod_base = OTHER; note = 2'-O-methyluridine-3'-phosphate
  modified_base 6: mod_base = OTHER; note = 2'-O-methyluridine-3'-phosphate
  modified_base 7: mod_base = OTHER; note = 2'-deoxy-2'-fluorocytidine-3'-phosphate
  modified_base 8: mod_base = OTHER; note = 2'-O-methylcytidine-3'-phosphate
  modified_base 9: mod_base = OTHER; note = 2'-deoxy-2'-fluoroadenosine-3'-phosphate
  modified_base 10: mod_base = OTHER; note = 2'-deoxy-2'-fluoroguanosine-3'-phosphate
  modified_base 11: mod_base = OTHER; note = 2'-deoxy-2'-fluoroadenosine-3'-phosphate
  modified_base 12: mod_base = OTHER; note = 2'-O-methyladenosine-3'-phosphate
  modified_base 13: mod_base = OTHER; note = 2'-O-methylcytidine-3'-phosphate
  modified_base 14: mod_base = OTHER; note = 2'-O-methyluridine-3'-phosphate
  modified_base 15: mod_base = OTHER; note = 2'-O-methylguanosine-3'-phosphate
  modified_base 16: mod_base = OTHER; note = 2'-O-methyladenosine-3'-phosphate
  modified_base 17: mod_base = OTHER; note = 2'-O-methyladenosine-3'-phosphate
  modified_base 18: mod_base = OTHER; note = 2'-O-methyluridine-3'-phosphate
  modified_base 19: mod_base = OTHER; note = 2'-O-methylguanosine-3'-phosphate
  modified_base 20: mod_base = OTHER; note = 2'-O-methylcytidine-3'-phosphate
  modified_base 21: mod_base = OTHER; note = 2'-O-methyladenosine
tcccttccagaactgaatgca

SEQ ID NO: 3043 - RNA, 21 nt, synthetic construct
  source 1..21: mol_type = other RNA
  modified_base 1: mod_base = OTHER; note = 2'-O-methylcytidine-3'-phosphate
  modified_base 2: mod_base = OTHER; note = 2'-O-methylcytidine-3'-phosphate
  modified_base 3: mod_base = OTHER; note = 2'-O-methylcytidine-3'-phosphate
  modified_base 4: mod_base = OTHER; note = 2'-O-methyluridine-3'-phosphate
  modified_base 5: mod_base = OTHER; note = 2'-O-methyluridine-3'-phosphate
  modified_base 6: mod_base = OTHER; note = 2'-O-methylcytidine-3'-phosphate
  modified_base 7: mod_base = OTHER; note = 2'-deoxy-2'-fluorocytidine-3'-phosphate
  modified_base 8: mod_base = OTHER; note = 2'-O-methyladenosine-3'-phosphate
  modified_base 9: mod_base = OTHER; note = 2'-deoxy-2'-fluoroguanosine-3'-phosphate
  modified_base 10: mod_base = OTHER; note = 2'-deoxy-2'-fluoroadenosine-3'-phosphate
  modified_base 11: mod_base = OTHER; note = 2'-deoxy-2'-fluoroadenosine-3'-phosphate
  modified_base 12: mod_base = OTHER; note = 2'-O-methylcytidine-3'-phosphate
  modified_base 13: mod_base = OTHER; note = 2'-O-methyluridine-3'-phosphate
  modified_base 14: mod_base = OTHER; note = 2'-O-methylguanosine-3'-phosphate
  modified_base 15: mod_base = OTHER; note = 2'-O-methyladenosine-3'-phosphate
  modified_base 16: mod_base = OTHER; note = 2'-O-methyladenosine-3'-phosphate
  modified_base 17: mod_base = OTHER; note = 2'-O-methyluridine-3'-phosphate
  modified_base 18: mod_base = OTHER; note = 2'-O-methylguanosine-3'-phosphate
  modified_base 19: mod_base = OTHER; note = 2'-O-methylcytidine-3'-phosphate
  modified_base 20: mod_base = OTHER; note = 2'-O-methyluridine-3'-phosphate
  modified_base 21: mod_base = OTHER; note = 2'-O-methyladenosine
cccttccagaactgaatgcta

SEQ ID NO: 3044 - RNA, 21 nt, synthetic construct
  source 1..21: mol_type = other RNA
  modified_base 1: mod_base = OTHER; note = 2'-O-methylcytidine-3'-phosphate
  modified_base 2: mod_base = OTHER; note = 2'-O-methylcytidine-3'-phosphate
  modified_base 3: mod_base = OTHER; note = 2'-O-methyluridine-3'-phosphate
  modified_base 4: mod_base = OTHER; note = 2'-O-methyluridine-3'-phosphate
  modified_base 5: mod_base = OTHER; note = 2'-O-methylcytidine-3'-phosphate
  modified_base 6: mod_base = OTHER; note = 2'-O-methylcytidine-3'-phosphate
  modified_base 7: mod_base = OTHER; note = 2'-deoxy-2'-fluoroadenosine-3'-phosphate
  modified_base 8: mod_base = OTHER; note = 2'-O-methylguanosine-3'-phosphate
  modified_base 9: mod_base = OTHER; note = 2'-deoxy-2'-fluoroadenosine-3'-phosphate
  modified_base 10: mod_base = OTHER; note = 2'-deoxy-2'-fluoroadenosine-3'-phosphate
  modified_base 11: mod_base = OTHER; note = 2'-deoxy-2'-fluorocytidine-3'-phosphate
  modified_base 12: mod_base = OTHER; note = 2'-O-methyluridine-3'-phosphate
  modified_base 13: mod_base = OTHER; note = 2'-O-methylguanosine-3'-phosphate
  modified_base 14: mod_base = OTHER; note = 2'-O-methyladenosine-3'-phosphate
  modified_base 15: mod_base = OTHER; note = 2'-O-methyladenosine-3'-phosphate
  modified_base 16: mod_base = OTHER; note = 2'-O-methyluridine-3'-phosphate
  modified_base 17: mod_base = OTHER; note = 2'-O-methylguanosine-3'-phosphate
  modified_base 18: mod_base = OTHER; note = 2'-O-methylcytidine-3'-phosphate
  modified_base 19: mod_base = OTHER; note = 2'-O-methyluridine-3'-phosphate
  modified_base 20: mod_base = OTHER; note = 2'-O-methylcytidine-3'-phosphate
  modified_base 21: mod_base = OTHER; note = 2'-O-methyladenosine
ccttccagaactgaatgctca

SEQ ID NO: 3045 - RNA, 21 nt, synthetic construct
  source 1..21: mol_type = other RNA
  modified_base 1: mod_base = OTHER; note = 2'-O-methylcytidine-3'-phosphate
  modified_base 2: mod_base = OTHER; note = 2'-O-methyluridine-3'-phosphate
  modified_base 3: mod_base = OTHER; note = 2'-O-methyluridine-3'-phosphate
  modified_base 4: mod_base = OTHER; note = 2'-O-methylcytidine-3'-phosphate
  modified_base 5: mod_base = OTHER; note = 2'-O-methylcytidine-3'-phosphate
  modified_base 6: mod_base = OTHER; note = 2'-O-methyladenosine-3'-phosphate
  modified_base 7: mod_base = OTHER; note = 2'-deoxy-2'-fluoroguanosine-3'-phosphate
  modified_base 8: mod_base = OTHER; note = 2'-O-methyladenosine-3'-phosphate
  modified_base 9: mod_base = OTHER; note = 2'-deoxy-2'-fluoroadenosine-3'-phosphate
  modified_base 10: mod_base = OTHER; note = 2'-deoxy-2'-fluorocytidine-3'-phosphate
  modified_base 11: mod_base = OTHER; note = 2'-deoxy-2'-fluorouridine-3'-phosphate
  modified_base 12: mod_base = OTHER; note = 2'-O-methylguanosine-3'-phosphate
  modified_base 13: mod_base = OTHER; note = 2'-O-methyladenosine-3'-phosphate
  modified_base 14: mod_base = OTHER; note = 2'-O-methyladenosine-3'-phosphate
  modified_base 15: mod_base = OTHER; note = 2'-O-methyluridine-3'-phosphate
  modified_base 16: mod_base = OTHER; note = 2'-O-methylguanosine-3'-phosphate
  modified_base 17: mod_base = OTHER; note = 2'-O-methylcytidine-3'-phosphate
  modified_base 18: mod_base = OTHER; note = 2'-O-methyluridine-3'-phosphate
  modified_base 19: mod_base = OTHER; note = 2'-O-methylcytidine-3'-phosphate
  modified_base 20: mod_base = OTHER; note = 2'-O-methyladenosine-3'-phosphate
  modified_base 21: mod_base = OTHER; note = 2'-O-methyladenosine
cttccagaactgaatgctcaa

SEQ ID NO: 3046 - RNA, 21 nt, synthetic construct
  source 1..21: mol_type = other RNA
  modified_base 1: mod_base = OTHER; note = 2'-O-methyluridine-3'-phosphate
  modified_base 2: mod_base = OTHER; note = 2'-O-methyluridine-3'-phosphate
  modified_base 3: mod_base = OTHER; note = 2'-O-methylcytidine-3'-phosphate
  modified_base 4: mod_base = OTHER; note = 2'-O-methylcytidine-3'-phosphate
  modified_base 5: mod_base = OTHER; note = 2'-O-methyladenosine-3'-phosphate
  modified_base 6: mod_base = OTHER; note = 2'-O-methylguanosine-3'-phosphate
  modified_base 7: mod_base = OTHER; note = 2'-deoxy-2'-fluoroadenosine-3'-phosphate
  modified_base 8: mod_base = OTHER; note = 2'-O-methyladenosine-3'-phosphate
  modified_base 9: mod_base = OTHER; note = 2'-deoxy-2'-fluorocytidine-3'-phosphate
  modified_base 10: mod_base = OTHER; note = 2'-deoxy-2'-fluorouridine-3'-phosphate
  modified_base 11: mod_base = OTHER; note = 2'-deoxy-2'-fluoroguanosine-3'-phosphate
  modified_base 12: mod_base = OTHER; note = 2'-O-methyladenosine-3'-phosphate
  modified_base 13: mod_base = OTHER; note = 2'-O-methyladenosine-3'-phosphate
  modified_base 14: mod_base = OTHER; note = 2'-O-methyluridine-3'-phosphate
  modified_base 15: mod_base = OTHER; note = 2'-O-methylguanosine-3'-phosphate
  modified_base 16: mod_base = OTHER; note = 2'-O-methylcytidine-3'-phosphate
  modified_base 17: mod_base = OTHER; note = 2'-O-methyluridine-3'-phosphate
  modified_base 18: mod_base = OTHER; note = 2'-O-methylcytidine-3'-phosphate
  modified_base 19: mod_base = OTHER; note = 2'-O-methyladenosine-3'-phosphate
  modified_base 20: mod_base = OTHER; note = 2'-O-methyladenosine-3'-phosphate
  modified_base 21: mod_base = OTHER; note = 2'-O-methyladenosine
ttccagaactgaatgctcaaa

SEQ ID NO: 3047 - RNA, 21 nt, synthetic construct
  source 1..21: mol_type = other RNA
  modified_base 1: mod_base = OTHER; note = 2'-O-methyluridine-3'-phosphate
  modified_base 2: mod_base = OTHER; note = 2'-O-methylcytidine-3'-phosphate
  modified_base 3: mod_base = OTHER; note = 2'-O-methylcytidine-3'-phosphate
  modified_base 4: mod_base = OTHER; note = 2'-O-methyladenosine-3'-phosphate
  modified_base 5: mod_base = OTHER; note = 2'-O-methylguanosine-3'-phosphate
  modified_base 6: mod_base = OTHER; note = 2'-O-methyladenosine-3'-phosphate
  modified_base 7: mod_base = OTHER; note = 2'-deoxy-2'-fluoroadenosine-3'-phosphate
  modified_base 8: mod_base = OTHER; note = 2'-O-methylcytidine-3'-phosphate
  modified_base 9: mod_base = OTHER; note = 2'-deoxy-2'-fluorouridine-3'-phosphate
  modified_base 10: mod_base = OTHER; note = 2'-deoxy-2'-fluoroguanosine-3'-phosphate
  modified_base 11: mod_base = OTHER; note = 2'-deoxy-2'-fluoroadenosine-3'-phosphate
  modified_base 12: mod_base = OTHER; note = 2'-O-methyladenosine-3'-phosphate
  modified_base 13: mod_base = OTHER; note = 2'-O-methyluridine-3'-phosphate
  modified_base 14: mod_base = OTHER; note = 2'-O-methylguanosine-3'-phosphate
  modified_base 15: mod_base = OTHER; note = 2'-O-methylcytidine-3'-phosphate
  modified_base 16: mod_base = OTHER; note = 2'-O-methyluridine-3'-phosphate
  modified_base 17: mod_base = OTHER; note = 2'-O-methylcytidine-3'-phosphate
  modified_base 18: mod_base = OTHER; note = 2'-O-methyladenosine-3'-phosphate
  modified_base 19: mod_base = OTHER; note = 2'-O-methyladenosine-3'-phosphate
  modified_base 20: mod_base = OTHER; note = 2'-O-methylguanosine-3'-phosphate
  modified_base 21: mod_base = OTHER; note = 2'-O-methyladenosine
tccagaactgaatgctcaaga

SEQ ID NO: 3048 - RNA, 21 nt, synthetic construct
  source 1..21: mol_type = other RNA
  modified_base 1: mod_base = OTHER; note = 2'-O-methylcytidine-3'-phosphate
  modified_base 2: mod_base = OTHER; note = 2'-O-methylcytidine-3'-phosphate
  modified_base 3: mod_base = OTHER; note = 2'-O-methyladenosine-3'-phosphate
  modified_base 4: mod_base = OTHER; note = 2'-O-methylguanosine-3'-phosphate
  modified_base 5: mod_base = OTHER; note = 2'-O-methyladenosine-3'-phosphate
  modified_base 6: mod_base = OTHER; note = 2'-O-methyladenosine-3'-phosphate
  modified_base 7: mod_base = OTHER; note = 2'-deoxy-2'-fluorocytidine-3'-phosphate
  modified_base 8: mod_base = OTHER; note = 2'-O-methyluridine-3'-phosphate
  modified_base 9: mod_base = OTHER; note = 2'-deoxy-2'-fluoroguanosine-3'-phosphate
  modified_base 10: mod_base = OTHER; note = 2'-deoxy-2'-fluoroadenosine-3'-phosphate
  modified_base 11: mod_base = OTHER; note = 2'-deoxy-2'-fluoroadenosine-3'-phosphate
  modified_base 12: mod_base = OTHER; note = 2'-O-methyluridine-3'-phosphate
  modified_base 13: mod_base = OTHER; note = 2'-O-methylguanosine-3'-phosphate
  modified_base 14: mod_base = OTHER; note = 2'-O-methylcytidine-3'-phosphate
  modified_base 15: mod_base = OTHER; note = 2'-O-methyluridine-3'-phosphate
  modified_base 16: mod_base = OTHER; note = 2'-O-methylcytidine-3'-phosphate
  modified_base 17: mod_base = OTHER; note = 2'-O-methyladenosine-3'-phosphate
  modified_base 18: mod_base = OTHER; note = 2'-O-methyladenosine-3'-phosphate
  modified_base 19: mod_base = OTHER; note = 2'-O-methylguanosine-3'-phosphate
  modified_base 20: mod_base = OTHER; note = 2'-O-methyluridine-3'-phosphate
  modified_base 21: mod_base = OTHER; note = 2'-O-methyladenosine
ccagaactgaatgctcaagta

SEQ ID NO: 3049 - RNA, 21 nt, synthetic construct
  source 1..21: mol_type = other RNA
  modified_base 1: mod_base = OTHER; note = 2'-O-methylcytidine-3'-phosphate
  modified_base 2: mod_base = OTHER; note = 2'-O-methyladenosine-3'-phosphate
  modified_base 3: mod_base = OTHER; note = 2'-O-methylguanosine-3'-phosphate
  modified_base 4: mod_base = OTHER; note = 2'-O-methyladenosine-3'-phosphate
  modified_base 5: mod_base = OTHER; note = 2'-O-methyladenosine-3'-phosphate
  modified_base 6: mod_base = OTHER; note = 2'-O-methylcytidine-3'-phosphate
  modified_base 7: mod_base = OTHER; note = 2'-deoxy-2'-fluorouridine-3'-phosphate
  modified_base 8: mod_base = OTHER; note = 2'-O-methylguanosine-3'-phosphate
  modified_base 9: mod_base = OTHER; note = 2'-deoxy-2'-fluoroadenosine-3'-phosphate
  modified_base 10: mod_base = OTHER; note = 2'-deoxy-2'-fluoroadenosine-3'-phosphate
  modified_base 11: mod_base = OTHER; note = 2'-deoxy-2'-fluorouridine-3'-phosphate
  modified_base 12: mod_base = OTHER; note = 2'-O-methylguanosine-3'-phosphate
  modified_base 13: mod_base = OTHER; note = 2'-O-methylcytidine-3'-phosphate
  modified_base 14: mod_base = OTHER; note = 2'-O-methyluridine-3'-phosphate
  modified_base 15: mod_base = OTHER; note = 2'-O-methylcytidine-3'-phosphate
  modified_base 16: mod_base = OTHER; note = 2'-O-methyladenosine-3'-phosphate
  modified_base 17: mod_base = OTHER; note = 2'-O-methyladenosine-3'-phosphate
  modified_base 18: mod_base = OTHER; note = 2'-O-methylguanosine-3'-phosphate
  modified_base 19: mod_base = OTHER; note = 2'-O-methyluridine-3'-phosphate
  modified_base 20: mod_base = OTHER; note = 2'-O-methylcytidine-3'-phosphate
  modified_base 21: mod_base = OTHER; note = 2'-O-methyladenosine
cagaactgaatgctcaagtca

SEQ ID NO: 3050 - RNA, 21 nt, synthetic construct
  source 1..21: mol_type = other RNA
  modified_base 1: mod_base = OTHER; note = 2'-O-methyladenosine-3'-phosphate
  modified_base 2: mod_base = OTHER; note = 2'-O-methylguanosine-3'-phosphate
  modified_base 3: mod_base = OTHER; note = 2'-O-methyladenosine-3'-phosphate
  modified_base 4: mod_base = OTHER; note = 2'-O-methyladenosine-3'-phosphate
  modified_base 5: mod_base = OTHER; note = 2'-O-methylcytidine-3'-phosphate
  modified_base 6: mod_base = OTHER; note = 2'-O-methyluridine-3'-phosphate
  modified_base 7: mod_base = OTHER; note = 2'-deoxy-2'-fluoroguanosine-3'-phosphate
  modified_base 8: mod_base = OTHER; note = 2'-O-methyladenosine-3'-phosphate
  modified_base 9: mod_base = OTHER; note = 2'-deoxy-2'-fluoroadenosine-3'-phosphate
  modified_base 10: mod_base = OTHER; note = 2'-deoxy-2'-fluorouridine-3'-phosphate
  modified_base 11: mod_base = OTHER; note = 2'-deoxy-2'-fluoroguanosine-3'-phosphate
  modified_base 12: mod_base = OTHER; note = 2'-O-methylcytidine-3'-phosphate
  modified_base 13: mod_base = OTHER; note = 2'-O-methyluridine-3'-phosphate
  modified_base 14: mod_base = OTHER; note = 2'-O-methylcytidine-3'-phosphate
  modified_base 15: mod_base = OTHER; note = 2'-O-methyladenosine-3'-phosphate
  modified_base 16: mod_base = OTHER; note = 2'-O-methyladenosine-3'-phosphate
  modified_base 17: mod_base = OTHER; note = 2'-O-methylguanosine-3'-phosphate
  modified_base 18: mod_base = OTHER; note = 2'-O-methyluridine-3'-phosphate
  modified_base 19: mod_base = OTHER; note = 2'-O-methylcytidine-3'-phosphate
  modified_base 20: mod_base = OTHER; note = 2'-O-methyluridine-3'-phosphate
  modified_base 21: mod_base = OTHER; note = 2'-O-methyladenosine
agaactgaatgctcaagtcta

SEQ ID NO: 3051 - RNA, 21 nt, synthetic construct
  source 1..21: mol_type = other RNA
  modified_base 1: mod_base = OTHER; note = 2'-O-methylguanosine-3'-phosphate
  modified_base 2: mod_base = OTHER; note = 2'-O-methyladenosine-3'-phosphate
  modified_base 3: mod_base = OTHER; note = 2'-O-methyladenosine-3'-phosphate
  modified_base 4: mod_base = OTHER; note = 2'-O-methylcytidine-3'-phosphate
  modified_base 5: mod_base = OTHER; note = 2'-O-methyluridine-3'-phosphate
  modified_base 6: mod_base = OTHER; note = 2'-O-methylguanosine-3'-phosphate
  modified_base 7: mod_base = OTHER; note = 2'-deoxy-2'-fluoroadenosine-3'-phosphate
  modified_base 8: mod_base = OTHER; note = 2'-O-methyladenosine-3'-phosphate
  modified_base 9: mod_base = OTHER; note = 2'-deoxy-2'-fluorouridine-3'-phosphate
  modified_base 10: mod_base = OTHER; note = 2'-deoxy-2'-fluoroguanosine-3'-phosphate
  modified_base 11: mod_base = OTHER; note = 2'-deoxy-2'-fluorocytidine-3'-phosphate
  modified_base 12: mod_base = OTHER; note = 2'-O-methyluridine-3'-phosphate
  modified_base 13: mod_base = OTHER; note = 2'-O-methylcytidine-3'-phosphate
  modified_base 14: mod_base = OTHER; note = 2'-O-methyladenosine-3'-phosphate
  modified_base 15: mod_base = OTHER; note = 2'-O-methyladenosine-3'-phosphate
  modified_base 16: mod_base = OTHER; note = 2'-O-methylguanosine-3'-phosphate
  modified_base 17: mod_base = OTHER; note = 2'-O-methyluridine-3'-phosphate
  modified_base 18: mod_base = OTHER; note = 2'-O-methylcytidine-3'-phosphate
  modified_base 19: mod_base = OTHER; note = 2'-O-methyluridine-3'-phosphate
  modified_base 20: mod_base = OTHER; note = 2'-O-methyluridine-3'-phosphate
  modified_base 21: mod_base = OTHER; note = 2'-O-methyladenosine
gaactgaatgctcaagtctta

SEQ ID NO: 3052 - RNA, 21 nt, synthetic construct
  source 1..21: mol_type = other RNA
  modified_base 1: mod_base = OTHER; note = 2'-O-methyladenosine-3'-phosphate
  modified_base 2: mod_base = OTHER; note = 2'-O-methyladenosine-3'-phosphate
  modified_base 3: mod_base = OTHER; note = 2'-O-methylcytidine-3'-phosphate
  modified_base 4: mod_base = OTHER; note = 2'-O-methyluridine-3'-phosphate
  modified_base 5: mod_base = OTHER; note = 2'-O-methylguanosine-3'-phosphate
  modified_base 6: mod_base = OTHER; note = 2'-O-methyladenosine-3'-phosphate
  modified_base 7: mod_base = OTHER; note = 2'-deoxy-2'-fluoroadenosine-3'-phosphate
  modified_base 8: mod_base = OTHER; note = 2'-O-methyluridine-3'-phosphate
  modified_base 9: mod_base = OTHER; note = 2'-deoxy-2'-fluoroguanosine-3'-phosphate
  modified_base 10: mod_base = OTHER; note = 2'-deoxy-2'-fluorocytidine-3'-phosphate
  modified_base 11: mod_base = OTHER; note = 2'-deoxy-2'-fluorouridine-3'-phosphate
  modified_base 12: mod_base = OTHER; note = 2'-O-methylcytidine-3'-phosphate
  modified_base 13: mod_base = OTHER; note = 2'-O-methyladenosine-3'-phosphate
  modified_base 14: mod_base = OTHER; note = 2'-O-methyladenosine-3'-phosphate
  modified_base 15: mod_base = OTHER; note = 2'-O-methylguanosine-3'-phosphate
  modified_base 16: mod_base = OTHER; note = 2'-O-methyluridine-3'-phosphate
  modified_base 17: mod_base = OTHER; note = 2'-O-methylcytidine-3'-phosphate
  modified_base 18: mod_base = OTHER; note = 2'-O-methyluridine-3'-phosphate
  modified_base 19: mod_base = OTHER; note = 2'-O-methyluridine-3'-phosphate
  modified_base 20: mod_base = OTHER; note = 2'-O-methylcytidine-3'-phosphate
  modified_base 21: mod_base = OTHER; note = 2'-O-methyladenosine
aactgaatgctcaagtcttca

SEQ ID NO: 3053 - RNA, 21 nt, synthetic construct
  source 1..21: mol_type = other RNA
  modified_base 1: mod_base = OTHER; note = 2'-O-methyladenosine-3'-phosphate
  modified_base 2: mod_base = OTHER; note = 2'-O-methylcytidine-3'-phosphate
  modified_base 3: mod_base = OTHER; note = 2'-O-methyluridine-3'-phosphate
  modified_base 4: mod_base = OTHER; note = 2'-O-methylguanosine-3'-phosphate
  modified_base 5: mod_base = OTHER; note = 2'-O-methyladenosine-3'-phosphate
  modified_base 6: mod_base = OTHER; note = 2'-O-methyladenosine-3'-phosphate
  modified_base 7: mod_base = OTHER; note = 2'-deoxy-2'-fluorouridine-3'-phosphate
  modified_base 8: mod_base = OTHER; note = 2'-O-methylguanosine-3'-phosphate
  modified_base 9: mod_base = OTHER; note = 2'-deoxy-2'-fluorocytidine-3'-phosphate
  modified_base 10: mod_base = OTHER; note = 2'-deoxy-2'-fluorouridine-3'-phosphate
  modified_base 11: mod_base = OTHER; note = 2'-deoxy-2'-fluorocytidine-3'-phosphate
  modified_base 12: mod_base = OTHER; note = 2'-O-methyladenosine-3'-phosphate
  modified_base 13: mod_base = OTHER; note = 2'-O-methyladenosine-3'-phosphate
  modified_base 14: mod_base = OTHER; note = 2'-O-methylguanosine-3'-phosphate
  modified_base 15: mod_base = OTHER; note = 2'-O-methyluridine-3'-phosphate
  modified_base 16: mod_base = OTHER; note = 2'-O-methylcytidine-3'-phosphate
  modified_base 17: mod_base = OTHER; note = 2'-O-methyluridine-3'-phosphate
  modified_base 18: mod_base = OTHER; note = 2'-O-methyluridine-3'-phosphate
  modified_base 19: mod_base = OTHER; note = 2'-O-methylcytidine-3'-phosphate
  modified_base 20: mod_base = OTHER; note = 2'-O-methyluridine-3'-phosphate
  modified_base 21: mod_base = OTHER; note = 2'-O-methyladenosine
actgaatgctcaagtcttcta

SEQ ID NO: 3054 - RNA, 21 nt, synthetic construct
  source 1..21: mol_type = other RNA
  modified_base 1: mod_base = OTHER; note = 2'-O-methylcytidine-3'-phosphate
  modified_base 2: mod_base = OTHER; note = 2'-O-methyluridine-3'-phosphate
  modified_base 3: mod_base = OTHER; note = 2'-O-methylguanosine-3'-phosphate
  modified_base 4: mod_base = OTHER; note = 2'-O-methyladenosine-3'-phosphate
  modified_base 5: mod_base = OTHER; note = 2'-O-methyladenosine-3'-phosphate
  modified_base 6: mod_base = OTHER; note = 2'-O-methyluridine-3'-phosphate
  modified_base 7: mod_base = OTHER; note = 2'-deoxy-2'-fluoroguanosine-3'-phosphate
  modified_base 8: mod_base = OTHER; note = 2'-O-methylcytidine-3'-phosphate
  modified_base 9: mod_base = OTHER; note = 2'-deoxy-2'-fluorouridine-3'-phosphate
  modified_base 10: mod_base = OTHER; note = 2'-deoxy-2'-fluorocytidine-3'-phosphate
  modified_base 11: mod_base = OTHER; note = 2'-deoxy-2'-fluoroadenosine-3'-phosphate
  modified_base 12: mod_base = OTHER; note = 2'-O-methyladenosine-3'-phosphate
  modified_base 13: mod_base = OTHER; note = 2'-O-methylguanosine-3'-phosphate
  modified_base 14: mod_base = OTHER; note = 2'-O-methyluridine-3'-phosphate
  modified_base 15: mod_base = OTHER; note = 2'-O-methylcytidine-3'-phosphate
  modified_base 16: mod_base = OTHER; note = 2'-O-methyluridine-3'-phosphate
  modified_base 17: mod_base = OTHER; note = 2'-O-methyluridine-3'-phosphate
  modified_base 18: mod_base = OTHER; note = 2'-O-methylcytidine-3'-phosphate
  modified_base 19: mod_base = OTHER; note = 2'-O-methyluridine-3'-phosphate
  modified_base 20: mod_base = OTHER; note = 2'-O-methylguanosine-3'-phosphate
  modified_base 21: mod_base = OTHER; note = 2'-O-methyladenosine
ctgaatgctcaagtcttctga

SEQ ID NO: 3055 - RNA, 21 nt, synthetic construct
  source 1..21: mol_type = other RNA
  modified_base 1: mod_base = OTHER; note = 2'-O-methyluridine-3'-phosphate
  modified_base 2: mod_base = OTHER; note = 2'-O-methylguanosine-3'-phosphate
  modified_base 3: mod_base = OTHER; note = 2'-O-methyladenosine-3'-phosphate
  modified_base 4: mod_base = OTHER; note = 2'-O-methyladenosine-3'-phosphate
  modified_base 5: mod_base = OTHER; note = 2'-O-methyluridine-3'-phosphate
  modified_base 6: mod_base = OTHER; note = 2'-O-methylguanosine-3'-phosphate
  modified_base 7: mod_base = OTHER; note = 2'-deoxy-2'-fluorocytidine-3'-phosphate
  modified_base 8: mod_base = OTHER; note = 2'-O-methyluridine-3'-phosphate
  modified_base 9: mod_base = OTHER; note = 2'-deoxy-2'-fluorocytidine-3'-phosphate
  modified_base 10: mod_base = OTHER; note = 2'-deoxy-2'-fluoroadenosine-3'-phosphate
  modified_base 11: mod_base = OTHER; note = 2'-deoxy-2'-fluoroadenosine-3'-phosphate
  modified_base 12: mod_base = OTHER; note = 2'-O-methylguanosine-3'-phosphate
  modified_base 13: mod_base = OTHER; note = 2'-O-methyluridine-3'-phosphate
  modified_base 14: mod_base = OTHER; note = 2'-O-methylcytidine-3'-phosphate
  modified_base 15: mod_base = OTHER; note = 2'-O-methyluridine-3'-phosphate
  modified_base 16: mod_base = OTHER; note = 2'-O-methyluridine-3'-phosphate
  modified_base 17: mod_base = OTHER; note = 2'-O-methylcytidine-3'-phosphate
  modified_base 18: mod_base = OTHER; note = 2'-O-methyluridine-3'-phosphate
  modified_base 19: mod_base = OTHER; note = 2'-O-methylguanosine-3'-phosphate
  modified_base 20: mod_base = OTHER; note = 2'-O-methyluridine-3'-phosphate
  modified_base 21: mod_base = OTHER; note = 2'-O-methyladenosine
tgaatgctcaagtcttctgta

SEQ ID NO: 3056 - RNA, 21 nt, synthetic construct
  source 1..21: mol_type = other RNA
  modified_base 1: mod_base = OTHER; note = 2'-O-methylguanosine-3'-phosphate
  modified_base 2: mod_base = OTHER; note = 2'-O-methyladenosine-3'-phosphate
  modified_base 3: mod_base = OTHER; note = 2'-O-methyladenosine-3'-phosphate
  modified_base 4: mod_base = OTHER; note = 2'-O-methyluridine-3'-phosphate
  modified_base 5: mod_base = OTHER; note = 2'-O-methylguanosine-3'-phosphate
  modified_base 6: mod_base = OTHER; note = 2'-O-methylcytidine-3'-phosphate
  modified_base 7: mod_base = OTHER; note = 2'-deoxy-2'-fluorouridine-3'-phosphate
  modified_base 8: mod_base = OTHER; note = 2'-O-methylcytidine-3'-phosphate
  modified_base 9: mod_base = OTHER; note = 2'-deoxy-2'-fluoroadenosine-3'-phosphate
  modified_base 10: mod_base = OTHER; note = 2'-deoxy-2'-fluoroadenosine-3'-phosphate
  modified_base 11: mod_base = OTHER; note = 2'-deoxy-2'-fluoroguanosine-3'-phosphate
  modified_base 12: mod_base = OTHER; note = 2'-O-methyluridine-3'-phosphate
  modified_base 13: mod_base = OTHER; note = 2'-O-methylcytidine-3'-phosphate
  modified_base 14: mod_base = OTHER; note = 2'-O-methyluridine-3'-phosphate
  modified_base 15: mod_base = OTHER; note = 2'-O-methyluridine-3'-phosphate
  modified_base 16: mod_base = OTHER; note = 2'-O-methylcytidine-3'-phosphate
  modified_base 17: mod_base = OTHER; note = 2'-O-methyluridine-3'-phosphate
  modified_base 18: mod_base = OTHER; note = 2'-O-methylguanosine-3'-phosphate
  modified_base 19: mod_base = OTHER; note = 2'-O-methyluridine-3'-phosphate
  modified_base 20: mod_base = OTHER; note = 2'-O-methylcytidine-3'-phosphate
  modified_base 21: mod_base = OTHER; note = 2'-O-methyladenosine
gaatgctcaagtcttctgtca

SEQ ID NO: 3057 - RNA, 21 nt, synthetic construct
  source 1..21: mol_type = other RNA
  modified_base 1: mod_base = OTHER; note = 2'-O-methyladenosine-3'-phosphate
  modified_base 2: mod_base = OTHER; note = 2'-O-methyladenosine-3'-phosphate
  modified_base 3: mod_base = OTHER; note = 2'-O-methyluridine-3'-phosphate
  modified_base 4: mod_base = OTHER; note = 2'-O-methylguanosine-3'-phosphate
  modified_base 5: mod_base = OTHER; note = 2'-O-methylcytidine-3'-phosphate
  modified_base 6: mod_base = OTHER; note = 2'-O-methyluridine-3'-phosphate
  modified_base 7: mod_base = OTHER; note = 2'-deoxy-2'-fluorocytidine-3'-phosphate
  modified_base 8: mod_base = OTHER; note = 2'-O-methyladenosine-3'-phosphate
  modified_base 9: mod_base = OTHER; note = 2'-deoxy-2'-fluoroadenosine-3'-phosphate
  modified_base 10: mod_base = OTHER; note = 2'-deoxy-2'-fluoroguanosine-3'-phosphate
  modified_base 11: mod_base = OTHER; note = 2'-deoxy-2'-fluorouridine-3'-phosphate
  modified_base 12: mod_base = OTHER; note = 2'-O-methylcytidine-3'-phosphate
  modified_base 13: mod_base = OTHER; note = 2'-O-methyluridine-3'-phosphate
  modified_base 14: mod_base = OTHER; note = 2'-O-methyluridine-3'-phosphate
  modified_base 15: mod_base = OTHER; note = 2'-O-methylcytidine-3'-phosphate
  modified_base 16: mod_base = OTHER; note = 2'-O-methyluridine-3'-phosphate
  modified_base 17: mod_base = OTHER; note = 2'-O-methylguanosine-3'-phosphate
  modified_base 18: mod_base = OTHER; note = 2'-O-methyluridine-3'-phosphate
  modified_base 19: mod_base = OTHER; note = 2'-O-methylcytidine-3'-phosphate
  modified_base 20: mod_base = OTHER; note = 2'-O-methyladenosine-3'-phosphate
  modified_base 21: mod_base = OTHER; note = 2'-O-methyladenosine
aatgctcaagtcttctgtcaa

SEQ ID NO: 3058 - RNA, 21 nt, synthetic construct
  source 1..21: mol_type = other RNA
  modified_base 1: mod_base = OTHER; note = 2'-O-methyladenosine-3'-phosphate
  modified_base 2: mod_base = OTHER; note = 2'-O-methyluridine-3'-phosphate
  modified_base 3: mod_base = OTHER; note = 2'-O-methylguanosine-3'-phosphate
  modified_base 4: mod_base = OTHER; note = 2'-O-methylcytidine-3'-phosphate
  modified_base 5: mod_base = OTHER; note = 2'-O-methyluridine-3'-phosphate
  modified_base 6: mod_base = OTHER; note = 2'-O-methylcytidine-3'-phosphate
  modified_base 7: mod_base = OTHER; note = 2'-deoxy-2'-fluoroadenosine-3'-phosphate
  modified_base 8: mod_base = OTHER; note = 2'-O-methyladenosine-3'-phosphate
  modified_base 9: mod_base = OTHER; note = 2'-deoxy-2'-fluoroguanosine-3'-phosphate
  modified_base 10: mod_base = OTHER; note = 2'-deoxy-2'-fluorouridine-3'-phosphate
  modified_base 11: mod_base = OTHER; note = 2'-deoxy-2'-fluorocytidine-3'-phosphate
  modified_base 12: mod_base = OTHER; note = 2'-O-methyluridine-3'-phosphate
  modified_base 13: mod_base = OTHER; note = 2'-O-methyluridine-3'-phosphate
  modified_base 14: mod_base = OTHER; note = 2'-O-methylcytidine-3'-phosphate
  modified_base 15: mod_base = OTHER; note = 2'-O-methyluridine-3'-phosphate
  modified_base 16: mod_base = OTHER; note = 2'-O-methylguanosine-3'-phosphate
  modified_base 17: mod_base = OTHER; note = 2'-O-methyluridine-3'-phosphate
  modified_base 18: mod_base = OTHER; note = 2'-O-methylcytidine-3'-phosphate
  modified_base 19: mod_base = OTHER; note = 2'-O-methyladenosine-3'-phosphate
  modified_base 20: mod_base = OTHER; note = 2'-O-methyluridine-3'-phosphate
  modified_base 21: mod_base = OTHER; note = 2'-O-methyladenosine
atgctcaagtcttctgtcata

SEQ ID NO: 3059 - RNA, 21 nt, synthetic construct
  source 1..21: mol_type = other RNA
  modified_base 1: mod_base = OTHER; note = 2'-O-methyluridine-3'-phosphate
  modified_base 2: mod_base = OTHER; note = 2'-O-methylguanosine-3'-phosphate
  modified_base 3: mod_base = OTHER; note = 2'-O-methylcytidine-3'-phosphate
  modified_base 4: mod_base = OTHER; note = 2'-O-methyluridine-3'-phosphate
  modified_base 5: mod_base = OTHER; note = 2'-O-methylcytidine-3'-phosphate
  modified_base 6: mod_base = OTHER; note = 2'-O-methyladenosine-3'-phosphate
  modified_base 7: mod_base = OTHER; note = 2'-deoxy-2'-fluoroadenosine-3'-phosphate
  modified_base 8: mod_base = OTHER; note = 2'-O-methylguanosine-3'-phosphate
  modified_base 9: mod_base = OTHER; note = 2'-deoxy-2'-fluorouridine-3'-phosphate
  modified_base 10: mod_base = OTHER; note = 2'-deoxy-2'-fluorocytidine-3'-phosphate
  modified_base 11: mod_base = OTHER; note = 2'-deoxy-2'-fluorouridine-3'-phosphate
  modified_base 12: mod_base = OTHER; note = 2'-O-methyluridine-3'-phosphate
  modified_base 13: mod_base = OTHER; note = 2'-O-methylcytidine-3'-phosphate
  modified_base 14: mod_base = OTHER; note = 2'-O-methyluridine-3'-phosphate
  modified_base 15: mod_base = OTHER; note = 2'-O-methylguanosine-3'-phosphate
  modified_base 16: mod_base = OTHER; note = 2'-O-methyluridine-3'-phosphate
  modified_base 17: mod_base = OTHER; note = 2'-O-methylcytidine-3'-phosphate
  modified_base 18: mod_base = OTHER; note = 2'-O-methyladenosine-3'-phosphate
  modified_base 19: mod_base = OTHER; note = 2'-O-methyluridine-3'-phosphate
  modified_base 20: mod_base = OTHER; note = 2'-O-methyladenosine-3'-phosphate
  modified_base 21: mod_base = OTHER; note = 2'-O-methyladenosine
tgctcaagtcttctgtcataa

SEQ ID NO: 3060 - RNA, 21 nt, synthetic construct
  source 1..21: mol_type = other RNA
  modified_base 1: mod_base = OTHER; note = 2'-O-methylguanosine-3'-phosphate
  modified_base 2: mod_base = OTHER; note = 2'-O-methylcytidine-3'-phosphate
  modified_base 3: mod_base = OTHER; note = 2'-O-methyluridine-3'-phosphate
  modified_base 4: mod_base = OTHER; note = 2'-O-methylcytidine-3'-phosphate
  modified_base 5: mod_base = OTHER; note = 2'-O-methyladenosine-3'-phosphate
  modified_base 6: mod_base = OTHER; note = 2'-O-methyladenosine-3'-phosphate
  modified_base 7: mod_base = OTHER; note = 2'-deoxy-2'-fluoroguanosine-3'-phosphate
  modified_base 8: mod_base = OTHER; note = 2'-O-methyluridine-3'-phosphate
  modified_base 9: mod_base = OTHER; note = 2'-deoxy-2'-fluorocytidine-3'-phosphate
  modified_base 10: mod_base = OTHER; note = 2'-deoxy-2'-fluorouridine-3'-phosphate
  modified_base 11: mod_base = OTHER; note = 2'-deoxy-2'-fluorouridine-3'-phosphate
  modified_base 12: mod_base = OTHER; note = 2'-O-methylcytidine-3'-phosphate
  modified_base 13: mod_base = OTHER; note = 2'-O-methyluridine-3'-phosphate
  modified_base 14: mod_base = OTHER; note = 2'-O-methylguanosine-3'-phosphate
  modified_base 15: mod_base = OTHER; note = 2'-O-methyluridine-3'-phosphate
  modified_base 16: mod_base = OTHER; note = 2'-O-methylcytidine-3'-phosphate
  modified_base 17: mod_base = OTHER; note = 2'-O-methyladenosine-3'-phosphate
  modified_base 18: mod_base = OTHER; note = 2'-O-methyluridine-3'-phosphate
  modified_base 19: mod_base = OTHER; note = 2'-O-methyladenosine-3'-phosphate
  modified_base 20: mod_base = OTHER; note = 2'-O-methylguanosine-3'-phosphate
  modified_base 21: mod_base = OTHER; note = 2'-O-methyladenosine
gctcaagtcttctgtcataga

SEQ ID NO: 3061 - RNA, 21 nt, synthetic construct
  source 1..21: mol_type = other RNA
  modified_base 1: mod_base = OTHER; note = 2'-O-methylcytidine-3'-phosphate
  modified_base 2: mod_base = OTHER; note = 2'-O-methyluridine-3'-phosphate
  modified_base 3: mod_base = OTHER; note = 2'-O-methylcytidine-3'-phosphate
  modified_base 4: mod_base = OTHER; note = 2'-O-methyladenosine-3'-phosphate
  modified_base 5: mod_base = OTHER; note = 2'-O-methyladenosine-3'-phosphate
  modified_base 6: mod_base = OTHER; note = 2'-O-methylguanosine-3'-phosphate
  modified_base 7: mod_base = OTHER; note = 2'-deoxy-2'-fluorouridine-3'-phosphate
  modified_base 8: mod_base = OTHER; note = 2'-O-methylcytidine-3'-phosphate
  modified_base 9: mod_base = OTHER; note = 2'-deoxy-2'-fluorouridine-3'-phosphate
  modified_base 10: mod_base = OTHER; note = 2'-deoxy-2'-fluorouridine-3'-phosphate
  modified_base 11: mod_base = OTHER; note = 2'-deoxy-2'-fluorocytidine-3'-phosphate
  modified_base 12: mod_base = OTHER; note = 2'-O-methyluridine-3'-phosphate
  modified_base 13: mod_base = OTHER; note = 2'-O-methylguanosine-3'-phosphate
  modified_base 14: mod_base = OTHER; note = 2'-O-methyluridine-3'-phosphate
  modified_base 15: mod_base = OTHER; note = 2'-O-methylcytidine-3'-phosphate
  modified_base 16: mod_base = OTHER; note = 2'-O-methyladenosine-3'-phosphate
  modified_base 17: mod_base = OTHER; note = 2'-O-methyluridine-3'-phosphate
  modified_base 18: mod_base = OTHER; note = 2'-O-methyladenosine-3'-phosphate
  modified_base 19: mod_base = OTHER; note = 2'-O-methylguanosine-3'-phosphate
  modified_base 20: mod_base = OTHER; note = 2'-O-methyluridine-3'-phosphate
  modified_base 21: mod_base = OTHER; note = 2'-O-methyladenosine
ctcaagtcttctgtcatagta

SEQ ID NO: 3062 - RNA, 21 nt, synthetic construct
  source 1..21: mol_type = other RNA
  modified_base 1: mod_base = OTHER; note = 2'-O-methyluridine-3'-phosphate
  modified_base 2: mod_base = OTHER; note = 2'-O-methylcytidine-3'-phosphate
  modified_base 3: mod_base = OTHER; note = 2'-O-methyladenosine-3'-phosphate
  modified_base 4: mod_base = OTHER; note = 2'-O-methyladenosine-3'-phosphate
  modified_base 5: mod_base = OTHER; note = 2'-O-methylguanosine-3'-phosphate
  modified_base 6: mod_base = OTHER; note = 2'-O-methyluridine-3'-phosphate
  modified_base 7: mod_base = OTHER; note = 2'-deoxy-2'-fluorocytidine-3'-phosphate
  modified_base 8: mod_base = OTHER; note = 2'-O-methyluridine-3'-phosphate
  modified_base 9: mod_base = OTHER; note = 2'-deoxy-2'-fluorouridine-3'-phosphate
  modified_base 10: mod_base = OTHER; note = 2'-deoxy-2'-fluorocytidine-3'-phosphate
  modified_base 11: mod_base = OTHER; note = 2'-deoxy-2'-fluorouridine-3'-phosphate
  modified_base 12: mod_base = OTHER; note = 2'-O-methylguanosine-3'-phosphate
  modified_base 13: mod_base = OTHER; note = 2'-O-methyluridine-3'-phosphate
  modified_base 14: mod_base = OTHER; note = 2'-O-methylcytidine-3'-phosphate
  modified_base 15: mod_base = OTHER; note = 2'-O-methyladenosine-3'-phosphate
  modified_base 16: mod_base = OTHER; note = 2'-O-methyluridine-3'-phosphate
  modified_base 17: mod_base = OTHER; note = 2'-O-methyladenosine-3'-phosphate
  modified_base 18: mod_base = OTHER; note = 2'-O-methylguanosine-3'-phosphate
  modified_base 19: mod_base = OTHER; note = 2'-O-methyluridine-3'-phosphate
  modified_base 20: mod_base = OTHER; note = 2'-O-methyluridine-3'-phosphate
  modified_base 21: mod_base = OTHER; note = 2'-O-methyladenosine
tcaagtcttctgtcatagtta

SEQ ID NO: 3063 - RNA, 21 nt, synthetic construct
  source 1..21: mol_type = other RNA
  modified_base 1: mod_base = OTHER; note = 2'-O-methylcytidine-3'-phosphate
  modified_base 2: mod_base = OTHER; note = 2'-O-methyladenosine-3'-phosphate
  modified_base 3: mod_base = OTHER; note = 2'-O-methyladenosine-3'-phosphate
  modified_base 4: mod_base = OTHER; note = 2'-O-methylguanosine-3'-phosphate
  modified_base 5: mod_base = OTHER; note = 2'-O-methyluridine-3'-phosphate
  modified_base 6: mod_base = OTHER; note = 2'-O-methylcytidine-3'-phosphate
  modified_base 7: mod_base = OTHER; note = 2'-deoxy-2'-fluorouridine-3'-phosphate
  modified_base 8: mod_base = OTHER; note = 2'-O-methyluridine-3'-phosphate
  modified_base 9: mod_base = OTHER; note = 2'-deoxy-2'-fluorocytidine-3'-phosphate
  modified_base 10: mod_base = OTHER; note = 2'-deoxy-2'-fluorouridine-3'-phosphate
  modified_base 11: mod_base = OTHER; note = 2'-deoxy-2'-fluoroguanosine-3'-phosphate
  modified_base 12: mod_base = OTHER; note = 2'-O-methyluridine-3'-phosphate
  modified_base 13: mod_base = OTHER; note = 2'-O-methylcytidine-3'-phosphate
  modified_base 14: mod_base = OTHER; note = 2'-O-methyladenosine-3'-phosphate
  modified_base 15: mod_base = OTHER; note = 2'-O-methyluridine-3'-phosphate
  modified_base 16: mod_base = OTHER; note = 2'-O-methyladenosine-3'-phosphate
  modified_base 17: mod_base = OTHER; note = 2'-O-methylguanosine-3'-phosphate
  modified_base 18: mod_base = OTHER; note = 2'-O-methyluridine-3'-phosphate
  modified_base 19: mod_base = OTHER; note = 2'-O-methyluridine-3'-phosphate
  modified_base 20: mod_base = OTHER; note = 2'-O-methylcytidine-3'-phosphate
  modified_base 21: mod_base = OTHER; note = 2'-O-methyladenosine
caagtcttctgtcatagttca

SEQ ID NO: 3064 - RNA, 21 nt, synthetic construct
  source 1..21: mol_type = other RNA
  modified_base 1: mod_base = OTHER; note = 2'-O-methyladenosine-3'-phosphate
  modified_base 2: mod_base = OTHER; note = 2'-O-methyladenosine-3'-phosphate
  modified_base 3: mod_base = OTHER; note = 2'-O-methylguanosine-3'-phosphate
  modified_base 4: mod_base = OTHER; note = 2'-O-methyluridine-3'-phosphate
  modified_base 5: mod_base = OTHER; note = 2'-O-methylcytidine-3'-phosphate
  modified_base 6: mod_base = OTHER; note = 2'-O-methyluridine-3'-phosphate
  modified_base 7: mod_base = OTHER; note = 2'-deoxy-2'-fluorouridine-3'-phosphate
  modified_base 8: mod_base = OTHER; note = 2'-O-methylcytidine-3'-phosphate
  modified_base 9: mod_base = OTHER; note = 2'-deoxy-2'-fluorouridine-3'-phosphate
  modified_base 10: mod_base = OTHER; note = 2'-deoxy-2'-fluoroguanosine-3'-phosphate
  modified_base 11: mod_base = OTHER; note = 2'-deoxy-2'-fluorouridine-3'-phosphate
  modified_base 12: mod_base = OTHER; note = 2'-O-methylcytidine-3'-phosphate
  modified_base 13: mod_base = OTHER; note = 2'-O-methyladenosine-3'-phosphate
  modified_base 14: mod_base = OTHER; note = 2'-O-methyluridine-3'-phosphate
  modified_base 15: mod_base = OTHER; note = 2'-O-methyladenosine-3'-phosphate
  modified_base 16: mod_base = OTHER; note = 2'-O-methylguanosine-3'-phosphate
  modified_base 17: mod_base = OTHER; note = 2'-O-methyluridine-3'-phosphate
  modified_base 18: mod_base = OTHER; note = 2'-O-methyluridine-3'-phosphate
  modified_base 19: mod_base = OTHER; note = 2'-O-methylcytidine-3'-phosphate
  modified_base 20: mod_base = OTHER; note = 2'-O-methylcytidine-3'-phosphate
  modified_base 21: mod_base = OTHER; note = 2'-O-methyladenosine
aagtcttctgtcatagttcca

SEQ ID NO: 3065 - RNA, 21 nt, synthetic construct
  source 1..21: mol_type = other RNA
  modified_base 1: mod_base = OTHER; note = 2'-O-methyladenosine-3'-phosphate
  modified_base 2: mod_base = OTHER; note = 2'-O-methylguanosine-3'-phosphate
  modified_base 3: mod_base = OTHER; note = 2'-O-methyluridine-3'-phosphate
  modified_base 4: mod_base = OTHER; note = 2'-O-methylcytidine-3'-phosphate
  modified_base 5: mod_base = OTHER; note = 2'-O-methyluridine-3'-phosphate
  modified_base 6: mod_base = OTHER; note = 2'-O-methyluridine-3'-phosphate
  modified_base 7: mod_base = OTHER; note = 2'-deoxy-2'-fluorocytidine-3'-phosphate
  modified_base 8: mod_base = OTHER; note = 2'-O-methyluridine-3'-phosphate
  modified_base 9: mod_base = OTHER; note = 2'-deoxy-2'-fluoroguanosine-3'-phosphate
  modified_base 10: mod_base = OTHER; note = 2'-deoxy-2'-fluorouridine-3'-phosphate
  modified_base 11: mod_base = OTHER; note = 2'-deoxy-2'-fluorocytidine-3'-phosphate
  modified_base 12: mod_base = OTHER; note = 2'-O-methyladenosine-3'-phosphate
  modified_base 13: mod_base = OTHER; note = 2'-O-methyluridine-3'-phosphate
  modified_base 14: mod_base = OTHER; note = 2'-O-methyladenosine-3'-phosphate
  modified_base 15: mod_base = OTHER; note = 2'-O-methylguanosine-3'-phosphate
  modified_base 16: mod_base = OTHER; note = 2'-O-methyluridine-3'-phosphate
  modified_base 17: mod_base = OTHER; note = 2'-O-methyluridine-3'-phosphate
  modified_base 18: mod_base = OTHER; note = 2'-O-methylcytidine-3'-phosphate
  modified_base 19: mod_base = OTHER; note = 2'-O-methylcytidine-3'-phosphate
  modified_base 20: mod_base = OTHER; note = 2'-O-methyladenosine-3'-phosphate
  modified_base 21: mod_base = OTHER; note = 2'-O-methyladenosine
agtcttctgtcatagttccaa

SEQ ID NO: 3066 - RNA, 21 nt, synthetic construct
  source 1..21: mol_type = other RNA
  modified_base 1: mod_base = OTHER; note = 2'-O-methylguanosine-3'-phosphate
  modified_base 2: mod_base = OTHER; note = 2'-O-methyluridine-3'-phosphate
  modified_base 3: mod_base = OTHER; note = 2'-O-methylcytidine-3'-phosphate
  modified_base 4: mod_base = OTHER; note = 2'-O-methyluridine-3'-phosphate
  modified_base 5: mod_base = OTHER; note = 2'-O-methyluridine-3'-phosphate
  modified_base 6: mod_base = OTHER; note = 2'-O-methylcytidine-3'-phosphate
  modified_base 7: mod_base = OTHER; note = 2'-deoxy-2'-fluorouridine-3'-phosphate
  modified_base 8: mod_base = OTHER; note = 2'-O-methylguanosine-3'-phosphate
  modified_base 9: mod_base = OTHER; note = 2'-deoxy-2'-fluorouridine-3'-phosphate
  modified_base 10: mod_base = OTHER; note = 2'-deoxy-2'-fluorocytidine-3'-phosphate
  modified_base 11: mod_base = OTHER; note = 2'-deoxy-2'-fluoroadenosine-3'-phosphate
  modified_base 12: mod_base = OTHER; note = 2'-O-methyluridine-3'-phosphate
  modified_base 13: mod_base = OTHER; note = 2'-O-methyladenosine-3'-phosphate
  modified_base 14: mod_base = OTHER; note = 2'-O-methylguanosine-3'-phosphate
  modified_base 15: mod_base = OTHER; note = 2'-O-methyluridine-3'-phosphate
  modified_base 16: mod_base = OTHER; note = 2'-O-methyluridine-3'-phosphate
  modified_base 17: mod_base = OTHER; note = 2'-O-methylcytidine-3'-phosphate
  modified_base 18: mod_base = OTHER; note = 2'-O-methylcytidine-3'-phosphate
  modified_base 19: mod_base = OTHER; note = 2'-O-methyladenosine-3'-phosphate
  modified_base 20: mod_base = OTHER; note = 2'-O-methyladenosine-3'-phosphate
  modified_base 21: mod_base = OTHER; note = 2'-O-methyladenosine
gtcttctgtcatagttccaaa

SEQ ID NO: 3067 - RNA, 21 nt, synthetic construct
  source 1..21: mol_type = other RNA
  modified_base 1: mod_base = OTHER; note = 2'-O-methyluridine-3'-phosphate
  modified_base 2: mod_base = OTHER; note = 2'-O-methylcytidine-3'-phosphate
  modified_base 3: mod_base = OTHER; note = 2'-O-methyluridine-3'-phosphate
  modified_base 4: mod_base = OTHER; note = 2'-O-methyluridine-3'-phosphate
  modified_base 5: mod_base = OTHER; note = 2'-O-methylcytidine-3'-phosphate
  modified_base 6: mod_base = OTHER; note = 2'-O-methyluridine-3'-phosphate
  modified_base 7: mod_base = OTHER; note = 2'-deoxy-2'-fluoroguanosine-3'-phosphate
  modified_base 8: mod_base = OTHER; note = 2'-O-methyluridine-3'-phosphate
  modified_base 9: mod_base = OTHER; note = 2'-deoxy-2'-fluorocytidine-3'-phosphate
  modified_base 10: mod_base = OTHER; note = 2'-deoxy-2'-fluoroadenosine-3'-phosphate
  modified_base 11: mod_base = OTHER; note = 2'-deoxy-2'-fluorouridine-3'-phosphate
  modified_base 12: mod_base = OTHER; note = 2'-O-methyladenosine-3'-phosphate
  modified_base 13: mod_base = OTHER; note = 2'-O-methylguanosine-3'-phosphate
  modified_base 14: mod_base = OTHER; note = 2'-O-methyluridine-3'-phosphate
  modified_base 15: mod_base = OTHER; note = 2'-O-methyluridine-3'-phosphate
  modified_base 16: mod_base = OTHER; note = 2'-O-methylcytidine-3'-phosphate
  modified_base 17: mod_base = OTHER; note = 2'-O-methylcytidine-3'-phosphate
  modified_base 18: mod_base = OTHER; note = 2'-O-methyladenosine-3'-phosphate
  modified_base 19: mod_base = OTHER; note = 2'-O-methyladenosine-3'-phosphate
  modified_base 20: mod_base = OTHER; note = 2'-O-methylcytidine-3'-phosphate
  modified_base 21: mod_base = OTHER; note = 2'-O-methyladenosine
tcttctgtcatagttccaaca

SEQ ID NO: 3068 - RNA, 21 nt, synthetic construct
  source 1..21: mol_type = other RNA
  modified_base 1: mod_base = OTHER; note = 2'-O-methylcytidine-3'-phosphate
  modified_base 2: mod_base = OTHER; note = 2'-O-methyluridine-3'-phosphate
  modified_base 3: mod_base = OTHER; note = 2'-O-methyluridine-3'-phosphate
  modified_base 4: mod_base = OTHER; note = 2'-O-methylcytidine-3'-phosphate
  modified_base 5: mod_base = OTHER; note = 2'-O-methyluridine-3'-phosphate
  modified_base 6: mod_base = OTHER; note = 2'-O-methylguanosine-3'-phosphate
  modified_base 7: mod_base = OTHER; note = 2'-deoxy-2'-fluorouridine-3'-phosphate
  modified_base 8: mod_base = OTHER; note = 2'-O-methylcytidine-3'-phosphate
  modified_base 9: mod_base = OTHER; note = 2'-deoxy-2'-fluoroadenosine-3'-phosphate
  modified_base 10: mod_base = OTHER; note = 2'-deoxy-2'-fluorouridine-3'-phosphate
  modified_base 11: mod_base = OTHER; note = 2'-deoxy-2'-fluoroadenosine-3'-phosphate
  modified_base 12: mod_base = OTHER; note = 2'-O-methylguanosine-3'-phosphate
  modified_base 13: mod_base = OTHER; note = 2'-O-methyluridine-3'-phosphate
  modified_base 14: mod_base = OTHER; note = 2'-O-methyluridine-3'-phosphate
  modified_base 15: mod_base = OTHER; note = 2'-O-methylcytidine-3'-phosphate
  modified_base 16: mod_base = OTHER; note = 2'-O-methylcytidine-3'-phosphate
  modified_base 17: mod_base = OTHER; note = 2'-O-methyladenosine-3'-phosphate
  modified_base 18: mod_base = OTHER; note = 2'-O-methyladenosine-3'-phosphate
  modified_base 19: mod_base = OTHER; note = 2'-O-methylcytidine-3'-phosphate
  modified_base 20: mod_base = OTHER; note = 2'-O-methyladenosine-3'-phosphate
  modified_base 21: mod_base = OTHER; note = 2'-O-methyladenosine
cttctgtcatagttccaacaa

SEQ ID NO: 3069 - RNA, 21 nt, synthetic construct
  source 1..21: mol_type = other RNA
  modified_base 1: mod_base = OTHER; note = 2'-O-methyluridine-3'-phosphate
  modified_base 2: mod_base = OTHER; note = 2'-O-methyluridine-3'-phosphate
  modified_base 3: mod_base = OTHER; note = 2'-O-methylcytidine-3'-phosphate
  modified_base 4: mod_base = OTHER; note = 2'-O-methyluridine-3'-phosphate
  modified_base 5: mod_base = OTHER; note = 2'-O-methylguanosine-3'-phosphate
  modified_base 6: mod_base = OTHER; note = 2'-O-methyluridine-3'-phosphate
  modified_base 7: mod_base = OTHER; note = 2'-deoxy-2'-fluorocytidine-3'-phosphate
  modified_base 8: mod_base = OTHER; note = 2'-O-methyladenosine-3'-phosphate
  modified_base 9: mod_base = OTHER; note = 2'-deoxy-2'-fluorouridine-3'-phosphate
  modified_base 10: mod_base = OTHER; note = 2'-deoxy-2'-fluoroadenosine-3'-phosphate
  modified_base 11: mod_base = OTHER; note = 2'-deoxy-2'-fluoroguanosine-3'-phosphate
  modified_base 12: mod_base = OTHER; note = 2'-O-methyluridine-3'-phosphate
  modified_base 13: mod_base = OTHER; note = 2'-O-methyluridine-3'-phosphate
  modified_base 14: mod_base = OTHER; note = 2'-O-methylcytidine-3'-phosphate
  modified_base 15: mod_base = OTHER; note = 2'-O-methylcytidine-3'-phosphate
  modified_base 16: mod_base = OTHER; note = 2'-O-methyladenosine-3'-phosphate
  modified_base 17: mod_base = OTHER; note = 2'-O-methyladenosine-3'-phosphate
  modified_base 18: mod_base = OTHER; note = 2'-O-methylcytidine-3'-phosphate
  modified_base 19: mod_base = OTHER; note = 2'-O-methyladenosine-3'-phosphate
  modified_base 20: mod_base = OTHER; note = 2'-O-methyladenosine-3'-phosphate
  modified_base 21: mod_base = OTHER; note = 2'-O-methyladenosine
ttctgtcatagttccaacaaa

SEQ ID NO: 3070 - RNA, 21 nt, synthetic construct
  source 1..21: mol_type = other RNA
  modified_base 1: mod_base = OTHER; note = 2'-O-methyluridine-3'-phosphate
  modified_base 2: mod_base = OTHER; note = 2'-O-methylcytidine-3'-phosphate
  modified_base 3: mod_base = OTHER; note = 2'-O-methyluridine-3'-phosphate
  modified_base 4: mod_base = OTHER; note = 2'-O-methylguanosine-3'-phosphate
  modified_base 5: mod_base = OTHER; note = 2'-O-methyluridine-3'-phosphate
  modified_base 6: mod_base = OTHER; note = 2'-O-methylcytidine-3'-phosphate
  modified_base 7: mod_base = OTHER; note = 2'-deoxy-2'-fluoroadenosine-3'-phosphate
  modified_base 8: mod_base = OTHER; note = 2'-O-methyluridine-3'-phosphate
  modified_base 9: mod_base = OTHER; note = 2'-deoxy-2'-fluoroadenosine-3'-phosphate
  modified_base 10: mod_base = OTHER; note = 2'-deoxy-2'-fluoroguanosine-3'-phosphate
  modified_base 11: mod_base = OTHER; note = 2'-deoxy-2'-fluorouridine-3'-phosphate
  modified_base 12: mod_base = OTHER; note = 2'-O-methyluridine-3'-phosphate
  modified_base 13: mod_base = OTHER; note = 2'-O-methylcytidine-3'-phosphate
  modified_base 14: mod_base = OTHER; note = 2'-O-methylcytidine-3'-phosphate
  modified_base 15: mod_base = OTHER; note = 2'-O-methyladenosine-3'-phosphate
  modified_base 16: mod_base = OTHER; note = 2'-O-methyladenosine-3'-phosphate
  modified_base 17: mod_base = OTHER; note = 2'-O-methylcytidine-3'-phosphate
  modified_base 18: mod_base = OTHER; note = 2'-O-methyladenosine-3'-phosphate
  modified_base 19: mod_base = OTHER; note = 2'-O-methyladenosine-3'-phosphate
  modified_base 20: mod_base = OTHER; note = 2'-O-methyluridine-3'-phosphate
  modified_base 21: mod_base = OTHER; note = 2'-O-methyladenosine
tctgtcatagttccaacaata

SEQ ID NO: 3071 - RNA, 21 nt, synthetic construct
  source 1..21: mol_type = other RNA
  modified_base 1: mod_base = OTHER; note = 2'-O-methylcytidine-3'-phosphate
  modified_base 2: mod_base = OTHER; note = 2'-O-methyluridine-3'-phosphate
  modified_base 3: mod_base = OTHER; note = 2'-O-methylguanosine-3'-phosphate
  modified_base 4: mod_base = OTHER; note = 2'-O-methyluridine-3'-phosphate
  modified_base 5: mod_base = OTHER; note = 2'-O-methylcytidine-3'-phosphate
  modified_base 6: mod_base = OTHER; note = 2'-O-methyladenosine-3'-phosphate
  modified_base 7: mod_base = OTHER; note = 2'-deoxy-2'-fluorouridine-3'-phosphate
  modified_base 8: mod_base = OTHER; note = 2'-O-methyladenosine-3'-phosphate
  modified_base 9: mod_base = OTHER; note = 2'-deoxy-2'-fluoroguanosine-3'-phosphate
  modified_base 10: mod_base = OTHER; note = 2'-deoxy-2'-fluorouridine-3'-phosphate
  modified_base 11: mod_base = OTHER; note = 2'-deoxy-2'-fluorouridine-3'-phosphate
  modified_base 12: mod_base = OTHER; note = 2'-O-methylcytidine-3'-phosphate
  modified_base 13: mod_base = OTHER; note = 2'-O-methylcytidine-3'-phosphate
  modified_base 14: mod_base = OTHER; note = 2'-O-methyladenosine-3'-phosphate
  modified_base 15: mod_base = OTHER; note = 2'-O-methyladenosine-3'-phosphate
  modified_base 16: mod_base = OTHER; note = 2'-O-methylcytidine-3'-phosphate
  modified_base 17: mod_base = OTHER; note = 2'-O-methyladenosine-3'-phosphate
  modified_base 18: mod_base = OTHER; note = 2'-O-methyladenosine-3'-phosphate
  modified_base 19: mod_base = OTHER; note = 2'-O-methyluridine-3'-phosphate
  modified_base 20: mod_base = OTHER; note = 2'-O-methylguanosine-3'-phosphate
  modified_base 21: mod_base = OTHER; note = 2'-O-methyladenosine
ctgtcatagttccaacaatga

SEQ ID NO: 3072 - RNA, 21 nt, synthetic construct
  source 1..21: mol_type = other RNA
  modified_base 1: mod_base = OTHER; note = 2'-O-methyluridine-3'-phosphate
  modified_base 2: mod_base = OTHER; note = 2'-O-methylguanosine-3'-phosphate
  modified_base 3: mod_base = OTHER; note = 2'-O-methyluridine-3'-phosphate
  modified_base 4: mod_base = OTHER; note = 2'-O-methylcytidine-3'-phosphate
  modified_base 5: mod_base = OTHER; note = 2'-O-methyladenosine-3'-phosphate
  modified_base 6: mod_base = OTHER; note = 2'-O-methyluridine-3'-phosphate
  modified_base 7: mod_base = OTHER; note = 2'-deoxy-2'-fluoroadenosine-3'-phosphate
  modified_base 8: mod_base = OTHER; note = 2'-O-methylguanosine-3'-phosphate
  modified_base 9: mod_base = OTHER; note = 2'-deoxy-2'-fluorouridine-3'-phosphate
  modified_base 10: mod_base = OTHER; note = 2'-deoxy-2'-fluorouridine-3'-phosphate
  modified_base 11: mod_base = OTHER; note = 2'-deoxy-2'-fluorocytidine-3'-phosphate
  modified_base 12: mod_base = OTHER; note = 2'-O-methylcytidine-3'-phosphate
  modified_base 13: mod_base = OTHER; note = 2'-O-methyladenosine-3'-phosphate
  modified_base 14: mod_base = OTHER; note = 2'-O-methyladenosine-3'-phosphate
  modified_base 15: mod_base = OTHER; note = 2'-O-methylcytidine-3'-phosphate
  modified_base 16: mod_base = OTHER; note = 2'-O-methyladenosine-3'-phosphate
  modified_base 17: mod_base = OTHER; note = 2'-O-methyladenosine-3'-phosphate
  modified_base 18: mod_base = OTHER; note = 2'-O-methyluridine-3'-phosphate
  modified_base 19: mod_base = OTHER; note = 2'-O-methylguanosine-3'-phosphate
  modified_base 20: mod_base = OTHER; note = 2'-O-methyluridine-3'-phosphate
  modified_base 21: mod_base = OTHER; note = 2'-O-methyladenosine
tgtcatagttccaacaatgta

SEQ ID NO: 3073 - RNA, 21 nt, synthetic construct
  source 1..21: mol_type = other RNA
  modified_base 1: mod_base = OTHER; note = 2'-O-methylguanosine-3'-phosphate
  modified_base 2: mod_base = OTHER; note = 2'-O-methyluridine-3'-phosphate
  modified_base 3: mod_base = OTHER; note = 2'-O-methylcytidine-3'-phosphate
  modified_base 4: mod_base = OTHER; note = 2'-O-methyladenosine-3'-phosphate
  modified_base 5: mod_base = OTHER; note = 2'-O-methyluridine-3'-phosphate
  modified_base 6: mod_base = OTHER; note = 2'-O-methyladenosine-3'-phosphate
  modified_base 7: mod_base = OTHER; note = 2'-deoxy-2'-fluoroguanosine-3'-phosphate
  modified_base 8: mod_base = OTHER; note = 2'-O-methyluridine-3'-phosphate
  modified_base 9: mod_base = OTHER; note = 2'-deoxy-2'-fluorouridine-3'-phosphate
  modified_base 10: mod_base = OTHER; note = 2'-deoxy-2'-fluorocytidine-3'-phosphate
  modified_base 11: mod_base = OTHER; note = 2'-deoxy-2'-fluorocytidine-3'-phosphate
  modified_base 12: mod_base = OTHER; note = 2'-O-methyladenosine-3'-phosphate
  modified_base 13: mod_base = OTHER; note = 2'-O-methyladenosine-3'-phosphate
  modified_base 14: mod_base = OTHER; note = 2'-O-methylcytidine-3'-phosphate
  modified_base 15: mod_base = OTHER; note = 2'-O-methyladenosine-3'-phosphate
  modified_base 16: mod_base = OTHER; note = 2'-O-methyladenosine-3'-phosphate
  modified_base 17: mod_base = OTHER; note = 2'-O-methyluridine-3'-phosphate
  modified_base 18: mod_base = OTHER; note = 2'-O-methylguanosine-3'-phosphate
  modified_base 19: mod_base = OTHER; note = 2'-O-methyluridine-3'-phosphate
  modified_base 20: mod_base = OTHER; note = 2'-O-methyluridine-3'-phosphate
  modified_base 21: mod_base = OTHER; note = 2'-O-methyladenosine
gtcatagttccaacaatgtta

SEQ ID NO: 3074 - RNA, 21 nt, synthetic construct
  source 1..21: mol_type = other RNA
  modified_base 1: mod_base = OTHER; note = 2'-O-methyluridine-3'-phosphate
  modified_base 2: mod_base = OTHER; note = 2'-O-methylcytidine-3'-phosphate
  modified_base 3: mod_base = OTHER; note = 2'-O-methyladenosine-3'-phosphate
  modified_base 4: mod_base = OTHER; note = 2'-O-methyluridine-3'-phosphate
  modified_base 5: mod_base = OTHER; note = 2'-O-methyladenosine-3'-phosphate
  modified_base 6: mod_base = OTHER; note = 2'-O-methylguanosine-3'-phosphate
  modified_base 7: mod_base = OTHER; note = 2'-deoxy-2'-fluorouridine-3'-phosphate
  modified_base 8: mod_base = OTHER; note = 2'-O-methyluridine-3'-phosphate
  modified_base 9: mod_base = OTHER; note = 2'-deoxy-2'-fluorocytidine-3'-phosphate
  modified_base 10: mod_base = OTHER; note = 2'-deoxy-2'-fluorocytidine-3'-phosphate
  modified_base 11: mod_base = OTHER; note = 2'-deoxy-2'-fluoroadenosine-3'-phosphate
  modified_base 12: mod_base = OTHER; note = 2'-O-methyladenosine-3'-phosphate
  modified_base 13: mod_base = OTHER; note = 2'-O-methylcytidine-3'-phosphate
  modified_base 14: mod_base = OTHER; note = 2'-O-methyladenosine-3'-phosphate
  modified_base 15: mod_base = OTHER; note = 2'-O-methyladenosine-3'-phosphate
  modified_base 16: mod_base = OTHER; note = 2'-O-methyluridine-3'-phosphate
  modified_base 17: mod_base = OTHER; note = 2'-O-methylguanosine-3'-phosphate
  modified_base 18: mod_base = OTHER; note = 2'-O-methyluridine-3'-phosphate
  modified_base 19: mod_base = OTHER; note = 2'-O-methyluridine-3'-phosphate
  modified_base 20: mod_base = OTHER; note = 2'-O-methyladenosine-3'-phosphate
  modified_base 21: mod_base = OTHER; note = 2'-O-methyladenosine
tcatagttccaacaatgttaa

SEQ ID NO: 3075 - RNA, 21 nt, synthetic construct
  source 1..21: mol_type = other RNA
  modified_base 1: mod_base = OTHER; note = 2'-O-methylcytidine-3'-phosphate
  modified_base 2: mod_base = OTHER; note = 2'-O-methyladenosine-3'-phosphate
  modified_base 3: mod_base = OTHER; note = 2'-O-methyluridine-3'-phosphate
  modified_base 4: mod_base = OTHER; note = 2'-O-methyladenosine-3'-phosphate
  modified_base 5: mod_base = OTHER; note = 2'-O-methylguanosine-3'-phosphate
  modified_base 6: mod_base = OTHER; note = 2'-O-methyluridine-3'-phosphate
  modified_base 7: mod_base = OTHER; note = 2'-deoxy-2'-fluorouridine-3'-phosphate
  modified_base 8: mod_base = OTHER; note = 2'-O-methylcytidine-3'-phosphate
  modified_base 9: mod_base = OTHER; note = 2'-deoxy-2'-fluorocytidine-3'-phosphate
  modified_base 10: mod_base = OTHER; note = 2'-deoxy-2'-fluoroadenosine-3'-phosphate
  modified_base 11: mod_base = OTHER; note = 2'-deoxy-2'-fluoroadenosine-3'-phosphate
  modified_base 12: mod_base = OTHER; note = 2'-O-methylcytidine-3'-phosphate
  modified_base 13: mod_base = OTHER; note = 2'-O-methyladenosine-3'-phosphate
  modified_base 14: mod_base = OTHER; note = 2'-O-methyladenosine-3'-phosphate
  modified_base 15: mod_base = OTHER; note = 2'-O-methyluridine-3'-phosphate
  modified_base 16: mod_base = OTHER; note = 2'-O-methylguanosine-3'-phosphate
  modified_base 17: mod_base = OTHER; note = 2'-O-methyluridine-3'-phosphate
  modified_base 18: mod_base = OTHER; note = 2'-O-methyluridine-3'-phosphate
  modified_base 19: mod_base = OTHER; note = 2'-O-methyladenosine-3'-phosphate
  modified_base 20: mod_base = OTHER; note = 2'-O-methylcytidine-3'-phosphate
  modified_base 21: mod_base = OTHER; note = 2'-O-methyladenosine
catagttccaacaatgttaca

SEQ ID NO: 3076 - RNA, 21 nt, synthetic construct
  source 1..21: mol_type = other RNA
  modified_base 1: mod_base = OTHER; note = 2'-O-methyladenosine-3'-phosphate
  modified_base 2: mod_base = OTHER; note = 2'-O-methyluridine-3'-phosphate
  modified_base 3: mod_base = OTHER; note = 2'-O-methyladenosine-3'-phosphate
  modified_base 4: mod_base = OTHER; note = 2'-O-methylguanosine-3'-phosphate
  modified_base 5: mod_base = OTHER; note = 2'-O-methyluridine-3'-phosphate
  modified_base 6: mod_base = OTHER; note = 2'-O-methyluridine-3'-phosphate
  modified_base 7: mod_base = OTHER; note = 2'-deoxy-2'-fluorocytidine-3'-phosphate
  modified_base 8: mod_base = OTHER; note = 2'-O-methylcytidine-3'-phosphate
  modified_base 9: mod_base = OTHER; note = 2'-deoxy-2'-fluoroadenosine-3'-phosphate
  modified_base 10: mod_base = OTHER; note = 2'-deoxy-2'-fluoroadenosine-3'-phosphate
  modified_base 11: mod_base = OTHER; note = 2'-deoxy-2'-fluorocytidine-3'-phosphate
  modified_base 12: mod_base = OTHER; note = 2'-O-methyladenosine-3'-phosphate
  modified_base 13: mod_base = OTHER; note = 2'-O-methyladenosine-3'-phosphate
  modified_base 14: mod_base = OTHER; note = 2'-O-methyluridine-3'-phosphate
  modified_base 15: mod_base = OTHER; note = 2'-O-methylguanosine-3'-phosphate
  modified_base 16: mod_base = OTHER; note = 2'-O-methyluridine-3'-phosphate
  modified_base 17: mod_base = OTHER; note = 2'-O-methyluridine-3'-phosphate
  modified_base 18: mod_base = OTHER; note = 2'-O-methyladenosine-3'-phosphate
  modified_base 19: mod_base = OTHER; note = 2'-O-methylcytidine-3'-phosphate
  modified_base 20: mod_base = OTHER; note = 2'-O-methylcytidine-3'-phosphate
  modified_base 21: mod_base = OTHER; note = 2'-O-methyladenosine
atagttccaacaatgttacca

SEQ ID NO: 3077 - RNA, 21 nt, synthetic construct
  source 1..21: mol_type = other RNA
  modified_base 1: mod_base = OTHER; note = 2'-O-methyluridine-3'-phosphate
  modified_base 2: mod_base = OTHER; note = 2'-O-methyladenosine-3'-phosphate
  modified_base 3: mod_base = OTHER; note = 2'-O-methylguanosine-3'-phosphate
  modified_base 4: mod_base = OTHER; note = 2'-O-methyluridine-3'-phosphate
  modified_base 5: mod_base = OTHER; note = 2'-O-methyluridine-3'-phosphate
  modified_base 6: mod_base = OTHER; note = 2'-O-methylcytidine-3'-phosphate
  modified_base 7: mod_base = OTHER; note = 2'-deoxy-2'-fluorocytidine-3'-phosphate
  modified_base 8: mod_base = OTHER; note = 2'-O-methyladenosine-3'-phosphate
  modified_base 9: mod_base = OTHER; note = 2'-deoxy-2'-fluoroadenosine-3'-phosphate
  modified_base 10: mod_base = OTHER; note = 2'-deoxy-2'-fluorocytidine-3'-phosphate
  modified_base 11: mod_base = OTHER; note = 2'-deoxy-2'-fluoroadenosine-3'-phosphate
  modified_base 12: mod_base = OTHER; note = 2'-O-methyladenosine-3'-phosphate
  modified_base 13: mod_base = OTHER; note = 2'-O-methyluridine-3'-phosphate
  modified_base 14: mod_base = OTHER; note = 2'-O-methylguanosine-3'-phosphate
  modified_base 15: mod_base = OTHER; note = 2'-O-methyluridine-3'-phosphate
  modified_base 16: mod_base = OTHER; note = 2'-O-methyluridine-3'-phosphate
  modified_base 17: mod_base = OTHER; note = 2'-O-methyladenosine-3'-phosphate
  modified_base 18: mod_base = OTHER; note = 2'-O-methylcytidine-3'-phosphate
  modified_base 19: mod_base = OTHER; note = 2'-O-methylcytidine-3'-phosphate
  modified_base 20: mod_base = OTHER; note = 2'-O-methyladenosine-3'-phosphate
  modified_base 21: mod_base = OTHER; note = 2'-O-methyladenosine
tagttccaacaatgttaccaa

SEQ ID NO: 3078 - RNA, 21 nt, synthetic construct
  source 1..21: mol_type = other RNA
  modified_base 1: mod_base = OTHER; note = 2'-O-methyladenosine-3'-phosphate
  modified_base 2: mod_base = OTHER; note = 2'-O-methylguanosine-3'-phosphate
  modified_base 3: mod_base = OTHER; note = 2'-O-methyluridine-3'-phosphate
  modified_base 4: mod_base = OTHER; note = 2'-O-methyluridine-3'-phosphate
  modified_base 5: mod_base = OTHER; note = 2'-O-methylcytidine-3'-phosphate
  modified_base 6: mod_base = OTHER; note = 2'-O-methylcytidine-3'-phosphate
  modified_base 7: mod_base = OTHER; note = 2'-deoxy-2'-fluoroadenosine-3'-phosphate
  modified_base 8: mod_base = OTHER; note = 2'-O-methyladenosine-3'-phosphate
  modified_base 9: mod_base = OTHER; note = 2'-deoxy-2'-fluorocytidine-3'-phosphate
  modified_base 10: mod_base = OTHER; note = 2'-deoxy-2'-fluoroadenosine-3'-phosphate
  modified_base 11: mod_base = OTHER; note = 2'-deoxy-2'-fluoroadenosine-3'-phosphate
  modified_base 12: mod_base = OTHER; note = 2'-O-methyluridine-3'-phosphate
  modified_base 13: mod_base = OTHER; note = 2'-O-methylguanosine-3'-phosphate
  modified_base 14: mod_base = OTHER; note = 2'-O-methyluridine-3'-phosphate
  modified_base 15: mod_base = OTHER; note = 2'-O-methyluridine-3'-phosphate
  modified_base 16: mod_base = OTHER; note = 2'-O-methyladenosine-3'-phosphate
  modified_base 17: mod_base = OTHER; note = 2'-O-methylcytidine-3'-phosphate
  modified_base 18: mod_base = OTHER; note = 2'-O-methylcytidine-3'-phosphate
  modified_base 19: mod_base = OTHER; note = 2'-O-methyladenosine-3'-phosphate
  modified_base 20: mod_base = OTHER; note = 2'-O-methyladenosine-3'-phosphate
  modified_base 21: mod_base = OTHER; note = 2'-O-methyladenosine
agttccaacaatgttaccaaa

SEQ ID NO: 3079 - RNA, 21 nt, synthetic construct
  source 1..21: mol_type = other RNA
  modified_base 1: mod_base = OTHER; note = 2'-O-methylguanosine-3'-phosphate
  modified_base 2: mod_base = OTHER; note = 2'-O-methyluridine-3'-phosphate
  modified_base 3: mod_base = OTHER; note = 2'-O-methyluridine-3'-phosphate
  modified_base 4: mod_base = OTHER; note = 2'-O-methylcytidine-3'-phosphate
  modified_base 5: mod_base = OTHER; note = 2'-O-methylcytidine-3'-phosphate
  modified_base 6: mod_base = OTHER; note = 2'-O-methyladenosine-3'-phosphate
  modified_base 7: mod_base = OTHER; note = 2'-deoxy-2'-fluoroadenosine-3'-phosphate
  modified_base 8: mod_base = OTHER; note = 2'-O-methylcytidine-3'-phosphate
  modified_base 9: mod_base = OTHER; note = 2'-deoxy-2'-fluoroadenosine-3'-phosphate
  modified_base 10: mod_base = OTHER; note = 2'-deoxy-2'-fluoroadenosine-3'-phosphate
  modified_base 11: mod_base = OTHER; note = 2'-deoxy-2'-fluorouridine-3'-phosphate
  modified_base 12: mod_base = OTHER; note = 2'-O-methylguanosine-3'-phosphate
  modified_base 13: mod_base = OTHER; note = 2'-O-methyluridine-3'-phosphate
  modified_base 14: mod_base = OTHER; note = 2'-O-methyluridine-3'-phosphate
  modified_base 15: mod_base = OTHER; note = 2'-O-methyladenosine-3'-phosphate
  modified_base 16: mod_base = OTHER; note = 2'-O-methylcytidine-3'-phosphate
  modified_base 17: mod_base = OTHER; note = 2'-O-methylcytidine-3'-phosphate
  modified_base 18: mod_base = OTHER; note = 2'-O-methyladenosine-3'-phosphate
  modified_base 19: mod_base = OTHER; note = 2'-O-methyladenosine-3'-phosphate
  modified_base 20: mod_base = OTHER; note = 2'-O-methyladenosine-3'-phosphate
  modified_base 21: mod_base = OTHER; note = 2'-O-methyladenosine
gttccaacaatgttaccaaaa

SEQ ID NO: 3080 - RNA, 21 nt, synthetic construct
  source 1..21: mol_type = other RNA
  modified_base 1: mod_base = OTHER; note = 2'-O-methyluridine-3'-phosphate
  modified_base 2: mod_base = OTHER; note = 2'-O-methyluridine-3'-phosphate
  modified_base 3: mod_base = OTHER; note = 2'-O-methylcytidine-3'-phosphate
  modified_base 4: mod_base = OTHER; note = 2'-O-methylcytidine-3'-phosphate
  modified_base 5: mod_base = OTHER; note = 2'-O-methyladenosine-3'-phosphate
  modified_base 6: mod_base = OTHER; note = 2'-O-methyladenosine-3'-phosphate
  modified_base 7: mod_base = OTHER; note = 2'-deoxy-2'-fluorocytidine-3'-phosphate
  modified_base 8: mod_base = OTHER; note = 2'-O-methyladenosine-3'-phosphate
  modified_base 9: mod_base = OTHER; note = 2'-deoxy-2'-fluoroadenosine-3'-phosphate
  modified_base 10: mod_base = OTHER; note = 2'-deoxy-2'-fluorouridine-3'-phosphate
  modified_base 11: mod_base = OTHER; note = 2'-deoxy-2'-fluoroguanosine-3'-phosphate
  modified_base 12: mod_base = OTHER; note = 2'-O-methyluridine-3'-phosphate
  modified_base 13: mod_base = OTHER; note = 2'-O-methyluridine-3'-phosphate
  modified_base 14: mod_base = OTHER; note = 2'-O-methyladenosine-3'-phosphate
  modified_base 15: mod_base = OTHER; note = 2'-O-methylcytidine-3'-phosphate
  modified_base 16: mod_base = OTHER; note = 2'-O-methylcytidine-3'-phosphate
  modified_base 17: mod_base = OTHER; note = 2'-O-methyladenosine-3'-phosphate
  modified_base 18: mod_base = OTHER; note = 2'-O-methyladenosine-3'-phosphate
  modified_base 19: mod_base = OTHER; note = 2'-O-methyladenosine-3'-phosphate
  modified_base 20: mod_base = OTHER; note = 2'-O-methyladenosine-3'-phosphate
  modified_base 21: mod_base = OTHER; note = 2'-O-methyladenosine
ttccaacaatgttaccaaaaa

SEQ ID NO: 3081 - RNA, 21 nt, synthetic construct
  source 1..21: mol_type = other RNA
  modified_base 1: mod_base = OTHER; note = 2'-O-methyluridine-3'-phosphate
  modified_base 2: mod_base = OTHER; note = 2'-O-methylcytidine-3'-phosphate
  modified_base 3: mod_base = OTHER; note = 2'-O-methylcytidine-3'-phosphate
  modified_base 4: mod_base = OTHER; note = 2'-O-methyladenosine-3'-phosphate
  modified_base 5: mod_base = OTHER; note = 2'-O-methyladenosine-3'-phosphate
  modified_base 6: mod_base = OTHER; note = 2'-O-methylcytidine-3'-phosphate
  modified_base 7: mod_base = OTHER; note = 2'-deoxy-2'-fluoroadenosine-3'-phosphate
  modified_base 8: mod_base = OTHER; note = 2'-O-methyladenosine-3'-phosphate
  modified_base 9: mod_base = OTHER; note = 2'-deoxy-2'-fluorouridine-3'-phosphate
  modified_base 10: mod_base = OTHER; note = 2'-deoxy-2'-fluoroguanosine-3'-phosphate
  modified_base 11: mod_base = OTHER; note = 2'-deoxy-2'-fluorouridine-3'-phosphate
  modified_base 12: mod_base = OTHER; note = 2'-O-methyluridine-3'-phosphate
  modified_base 13: mod_base = OTHER; note = 2'-O-methyladenosine-3'-phosphate
  modified_base 14: mod_base = OTHER; note = 2'-O-methylcytidine-3'-phosphate
  modified_base 15: mod_base = OTHER; note = 2'-O-methylcytidine-3'-phosphate
  modified_base 16: mod_base = OTHER; note = 2'-O-methyladenosine-3'-phosphate
  modified_base 17: mod_base = OTHER; note = 2'-O-methyladenosine-3'-phosphate
  modified_base 18: mod_base = OTHER; note = 2'-O-methyladenosine-3'-phosphate
  modified_base 19: mod_base = OTHER; note = 2'-O-methyladenosine-3'-phosphate
  modified_base 20: mod_base = OTHER; note = 2'-O-methylcytidine-3'-phosphate
  modified_base 21: mod_base = OTHER; note = 2'-O-methyladenosine
tccaacaatgttaccaaaaca

SEQ ID NO: 3082 - RNA, 21 nt, synthetic construct
  source 1..21: mol_type = other RNA
  modified_base 1: mod_base = OTHER; note = 2'-O-methylcytidine-3'-phosphate
  modified_base 2: mod_base = OTHER; note = 2'-O-methylcytidine-3'-phosphate
  modified_base 3: mod_base = OTHER; note = 2'-O-methyladenosine-3'-phosphate
  modified_base 4: mod_base = OTHER; note = 2'-O-methyladenosine-3'-phosphate
  modified_base 5: mod_base = OTHER; note = 2'-O-methylcytidine-3'-phosphate
  modified_base 6: mod_base = OTHER; note = 2'-O-methyladenosine-3'-phosphate
  modified_base 7: mod_base = OTHER; note = 2'-deoxy-2'-fluoroadenosine-3'-phosphate
  modified_base 8: mod_base = OTHER; note = 2'-O-methyluridine-3'-phosphate
  modified_base 9: mod_base = OTHER; note = 2'-deoxy-2'-fluoroguanosine-3'-phosphate
  modified_base 10: mod_base = OTHER; note = 2'-deoxy-2'-fluorouridine-3'-phosphate
  modified_base 11: mod_base = OTHER; note = 2'-deoxy-2'-fluorouridine-3'-phosphate
  modified_base 12: mod_base = OTHER; note = 2'-O-methyladenosine-3'-phosphate
  modified_base 13: mod_base = OTHER; note = 2'-O-methylcytidine-3'-phosphate
  modified_base 14: mod_base = OTHER; note = 2'-O-methylcytidine-3'-phosphate
  modified_base 15: mod_base = OTHER; note = 2'-O-methyladenosine-3'-phosphate
  modified_base 16: mod_base = OTHER; note = 2'-O-methyladenosine-3'-phosphate
  modified_base 17: mod_base = OTHER; note = 2'-O-methyladenosine-3'-phosphate
  modified_base 18: mod_base = OTHER; note = 2'-O-methyladenosine-3'-phosphate
  modified_base 19: mod_base = OTHER; note = 2'-O-methylcytidine-3'-phosphate
  modified_base 20: mod_base = OTHER; note = 2'-O-methylcytidine-3'-phosphate
  modified_base 21: mod_base = OTHER; note = 2'-O-methyladenosine
ccaacaatgttaccaaaacca

SEQ ID NO: 3083 - RNA, 21 nt, synthetic construct
  source 1..21: mol_type = other RNA
  modified_base 1: mod_base = OTHER; note = 2'-O-methylcytidine-3'-phosphate
  modified_base 2: mod_base = OTHER; note = 2'-O-methyladenosine-3'-phosphate
  modified_base 3: mod_base = OTHER; note = 2'-O-methyladenosine-3'-phosphate
  modified_base 4: mod_base = OTHER; note = 2'-O-methylcytidine-3'-phosphate
  modified_base 5: mod_base = OTHER; note = 2'-O-methyladenosine-3'-phosphate
  modified_base 6: mod_base = OTHER; note = 2'-O-methyladenosine-3'-phosphate
  modified_base 7: mod_base = OTHER; note = 2'-deoxy-2'-fluorouridine-3'-phosphate
  modified_base 8: mod_base = OTHER; note = 2'-O-methylguanosine-3'-phosphate
  modified_base 9: mod_base = OTHER; note = 2'-deoxy-2'-fluorouridine-3'-phosphate
  modified_base 10: mod_base = OTHER; note = 2'-deoxy-2'-fluorouridine-3'-phosphate
  modified_base 11: mod_base = OTHER; note = 2'-deoxy-2'-fluoroadenosine-3'-phosphate
  modified_base 12: mod_base = OTHER; note = 2'-O-methylcytidine-3'-phosphate
  modified_base 13: mod_base = OTHER; note = 2'-O-methylcytidine-3'-phosphate
  modified_base 14: mod_base = OTHER; note = 2'-O-methyladenosine-3'-phosphate
  modified_base 15: mod_base = OTHER; note = 2'-O-methyladenosine-3'-phosphate
  modified_base 16: mod_base = OTHER; note = 2'-O-methyladenosine-3'-phosphate
  modified_base 17: mod_base = OTHER; note = 2'-O-methyladenosine-3'-phosphate
  modified_base 18: mod_base = OTHER; note = 2'-O-methylcytidine-3'-phosphate
  modified_base 19: mod_base = OTHER; note = 2'-O-methylcytidine-3'-phosphate
  modified_base 20: mod_base = OTHER; note = 2'-O-methylguanosine-3'-phosphate
  modified_base 21: mod_base = OTHER; note = 2'-O-methyladenosine
caacaatgttaccaaaaccga

SEQ ID NO: 3084 - RNA, 21 nt, synthetic construct
  source 1..21: mol_type = other RNA
  modified_base 1: mod_base = OTHER; note = 2'-O-methyladenosine-3'-phosphate
  modified_base 2: mod_base = OTHER; note = 2'-O-methyladenosine-3'-phosphate
  modified_base 3: mod_base = OTHER; note = 2'-O-methylcytidine-3'-phosphate
  modified_base 4: mod_base = OTHER; note = 2'-O-methyladenosine-3'-phosphate
  modified_base 5: mod_base = OTHER; note = 2'-O-methyladenosine-3'-phosphate
  modified_base 6: mod_base = OTHER; note = 2'-O-methyluridine-3'-phosphate
  modified_base 7: mod_base = OTHER; note = 2'-deoxy-2'-fluoroguanosine-3'-phosphate
  modified_base 8: mod_base = OTHER; note = 2'-O-methyluridine-3'-phosphate
  modified_base 9: mod_base = OTHER; note = 2'-deoxy-2'-fluorouridine-3'-phosphate
  modified_base 10: mod_base = OTHER; note = 2'-deoxy-2'-fluoroadenosine-3'-phosphate
  modified_base 11: mod_base = OTHER; note = 2'-deoxy-2'-fluorocytidine-3'-phosphate
  modified_base 12: mod_base = OTHER; note = 2'-O-methylcytidine-3'-phosphate
  modified_base 13: mod_base = OTHER; note = 2'-O-methyladenosine-3'-phosphate
  modified_base 14: mod_base = OTHER; note = 2'-O-methyladenosine-3'-phosphate
  modified_base 15: mod_base = OTHER; note = 2'-O-methyladenosine-3'-phosphate
  modified_base 16: mod_base = OTHER; note = 2'-O-methyladenosine-3'-phosphate
  modified_base 17: mod_base = OTHER; note = 2'-O-methylcytidine-3'-phosphate
  modified_base 18: mod_base = OTHER; note = 2'-O-methylcytidine-3'-phosphate
  modified_base 19: mod_base = OTHER; note = 2'-O-methylguanosine-3'-phosphate
  modified_base 20: mod_base = OTHER; note = 2'-O-methyladenosine-3'-phosphate
  modified_base 21: mod_base = OTHER; note = 2'-O-methyladenosine
aacaatgttaccaaaaccgaa

SEQ ID NO: 3085 - RNA, 21 nt, synthetic construct
  source 1..21: mol_type = other RNA
  modified_base 1: mod_base = OTHER; note = 2'-O-methyladenosine-3'-phosphate
  modified_base 2: mod_base = OTHER; note = 2'-O-methylcytidine-3'-phosphate
  modified_base 3: mod_base = OTHER; note = 2'-O-methyladenosine-3'-phosphate
  modified_base 4: mod_base = OTHER; note = 2'-O-methyladenosine-3'-phosphate
  modified_base 5: mod_base = OTHER; note = 2'-O-methyluridine-3'-phosphate
  modified_base 6: mod_base = OTHER; note = 2'-O-methylguanosine-3'-phosphate
  modified_base 7: mod_base = OTHER; note = 2'-deoxy-2'-fluorouridine-3'-phosphate
  modified_base 8: mod_base = OTHER; note = 2'-O-methyluridine-3'-phosphate
  modified_base 9: mod_base = OTHER; note = 2'-deoxy-2'-fluoroadenosine-3'-phosphate
  modified_base 10: mod_base = OTHER; note = 2'-deoxy-2'-fluorocytidine-3'-phosphate
  modified_base 11: mod_base = OTHER; note = 2'-deoxy-2'-fluorocytidine-3'-phosphate
  modified_base 12: mod_base = OTHER; note = 2'-O-methyladenosine-3'-phosphate
  modified_base 13: mod_base = OTHER; note = 2'-O-methyladenosine-3'-phosphate
  modified_base 14: mod_base = OTHER; note = 2'-O-methyladenosine-3'-phosphate
  modified_base 15: mod_base = OTHER; note = 2'-O-methyladenosine-3'-phosphate
  modified_base 16: mod_base = OTHER; note = 2'-O-methylcytidine-3'-phosphate
  modified_base 17: mod_base = OTHER; note = 2'-O-methylcytidine-3'-phosphate
  modified_base 18: mod_base = OTHER; note = 2'-O-methylguanosine-3'-phosphate
  modified_base 19: mod_base = OTHER; note = 2'-O-methyladenosine-3'-phosphate
  modified_base 20: mod_base = OTHER; note = 2'-O-methyladenosine-3'-phosphate
  modified_base 21: mod_base = OTHER; note = 2'-O-methyladenosine
acaatgttaccaaaaccgaaa

SEQ ID NO: 3086 - RNA, 21 nt, synthetic construct
  source 1..21: mol_type = other RNA
  modified_base 1: mod_base = OTHER; note = 2'-O-methylcytidine-3'-phosphate
  modified_base 2: mod_base = OTHER; note = 2'-O-methyladenosine-3'-phosphate
  modified_base 3: mod_base = OTHER; note = 2'-O-methyladenosine-3'-phosphate
  modified_base 4: mod_base = OTHER; note = 2'-O-methyluridine-3'-phosphate
  modified_base 5: mod_base = OTHER; note = 2'-O-methylguanosine-3'-phosphate
  modified_base 6: mod_base = OTHER; note = 2'-O-methyluridine-3'-phosphate
  modified_base 7: mod_base = OTHER; note = 2'-deoxy-2'-fluorouridine-3'-phosphate
  modified_base 8: mod_base = OTHER; note = 2'-O-methyladenosine-3'-phosphate
  modified_base 9: mod_base = OTHER; note = 2'-deoxy-2'-fluorocytidine-3'-phosphate
  modified_base 10: mod_base = OTHER; note = 2'-deoxy-2'-fluorocytidine-3'-phosphate
  modified_base 11: mod_base = OTHER; note = 2'-deoxy-2'-fluoroadenosine-3'-phosphate
  modified_base 12: mod_base = OTHER; note = 2'-O-methyladenosine-3'-phosphate
  modified_base 13: mod_base = OTHER; note = 2'-O-methyladenosine-3'-phosphate
  modified_base 14: mod_base = OTHER; note = 2'-O-methyladenosine-3'-phosphate
  modified_base 15: mod_base = OTHER; note = 2'-O-methylcytidine-3'-phosphate
  modified_base 16: mod_base = OTHER; note = 2'-O-methylcytidine-3'-phosphate
  modified_base 17: mod_base = OTHER; note = 2'-O-methylguanosine-3'-phosphate
  modified_base 18: mod_base = OTHER; note = 2'-O-methyladenosine-3'-phosphate
  modified_base 19: mod_base = OTHER; note = 2'-O-methyladenosine-3'-phosphate
  modified_base 20: mod_base = OTHER; note = 2'-O-methyluridine-3'-phosphate
  modified_base 21: mod_base = OTHER; note = 2'-O-methyladenosine
caatgttaccaaaaccgaata

SEQ ID NO: 3087 - RNA, 21 nt, synthetic construct
  source 1..21: mol_type = other RNA
  modified_base 1: mod_base = OTHER; note = 2'-O-methyladenosine-3'-phosphate
  modified_base 2: mod_base = OTHER; note = 2'-O-methyladenosine-3'-phosphate
  modified_base 3: mod_base = OTHER; note = 2'-O-methyluridine-3'-phosphate
  modified_base 4: mod_base = OTHER; note = 2'-O-methylguanosine-3'-phosphate
  modified_base 5: mod_base = OTHER; note = 2'-O-methyluridine-3'-phosphate
  modified_base 6: mod_base = OTHER; note = 2'-O-methyluridine-3'-phosphate
  modified_base 7: mod_base = OTHER; note = 2'-deoxy-2'-fluoroadenosine-3'-phosphate
  modified_base 8: mod_base = OTHER; note = 2'-O-methylcytidine-3'-phosphate
  modified_base 9: mod_base = OTHER; note = 2'-deoxy-2'-fluorocytidine-3'-phosphate
  modified_base 10: mod_base = OTHER; note = 2'-deoxy-2'-fluoroadenosine-3'-phosphate
  modified_base 11: mod_base = OTHER; note = 2'-deoxy-2'-fluoroadenosine-3'-phosphate
  modified_base 12: mod_base = OTHER; note = 2'-O-methyladenosine-3'-phosphate
  modified_base 13: mod_base = OTHER; note = 2'-O-methyladenosine-3'-phosphate
  modified_base 14: mod_base = OTHER; note = 2'-O-methylcytidine-3'-phosphate
  modified_base 15: mod_base = OTHER; note = 2'-O-methylcytidine-3'-phosphate
  modified_base 16: mod_base = OTHER; note = 2'-O-methylguanosine-3'-phosphate
  modified_base 17: mod_base = OTHER; note = 2'-O-methyladenosine-3'-phosphate
  modified_base 18: mod_base = OTHER; note = 2'-O-methyladenosine-3'-phosphate
  modified_base 19: mod_base = OTHER; note = 2'-O-methyluridine-3'-phosphate
  modified_base 20: mod_base = OTHER; note = 2'-O-methylguanosine-3'-phosphate
  modified_base 21: mod_base = OTHER; note = 2'-O-methyladenosine
aatgttaccaaaaccgaatga

SEQ ID NO: 3088 - RNA, 21 nt, synthetic construct
  source 1..21: mol_type = other RNA
  modified_base 1: mod_base = OTHER; note = 2'-O-methyladenosine-3'-phosphate
  modified_base 2: mod_base = OTHER; note = 2'-O-methyluridine-3'-phosphate
  modified_base 3: mod_base = OTHER; note = 2'-O-methylguanosine-3'-phosphate
  modified_base 4: mod_base = OTHER; note = 2'-O-methyluridine-3'-phosphate
  modified_base 5: mod_base = OTHER; note = 2'-O-methyluridine-3'-phosphate
  modified_base 6: mod_base = OTHER; note = 2'-O-methyladenosine-3'-phosphate
  modified_base 7: mod_base = OTHER; note = 2'-deoxy-2'-fluorocytidine-3'-phosphate
  modified_base 8: mod_base = OTHER; note = 2'-O-methylcytidine-3'-phosphate
  modified_base 9: mod_base = OTHER; note = 2'-deoxy-2'-fluoroadenosine-3'-phosphate
  modified_base 10: mod_base = OTHER; note = 2'-deoxy-2'-fluoroadenosine-3'-phosphate
  modified_base 11: mod_base = OTHER; note = 2'-deoxy-2'-fluoroadenosine-3'-phosphate
  modified_base 12: mod_base = OTHER; note = 2'-O-methyladenosine-3'-phosphate
  modified_base 13: mod_base = OTHER; note = 2'-O-methylcytidine-3'-phosphate
  modified_base 14: mod_base = OTHER; note = 2'-O-methylcytidine-3'-phosphate
  modified_base 15: mod_base = OTHER; note = 2'-O-methylguanosine-3'-phosphate
  modified_base 16: mod_base = OTHER; note = 2'-O-methyladenosine-3'-phosphate
  modified_base 17: mod_base = OTHER; note = 2'-O-methyladenosine-3'-phosphate
  modified_base 18: mod_base = OTHER; note = 2'-O-methyluridine-3'-phosphate
  modified_base 19: mod_base = OTHER; note = 2'-O-methylguanosine-3'-phosphate
  modified_base 20: mod_base = OTHER; note = 2'-O-methylcytidine-3'-phosphate
  modified_base 21: mod_base = OTHER; note = 2'-O-methyladenosine
atgttaccaaaaccgaatgca

SEQ ID NO: 3089 - RNA, 21 nt, synthetic construct
  source 1..21: mol_type = other RNA
  modified_base 1: mod_base = OTHER; note = 2'-O-methyluridine-3'-phosphate
  modified_base 2: mod_base = OTHER; note = 2'-O-methylguanosine-3'-phosphate
  modified_base 3: mod_base = OTHER; note = 2'-O-methyluridine-3'-phosphate
  modified_base 4: mod_base = OTHER; note = 2'-O-methyluridine-3'-phosphate
  modified_base 5: mod_base = OTHER; note = 2'-O-methyladenosine-3'-phosphate
  modified_base 6: mod_base = OTHER; note = 2'-O-methylcytidine-3'-phosphate
  modified_base 7: mod_base = OTHER; note = 2'-deoxy-2'-fluorocytidine-3'-phosphate
  modified_base 8: mod_base = OTHER; note = 2'-O-methyladenosine-3'-phosphate
  modified_base 9: mod_base = OTHER; note = 2'-deoxy-2'-fluoroadenosine-3'-phosphate
  modified_base 10: mod_base = OTHER; note = 2'-deoxy-2'-fluoroadenosine-3'-phosphate
  modified_base 11: mod_base = OTHER; note = 2'-deoxy-2'-fluoroadenosine-3'-phosphate
  modified_base 12: mod_base = OTHER; note = 2'-O-methylcytidine-3'-phosphate
  modified_base 13: mod_base = OTHER; note = 2'-O-methylcytidine-3'-phosphate
  modified_base 14: mod_base = OTHER; note = 2'-O-methylguanosine-3'-phosphate
  modified_base 15: mod_base = OTHER; note = 2'-O-methyladenosine-3'-phosphate
  modified_base 16: mod_base = OTHER; note = 2'-O-methyladenosine-3'-phosphate
  modified_base 17: mod_base = OTHER; note = 2'-O-methyluridine-3'-phosphate
  modified_base 18: mod_base = OTHER; note = 2'-O-methylguanosine-3'-phosphate
  modified_base 19: mod_base = OTHER; note = 2'-O-methylcytidine-3'-phosphate
  modified_base 20: mod_base = OTHER; note = 2'-O-methyluridine-3'-phosphate
  modified_base 21: mod_base = OTHER; note = 2'-O-methyladenosine
tgttaccaaaaccgaatgcta

SEQ ID NO: 3090 - RNA, 21 nt, synthetic construct
  source 1..21: mol_type = other RNA
  modified_base 1: mod_base = OTHER; note = 2'-O-methylguanosine-3'-phosphate
  modified_base 2: mod_base = OTHER; note = 2'-O-methyluridine-3'-phosphate
  modified_base 3: mod_base = OTHER; note = 2'-O-methyluridine-3'-phosphate
  modified_base 4: mod_base = OTHER; note = 2'-O-methyladenosine-3'-phosphate
  modified_base 5: mod_base = OTHER; note = 2'-O-methylcytidine-3'-phosphate
  modified_base 6: mod_base = OTHER; note = 2'-O-methylcytidine-3'-phosphate
  modified_base 7: mod_base = OTHER; note = 2'-deoxy-2'-fluoroadenosine-3'-phosphate
  modified_base 8: mod_base = OTHER; note = 2'-O-methyladenosine-3'-phosphate
  modified_base 9: mod_base = OTHER; note = 2'-deoxy-2'-fluoroadenosine-3'-phosphate
  modified_base 10: mod_base = OTHER; note = 2'-deoxy-2'-fluoroadenosine-3'-phosphate
  modified_base 11: mod_base = OTHER; note = 2'-deoxy-2'-fluorocytidine-3'-phosphate
  modified_base 12: mod_base = OTHER; note = 2'-O-methylcytidine-3'-phosphate
  modified_base 13: mod_base = OTHER; note = 2'-O-methylguanosine-3'-phosphate
  modified_base 14: mod_base = OTHER; note = 2'-O-methyladenosine-3'-phosphate
  modified_base 15: mod_base = OTHER; note = 2'-O-methyladenosine-3'-phosphate
  modified_base 16: mod_base = OTHER; note = 2'-O-methyluridine-3'-phosphate
  modified_base 17: mod_base = OTHER; note = 2'-O-methylguanosine-3'-phosphate
  modified_base 18: mod_base = OTHER; note = 2'-O-methylcytidine-3'-phosphate
  modified_base 19: mod_base = OTHER; note = 2'-O-methyluridine-3'-phosphate
  modified_base 20: mod_base = OTHER; note = 2'-O-methylguanosine-3'-phosphate
  modified_base 21: mod_base = OTHER; note = 2'-O-methyladenosine
gttaccaaaaccgaatgctga

SEQ ID NO: 3091 - RNA, 21 nt, synthetic construct
  source 1..21: mol_type = other RNA
  modified_base 1: mod_base = OTHER; note = 2'-O-methyluridine-3'-phosphate
  modified_base 2: mod_base = OTHER; note = 2'-O-methyluridine-3'-phosphate
  modified_base 3: mod_base = OTHER; note = 2'-O-methyladenosine-3'-phosphate
  modified_base 4: mod_base = OTHER; note = 2'-O-methylcytidine-3'-phosphate
  modified_base 5: mod_base = OTHER; note = 2'-O-methylcytidine-3'-phosphate
  modified_base 6: mod_base = OTHER; note = 2'-O-methyladenosine-3'-phosphate
  modified_base 7: mod_base = OTHER; note = 2'-deoxy-2'-fluoroadenosine-3'-phosphate
  modified_base 8: mod_base = OTHER; note = 2'-O-methyladenosine-3'-phosphate
  modified_base 9: mod_base = OTHER; note = 2'-deoxy-2'-fluoroadenosine-3'-phosphate
  modified_base 10: mod_base = OTHER; note = 2'-deoxy-2'-fluorocytidine-3'-phosphate
  modified_base 11: mod_base = OTHER; note = 2'-deoxy-2'-fluorocytidine-3'-phosphate
  modified_base 12: mod_base = OTHER; note = 2'-O-methylguanosine-3'-phosphate
  modified_base 13: mod_base = OTHER; note = 2'-O-methyladenosine-3'-phosphate
  modified_base 14: mod_base = OTHER; note = 2'-O-methyladenosine-3'-phosphate
  modified_base 15: mod_base = OTHER; note = 2'-O-methyluridine-3'-phosphate
  modified_base 16: mod_base = OTHER; note = 2'-O-methylguanosine-3'-phosphate
  modified_base 17: mod_base = OTHER; note = 2'-O-methylcytidine-3'-phosphate
  modified_base 18: mod_base = OTHER; note = 2'-O-methyluridine-3'-phosphate
  modified_base 19: mod_base = OTHER; note = 2'-O-methylguanosine-3'-phosphate
  modified_base 20: mod_base = OTHER; note = 2'-O-methylcytidine-3'-phosphate
  modified_base 21: mod_base = OTHER; note = 2'-O-methyladenosine
ttaccaaaaccgaatgctgca

SEQ ID NO: 3092 - RNA, 21 nt, synthetic construct
  source 1..21: mol_type = other RNA
  modified_base 1: mod_base = OTHER; note = 2'-O-methyluridine-3'-phosphate
  modified_base 2: mod_base = OTHER; note = 2'-O-methyladenosine-3'-phosphate
  modified_base 3: mod_base = OTHER; note = 2'-O-methylcytidine-3'-phosphate
  modified_base 4: mod_base = OTHER; note = 2'-O-methylcytidine-3'-phosphate
  modified_base 5: mod_base = OTHER; note = 2'-O-methyladenosine-3'-phosphate
  modified_base 6: mod_base = OTHER; note = 2'-O-methyladenosine-3'-phosphate
  modified_base 7: mod_base = OTHER; note = 2'-deoxy-2'-fluoroadenosine-3'-phosphate
  modified_base 8: mod_base = OTHER; note = 2'-O-methyladenosine-3'-phosphate
  modified_base 9: mod_base = OTHER; note = 2'-deoxy-2'-fluorocytidine-3'-phosphate
  modified_base 10: mod_base = OTHER; note = 2'-deoxy-2'-fluorocytidine-3'-phosphate
  modified_base 11: mod_base = OTHER; note = 2'-deoxy-2'-fluoroguanosine-3'-phosphate
  modified_base 12: mod_base = OTHER; note = 2'-O-methyladenosine-3'-phosphate
  modified_base 13: mod_base = OTHER; note = 2'-O-methyladenosine-3'-phosphate
  modified_base 14: mod_base = OTHER; note = 2'-O-methyluridine-3'-phosphate
  modified_base 15: mod_base = OTHER; note = 2'-O-methylguanosine-3'-phosphate
  modified_base 16: mod_base = OTHER; note = 2'-O-methylcytidine-3'-phosphate
  modified_base 17: mod_base = OTHER; note = 2'-O-methyluridine-3'-phosphate
  modified_base 18: mod_base = OTHER; note = 2'-O-methylguanosine-3'-phosphate
  modified_base 19: mod_base = OTHER; note = 2'-O-methylcytidine-3'-phosphate
  modified_base 20: mod_base = OTHER; note = 2'-O-methyluridine-3'-phosphate
  modified_base 21: mod_base = OTHER; note = 2'-O-methyladenosine
taccaaaaccgaatgctgcta

SEQ ID NO: 3093 - RNA, 21 nt, synthetic construct
  source 1..21: mol_type = other RNA
  modified_base 1: mod_base = OTHER; note = 2'-O-methyladenosine-3'-phosphate
  modified_base 2: mod_base = OTHER; note = 2'-O-methylcytidine-3'-phosphate
  modified_base 3: mod_base = OTHER; note = 2'-O-methylcytidine-3'-phosphate
  modified_base 4: mod_base = OTHER; note = 2'-O-methyladenosine-3'-phosphate
  modified_base 5: mod_base = OTHER; note = 2'-O-methyladenosine-3'-phosphate
  modified_base 6: mod_base = OTHER; note = 2'-O-methyladenosine-3'-phosphate
  modified_base 7: mod_base = OTHER; note = 2'-deoxy-2'-fluoroadenosine-3'-phosphate
  modified_base 8: mod_base = OTHER; note = 2'-O-methylcytidine-3'-phosphate
  modified_base 9: mod_base = OTHER; note = 2'-deoxy-2'-fluorocytidine-3'-phosphate
  modified_base 10: mod_base = OTHER; note = 2'-deoxy-2'-fluoroguanosine-3'-phosphate
  modified_base 11: mod_base = OTHER; note = 2'-deoxy-2'-fluoroadenosine-3'-phosphate
  modified_base 12: mod_base = OTHER; note = 2'-O-methyladenosine-3'-phosphate
  modified_base 13: mod_base = OTHER; note = 2'-O-methyluridine-3'-phosphate
  modified_base 14: mod_base = OTHER; note = 2'-O-methylguanosine-3'-phosphate
  modified_base 15: mod_base = OTHER; note = 2'-O-methylcytidine-3'-phosphate
  modified_base 16: mod_base = OTHER; note = 2'-O-methyluridine-3'-phosphate
  modified_base 17: mod_base = OTHER; note = 2'-O-methylguanosine-3'-phosphate
  modified_base 18: mod_base = OTHER; note = 2'-O-methylcytidine-3'-phosphate
  modified_base 19: mod_base = OTHER; note = 2'-O-methyluridine-3'-phosphate
  modified_base 20: mod_base = OTHER; note = 2'-O-methyluridine-3'-phosphate
  modified_base 21: mod_base = OTHER; note = 2'-O-methyladenosine
accaaaaccgaatgctgctta

SEQ ID NO: 3094 - RNA, 21 nt, synthetic construct
  source 1..21: mol_type = other RNA
  modified_base 1: mod_base = OTHER; note = 2'-O-methylcytidine-3'-phosphate
  modified_base 2: mod_base = OTHER; note = 2'-O-methylcytidine-3'-phosphate
  modified_base 3: mod_base = OTHER; note = 2'-O-methyladenosine-3'-phosphate
  modified_base 4: mod_base = OTHER; note = 2'-O-methyladenosine-3'-phosphate
  modified_base 5: mod_base = OTHER; note = 2'-O-methyladenosine-3'-phosphate
  modified_base 6: mod_base = OTHER; note = 2'-O-methyladenosine-3'-phosphate
  modified_base 7: mod_base = OTHER; note = 2'-deoxy-2'-fluorocytidine-3'-phosphate
  modified_base 8: mod_base = OTHER; note = 2'-O-methylcytidine-3'-phosphate
  modified_base 9: mod_base = OTHER; note = 2'-deoxy-2'-fluoroguanosine-3'-phosphate
  modified_base 10: mod_base = OTHER; note = 2'-deoxy-2'-fluoroadenosine-3'-phosphate
  modified_base 11: mod_base = OTHER; note = 2'-deoxy-2'-fluoroadenosine-3'-phosphate
  modified_base 12: mod_base = OTHER; note = 2'-O-methyluridine-3'-phosphate
  modified_base 13: mod_base = OTHER; note = 2'-O-methylguanosine-3'-phosphate
  modified_base 14: mod_base = OTHER; note = 2'-O-methylcytidine-3'-phosphate
  modified_base 15: mod_base = OTHER; note = 2'-O-methyluridine-3'-phosphate
  modified_base 16: mod_base = OTHER; note = 2'-O-methylguanosine-3'-phosphate
  modified_base 17: mod_base = OTHER; note = 2'-O-methylcytidine-3'-phosphate
  modified_base 18: mod_base = OTHER; note = 2'-O-methyluridine-3'-phosphate
  modified_base 19: mod_base = OTHER; note = 2'-O-methyluridine-3'-phosphate
  modified_base 20: mod_base = OTHER; note = 2'-O-methylcytidine-3'-phosphate
  modified_base 21: mod_base = OTHER; note = 2'-O-methyladenosine
ccaaaaccgaatgctgcttca

SEQ ID NO: 3095 - RNA, 21 nt, synthetic construct
  source 1..21: mol_type = other RNA
  modified_base 1: mod_base = OTHER; note = 2'-O-methylcytidine-3'-phosphate
  modified_base 2: mod_base = OTHER; note = 2'-O-methyladenosine-3'-phosphate
  modified_base 3: mod_base = OTHER; note = 2'-O-methyladenosine-3'-phosphate
  modified_base 4: mod_base = OTHER; note = 2'-O-methyladenosine-3'-phosphate
  modified_base 5: mod_base = OTHER; note = 2'-O-methyladenosine-3'-phosphate
  modified_base 6: mod_base = OTHER; note = 2'-O-methylcytidine-3'-phosphate
  modified_base 7: mod_base = OTHER; note = 2'-deoxy-2'-fluorocytidine-3'-phosphate
  modified_base 8: mod_base = OTHER; note = 2'-O-methylguanosine-3'-phosphate
  modified_base 9: mod_base = OTHER; note = 2'-deoxy-2'-fluoroadenosine-3'-phosphate
  modified_base 10: mod_base = OTHER; note = 2'-deoxy-2'-fluoroadenosine-3'-phosphate
  modified_base 11: mod_base = OTHER; note = 2'-deoxy-2'-fluorouridine-3'-phosphate
  modified_base 12: mod_base = OTHER; note = 2'-O-methylguanosine-3'-phosphate
  modified_base 13: mod_base = OTHER; note = 2'-O-methylcytidine-3'-phosphate
  modified_base 14: mod_base = OTHER; note = 2'-O-methyluridine-3'-phosphate
  modified_base 15: mod_base = OTHER; note = 2'-O-methylguanosine-3'-phosphate
  modified_base 16: mod_base = OTHER; note = 2'-O-methylcytidine-3'-phosphate
  modified_base 17: mod_base = OTHER; note = 2'-O-methyluridine-3'-phosphate
  modified_base 18: mod_base = OTHER; note = 2'-O-methyluridine-3'-phosphate
  modified_base 19: mod_base = OTHER; note = 2'-O-methylcytidine-3'-phosphate
  modified_base 20: mod_base = OTHER; note = 2'-O-methyladenosine-3'-phosphate
  modified_base 21: mod_base = OTHER; note = 2'-O-methyladenosine
caaaaccgaatgctgcttcaa

SEQ ID NO: 3096 - RNA, 21 nt, synthetic construct
  source 1..21: mol_type = other RNA
  modified_base 1: mod_base = OTHER; note = 2'-O-methyladenosine-3'-phosphate
  modified_base 2: mod_base = OTHER; note = 2'-O-methyladenosine-3'-phosphate
  modified_base 3: mod_base = OTHER; note = 2'-O-methyladenosine-3'-phosphate
  modified_base 4: mod_base = OTHER; note = 2'-O-methyladenosine-3'-phosphate
  modified_base 5: mod_base = OTHER; note = 2'-O-methylcytidine-3'-phosphate
  modified_base 6: mod_base = OTHER; note = 2'-O-methylcytidine-3'-phosphate
  modified_base 7: mod_base = OTHER; note = 2'-deoxy-2'-fluoroguanosine-3'-phosphate
  modified_base 8: mod_base = OTHER; note = 2'-O-methyladenosine-3'-phosphate
  modified_base 9: mod_base = OTHER; note = 2'-deoxy-2'-fluoroadenosine-3'-phosphate
  modified_base 10: mod_base = OTHER; note = 2'-deoxy-2'-fluorouridine-3'-phosphate
  modified_base 11: mod_base = OTHER; note = 2'-deoxy-2'-fluoroguanosine-3'-phosphate
  modified_base 12: mod_base = OTHER; note = 2'-O-methylcytidine-3'-phosphate
  modified_base 13: mod_base = OTHER; note = 2'-O-methyluridine-3'-phosphate
  modified_base 14: mod_base = OTHER; note = 2'-O-methylguanosine-3'-phosphate
  modified_base 15: mod_base = OTHER; note = 2'-O-methylcytidine-3'-phosphate
  modified_base 16: mod_base = OTHER; note = 2'-O-methyluridine-3'-phosphate
  modified_base 17: mod_base = OTHER; note = 2'-O-methyluridine-3'-phosphate
  modified_base 18: mod_base = OTHER; note = 2'-O-methylcytidine-3'-phosphate
  modified_base 19: mod_base = OTHER; note = 2'-O-methyladenosine-3'-phosphate
  modified_base 20: mod_base = OTHER; note = 2'-O-methylcytidine-3'-phosphate
  modified_base 21: mod_base = OTHER; note = 2'-O-methyladenosine
aaaaccgaatgctgcttcaca

SEQ ID NO: 3097 - RNA, 21 nt, synthetic construct
  source 1..21: mol_type = other RNA
  modified_base 1: mod_base = OTHER; note = 2'-O-methyladenosine-3'-phosphate
  modified_base 2: mod_base = OTHER; note = 2'-O-methyladenosine-3'-phosphate
  modified_base 3: mod_base = OTHER; note = 2'-O-methyladenosine-3'-phosphate
  modified_base 4: mod_base = OTHER; note = 2'-O-methylcytidine-3'-phosphate
  modified_base 5: mod_base = OTHER; note = 2'-O-methylcytidine-3'-phosphate
  modified_base 6: mod_base = OTHER; note = 2'-O-methylguanosine-3'-phosphate
  modified_base 7: mod_base = OTHER; note = 2'-deoxy-2'-fluoroadenosine-3'-phosphate
  modified_base 8: mod_base = OTHER; note = 2'-O-methyladenosine-3'-phosphate
  modified_base 9: mod_base = OTHER; note = 2'-deoxy-2'-fluorouridine-3'-phosphate
  modified_base 10: mod_base = OTHER; note = 2'-deoxy-2'-fluoroguanosine-3'-phosphate
  modified_base 11: mod_base = OTHER; note = 2'-deoxy-2'-fluorocytidine-3'-phosphate
  modified_base 12: mod_base = OTHER; note = 2'-O-methyluridine-3'-phosphate
  modified_base 13: mod_base = OTHER; note = 2'-O-methylguanosine-3'-phosphate
  modified_base 14: mod_base = OTHER; note = 2'-O-methylcytidine-3'-phosphate
  modified_base 15: mod_base = OTHER; note = 2'-O-methyluridine-3'-phosphate
  modified_base 16: mod_base = OTHER; note = 2'-O-methyluridine-3'-phosphate
  modified_base 17: mod_base = OTHER; note = 2'-O-methylcytidine-3'-phosphate
  modified_base 18: mod_base = OTHER; note = 2'-O-methyladenosine-3'-phosphate
  modified_base 19: mod_base = OTHER; note = 2'-O-methylcytidine-3'-phosphate
  modified_base 20: mod_base = OTHER; note = 2'-O-methyladenosine-3'-phosphate
  modified_base 21: mod_base = OTHER; note = 2'-O-methyladenosine
aaaccgaatgctgcttcacaa

SEQ ID NO: 3098 - RNA, 21 nt, synthetic construct
  source 1..21: mol_type = other RNA
  modified_base 1: mod_base = OTHER; note = 2'-O-methyladenosine-3'-phosphate
  modified_base 2: mod_base = OTHER; note = 2'-O-methyladenosine-3'-phosphate
  modified_base 3: mod_base = OTHER; note = 2'-O-methylcytidine-3'-phosphate
  modified_base 4: mod_base = OTHER; note = 2'-O-methylcytidine-3'-phosphate
  modified_base 5: mod_base = OTHER; note = 2'-O-methylguanosine-3'-phosphate
  modified_base 6: mod_base = OTHER; note = 2'-O-methyladenosine-3'-phosphate
  modified_base 7: mod_base = OTHER; note = 2'-deoxy-2'-fluoroadenosine-3'-phosphate
  modified_base 8: mod_base = OTHER; note = 2'-O-methyluridine-3'-phosphate
  modified_base 9: mod_base = OTHER; note = 2'-deoxy-2'-fluoroguanosine-3'-phosphate
  modified_base 10: mod_base = OTHER; note = 2'-deoxy-2'-fluorocytidine-3'-phosphate
  modified_base 11: mod_base = OTHER; note = 2'-deoxy-2'-fluorouridine-3'-phosphate
  modified_base 12: mod_base = OTHER; note = 2'-O-methylguanosine-3'-phosphate
  modified_base 13: mod_base = OTHER; note = 2'-O-methylcytidine-3'-phosphate
  modified_base 14: mod_base = OTHER; note = 2'-O-methyluridine-3'-phosphate
  modified_base 15: mod_base = OTHER; note = 2'-O-methyluridine-3'-phosphate
  modified_base 16: mod_base = OTHER; note = 2'-O-methylcytidine-3'-phosphate
  modified_base 17: mod_base = OTHER; note = 2'-O-methyladenosine-3'-phosphate
  modified_base 18: mod_base = OTHER; note = 2'-O-methylcytidine-3'-phosphate
  modified_base 19: mod_base = OTHER; note = 2'-O-methyladenosine-3'-phosphate
  modified_base 20: mod_base = OTHER; note = 2'-O-methylguanosine-3'-phosphate
  modified_base 21: mod_base = OTHER; note = 2'-O-methyladenosine
aaccgaatgctgcttcacaga

SEQ ID NO: 3099 - RNA, 21 nt, synthetic construct
  source 1..21: mol_type = other RNA
  modified_base 1: mod_base = OTHER; note = 2'-O-methyladenosine-3'-phosphate
  modified_base 2: mod_base = OTHER; note = 2'-O-methylcytidine-3'-phosphate
  modified_base 3: mod_base = OTHER; note = 2'-O-methylcytidine-3'-phosphate
  modified_base 4: mod_base = OTHER; note = 2'-O-methylguanosine-3'-phosphate
  modified_base 5: mod_base = OTHER; note = 2'-O-methyladenosine-3'-phosphate
  modified_base 6: mod_base = OTHER; note = 2'-O-methyladenosine-3'-phosphate
  modified_base 7: mod_base = OTHER; note = 2'-deoxy-2'-fluorouridine-3'-phosphate
  modified_base 8: mod_base = OTHER; note = 2'-O-methylguanosine-3'-phosphate
  modified_base 9: mod_base = OTHER; note = 2'-deoxy-2'-fluorocytidine-3'-phosphate
  modified_base 10: mod_base = OTHER; note = 2'-deoxy-2'-fluorouridine-3'-phosphate
  modified_base 11: mod_base = OTHER; note = 2'-deoxy-2'-fluoroguanosine-3'-phosphate
  modified_base 12: mod_base = OTHER; note = 2'-O-methylcytidine-3'-phosphate
  modified_base 13: mod_base = OTHER; note = 2'-O-methyluridine-3'-phosphate
  modified_base 14: mod_base = OTHER; note = 2'-O-methyluridine-3'-phosphate
  modified_base 15: mod_base = OTHER; note = 2'-O-methylcytidine-3'-phosphate
  modified_base 16: mod_base = OTHER; note = 2'-O-methyladenosine-3'-phosphate
  modified_base 17: mod_base = OTHER; note = 2'-O-methylcytidine-3'-phosphate
  modified_base 18: mod_base = OTHER; note = 2'-O-methyladenosine-3'-phosphate
  modified_base 19: mod_base = OTHER; note = 2'-O-methylguanosine-3'-phosphate
  modified_base 20: mod_base = OTHER; note = 2'-O-methyladenosine-3'-phosphate
  modified_base 21: mod_base = OTHER; note = 2'-O-methyladenosine
accgaatgctgcttcacagaa

SEQ ID NO: 3100 - RNA, 21 nt, synthetic construct
  source 1..21: mol_type = other RNA
  modified_base 1: mod_base = OTHER; note = 2'-O-methylcytidine-3'-phosphate
  modified_base 2: mod_base = OTHER; note = 2'-O-methylguanosine-3'-phosphate
  modified_base 3: mod_base = OTHER; note = 2'-O-methyladenosine-3'-phosphate
  modified_base 4: mod_base = OTHER; note = 2'-O-methyladenosine-3'-phosphate
  modified_base 5: mod_base = OTHER; note = 2'-O-methyluridine-3'-phosphate
  modified_base 6: mod_base = OTHER; note = 2'-O-methylguanosine-3'-phosphate
  modified_base 7: mod_base = OTHER; note = 2'-deoxy-2'-fluorocytidine-3'-phosphate
  modified_base 8: mod_base = OTHER; note = 2'-O-methyluridine-3'-phosphate
  modified_base 9: mod_base = OTHER; note = 2'-deoxy-2'-fluoroguanosine-3'-phosphate
  modified_base 10: mod_base = OTHER; note = 2'-deoxy-2'-fluorocytidine-3'-phosphate
  modified_base 11: mod_base = OTHER; note = 2'-deoxy-2'-fluorouridine-3'-phosphate
  modified_base 12: mod_base = OTHER; note = 2'-O-methyluridine-3'-phosphate
  modified_base 13: mod_base = OTHER; note = 2'-O-methylcytidine-3'-phosphate
  modified_base 14: mod_base = OTHER; note = 2'-O-methyladenosine-3'-phosphate
  modified_base 15: mod_base = OTHER; note = 2'-O-methylcytidine-3'-phosphate
  modified_base 16: mod_base = OTHER; note = 2'-O-methyladenosine-3'-phosphate
  modified_base 17: mod_base = OTHER; note = 2'-O-methylguanosine-3'-phosphate
  modified_base 18: mod_base = OTHER; note = 2'-O-methyladenosine-3'-phosphate
  modified_base 19: mod_base = OTHER; note = 2'-O-methyluridine-3'-phosphate
  modified_base 20: mod_base = OTHER; note = 2'-O-methyluridine-3'-phosphate
  modified_base 21: mod_base = OTHER; note = 2'-O-methyladenosine
cgaatgctgcttcacagatta

SEQ ID NO: 3101 - RNA, 21 nt, synthetic construct
  source 1..21: mol_type = other RNA
  modified_base 1: mod_base = OTHER; note = 2'-O-methyladenosine-3'-phosphate
  modified_base 2: mod_base = OTHER; note = 2'-O-methyluridine-3'-phosphate
  modified_base 3: mod_base = OTHER; note = 2'-O-methylguanosine-3'-phosphate
  modified_base 4: mod_base = OTHER; note = 2'-O-methylcytidine-3'-phosphate
  modified_base 5: mod_base = OTHER; note = 2'-O-methyluridine-3'-phosphate
  modified_base 6: mod_base = OTHER; note = 2'-O-methylguanosine-3'-phosphate
  modified_base 7: mod_base = OTHER; note = 2'-deoxy-2'-fluorocytidine-3'-phosphate
  modified_base 8: mod_base = OTHER; note = 2'-O-methyluridine-3'-phosphate
  modified_base 9: mod_base = OTHER; note = 2'-deoxy-2'-fluorouridine-3'-phosphate
  modified_base 10: mod_base = OTHER; note = 2'-deoxy-2'-fluorocytidine-3'-phosphate
  modified_base 11: mod_base = OTHER; note = 2'-deoxy-2'-fluoroadenosine-3'-phosphate
  modified_base 12: mod_base = OTHER; note = 2'-O-methylcytidine-3'-phosphate
  modified_base 13: mod_base = OTHER; note = 2'-O-methyladenosine-3'-phosphate
  modified_base 14: mod_base = OTHER; note = 2'-O-methylguanosine-3'-phosphate
  modified_base 15: mod_base = OTHER; note = 2'-O-methyladenosine-3'-phosphate
  modified_base 16: mod_base = OTHER; note = 2'-O-methyluridine-3'-phosphate
  modified_base 17: mod_base = OTHER; note = 2'-O-methyluridine-3'-phosphate
  modified_base 18: mod_base = OTHER; note = 2'-O-methyluridine-3'-phosphate
  modified_base 19: mod_base = OTHER; note = 2'-O-methyluridine-3'-phosphate
  modified_base 20: mod_base = OTHER; note = 2'-O-methyluridine-3'-phosphate
  modified_base 21: mod_base = OTHER; note = 2'-O-methyladenosine
atgctgcttcacagattttta

SEQ ID NO: 3102 - RNA, 21 nt, synthetic construct
  source 1..21: mol_type = other RNA
  modified_base 1: mod_base = OTHER; note = 2'-O-methyluridine-3'-phosphate
  modified_base 2: mod_base = OTHER; note = 2'-O-methylguanosine-3'-phosphate
  modified_base 3: mod_base = OTHER; note = 2'-O-methylcytidine-3'-phosphate
  modified_base 4: mod_base = OTHER; note = 2'-O-methyluridine-3'-phosphate
  modified_base 5: mod_base = OTHER; note = 2'-O-methylguanosine-3'-phosphate
  modified_base 6: mod_base = OTHER; note = 2'-O-methylcytidine-3'-phosphate
  modified_base 7: mod_base = OTHER; note = 2'-deoxy-2'-fluorouridine-3'-phosphate
  modified_base 8: mod_base = OTHER; note = 2'-O-methyluridine-3'-phosphate
  modified_base 9: mod_base = OTHER; note = 2'-deoxy-2'-fluorocytidine-3'-phosphate
  modified_base 10: mod_base = OTHER; note = 2'-deoxy-2'-fluoroadenosine-3'-phosphate
  modified_base 11: mod_base = OTHER; note = 2'-deoxy-2'-fluorocytidine-3'-phosphate
  modified_base 12: mod_base = OTHER; note = 2'-O-methyladenosine-3'-phosphate
  modified_base 13: mod_base = OTHER; note = 2'-O-methylguanosine-3'-phosphate
  modified_base 14: mod_base = OTHER; note = 2'-O-methyladenosine-3'-phosphate
  modified_base 15: mod_base = OTHER; note = 2'-O-methyluridine-3'-phosphate
  modified_base 16: mod_base = OTHER; note = 2'-O-methyluridine-3'-phosphate
  modified_base 17: mod_base = OTHER; note = 2'-O-methyluridine-3'-phosphate
  modified_base 18: mod_base = OTHER; note = 2'-O-methyluridine-3'-phosphate
  modified_base 19: mod_base = OTHER; note = 2'-O-methyluridine-3'-phosphate
  modified_base 20: mod_base = OTHER; note = 2'-O-methylguanosine-3'-phosphate
  modified_base 21: mod_base = OTHER; note = 2'-O-methyladenosine
tgctgcttcacagatttttga

SEQ ID NO: 3103 - RNA, 21 nt, synthetic construct
  source 1..21: mol_type = other RNA
  modified_base 1: mod_base = OTHER; note = 2'-O-methylguanosine-3'-phosphate
  modified_base 2: mod_base = OTHER; note = 2'-O-methylcytidine-3'-phosphate
  modified_base 3: mod_base = OTHER; note = 2'-O-methyluridine-3'-phosphate
  modified_base 4: mod_base = OTHER; note = 2'-O-methylguanosine-3'-phosphate
  modified_base 5: mod_base = OTHER; note = 2'-O-methylcytidine-3'-phosphate
  modified_base 6: mod_base = OTHER; note = 2'-O-methyluridine-3'-phosphate
  modified_base 7: mod_base = OTHER; note = 2'-deoxy-2'-fluorouridine-3'-phosphate
  modified_base 8: mod_base = OTHER; note = 2'-O-methylcytidine-3'-phosphate
  modified_base 9: mod_base = OTHER; note = 2'-deoxy-2'-fluoroadenosine-3'-phosphate
  modified_base 10: mod_base = OTHER; note = 2'-deoxy-2'-fluorocytidine-3'-phosphate
  modified_base 11: mod_base = OTHER; note = 2'-deoxy-2'-fluoroadenosine-3'-phosphate
  modified_base 12: mod_base = OTHER; note = 2'-O-methylguanosine-3'-phosphate
  modified_base 13: mod_base = OTHER; note = 2'-O-methyladenosine-3'-phosphate
  modified_base 14: mod_base = OTHER; note = 2'-O-methyluridine-3'-phosphate
  modified_base 15: mod_base = OTHER; note = 2'-O-methyluridine-3'-phosphate
  modified_base 16: mod_base = OTHER; note = 2'-O-methyluridine-3'-phosphate
  modified_base 17: mod_base = OTHER; note = 2'-O-methyluridine-3'-phosphate
  modified_base 18: mod_base = OTHER; note = 2'-O-methyluridine-3'-phosphate
  modified_base 19: mod_base = OTHER; note = 2'-O-methylguanosine-3'-phosphate
  modified_base 20: mod_base = OTHER; note = 2'-O-methylcytidine-3'-phosphate
  modified_base 21: mod_base = OTHER; note = 2'-O-methyladenosine
gctgcttcacagatttttgca

SEQ ID NO: 3104 - RNA, 21 nt, synthetic construct
  source 1..21: mol_type = other RNA
  modified_base 1: mod_base = OTHER; note = 2'-O-methylcytidine-3'-phosphate
  modified_base 2: mod_base = OTHER; note = 2'-O-methyluridine-3'-phosphate
  modified_base 3: mod_base = OTHER; note = 2'-O-methylguanosine-3'-phosphate
  modified_base 4: mod_base = OTHER; note = 2'-O-methylcytidine-3'-phosphate
  modified_base 5: mod_base = OTHER; note = 2'-O-methyluridine-3'-phosphate
  modified_base 6: mod_base = OTHER; note = 2'-O-methyluridine-3'-phosphate
  modified_base 7: mod_base = OTHER; note = 2'-deoxy-2'-fluorocytidine-3'-phosphate
  modified_base 8: mod_base = OTHER; note = 2'-O-methyladenosine-3'-phosphate
  modified_base 9: mod_base = OTHER; note = 2'-deoxy-2'-fluorocytidine-3'-phosphate
  modified_base 10: mod_base = OTHER; note = 2'-deoxy-2'-fluoroadenosine-3'-phosphate
  modified_base 11: mod_base = OTHER; note = 2'-deoxy-2'-fluoroguanosine-3'-phosphate
  modified_base 12: mod_base = OTHER; note = 2'-O-methyladenosine-3'-phosphate
  modified_base 13: mod_base = OTHER; note = 2'-O-methyluridine-3'-phosphate
  modified_base 14: mod_base = OTHER; note = 2'-O-methyluridine-3'-phosphate
  modified_base 15: mod_base = OTHER; note = 2'-O-methyluridine-3'-phosphate
  modified_base 16: mod_base = OTHER; note = 2'-O-methyluridine-3'-phosphate
  modified_base 17: mod_base = OTHER; note = 2'-O-methyluridine-3'-phosphate
  modified_base 18: mod_base = OTHER; note = 2'-O-methylguanosine-3'-phosphate
  modified_base 19: mod_base = OTHER; note = 2'-O-methylcytidine-3'-phosphate
  modified_base 20: mod_base = OTHER; note = 2'-O-methyladenosine-3'-phosphate
  modified_base 21: mod_base = OTHER; note = 2'-O-methyladenosine
ctgcttcacagatttttgcaa

SEQ ID NO: 3105 - RNA, 21 nt, synthetic construct
  source 1..21: mol_type = other RNA
  modified_base 1: mod_base = OTHER; note = 2'-O-methyluridine-3'-phosphate
  modified_base 2: mod_base = OTHER; note = 2'-O-methylguanosine-3'-phosphate
  modified_base 3: mod_base = OTHER; note = 2'-O-methylcytidine-3'-phosphate
  modified_base 4: mod_base = OTHER; note = 2'-O-methyluridine-3'-phosphate
  modified_base 5: mod_base = OTHER; note = 2'-O-methyluridine-3'-phosphate
  modified_base 6: mod_base = OTHER; note = 2'-O-methylcytidine-3'-phosphate
  modified_base 7: mod_base = OTHER; note = 2'-deoxy-2'-fluoroadenosine-3'-phosphate
  modified_base 8: mod_base = OTHER; note = 2'-O-methylcytidine-3'-phosphate
  modified_base 9: mod_base = OTHER; note = 2'-deoxy-2'-fluoroadenosine-3'-phosphate
  modified_base 10: mod_base = OTHER; note = 2'-deoxy-2'-fluoroguanosine-3'-phosphate
  modified_base 11: mod_base = OTHER; note = 2'-deoxy-2'-fluoroadenosine-3'-phosphate
  modified_base 12: mod_base = OTHER; note = 2'-O-methyluridine-3'-phosphate
  modified_base 13: mod_base = OTHER; note = 2'-O-methyluridine-3'-phosphate
  modified_base 14: mod_base = OTHER; note = 2'-O-methyluridine-3'-phosphate
  modified_base 15: mod_base = OTHER; note = 2'-O-methyluridine-3'-phosphate
  modified_base 16: mod_base = OTHER; note = 2'-O-methyluridine-3'-phosphate
  modified_base 17: mod_base = OTHER; note = 2'-O-methylguanosine-3'-phosphate
  modified_base 18: mod_base = OTHER; note = 2'-O-methylcytidine-3'-phosphate
  modified_base 19: mod_base = OTHER; note = 2'-O-methyladenosine-3'-phosphate
  modified_base 20: mod_base = OTHER; note = 2'-O-methyladenosine-3'-phosphate
  modified_base 21: mod_base = OTHER; note = 2'-O-methyladenosine
tgcttcacagatttttgcaaa

SEQ ID NO: 3106 - RNA, 21 nt, synthetic construct
  source 1..21: mol_type = other RNA
  modified_base 1: mod_base = OTHER; note = 2'-O-methylguanosine-3'-phosphate
  modified_base 2: mod_base = OTHER; note = 2'-O-methylcytidine-3'-phosphate
  modified_base 3: mod_base = OTHER; note = 2'-O-methyluridine-3'-phosphate
  modified_base 4: mod_base = OTHER; note = 2'-O-methyluridine-3'-phosphate
  modified_base 5: mod_base = OTHER; note = 2'-O-methylcytidine-3'-phosphate
  modified_base 6: mod_base = OTHER; note = 2'-O-methyladenosine-3'-phosphate
  modified_base 7: mod_base = OTHER; note = 2'-deoxy-2'-fluorocytidine-3'-phosphate
  modified_base 8: mod_base = OTHER; note = 2'-O-methyladenosine-3'-phosphate
  modified_base 9: mod_base = OTHER; note = 2'-deoxy-2'-fluoroguanosine-3'-phosphate
  modified_base 10: mod_base = OTHER; note = 2'-deoxy-2'-fluoroadenosine-3'-phosphate
  modified_base 11: mod_base = OTHER; note = 2'-deoxy-2'-fluorouridine-3'-phosphate
  modified_base 12: mod_base = OTHER; note = 2'-O-methyluridine-3'-phosphate
  modified_base 13: mod_base = OTHER; note = 2'-O-methyluridine-3'-phosphate
  modified_base 14: mod_base = OTHER; note = 2'-O-methyluridine-3'-phosphate
  modified_base 15: mod_base = OTHER; note = 2'-O-methyluridine-3'-phosphate
  modified_base 16: mod_base = OTHER; note = 2'-O-methylguanosine-3'-phosphate
  modified_base 17: mod_base = OTHER; note = 2'-O-methylcytidine-3'-phosphate
  modified_base 18: mod_base = OTHER; note = 2'-O-methyladenosine-3'-phosphate
  modified_base 19: mod_base = OTHER; note = 2'-O-methyladenosine-3'-phosphate
  modified_base 20: mod_base = OTHER; note = 2'-O-methylcytidine-3'-phosphate
  modified_base 21: mod_base = OTHER; note = 2'-O-methyladenosine
gcttcacagatttttgcaaca

SEQ ID NO: 3107 - RNA, 21 nt, synthetic construct
  source 1..21: mol_type = other RNA
  modified_base 1: mod_base = OTHER; note = 2'-O-methylcytidine-3'-phosphate
  modified_base 2: mod_base = OTHER; note = 2'-O-methyluridine-3'-phosphate
  modified_base 3: mod_base = OTHER; note = 2'-O-methyluridine-3'-phosphate
  modified_base 4: mod_base = OTHER; note = 2'-O-methylcytidine-3'-phosphate
  modified_base 5: mod_base = OTHER; note = 2'-O-methyladenosine-3'-phosphate
  modified_base 6: mod_base = OTHER; note = 2'-O-methylcytidine-3'-phosphate
  modified_base 7: mod_base = OTHER; note = 2'-deoxy-2'-fluoroadenosine-3'-phosphate
  modified_base 8: mod_base = OTHER; note = 2'-O-methylguanosine-3'-phosphate
  modified_base 9: mod_base = OTHER; note = 2'-deoxy-2'-fluoroadenosine-3'-phosphate
  modified_base 10: mod_base = OTHER; note = 2'-deoxy-2'-fluorouridine-3'-phosphate
  modified_base 11: mod_base = OTHER; note = 2'-deoxy-2'-fluorouridine-3'-phosphate
  modified_base 12: mod_base = OTHER; note = 2'-O-methyluridine-3'-phosphate
  modified_base 13: mod_base = OTHER; note = 2'-O-methyluridine-3'-phosphate
  modified_base 14: mod_base = OTHER; note = 2'-O-methyluridine-3'-phosphate
  modified_base 15: mod_base = OTHER; note = 2'-O-methylguanosine-3'-phosphate
  modified_base 16: mod_base = OTHER; note = 2'-O-methylcytidine-3'-phosphate
  modified_base 17: mod_base = OTHER; note = 2'-O-methyladenosine-3'-phosphate
  modified_base 18: mod_base = OTHER; note = 2'-O-methyladenosine-3'-phosphate
  modified_base 19: mod_base = OTHER; note = 2'-O-methylcytidine-3'-phosphate
  modified_base 20: mod_base = OTHER; note = 2'-O-methyladenosine-3'-phosphate
  modified_base 21: mod_base = OTHER; note = 2'-O-methyladenosine
cttcacagatttttgcaacaa

SEQ ID NO: 3108 - RNA, 21 nt, synthetic construct
  source 1..21: mol_type = other RNA
  modified_base 1: mod_base = OTHER; note = 2'-O-methyluridine-3'-phosphate
  modified_base 2: mod_base = OTHER; note = 2'-O-methyluridine-3'-phosphate
  modified_base 3: mod_base = OTHER; note = 2'-O-methylcytidine-3'-phosphate
  modified_base 4: mod_base = OTHER; note = 2'-O-methyladenosine-3'-phosphate
  modified_base 5: mod_base = OTHER; note = 2'-O-methylcytidine-3'-phosphate
  modified_base 6: mod_base = OTHER; note = 2'-O-methyladenosine-3'-phosphate
  modified_base 7: mod_base = OTHER; note = 2'-deoxy-2'-fluoroguanosine-3'-phosphate
  modified_base 8: mod_base = OTHER; note = 2'-O-methyladenosine-3'-phosphate
  modified_base 9: mod_base = OTHER; note = 2'-deoxy-2'-fluorouridine-3'-phosphate
  modified_base 10: mod_base = OTHER; note = 2'-deoxy-2'-fluorouridine-3'-phosphate
  modified_base 11: mod_base = OTHER; note = 2'-deoxy-2'-fluorouridine-3'-phosphate
  modified_base 12: mod_base = OTHER; note = 2'-O-methyluridine-3'-phosphate
  modified_base 13: mod_base = OTHER; note = 2'-O-methyluridine-3'-phosphate
  modified_base 14: mod_base = OTHER; note = 2'-O-methylguanosine-3'-phosphate
  modified_base 15: mod_base = OTHER; note = 2'-O-methylcytidine-3'-phosphate
  modified_base 16: mod_base = OTHER; note = 2'-O-methyladenosine-3'-phosphate
  modified_base 17: mod_base = OTHER; note = 2'-O-methyladenosine-3'-phosphate
  modified_base 18: mod_base = OTHER; note = 2'-O-methylcytidine-3'-phosphate
  modified_base 19: mod_base = OTHER; note = 2'-O-methyladenosine-3'-phosphate
  modified_base 20: mod_base = OTHER; note = 2'-O-methyladenosine-3'-phosphate
  modified_base 21: mod_base = OTHER; note = 2'-O-methyladenosine
ttcacagatttttgcaacaaa

SEQ ID NO: 3109 - RNA, 21 nt, synthetic construct
  source 1..21: mol_type = other RNA
  modified_base 1: mod_base = OTHER; note = 2'-O-methyluridine-3'-phosphate
  modified_base 2: mod_base = OTHER; note = 2'-O-methylcytidine-3'-phosphate
  modified_base 3: mod_base = OTHER; note = 2'-O-methyladenosine-3'-phosphate
  modified_base 4: mod_base = OTHER; note = 2'-O-methylcytidine-3'-phosphate
  modified_base 5: mod_base = OTHER; note = 2'-O-methyladenosine-3'-phosphate
  modified_base 6: mod_base = OTHER; note = 2'-O-methylguanosine-3'-phosphate
  modified_base 7: mod_base = OTHER; note = 2'-deoxy-2'-fluoroadenosine-3'-phosphate
  modified_base 8: mod_base = OTHER; note = 2'-O-methyluridine-3'-phosphate
  modified_base 9: mod_base = OTHER; note = 2'-deoxy-2'-fluorouridine-3'-phosphate
  modified_base 10: mod_base = OTHER; note = 2'-deoxy-2'-fluorouridine-3'-phosphate
  modified_base 11: mod_base = OTHER; note = 2'-deoxy-2'-fluorouridine-3'-phosphate
  modified_base 12: mod_base = OTHER; note = 2'-O-methyluridine-3'-phosphate
  modified_base 13: mod_base = OTHER; note = 2'-O-methylguanosine-3'-phosphate
  modified_base 14: mod_base = OTHER; note = 2'-O-methylcytidine-3'-phosphate
  modified_base 15: mod_base = OTHER; note = 2'-O-methyladenosine-3'-phosphate
  modified_base 16: mod_base = OTHER; note = 2'-O-methyladenosine-3'-phosphate
  modified_base 17: mod_base = OTHER; note = 2'-O-methylcytidine-3'-phosphate
  modified_base 18: mod_base = OTHER; note = 2'-O-methyladenosine-3'-phosphate
  modified_base 19: mod_base = OTHER; note = 2'-O-methyladenosine-3'-phosphate
  modified_base 20: mod_base = OTHER; note = 2'-O-methylcytidine-3'-phosphate
  modified_base 21: mod_base = OTHER; note = 2'-O-methyladenosine
tcacagatttttgcaacaaca

SEQ ID NO: 3110 - RNA, 21 nt, synthetic construct
  source 1..21: mol_type = other RNA
  modified_base 1: mod_base = OTHER; note = 2'-O-methylcytidine-3'-phosphate
  modified_base 2: mod_base = OTHER; note = 2'-O-methyladenosine-3'-phosphate
  modified_base 3: mod_base = OTHER; note = 2'-O-methylcytidine-3'-phosphate
  modified_base 4: mod_base = OTHER; note = 2'-O-methyladenosine-3'-phosphate
  modified_base 5: mod_base = OTHER; note = 2'-O-methylguanosine-3'-phosphate
  modified_base 6: mod_base = OTHER; note = 2'-O-methyladenosine-3'-phosphate
  modified_base 7: mod_base = OTHER; note = 2'-deoxy-2'-fluorouridine-3'-phosphate
  modified_base 8: mod_base = OTHER; note = 2'-O-methyluridine-3'-phosphate
  modified_base 9: mod_base = OTHER; note = 2'-deoxy-2'-fluorouridine-3'-phosphate
  modified_base 10: mod_base = OTHER; note = 2'-deoxy-2'-fluorouridine-3'-phosphate
  modified_base 11: mod_base = OTHER; note = 2'-deoxy-2'-fluorouridine-3'-phosphate
  modified_base 12: mod_base = OTHER; note = 2'-O-methylguanosine-3'-phosphate
  modified_base 13: mod_base = OTHER; note = 2'-O-methylcytidine-3'-phosphate
  modified_base 14: mod_base = OTHER; note = 2'-O-methyladenosine-3'-phosphate
  modified_base 15: mod_base = OTHER; note = 2'-O-methyladenosine-3'-phosphate
  modified_base 16: mod_base = OTHER; note = 2'-O-methylcytidine-3'-phosphate
  modified_base 17: mod_base = OTHER; note = 2'-O-methyladenosine-3'-phosphate
  modified_base 18: mod_base = OTHER; note = 2'-O-methyladenosine-3'-phosphate
  modified_base 19: mod_base = OTHER; note = 2'-O-methylcytidine-3'-phosphate
  modified_base 20: mod_base = OTHER; note = 2'-O-methyladenosine-3'-phosphate
  modified_base 21: mod_base = OTHER; note = 2'-O-methyladenosine
cacagatttttgcaacaacaa

SEQ ID NO: 3111 - RNA, 21 nt, synthetic construct
  source 1..21: mol_type = other RNA
  modified_base 1: mod_base = OTHER; note = 2'-O-methyladenosine-3'-phosphate
  modified_base 2: mod_base = OTHER; note = 2'-O-methylcytidine-3'-phosphate
  modified_base 3: mod_base = OTHER; note = 2'-O-methyladenosine-3'-phosphate
  modified_base 4: mod_base = OTHER; note = 2'-O-methylguanosine-3'-phosphate
  modified_base 5: mod_base = OTHER; note = 2'-O-methyladenosine-3'-phosphate
  modified_base 6: mod_base = OTHER; note = 2'-O-methyluridine-3'-phosphate
  modified_base 7: mod_base = OTHER; note = 2'-deoxy-2'-fluorouridine-3'-phosphate
  modified_base 8: mod_base = OTHER; note = 2'-O-methyluridine-3'-phosphate
  modified_base 9: mod_base = OTHER; note = 2'-deoxy-2'-fluorouridine-3'-phosphate
  modified_base 10: mod_base = OTHER; note = 2'-deoxy-2'-fluorouridine-3'-phosphate
  modified_base 11: mod_base = OTHER; note = 2'-deoxy-2'-fluoroguanosine-3'-phosphate
  modified_base 12: mod_base = OTHER; note = 2'-O-methylcytidine-3'-phosphate
  modified_base 13: mod_base = OTHER; note = 2'-O-methyladenosine-3'-phosphate
  modified_base 14: mod_base = OTHER; note = 2'-O-methyladenosine-3'-phosphate
  modified_base 15: mod_base = OTHER; note = 2'-O-methylcytidine-3'-phosphate
  modified_base 16: mod_base = OTHER; note = 2'-O-methyladenosine-3'-phosphate
  modified_base 17: mod_base = OTHER; note = 2'-O-methyladenosine-3'-phosphate
  modified_base 18: mod_base = OTHER; note = 2'-O-methylcytidine-3'-phosphate
  modified_base 19: mod_base = OTHER; note = 2'-O-methyladenosine-3'-phosphate
  modified_base 20: mod_base = OTHER; note = 2'-O-methyluridine-3'-phosphate
  modified_base 21: mod_base = OTHER; note = 2'-O-methyladenosine
acagatttttgcaacaacata

SEQ ID NO: 3112 - RNA, 21 nt, synthetic construct
  source 1..21: mol_type = other RNA
  modified_base 1: mod_base = OTHER; note = 2'-O-methylcytidine-3'-phosphate
  modified_base 2: mod_base = OTHER; note = 2'-O-methyladenosine-3'-phosphate
  modified_base 3: mod_base = OTHER; note = 2'-O-methylguanosine-3'-phosphate
  modified_base 4: mod_base = OTHER; note = 2'-O-methyladenosine-3'-phosphate
  modified_base 5: mod_base = OTHER; note = 2'-O-methyluridine-3'-phosphate
  modified_base 6: mod_base = OTHER; note = 2'-O-methyluridine-3'-phosphate
  modified_base 7: mod_base = OTHER; note = 2'-deoxy-2'-fluorouridine-3'-phosphate
  modified_base 8: mod_base = OTHER; note = 2'-O-methyluridine-3'-phosphate
  modified_base 9: mod_base = OTHER; note = 2'-deoxy-2'-fluorouridine-3'-phosphate
  modified_base 10: mod_base = OTHER; note = 2'-deoxy-2'-fluoroguanosine-3'-phosphate
  modified_base 11: mod_base = OTHER; note = 2'-deoxy-2'-fluorocytidine-3'-phosphate
  modified_base 12: mod_base = OTHER; note = 2'-O-methyladenosine-3'-phosphate
  modified_base 13: mod_base = OTHER; note = 2'-O-methyladenosine-3'-phosphate
  modified_base 14: mod_base = OTHER; note = 2'-O-methylcytidine-3'-phosphate
  modified_base 15: mod_base = OTHER; note = 2'-O-methyladenosine-3'-phosphate
  modified_base 16: mod_base = OTHER; note = 2'-O-methyladenosine-3'-phosphate
  modified_base 17: mod_base = OTHER; note = 2'-O-methylcytidine-3'-phosphate
  modified_base 18: mod_base = OTHER; note = 2'-O-methyladenosine-3'-phosphate
  modified_base 19: mod_base = OTHER; note = 2'-O-methyluridine-3'-phosphate
  modified_base 20: mod_base = OTHER; note = 2'-O-methyladenosine-3'-phosphate
  modified_base 21: mod_base = OTHER; note = 2'-O-methyladenosine
cagatttttgcaacaacataa

SEQ ID NO: 3113 - RNA, 21 nt, synthetic construct
  source 1..21: mol_type = other RNA
  modified_base 1: mod_base = OTHER; note = 2'-O-methyladenosine-3'-phosphate
  modified_base 2: mod_base = OTHER; note = 2'-O-methylguanosine-3'-phosphate
  modified_base 3: mod_base = OTHER; note = 2'-O-methyladenosine-3'-phosphate
  modified_base 4: mod_base = OTHER; note = 2'-O-methyluridine-3'-phosphate
  modified_base 5: mod_base = OTHER; note = 2'-O-methyluridine-3'-phosphate
  modified_base 6: mod_base = OTHER; note = 2'-O-methyluridine-3'-phosphate
  modified_base 7: mod_base = OTHER; note = 2'-deoxy-2'-fluorouridine-3'-phosphate
  modified_base 8: mod_base = OTHER; note = 2'-O-methyluridine-3'-phosphate
  modified_base 9: mod_base = OTHER; note = 2'-deoxy-2'-fluoroguanosine-3'-phosphate
  modified_base 10: mod_base = OTHER; note = 2'-deoxy-2'-fluorocytidine-3'-phosphate
  modified_base 11: mod_base = OTHER; note = 2'-deoxy-2'-fluoroadenosine-3'-phosphate
  modified_base 12: mod_base = OTHER; note = 2'-O-methyladenosine-3'-phosphate
  modified_base 13: mod_base = OTHER; note = 2'-O-methylcytidine-3'-phosphate
  modified_base 14: mod_base = OTHER; note = 2'-O-methyladenosine-3'-phosphate
  modified_base 15: mod_base = OTHER; note = 2'-O-methyladenosine-3'-phosphate
  modified_base 16: mod_base = OTHER; note = 2'-O-methylcytidine-3'-phosphate
  modified_base 17: mod_base = OTHER; note = 2'-O-methyladenosine-3'-phosphate
  modified_base 18: mod_base = OTHER; note = 2'-O-methyluridine-3'-phosphate
  modified_base 19: mod_base = OTHER; note = 2'-O-methyladenosine-3'-phosphate
  modified_base 20: mod_base = OTHER; note = 2'-O-methyladenosine-3'-phosphate
  modified_base 21: mod_base = OTHER; note = 2'-O-methyladenosine
agatttttgcaacaacataaa

SEQ ID NO: 3114 - RNA, 21 nt, synthetic construct
  source 1..21: mol_type = other RNA
  modified_base 1: mod_base = OTHER; note = 2'-O-methylguanosine-3'-phosphate
  modified_base 2: mod_base = OTHER; note = 2'-O-methyladenosine-3'-phosphate
  modified_base 3: mod_base = OTHER; note = 2'-O-methyluridine-3'-phosphate
  modified_base 4: mod_base = OTHER; note = 2'-O-methyluridine-3'-phosphate
  modified_base 5: mod_base = OTHER; note = 2'-O-methyluridine-3'-phosphate
  modified_base 6: mod_base = OTHER; note = 2'-O-methyluridine-3'-phosphate
  modified_base 7: mod_base = OTHER; note = 2'-deoxy-2'-fluorouridine-3'-phosphate
  modified_base 8: mod_base = OTHER; note = 2'-O-methylguanosine-3'-phosphate
  modified_base 9: mod_base = OTHER; note = 2'-deoxy-2'-fluorocytidine-3'-phosphate
  modified_base 10: mod_base = OTHER; note = 2'-deoxy-2'-fluoroadenosine-3'-phosphate
  modified_base 11: mod_base = OTHER; note = 2'-deoxy-2'-fluoroadenosine-3'-phosphate
  modified_base 12: mod_base = OTHER; note = 2'-O-methylcytidine-3'-phosphate
  modified_base 13: mod_base = OTHER; note = 2'-O-methyladenosine-3'-phosphate
  modified_base 14: mod_base = OTHER; note = 2'-O-methyladenosine-3'-phosphate
  modified_base 15: mod_base = OTHER; note = 2'-O-methylcytidine-3'-phosphate
  modified_base 16: mod_base = OTHER; note = 2'-O-methyladenosine-3'-phosphate
  modified_base 17: mod_base = OTHER; note = 2'-O-methyluridine-3'-phosphate
  modified_base 18: mod_base = OTHER; note = 2'-O-methyladenosine-3'-phosphate
  modified_base 19: mod_base = OTHER; note = 2'-O-methyladenosine-3'-phosphate
  modified_base 20: mod_base = OTHER; note = 2'-O-methylcytidine-3'-phosphate
  modified_base 21: mod_base = OTHER; note = 2'-O-methyladenosine
gatttttgcaacaacataaca

SEQ ID NO: 3115 - RNA, 21 nt, synthetic construct
  source 1..21: mol_type = other RNA
  modified_base 1: mod_base = OTHER; note = 2'-O-methyladenosine-3'-phosphate
  modified_base 2: mod_base = OTHER; note = 2'-O-methyluridine-3'-phosphate
  modified_base 3: mod_base = OTHER; note = 2'-O-methyluridine-3'-phosphate
  modified_base 4: mod_base = OTHER; note = 2'-O-methyluridine-3'-phosphate
  modified_base 5: mod_base = OTHER; note = 2'-O-methyluridine-3'-phosphate
  modified_base 6: mod_base = OTHER; note = 2'-O-methyluridine-3'-phosphate
  modified_base 7: mod_base = OTHER; note = 2'-deoxy-2'-fluoroguanosine-3'-phosphate
  modified_base 8: mod_base = OTHER; note = 2'-O-methylcytidine-3'-phosphate
  modified_base 9: mod_base = OTHER; note = 2'-deoxy-2'-fluoroadenosine-3'-phosphate
  modified_base 10: mod_base = OTHER; note = 2'-deoxy-2'-fluoroadenosine-3'-phosphate
  modified_base 11: mod_base = OTHER; note = 2'-deoxy-2'-fluorocytidine-3'-phosphate
  modified_base 12: mod_base = OTHER; note = 2'-O-methyladenosine-3'-phosphate
  modified_base 13: mod_base = OTHER; note = 2'-O-methyladenosine-3'-phosphate
  modified_base 14: mod_base = OTHER; note = 2'-O-methylcytidine-3'-phosphate
  modified_base 15: mod_base = OTHER; note = 2'-O-methyladenosine-3'-phosphate
  modified_base 16: mod_base = OTHER; note = 2'-O-methyluridine-3'-phosphate
  modified_base 17: mod_base = OTHER; note = 2'-O-methyladenosine-3'-phosphate
  modified_base 18: mod_base = OTHER; note = 2'-O-methyladenosine-3'-phosphate
  modified_base 19: mod_base = OTHER; note = 2'-O-methylcytidine-3'-phosphate
  modified_base 20: mod_base = OTHER; note = 2'-O-methyladenosine-3'-phosphate
  modified_base 21: mod_base = OTHER; note = 2'-O-methyladenosine
atttttgcaacaacataacaa

SEQ ID NO: 3116 - RNA, 21 nt, synthetic construct
  source 1..21: mol_type = other RNA
  modified_base 1: mod_base = OTHER; note = 2'-O-methyluridine-3'-phosphate
  modified_base 2: mod_base = OTHER; note = 2'-O-methyluridine-3'-phosphate
  modified_base 3: mod_base = OTHER; note = 2'-O-methyluridine-3'-phosphate
  modified_base 4: mod_base = OTHER; note = 2'-O-methyluridine-3'-phosphate
  modified_base 5: mod_base = OTHER; note = 2'-O-methyluridine-3'-phosphate
  modified_base 6: mod_base = OTHER; note = 2'-O-methylguanosine-3'-phosphate
  modified_base 7: mod_base = OTHER; note = 2'-deoxy-2'-fluorocytidine-3'-phosphate
  modified_base 8: mod_base = OTHER; note = 2'-O-methyladenosine-3'-phosphate
  modified_base 9: mod_base = OTHER; note = 2'-deoxy-2'-fluoroadenosine-3'-phosphate
  modified_base 10: mod_base = OTHER; note = 2'-deoxy-2'-fluorocytidine-3'-phosphate
  modified_base 11: mod_base = OTHER; note = 2'-deoxy-2'-fluoroadenosine-3'-phosphate
  modified_base 12: mod_base = OTHER; note = 2'-O-methyladenosine-3'-phosphate
  modified_base 13: mod_base = OTHER; note = 2'-O-methylcytidine-3'-phosphate
  modified_base 14: mod_base = OTHER; note = 2'-O-methyladenosine-3'-phosphate
  modified_base 15: mod_base = OTHER; note = 2'-O-methyluridine-3'-phosphate
  modified_base 16: mod_base = OTHER; note = 2'-O-methyladenosine-3'-phosphate
  modified_base 17: mod_base = OTHER; note = 2'-O-methyladenosine-3'-phosphate
  modified_base 18: mod_base = OTHER; note = 2'-O-methylcytidine-3'-phosphate
  modified_base 19: mod_base = OTHER; note = 2'-O-methyladenosine-3'-phosphate
  modified_base 20: mod_base = OTHER; note = 2'-O-methylcytidine-3'-phosphate
  modified_base 21: mod_base = OTHER; note = 2'-O-methyladenosine
tttttgcaacaacataacaca

SEQ ID NO: 3117 - RNA, 21 nt, synthetic construct
  source 1..21: mol_type = other RNA
  modified_base 1: mod_base = OTHER; note = 2'-O-methyluridine-3'-phosphate
  modified_base 2: mod_base = OTHER; note = 2'-O-methyluridine-3'-phosphate
  modified_base 3: mod_base = OTHER; note = 2'-O-methyluridine-3'-phosphate
  modified_base 4: mod_base = OTHER; note = 2'-O-methyluridine-3'-phosphate
  modified_base 5: mod_base = OTHER; note = 2'-O-methylguanosine-3'-phosphate
  modified_base 6: mod_base = OTHER; note = 2'-O-methylcytidine-3'-phosphate
  modified_base 7: mod_base = OTHER; note = 2'-deoxy-2'-fluoroadenosine-3'-phosphate
  modified_base 8: mod_base = OTHER; note = 2'-O-methyladenosine-3'-phosphate
  modified_base 9: mod_base = OTHER; note = 2'-deoxy-2'-fluorocytidine-3'-phosphate
  modified_base 10: mod_base = OTHER; note = 2'-deoxy-2'-fluoroadenosine-3'-phosphate
  modified_base 11: mod_base = OTHER; note = 2'-deoxy-2'-fluoroadenosine-3'-phosphate
  modified_base 12: mod_base = OTHER; note = 2'-O-methylcytidine-3'-phosphate
  modified_base 13: mod_base = OTHER; note = 2'-O-methyladenosine-3'-phosphate
  modified_base 14: mod_base = OTHER; note = 2'-O-methyluridine-3'-phosphate
  modified_base 15: mod_base = OTHER; note = 2'-O-methyladenosine-3'-phosphate
  modified_base 16: mod_base = OTHER; note = 2'-O-methyladenosine-3'-phosphate
  modified_base 17: mod_base = OTHER; note = 2'-O-methylcytidine-3'-phosphate
  modified_base 18: mod_base = OTHER; note = 2'-O-methyladenosine-3'-phosphate
  modified_base 19: mod_base = OTHER; note = 2'-O-methylcytidine-3'-phosphate
  modified_base 20: mod_base = OTHER; note = 2'-O-methyluridine-3'-phosphate
  modified_base 21: mod_base = OTHER; note = 2'-O-methyladenosine
ttttgcaacaacataacacta

SEQ ID NO: 3118 - RNA, 21 nt, synthetic construct
  source 1..21: mol_type = other RNA
  modified_base 1: mod_base = OTHER; note = 2'-O-methyluridine-3'-phosphate
  modified_base 2: mod_base = OTHER; note = 2'-O-methyluridine-3'-phosphate
  modified_base 3: mod_base = OTHER; note = 2'-O-methyluridine-3'-phosphate
  modified_base 4: mod_base = OTHER; note = 2'-O-methylguanosine-3'-phosphate
  modified_base 5: mod_base = OTHER; note = 2'-O-methylcytidine-3'-phosphate
  modified_base 6: mod_base = OTHER; note = 2'-O-methyladenosine-3'-phosphate
  modified_base 7: mod_base = OTHER; note = 2'-deoxy-2'-fluoroadenosine-3'-phosphate
  modified_base 8: mod_base = OTHER; note = 2'-O-methylcytidine-3'-phosphate
  modified_base 9: mod_base = OTHER; note = 2'-deoxy-2'-fluoroadenosine-3'-phosphate
  modified_base 10: mod_base = OTHER; note = 2'-deoxy-2'-fluoroadenosine-3'-phosphate
  modified_base 11: mod_base = OTHER; note = 2'-deoxy-2'-fluorocytidine-3'-phosphate
  modified_base 12: mod_base = OTHER; note = 2'-O-methyladenosine-3'-phosphate
  modified_base 13: mod_base = OTHER; note = 2'-O-methyluridine-3'-phosphate
  modified_base 14: mod_base = OTHER; note = 2'-O-methyladenosine-3'-phosphate
  modified_base 15: mod_base = OTHER; note = 2'-O-methyladenosine-3'-phosphate
  modified_base 16: mod_base = OTHER; note = 2'-O-methylcytidine-3'-phosphate
  modified_base 17: mod_base = OTHER; note = 2'-O-methyladenosine-3'-phosphate
  modified_base 18: mod_base = OTHER; note = 2'-O-methylcytidine-3'-phosphate
  modified_base 19: mod_base = OTHER; note = 2'-O-methyluridine-3'-phosphate
  modified_base 20: mod_base = OTHER; note = 2'-O-methylguanosine-3'-phosphate
  modified_base 21: mod_base = OTHER; note = 2'-O-methyladenosine
tttgcaacaacataacactga

SEQ ID NO: 3119 - RNA, 21 nt, synthetic construct
  source 1..21: mol_type = other RNA
  modified_base 1: mod_base = OTHER; note = 2'-O-methyluridine-3'-phosphate
  modified_base 2: mod_base = OTHER; note = 2'-O-methyluridine-3'-phosphate
  modified_base 3: mod_base = OTHER; note = 2'-O-methylguanosine-3'-phosphate
  modified_base 4: mod_base = OTHER; note = 2'-O-methylcytidine-3'-phosphate
  modified_base 5: mod_base = OTHER; note = 2'-O-methyladenosine-3'-phosphate
  modified_base 6: mod_base = OTHER; note = 2'-O-methyladenosine-3'-phosphate
  modified_base 7: mod_base = OTHER; note = 2'-deoxy-2'-fluorocytidine-3'-phosphate
  modified_base 8: mod_base = OTHER; note = 2'-O-methyladenosine-3'-phosphate
  modified_base 9: mod_base = OTHER; note = 2'-deoxy-2'-fluoroadenosine-3'-phosphate
  modified_base 10: mod_base = OTHER; note = 2'-deoxy-2'-fluorocytidine-3'-phosphate
  modified_base 11: mod_base = OTHER; note = 2'-deoxy-2'-fluoroadenosine-3'-phosphate
  modified_base 12: mod_base = OTHER; note = 2'-O-methyluridine-3'-phosphate
  modified_base 13: mod_base = OTHER; note = 2'-O-methyladenosine-3'-phosphate
  modified_base 14: mod_base = OTHER; note = 2'-O-methyladenosine-3'-phosphate
  modified_base 15: mod_base = OTHER; note = 2'-O-methylcytidine-3'-phosphate
  modified_base 16: mod_base = OTHER; note = 2'-O-methyladenosine-3'-phosphate
  modified_base 17: mod_base = OTHER; note = 2'-O-methylcytidine-3'-phosphate
  modified_base 18: mod_base = OTHER; note = 2'-O-methyluridine-3'-phosphate
  modified_base 19: mod_base = OTHER; note = 2'-O-methylguanosine-3'-phosphate
  modified_base 20: mod_base = OTHER; note = 2'-O-methylcytidine-3'-phosphate
  modified_base 21: mod_base = OTHER; note = 2'-O-methyladenosine
ttgcaacaacataacactgca

SEQ ID NO: 3120 - RNA, 21 nt, synthetic construct
  source 1..21: mol_type = other RNA
  modified_base 1: mod_base = OTHER; note = 2'-O-methyluridine-3'-phosphate
  modified_base 2: mod_base = OTHER; note = 2'-O-methylguanosine-3'-phosphate
  modified_base 3: mod_base = OTHER; note = 2'-O-methylcytidine-3'-phosphate
  modified_base 4: mod_base = OTHER; note = 2'-O-methyladenosine-3'-phosphate
  modified_base 5: mod_base = OTHER; note = 2'-O-methyladenosine-3'-phosphate
  modified_base 6: mod_base = OTHER; note = 2'-O-methylcytidine-3'-phosphate
  modified_base 7: mod_base = OTHER; note = 2'-deoxy-2'-fluoroadenosine-3'-phosphate
  modified_base 8: mod_base = OTHER; note = 2'-O-methyladenosine-3'-phosphate
  modified_base 9: mod_base = OTHER; note = 2'-deoxy-2'-fluorocytidine-3'-phosphate
  modified_base 10: mod_base = OTHER; note = 2'-deoxy-2'-fluoroadenosine-3'-phosphate
  modified_base 11: mod_base = OTHER; note = 2'-deoxy-2'-fluorouridine-3'-phosphate
  modified_base 12: mod_base = OTHER; note = 2'-O-methyladenosine-3'-phosphate
  modified_base 13: mod_base = OTHER; note = 2'-O-methyladenosine-3'-phosphate
  modified_base 14: mod_base = OTHER; note = 2'-O-methylcytidine-3'-phosphate
  modified_base 15: mod_base = OTHER; note = 2'-O-methyladenosine-3'-phosphate
  modified_base 16: mod_base = OTHER; note = 2'-O-methylcytidine-3'-phosphate
  modified_base 17: mod_base = OTHER; note = 2'-O-methyluridine-3'-phosphate
  modified_base 18: mod_base = OTHER; note = 2'-O-methylguanosine-3'-phosphate
  modified_base 19: mod_base = OTHER; note = 2'-O-methylcytidine-3'-phosphate
  modified_base 20: mod_base = OTHER; note = 2'-O-methyladenosine-3'-phosphate
  modified_base 21: mod_base = OTHER; note = 2'-O-methyladenosine
tgcaacaacataacactgcaa

SEQ ID NO: 3121 - RNA, 21 nt, synthetic construct
  source 1..21: mol_type = other RNA
  modified_base 1: mod_base = OTHER; note = 2'-O-methylguanosine-3'-phosphate
  modified_base 2: mod_base = OTHER; note = 2'-O-methylcytidine-3'-phosphate
  modified_base 3: mod_base = OTHER; note = 2'-O-methyladenosine-3'-phosphate
  modified_base 4: mod_base = OTHER; note = 2'-O-methyladenosine-3'-phosphate
  modified_base 5: mod_base = OTHER; note = 2'-O-methylcytidine-3'-phosphate
  modified_base 6: mod_base = OTHER; note = 2'-O-methyladenosine-3'-phosphate
  modified_base 7: mod_base = OTHER; note = 2'-deoxy-2'-fluoroadenosine-3'-phosphate
  modified_base 8: mod_base = OTHER; note = 2'-O-methylcytidine-3'-phosphate
  modified_base 9: mod_base = OTHER; note = 2'-deoxy-2'-fluoroadenosine-3'-phosphate
  modified_base 10: mod_base = OTHER; note = 2'-deoxy-2'-fluorouridine-3'-phosphate
  modified_base 11: mod_base = OTHER; note = 2'-deoxy-2'-fluoroadenosine-3'-phosphate
  modified_base 12: mod_base = OTHER; note = 2'-O-methyladenosine-3'-phosphate
  modified_base 13: mod_base = OTHER; note = 2'-O-methylcytidine-3'-phosphate
  modified_base 14: mod_base = OTHER; note = 2'-O-methyladenosine-3'-phosphate
  modified_base 15: mod_base = OTHER; note = 2'-O-methylcytidine-3'-phosphate
  modified_base 16: mod_base = OTHER; note = 2'-O-methyluridine-3'-phosphate
  modified_base 17: mod_base = OTHER; note = 2'-O-methylguanosine-3'-phosphate
  modified_base 18: mod_base = OTHER; note = 2'-O-methylcytidine-3'-phosphate
  modified_base 19: mod_base = OTHER; note = 2'-O-methyladenosine-3'-phosphate
  modified_base 20: mod_base = OTHER; note = 2'-O-methylcytidine-3'-phosphate
  modified_base 21: mod_base = OTHER; note = 2'-O-methyladenosine
gcaacaacataacactgcaca

SEQ ID NO: 3122 - RNA, 21 nt, synthetic construct
  source 1..21: mol_type = other RNA
  modified_base 1: mod_base = OTHER; note = 2'-O-methylcytidine-3'-phosphate
  modified_base 2: mod_base = OTHER; note = 2'-O-methyladenosine-3'-phosphate
  modified_base 3: mod_base = OTHER; note = 2'-O-methyladenosine-3'-phosphate
  modified_base 4: mod_base = OTHER; note = 2'-O-methylcytidine-3'-phosphate
  modified_base 5: mod_base = OTHER; note = 2'-O-methyladenosine-3'-phosphate
  modified_base 6: mod_base = OTHER; note = 2'-O-methyladenosine-3'-phosphate
  modified_base 7: mod_base = OTHER; note = 2'-deoxy-2'-fluorocytidine-3'-phosphate
  modified_base 8: mod_base = OTHER; note = 2'-O-methyladenosine-3'-phosphate
  modified_base 9: mod_base = OTHER; note = 2'-deoxy-2'-fluorouridine-3'-phosphate
  modified_base 10: mod_base = OTHER; note = 2'-deoxy-2'-fluoroadenosine-3'-phosphate
  modified_base 11: mod_base = OTHER; note = 2'-deoxy-2'-fluoroadenosine-3'-phosphate
  modified_base 12: mod_base = OTHER; note = 2'-O-methylcytidine-3'-phosphate
  modified_base 13: mod_base = OTHER; note = 2'-O-methyladenosine-3'-phosphate
  modified_base 14: mod_base = OTHER; note = 2'-O-methylcytidine-3'-phosphate
  modified_base 15: mod_base = OTHER; note = 2'-O-methyluridine-3'-phosphate
  modified_base 16: mod_base = OTHER; note = 2'-O-methylguanosine-3'-phosphate
  modified_base 17: mod_base = OTHER; note = 2'-O-methylcytidine-3'-phosphate
  modified_base 18: mod_base = OTHER; note = 2'-O-methyladenosine-3'-phosphate
  modified_base 19: mod_base = OTHER; note = 2'-O-methylcytidine-3'-phosphate
  modified_base 20: mod_base = OTHER; note = 2'-O-methylcytidine-3'-phosphate
  modified_base 21: mod_base = OTHER; note = 2'-O-methyladenosine
caacaacataacactgcacca

SEQ ID NO: 3123 - RNA, 21 nt, synthetic construct
  source 1..21: mol_type = other RNA
  modified_base 1: mod_base = OTHER; note = 2'-O-methyladenosine-3'-phosphate
  modified_base 2: mod_base = OTHER; note = 2'-O-methyladenosine-3'-phosphate
  modified_base 3: mod_base = OTHER; note = 2'-O-methylcytidine-3'-phosphate
  modified_base 4: mod_base = OTHER; note = 2'-O-methyladenosine-3'-phosphate
  modified_base 5: mod_base = OTHER; note = 2'-O-methyladenosine-3'-phosphate
  modified_base 6: mod_base = OTHER; note = 2'-O-methylcytidine-3'-phosphate
  modified_base 7: mod_base = OTHER; note = 2'-deoxy-2'-fluoroadenosine-3'-phosphate
  modified_base 8: mod_base = OTHER; note = 2'-O-methyluridine-3'-phosphate
  modified_base 9: mod_base = OTHER; note = 2'-deoxy-2'-fluoroadenosine-3'-phosphate
  modified_base 10: mod_base = OTHER; note = 2'-deoxy-2'-fluoroadenosine-3'-phosphate
  modified_base 11: mod_base = OTHER; note = 2'-deoxy-2'-fluorocytidine-3'-phosphate
  modified_base 12: mod_base = OTHER; note = 2'-O-methyladenosine-3'-phosphate
  modified_base 13: mod_base = OTHER; note = 2'-O-methylcytidine-3'-phosphate
  modified_base 14: mod_base = OTHER; note = 2'-O-methyluridine-3'-phosphate
  modified_base 15: mod_base = OTHER; note = 2'-O-methylguanosine-3'-phosphate
  modified_base 16: mod_base = OTHER; note = 2'-O-methylcytidine-3'-phosphate
  modified_base 17: mod_base = OTHER; note = 2'-O-methyladenosine-3'-phosphate
  modified_base 18: mod_base = OTHER; note = 2'-O-methylcytidine-3'-phosphate
  modified_base 19: mod_base = OTHER; note = 2'-O-methylcytidine-3'-phosphate
  modified_base 20: mod_base = OTHER; note = 2'-O-methyluridine-3'-phosphate
  modified_base 21: mod_base = OTHER; note = 2'-O-methyladenosine
aacaacataacactgcaccta

SEQ ID NO: 3124 - RNA, 21 nt, synthetic construct
  source 1..21: mol_type = other RNA
  modified_base 1: mod_base = OTHER; note = 2'-O-methyladenosine-3'-phosphate
  modified_base 2: mod_base = OTHER; note = 2'-O-methylcytidine-3'-phosphate
  modified_base 3: mod_base = OTHER; note = 2'-O-methyladenosine-3'-phosphate
  modified_base 4: mod_base = OTHER; note = 2'-O-methyladenosine-3'-phosphate
  modified_base 5: mod_base = OTHER; note = 2'-O-methylcytidine-3'-phosphate
  modified_base 6: mod_base = OTHER; note = 2'-O-methyladenosine-3'-phosphate
  modified_base 7: mod_base = OTHER; note = 2'-deoxy-2'-fluorouridine-3'-phosphate
  modified_base 8: mod_base = OTHER; note = 2'-O-methyladenosine-3'-phosphate
  modified_base 9: mod_base = OTHER; note = 2'-deoxy-2'-fluoroadenosine-3'-phosphate
  modified_base 10: mod_base = OTHER; note = 2'-deoxy-2'-fluorocytidine-3'-phosphate
  modified_base 11: mod_base = OTHER; note = 2'-deoxy-2'-fluoroadenosine-3'-phosphate
  modified_base 12: mod_base = OTHER; note = 2'-O-methylcytidine-3'-phosphate
  modified_base 13: mod_base = OTHER; note = 2'-O-methyluridine-3'-phosphate
  modified_base 14: mod_base = OTHER; note = 2'-O-methylguanosine-3'-phosphate
  modified_base 15: mod_base = OTHER; note = 2'-O-methylcytidine-3'-phosphate
  modified_base 16: mod_base = OTHER; note = 2'-O-methyladenosine-3'-phosphate
  modified_base 17: mod_base = OTHER; note = 2'-O-methylcytidine-3'-phosphate
  modified_base 18: mod_base = OTHER; note = 2'-O-methylcytidine-3'-phosphate
  modified_base 19: mod_base = OTHER; note = 2'-O-methyluridine-3'-phosphate
  modified_base 20: mod_base = OTHER; note = 2'-O-methyluridine-3'-phosphate
  modified_base 21: mod_base = OTHER; note = 2'-O-methyladenosine
acaacataacactgcacctta

SEQ ID NO: 3125 - RNA, 21 nt, synthetic construct
  source 1..21: mol_type = other RNA
  modified_base 1: mod_base = OTHER; note = 2'-O-methylcytidine-3'-phosphate
  modified_base 2: mod_base = OTHER; note = 2'-O-methyladenosine-3'-phosphate
  modified_base 3: mod_base = OTHER; note = 2'-O-methyladenosine-3'-phosphate
  modified_base 4: mod_base = OTHER; note = 2'-O-methylcytidine-3'-phosphate
  modified_base 5: mod_base = OTHER; note = 2'-O-methyladenosine-3'-phosphate
  modified_base 6: mod_base = OTHER; note = 2'-O-methyluridine-3'-phosphate
  modified_base 7: mod_base = OTHER; note = 2'-deoxy-2'-fluoroadenosine-3'-phosphate
  modified_base 8: mod_base = OTHER; note = 2'-O-methyladenosine-3'-phosphate
  modified_base 9: mod_base = OTHER; note = 2'-deoxy-2'-fluorocytidine-3'-phosphate
  modified_base 10: mod_base = OTHER; note = 2'-deoxy-2'-fluoroadenosine-3'-phosphate
  modified_base 11: mod_base = OTHER; note = 2'-deoxy-2'-fluorocytidine-3'-phosphate
  modified_base 12: mod_base = OTHER; note = 2'-O-methyluridine-3'-phosphate
  modified_base 13: mod_base = OTHER; note = 2'-O-methylguanosine-3'-phosphate
  modified_base 14: mod_base = OTHER; note = 2'-O-methylcytidine-3'-phosphate
  modified_base 15: mod_base = OTHER; note = 2'-O-methyladenosine-3'-phosphate
  modified_base 16: mod_base = OTHER; note = 2'-O-methylcytidine-3'-phosphate
  modified_base 17: mod_base = OTHER; note = 2'-O-methylcytidine-3'-phosphate
  modified_base 18: mod_base = OTHER; note = 2'-O-methyluridine-3'-phosphate
  modified_base 19: mod_base = OTHER; note = 2'-O-methyluridine-3'-phosphate
  modified_base 20: mod_base = OTHER; note = 2'-O-methylcytidine-3'-phosphate
  modified_base 21: mod_base = OTHER; note = 2'-O-methyladenosine
caacataacactgcaccttca

SEQ ID NO: 3126 - RNA, 21 nt, synthetic construct
  source 1..21: mol_type = other RNA
  modified_base 1: mod_base = OTHER; note = 2'-O-methyladenosine-3'-phosphate
  modified_base 2: mod_base = OTHER; note = 2'-O-methyladenosine-3'-phosphate
  modified_base 3: mod_base = OTHER; note = 2'-O-methylcytidine-3'-phosphate
  modified_base 4: mod_base = OTHER; note = 2'-O-methyladenosine-3'-phosphate
  modified_base 5: mod_base = OTHER; note = 2'-O-methyluridine-3'-phosphate
  modified_base 6: mod_base = OTHER; note = 2'-O-methyladenosine-3'-phosphate
  modified_base 7: mod_base = OTHER; note = 2'-deoxy-2'-fluoroadenosine-3'-phosphate
  modified_base 8: mod_base = OTHER; note = 2'-O-methylcytidine-3'-phosphate
  modified_base 9: mod_base = OTHER; note = 2'-deoxy-2'-fluoroadenosine-3'-phosphate
  modified_base 10: mod_base = OTHER; note = 2'-deoxy-2'-fluorocytidine-3'-phosphate
  modified_base 11: mod_base = OTHER; note = 2'-deoxy-2'-fluorouridine-3'-phosphate
  modified_base 12: mod_base = OTHER; note = 2'-O-methylguanosine-3'-phosphate
  modified_base 13: mod_base = OTHER; note = 2'-O-methylcytidine-3'-phosphate
  modified_base 14: mod_base = OTHER; note = 2'-O-methyladenosine-3'-phosphate
  modified_base 15: mod_base = OTHER; note = 2'-O-methylcytidine-3'-phosphate
  modified_base 16: mod_base = OTHER; note = 2'-O-methylcytidine-3'-phosphate
  modified_base 17: mod_base = OTHER; note = 2'-O-methyluridine-3'-phosphate
  modified_base 18: mod_base = OTHER; note = 2'-O-methyluridine-3'-phosphate
  modified_base 19: mod_base = OTHER; note = 2'-O-methylcytidine-3'-phosphate
  modified_base 20: mod_base = OTHER; note = 2'-O-methylcytidine-3'-phosphate
  modified_base 21: mod_base = OTHER; note = 2'-O-methyladenosine
aacataacactgcaccttcca

SEQ ID NO: 3127 - RNA, 21 nt, synthetic construct
  source 1..21: mol_type = other RNA
  modified_base 1: mod_base = OTHER; note = 2'-O-methyladenosine-3'-phosphate
  modified_base 2: mod_base = OTHER; note = 2'-O-methylcytidine-3'-phosphate
  modified_base 3: mod_base = OTHER; note = 2'-O-methyladenosine-3'-phosphate
  modified_base 4: mod_base = OTHER; note = 2'-O-methyluridine-3'-phosphate
  modified_base 5: mod_base = OTHER; note = 2'-O-methyladenosine-3'-phosphate
  modified_base 6: mod_base = OTHER; note = 2'-O-methyladenosine-3'-phosphate
  modified_base 7: mod_base = OTHER; note = 2'-deoxy-2'-fluorocytidine-3'-phosphate
  modified_base 8: mod_base = OTHER; note = 2'-O-methyladenosine-3'-phosphate
  modified_base 9: mod_base = OTHER; note = 2'-deoxy-2'-fluorocytidine-3'-phosphate
  modified_base 10: mod_base = OTHER; note = 2'-deoxy-2'-fluorouridine-3'-phosphate
  modified_base 11: mod_base = OTHER; note = 2'-deoxy-2'-fluoroguanosine-3'-phosphate
  modified_base 12: mod_base = OTHER; note = 2'-O-methylcytidine-3'-phosphate
  modified_base 13: mod_base = OTHER; note = 2'-O-methyladenosine-3'-phosphate
  modified_base 14: mod_base = OTHER; note = 2'-O-methylcytidine-3'-phosphate
  modified_base 15: mod_base = OTHER; note = 2'-O-methylcytidine-3'-phosphate
  modified_base 16: mod_base = OTHER; note = 2'-O-methyluridine-3'-phosphate
  modified_base 17: mod_base = OTHER; note = 2'-O-methyluridine-3'-phosphate
  modified_base 18: mod_base = OTHER; note = 2'-O-methylcytidine-3'-phosphate
  modified_base 19: mod_base = OTHER; note = 2'-O-methylcytidine-3'-phosphate
  modified_base 20: mod_base = OTHER; note = 2'-O-methyladenosine-3'-phosphate
  modified_base 21: mod_base = OTHER; note = 2'-O-methyladenosine
acataacactgcaccttccaa

SEQ ID NO: 3128 - RNA, 21 nt, synthetic construct
  source 1..21: mol_type = other RNA
  modified_base 1: mod_base = OTHER; note = 2'-O-methylcytidine-3'-phosphate
  modified_base 2: mod_base = OTHER; note = 2'-O-methyladenosine-3'-phosphate
  modified_base 3: mod_base = OTHER; note = 2'-O-methyluridine-3'-phosphate
  modified_base 4: mod_base = OTHER; note = 2'-O-methyladenosine-3'-phosphate
  modified_base 5: mod_base = OTHER; note = 2'-O-methyladenosine-3'-phosphate
  modified_base 6: mod_base = OTHER; note = 2'-O-methylcytidine-3'-phosphate
  modified_base 7: mod_base = OTHER; note = 2'-deoxy-2'-fluoroadenosine-3'-phosphate
  modified_base 8: mod_base = OTHER; note = 2'-O-methylcytidine-3'-phosphate
  modified_base 9: mod_base = OTHER; note = 2'-deoxy-2'-fluorouridine-3'-phosphate
  modified_base 10: mod_base = OTHER; note = 2'-deoxy-2'-fluoroguanosine-3'-phosphate
  modified_base 11: mod_base = OTHER; note = 2'-deoxy-2'-fluorocytidine-3'-phosphate
  modified_base 12: mod_base = OTHER; note = 2'-O-methyladenosine-3'-phosphate
  modified_base 13: mod_base = OTHER; note = 2'-O-methylcytidine-3'-phosphate
  modified_base 14: mod_base = OTHER; note = 2'-O-methylcytidine-3'-phosphate
  modified_base 15: mod_base = OTHER; note = 2'-O-methyluridine-3'-phosphate
  modified_base 16: mod_base = OTHER; note = 2'-O-methyluridine-3'-phosphate
  modified_base 17: mod_base = OTHER; note = 2'-O-methylcytidine-3'-phosphate
  modified_base 18: mod_base = OTHER; note = 2'-O-methylcytidine-3'-phosphate
  modified_base 19: mod_base = OTHER; note = 2'-O-methyladenosine-3'-phosphate
  modified_base 20: mod_base = OTHER; note = 2'-O-methyladenosine-3'-phosphate
  modified_base 21: mod_base = OTHER; note = 2'-O-methyladenosine
cataacactgcaccttccaaa

SEQ ID NO: 3129 - RNA, 21 nt, synthetic construct
  source 1..21: mol_type = other RNA
  modified_base 1: mod_base = OTHER; note = 2'-O-methyladenosine-3'-phosphate
  modified_base 2: mod_base = OTHER; note = 2'-O-methyluridine-3'-phosphate
  modified_base 3: mod_base = OTHER; note = 2'-O-methyladenosine-3'-phosphate
  modified_base 4: mod_base = OTHER; note = 2'-O-methyladenosine-3'-phosphate
  modified_base 5: mod_base = OTHER; note = 2'-O-methylcytidine-3'-phosphate
  modified_base 6: mod_base = OTHER; note = 2'-O-methyladenosine-3'-phosphate
  modified_base 7: mod_base = OTHER; note = 2'-deoxy-2'-fluorocytidine-3'-phosphate
  modified_base 8: mod_base = OTHER; note = 2'-O-methyluridine-3'-phosphate
  modified_base 9: mod_base = OTHER; note = 2'-deoxy-2'-fluoroguanosine-3'-phosphate
  modified_base 10: mod_base = OTHER; note = 2'-deoxy-2'-fluorocytidine-3'-phosphate
  modified_base 11: mod_base = OTHER; note = 2'-deoxy-2'-fluoroadenosine-3'-phosphate
  modified_base 12: mod_base = OTHER; note = 2'-O-methylcytidine-3'-phosphate
  modified_base 13: mod_base = OTHER; note = 2'-O-methylcytidine-3'-phosphate
  modified_base 14: mod_base = OTHER; note = 2'-O-methyluridine-3'-phosphate
  modified_base 15: mod_base = OTHER; note = 2'-O-methyluridine-3'-phosphate
  modified_base 16: mod_base = OTHER; note = 2'-O-methylcytidine-3'-phosphate
  modified_base 17: mod_base = OTHER; note = 2'-O-methylcytidine-3'-phosphate
  modified_base 18: mod_base = OTHER; note = 2'-O-methyladenosine-3'-phosphate
  modified_base 19: mod_base = OTHER; note = 2'-O-methyladenosine-3'-phosphate
  modified_base 20: mod_base = OTHER; note = 2'-O-methylcytidine-3'-phosphate
  modified_base 21: mod_base = OTHER; note = 2'-O-methyladenosine
ataacactgcaccttccaaca

SEQ ID NO: 3130 - RNA, 21 nt, synthetic construct
  source 1..21: mol_type = other RNA
  modified_base 1: mod_base = OTHER; note = 2'-O-methyluridine-3'-phosphate
  modified_base 2: mod_base = OTHER; note = 2'-O-methyladenosine-3'-phosphate
  modified_base 3: mod_base = OTHER; note = 2'-O-methyladenosine-3'-phosphate
  modified_base 4: mod_base = OTHER; note = 2'-O-methylcytidine-3'-phosphate
  modified_base 5: mod_base = OTHER; note = 2'-O-methyladenosine-3'-phosphate
  modified_base 6: mod_base = OTHER; note = 2'-O-methylcytidine-3'-phosphate
  modified_base 7: mod_base = OTHER; note = 2'-deoxy-2'-fluorouridine-3'-phosphate
  modified_base 8: mod_base = OTHER; note = 2'-O-methylguanosine-3'-phosphate
  modified_base 9: mod_base = OTHER; note = 2'-deoxy-2'-fluorocytidine-3'-phosphate
  modified_base 10: mod_base = OTHER; note = 2'-deoxy-2'-fluoroadenosine-3'-phosphate
  modified_base 11: mod_base = OTHER; note = 2'-deoxy-2'-fluorocytidine-3'-phosphate
  modified_base 12: mod_base = OTHER; note = 2'-O-methylcytidine-3'-phosphate
  modified_base 13: mod_base = OTHER; note = 2'-O-methyluridine-3'-phosphate
  modified_base 14: mod_base = OTHER; note = 2'-O-methyluridine-3'-phosphate
  modified_base 15: mod_base = OTHER; note = 2'-O-methylcytidine-3'-phosphate
  modified_base 16: mod_base = OTHER; note = 2'-O-methylcytidine-3'-phosphate
  modified_base 17: mod_base = OTHER; note = 2'-O-methyladenosine-3'-phosphate
  modified_base 18: mod_base = OTHER; note = 2'-O-methyladenosine-3'-phosphate
  modified_base 19: mod_base = OTHER; note = 2'-O-methylcytidine-3'-phosphate
  modified_base 20: mod_base = OTHER; note = 2'-O-methyladenosine-3'-phosphate
  modified_base 21: mod_base = OTHER; note = 2'-O-methyladenosine
taacactgcaccttccaacaa

SEQ ID NO: 3131 - RNA, 21 nt, synthetic construct
  source 1..21: mol_type = other RNA
  modified_base 1: mod_base = OTHER; note = 2'-O-methyladenosine-3'-phosphate
  modified_base 2: mod_base = OTHER; note = 2'-O-methyladenosine-3'-phosphate
  modified_base 3: mod_base = OTHER; note = 2'-O-methylcytidine-3'-phosphate
  modified_base 4: mod_base = OTHER; note = 2'-O-methyladenosine-3'-phosphate
  modified_base 5: mod_base = OTHER; note = 2'-O-methylcytidine-3'-phosphate
  modified_base 6: mod_base = OTHER; note = 2'-O-methyluridine-3'-phosphate
  modified_base 7: mod_base = OTHER; note = 2'-deoxy-2'-fluoroguanosine-3'-phosphate
  modified_base 8: mod_base = OTHER; note = 2'-O-methylcytidine-3'-phosphate
  modified_base 9: mod_base = OTHER; note = 2'-deoxy-2'-fluoroadenosine-3'-phosphate
  modified_base 10: mod_base = OTHER; note = 2'-deoxy-2'-fluorocytidine-3'-phosphate
  modified_base 11: mod_base = OTHER; note = 2'-deoxy-2'-fluorocytidine-3'-phosphate
  modified_base 12: mod_base = OTHER; note = 2'-O-methyluridine-3'-phosphate
  modified_base 13: mod_base = OTHER; note = 2'-O-methyluridine-3'-phosphate
  modified_base 14: mod_base = OTHER; note = 2'-O-methylcytidine-3'-phosphate
  modified_base 15: mod_base = OTHER; note = 2'-O-methylcytidine-3'-phosphate
  modified_base 16: mod_base = OTHER; note = 2'-O-methyladenosine-3'-phosphate
  modified_base 17: mod_base = OTHER; note = 2'-O-methyladenosine-3'-phosphate
  modified_base 18: mod_base = OTHER; note = 2'-O-methylcytidine-3'-phosphate
  modified_base 19: mod_base = OTHER; note = 2'-O-methyladenosine-3'-phosphate
  modified_base 20: mod_base = OTHER; note = 2'-O-methylguanosine-3'-phosphate
  modified_base 21: mod_base = OTHER; note = 2'-O-methyladenosine
aacactgcaccttccaacaga

SEQ ID NO: 3132 - RNA, 21 nt, synthetic construct
  source 1..21: mol_type = other RNA
  modified_base 1: mod_base = OTHER; note = 2'-O-methyladenosine-3'-phosphate
  modified_base 2: mod_base = OTHER; note = 2'-O-methylcytidine-3'-phosphate
  modified_base 3: mod_base = OTHER; note = 2'-O-methyladenosine-3'-phosphate
  modified_base 4: mod_base = OTHER; note = 2'-O-methylcytidine-3'-phosphate
  modified_base 5: mod_base = OTHER; note = 2'-O-methyluridine-3'-phosphate
  modified_base 6: mod_base = OTHER; note = 2'-O-methylguanosine-3'-phosphate
  modified_base 7: mod_base = OTHER; note = 2'-deoxy-2'-fluorocytidine-3'-phosphate
  modified_base 8: mod_base = OTHER; note = 2'-O-methyladenosine-3'-phosphate
  modified_base 9: mod_base = OTHER; note = 2'-deoxy-2'-fluorocytidine-3'-phosphate
  modified_base 10: mod_base = OTHER; note = 2'-deoxy-2'-fluorocytidine-3'-phosphate
  modified_base 11: mod_base = OTHER; note = 2'-deoxy-2'-fluorouridine-3'-phosphate
  modified_base 12: mod_base = OTHER; note = 2'-O-methyluridine-3'-phosphate
  modified_base 13: mod_base = OTHER; note = 2'-O-methylcytidine-3'-phosphate
  modified_base 14: mod_base = OTHER; note = 2'-O-methylcytidine-3'-phosphate
  modified_base 15: mod_base = OTHER; note = 2'-O-methyladenosine-3'-phosphate
  modified_base 16: mod_base = OTHER; note = 2'-O-methyladenosine-3'-phosphate
  modified_base 17: mod_base = OTHER; note = 2'-O-methylcytidine-3'-phosphate
  modified_base 18: mod_base = OTHER; note = 2'-O-methyladenosine-3'-phosphate
  modified_base 19: mod_base = OTHER; note = 2'-O-methylguanosine-3'-phosphate
  modified_base 20: mod_base = OTHER; note = 2'-O-methylcytidine-3'-phosphate
  modified_base 21: mod_base = OTHER; note = 2'-O-methyladenosine
acactgcaccttccaacagca

SEQ ID NO: 3133 - RNA, 21 nt, synthetic construct
  source 1..21: mol_type = other RNA
  modified_base 1: mod_base = OTHER; note = 2'-O-methylcytidine-3'-phosphate
  modified_base 2: mod_base = OTHER; note = 2'-O-methyladenosine-3'-phosphate
  modified_base 3: mod_base = OTHER; note = 2'-O-methylcytidine-3'-phosphate
  modified_base 4: mod_base = OTHER; note = 2'-O-methyluridine-3'-phosphate
  modified_base 5: mod_base = OTHER; note = 2'-O-methylguanosine-3'-phosphate
  modified_base 6: mod_base = OTHER; note = 2'-O-methylcytidine-3'-phosphate
  modified_base 7: mod_base = OTHER; note = 2'-deoxy-2'-fluoroadenosine-3'-phosphate
  modified_base 8: mod_base = OTHER; note = 2'-O-methylcytidine-3'-phosphate
  modified_base 9: mod_base = OTHER; note = 2'-deoxy-2'-fluorocytidine-3'-phosphate
  modified_base 10: mod_base = OTHER; note = 2'-deoxy-2'-fluorouridine-3'-phosphate
  modified_base 11: mod_base = OTHER; note = 2'-deoxy-2'-fluorouridine-3'-phosphate
  modified_base 12: mod_base = OTHER; note = 2'-O-methylcytidine-3'-phosphate
  modified_base 13: mod_base = OTHER; note = 2'-O-methylcytidine-3'-phosphate
  modified_base 14: mod_base = OTHER; note = 2'-O-methyladenosine-3'-phosphate
  modified_base 15: mod_base = OTHER; note = 2'-O-methyladenosine-3'-phosphate
  modified_base 16: mod_base = OTHER; note = 2'-O-methylcytidine-3'-phosphate
  modified_base 17: mod_base = OTHER; note = 2'-O-methyladenosine-3'-phosphate
  modified_base 18: mod_base = OTHER; note = 2'-O-methylguanosine-3'-phosphate
  modified_base 19: mod_base = OTHER; note = 2'-O-methylcytidine-3'-phosphate
  modified_base 20: mod_base = OTHER; note = 2'-O-methyladenosine-3'-phosphate
  modified_base 21: mod_base = OTHER; note = 2'-O-methyladenosine
cactgcaccttccaacagcaa

SEQ ID NO: 3134 - RNA, 21 nt, synthetic construct
  source 1..21: mol_type = other RNA
  modified_base 1: mod_base = OTHER; note = 2'-O-methyladenosine-3'-phosphate
  modified_base 2: mod_base = OTHER; note = 2'-O-methylcytidine-3'-phosphate
  modified_base 3: mod_base = OTHER; note = 2'-O-methyluridine-3'-phosphate
  modified_base 4: mod_base = OTHER; note = 2'-O-methylguanosine-3'-phosphate
  modified_base 5: mod_base = OTHER; note = 2'-O-methylcytidine-3'-phosphate
  modified_base 6: mod_base = OTHER; note = 2'-O-methyladenosine-3'-phosphate
  modified_base 7: mod_base = OTHER; note = 2'-deoxy-2'-fluorocytidine-3'-phosphate
  modified_base 8: mod_base = OTHER; note = 2'-O-methylcytidine-3'-phosphate
  modified_base 9: mod_base = OTHER; note = 2'-deoxy-2'-fluorouridine-3'-phosphate
  modified_base 10: mod_base = OTHER; note = 2'-deoxy-2'-fluorouridine-3'-phosphate
  modified_base 11: mod_base = OTHER; note = 2'-deoxy-2'-fluorocytidine-3'-phosphate
  modified_base 12: mod_base = OTHER; note = 2'-O-methylcytidine-3'-phosphate
  modified_base 13: mod_base = OTHER; note = 2'-O-methyladenosine-3'-phosphate
  modified_base 14: mod_base = OTHER; note = 2'-O-methyladenosine-3'-phosphate
  modified_base 15: mod_base = OTHER; note = 2'-O-methylcytidine-3'-phosphate
  modified_base 16: mod_base = OTHER; note = 2'-O-methyladenosine-3'-phosphate
  modified_base 17: mod_base = OTHER; note = 2'-O-methylguanosine-3'-phosphate
  modified_base 18: mod_base = OTHER; note = 2'-O-methylcytidine-3'-phosphate
  modified_base 19: mod_base = OTHER; note = 2'-O-methyladenosine-3'-phosphate
  modified_base 20: mod_base = OTHER; note = 2'-O-methyluridine-3'-phosphate
  modified_base 21: mod_base = OTHER; note = 2'-O-methyladenosine
actgcaccttccaacagcata

SEQ ID NO: 3135 - RNA, 21 nt, synthetic construct
  source 1..21: mol_type = other RNA
  modified_base 1: mod_base = OTHER; note = 2'-O-methylcytidine-3'-phosphate
  modified_base 2: mod_base = OTHER; note = 2'-O-methyluridine-3'-phosphate
  modified_base 3: mod_base = OTHER; note = 2'-O-methylguanosine-3'-phosphate
  modified_base 4: mod_base = OTHER; note = 2'-O-methylcytidine-3'-phosphate
  modified_base 5: mod_base = OTHER; note = 2'-O-methyladenosine-3'-phosphate
  modified_base 6: mod_base = OTHER; note = 2'-O-methylcytidine-3'-phosphate
  modified_base 7: mod_base = OTHER; note = 2'-deoxy-2'-fluorocytidine-3'-phosphate
  modified_base 8: mod_base = OTHER; note = 2'-O-methyluridine-3'-phosphate
  modified_base 9: mod_base = OTHER; note = 2'-deoxy-2'-fluorouridine-3'-phosphate
  modified_base 10: mod_base = OTHER; note = 2'-deoxy-2'-fluorocytidine-3'-phosphate
  modified_base 11: mod_base = OTHER; note = 2'-deoxy-2'-fluorocytidine-3'-phosphate
  modified_base 12: mod_base = OTHER; note = 2'-O-methyladenosine-3'-phosphate
  modified_base 13: mod_base = OTHER; note = 2'-O-methyladenosine-3'-phosphate
  modified_base 14: mod_base = OTHER; note = 2'-O-methylcytidine-3'-phosphate
  modified_base 15: mod_base = OTHER; note = 2'-O-methyladenosine-3'-phosphate
  modified_base 16: mod_base = OTHER; note = 2'-O-methylguanosine-3'-phosphate
  modified_base 17: mod_base = OTHER; note = 2'-O-methylcytidine-3'-phosphate
  modified_base 18: mod_base = OTHER; note = 2'-O-methyladenosine-3'-phosphate
  modified_base 19: mod_base = OTHER; note = 2'-O-methyluridine-3'-phosphate
  modified_base 20: mod_base = OTHER; note = 2'-O-methylcytidine-3'-phosphate
  modified_base 21: mod_base = OTHER; note = 2'-O-methyladenosine
ctgcaccttccaacagcatca

SEQ ID NO: 3136 - RNA, 21 nt, synthetic construct
  source 1..21: mol_type = other RNA
  modified_base 1: mod_base = OTHER; note = 2'-O-methyluridine-3'-phosphate
  modified_base 2: mod_base = OTHER; note = 2'-O-methylguanosine-3'-phosphate
  modified_base 3: mod_base = OTHER; note = 2'-O-methylcytidine-3'-phosphate
  modified_base 4: mod_base = OTHER; note = 2'-O-methyladenosine-3'-phosphate
  modified_base 5: mod_base = OTHER; note = 2'-O-methylcytidine-3'-phosphate
  modified_base 6: mod_base = OTHER; note = 2'-O-methylcytidine-3'-phosphate
  modified_base 7: mod_base = OTHER; note = 2'-deoxy-2'-fluorouridine-3'-phosphate
  modified_base 8: mod_base = OTHER; note = 2'-O-methyluridine-3'-phosphate
  modified_base 9: mod_base = OTHER; note = 2'-deoxy-2'-fluorocytidine-3'-phosphate
  modified_base 10: mod_base = OTHER; note = 2'-deoxy-2'-fluorocytidine-3'-phosphate
  modified_base 11: mod_base = OTHER; note = 2'-deoxy-2'-fluoroadenosine-3'-phosphate
  modified_base 12: mod_base = OTHER; note = 2'-O-methyladenosine-3'-phosphate
  modified_base 13: mod_base = OTHER; note = 2'-O-methylcytidine-3'-phosphate
  modified_base 14: mod_base = OTHER; note = 2'-O-methyladenosine-3'-phosphate
  modified_base 15: mod_base = OTHER; note = 2'-O-methylguanosine-3'-phosphate
  modified_base 16: mod_base = OTHER; note = 2'-O-methylcytidine-3'-phosphate
  modified_base 17: mod_base = OTHER; note = 2'-O-methyladenosine-3'-phosphate
  modified_base 18: mod_base = OTHER; note = 2'-O-methyluridine-3'-phosphate
  modified_base 19: mod_base = OTHER; note = 2'-O-methylcytidine-3'-phosphate
  modified_base 20: mod_base = OTHER; note = 2'-O-methyladenosine-3'-phosphate
  modified_base 21: mod_base = OTHER; note = 2'-O-methyladenosine
tgcaccttccaacagcatcaa

SEQ ID NO: 3137 - RNA, 21 nt, synthetic construct
  source 1..21: mol_type = other RNA
  modified_base 1: mod_base = OTHER; note = 2'-O-methylguanosine-3'-phosphate
  modified_base 2: mod_base = OTHER; note = 2'-O-methylcytidine-3'-phosphate
  modified_base 3: mod_base = OTHER; note = 2'-O-methyladenosine-3'-phosphate
  modified_base 4: mod_base = OTHER; note = 2'-O-methylcytidine-3'-phosphate
  modified_base 5: mod_base = OTHER; note = 2'-O-methylcytidine-3'-phosphate
  modified_base 6: mod_base = OTHER; note = 2'-O-methyluridine-3'-phosphate
  modified_base 7: mod_base = OTHER; note = 2'-deoxy-2'-fluorouridine-3'-phosphate
  modified_base 8: mod_base = OTHER; note = 2'-O-methylcytidine-3'-phosphate
  modified_base 9: mod_base = OTHER; note = 2'-deoxy-2'-fluorocytidine-3'-phosphate
  modified_base 10: mod_base = OTHER; note = 2'-deoxy-2'-fluoroadenosine-3'-phosphate
  modified_base 11: mod_base = OTHER; note = 2'-deoxy-2'-fluoroadenosine-3'-phosphate
  modified_base 12: mod_base = OTHER; note = 2'-O-methylcytidine-3'-phosphate
  modified_base 13: mod_base = OTHER; note = 2'-O-methyladenosine-3'-phosphate
  modified_base 14: mod_base = OTHER; note = 2'-O-methylguanosine-3'-phosphate
  modified_base 15: mod_base = OTHER; note = 2'-O-methylcytidine-3'-phosphate
  modified_base 16: mod_base = OTHER; note = 2'-O-methyladenosine-3'-phosphate
  modified_base 17: mod_base = OTHER; note = 2'-O-methyluridine-3'-phosphate
  modified_base 18: mod_base = OTHER; note = 2'-O-methylcytidine-3'-phosphate
  modified_base 19: mod_base = OTHER; note = 2'-O-methyladenosine-3'-phosphate
  modified_base 20: mod_base = OTHER; note = 2'-O-methylcytidine-3'-phosphate
  modified_base 21: mod_base = OTHER; note = 2'-O-methyladenosine
gcaccttccaacagcatcaca

SEQ ID NO: 3138 - RNA, 21 nt, synthetic construct
  source 1..21: mol_type = other RNA
  modified_base 1: mod_base = OTHER; note = 2'-O-methylcytidine-3'-phosphate
  modified_base 2: mod_base = OTHER; note = 2'-O-methyladenosine-3'-phosphate
  modified_base 3: mod_base = OTHER; note = 2'-O-methylcytidine-3'-phosphate
  modified_base 4: mod_base = OTHER; note = 2'-O-methylcytidine-3'-phosphate
  modified_base 5: mod_base = OTHER; note = 2'-O-methyluridine-3'-phosphate
  modified_base 6: mod_base = OTHER; note = 2'-O-methyluridine-3'-phosphate
  modified_base 7: mod_base = OTHER; note = 2'-deoxy-2'-fluorocytidine-3'-phosphate
  modified_base 8: mod_base = OTHER; note = 2'-O-methylcytidine-3'-phosphate
  modified_base 9: mod_base = OTHER; note = 2'-deoxy-2'-fluoroadenosine-3'-phosphate
  modified_base 10: mod_base = OTHER; note = 2'-deoxy-2'-fluoroadenosine-3'-phosphate
  modified_base 11: mod_base = OTHER; note = 2'-deoxy-2'-fluorocytidine-3'-phosphate
  modified_base 12: mod_base = OTHER; note = 2'-O-methyladenosine-3'-phosphate
  modified_base 13: mod_base = OTHER; note = 2'-O-methylguanosine-3'-phosphate
  modified_base 14: mod_base = OTHER; note = 2'-O-methylcytidine-3'-phosphate
  modified_base 15: mod_base = OTHER; note = 2'-O-methyladenosine-3'-phosphate
  modified_base 16: mod_base = OTHER; note = 2'-O-methyluridine-3'-phosphate
  modified_base 17: mod_base = OTHER; note = 2'-O-methylcytidine-3'-phosphate
  modified_base 18: mod_base = OTHER; note = 2'-O-methyladenosine-3'-phosphate
  modified_base 19: mod_base = OTHER; note = 2'-O-methylcytidine-3'-phosphate
  modified_base 20: mod_base = OTHER; note = 2'-O-methylcytidine-3'-phosphate
  modified_base 21: mod_base = OTHER; note = 2'-O-methyladenosine
caccttccaacagcatcacca

SEQ ID NO: 3139 - RNA, 21 nt, synthetic construct
  source 1..21: mol_type = other RNA
  modified_base 1: mod_base = OTHER; note = 2'-O-methyladenosine-3'-phosphate
  modified_base 2: mod_base = OTHER; note = 2'-O-methylcytidine-3'-phosphate
  modified_base 3: mod_base = OTHER; note = 2'-O-methylcytidine-3'-phosphate
  modified_base 4: mod_base = OTHER; note = 2'-O-methyluridine-3'-phosphate
  modified_base 5: mod_base = OTHER; note = 2'-O-methyluridine-3'-phosphate
  modified_base 6: mod_base = OTHER; note = 2'-O-methylcytidine-3'-phosphate
  modified_base 7: mod_base = OTHER; note = 2'-deoxy-2'-fluorocytidine-3'-phosphate
  modified_base 8: mod_base = OTHER; note = 2'-O-methyladenosine-3'-phosphate
  modified_base 9: mod_base = OTHER; note = 2'-deoxy-2'-fluoroadenosine-3'-phosphate
  modified_base 10: mod_base = OTHER; note = 2'-deoxy-2'-fluorocytidine-3'-phosphate
  modified_base 11: mod_base = OTHER; note = 2'-deoxy-2'-fluoroadenosine-3'-phosphate
  modified_base 12: mod_base = OTHER; note = 2'-O-methylguanosine-3'-phosphate
  modified_base 13: mod_base = OTHER; note = 2'-O-methylcytidine-3'-phosphate
  modified_base 14: mod_base = OTHER; note = 2'-O-methyladenosine-3'-phosphate
  modified_base 15: mod_base = OTHER; note = 2'-O-methyluridine-3'-phosphate
  modified_base 16: mod_base = OTHER; note = 2'-O-methylcytidine-3'-phosphate
  modified_base 17: mod_base = OTHER; note = 2'-O-methyladenosine-3'-phosphate
  modified_base 18: mod_base = OTHER; note = 2'-O-methylcytidine-3'-phosphate
  modified_base 19: mod_base = OTHER; note = 2'-O-methylcytidine-3'-phosphate
  modified_base 20: mod_base = OTHER; note = 2'-O-methyladenosine-3'-phosphate
  modified_base 21: mod_base = OTHER; note = 2'-O-methyladenosine
accttccaacagcatcaccaa

SEQ ID NO: 3140 - RNA, 21 nt, synthetic construct
  source 1..21: mol_type = other RNA
  modified_base 1: mod_base = OTHER; note = 2'-O-methylcytidine-3'-phosphate
  modified_base 2: mod_base = OTHER; note = 2'-O-methylcytidine-3'-phosphate
  modified_base 3: mod_base = OTHER; note = 2'-O-methyluridine-3'-phosphate
  modified_base 4: mod_base = OTHER; note = 2'-O-methyluridine-3'-phosphate
  modified_base 5: mod_base = OTHER; note = 2'-O-methylcytidine-3'-phosphate
  modified_base 6: mod_base = OTHER; note = 2'-O-methylcytidine-3'-phosphate
  modified_base 7: mod_base = OTHER; note = 2'-deoxy-2'-fluoroadenosine-3'-phosphate
  modified_base 8: mod_base = OTHER; note = 2'-O-methyladenosine-3'-phosphate
  modified_base 9: mod_base = OTHER; note = 2'-deoxy-2'-fluorocytidine-3'-phosphate
  modified_base 10: mod_base = OTHER; note = 2'-deoxy-2'-fluoroadenosine-3'-phosphate
  modified_base 11: mod_base = OTHER; note = 2'-deoxy-2'-fluoroguanosine-3'-phosphate
  modified_base 12: mod_base = OTHER; note = 2'-O-methylcytidine-3'-phosphate
  modified_base 13: mod_base = OTHER; note = 2'-O-methyladenosine-3'-phosphate
  modified_base 14: mod_base = OTHER; note = 2'-O-methyluridine-3'-phosphate
  modified_base 15: mod_base = OTHER; note = 2'-O-methylcytidine-3'-phosphate
  modified_base 16: mod_base = OTHER; note = 2'-O-methyladenosine-3'-phosphate
  modified_base 17: mod_base = OTHER; note = 2'-O-methylcytidine-3'-phosphate
  modified_base 18: mod_base = OTHER; note = 2'-O-methylcytidine-3'-phosphate
  modified_base 19: mod_base = OTHER; note = 2'-O-methyladenosine-3'-phosphate
  modified_base 20: mod_base = OTHER; note = 2'-O-methyladenosine-3'-phosphate
  modified_base 21: mod_base = OTHER; note = 2'-O-methyladenosine
ccttccaacagcatcaccaaa

SEQ ID NO: 3141 - RNA, 21 nt, synthetic construct
  source 1..21: mol_type = other RNA
  modified_base 1: mod_base = OTHER; note = 2'-O-methylcytidine-3'-phosphate
  modified_base 2: mod_base = OTHER; note = 2'-O-methyluridine-3'-phosphate
  modified_base 3: mod_base = OTHER; note = 2'-O-methyluridine-3'-phosphate
  modified_base 4: mod_base = OTHER; note = 2'-O-methylcytidine-3'-phosphate
  modified_base 5: mod_base = OTHER; note = 2'-O-methylcytidine-3'-phosphate
  modified_base 6: mod_base = OTHER; note = 2'-O-methyladenosine-3'-phosphate
  modified_base 7: mod_base = OTHER; note = 2'-deoxy-2'-fluoroadenosine-3'-phosphate
  modified_base 8: mod_base = OTHER; note = 2'-O-methylcytidine-3'-phosphate
  modified_base 9: mod_base = OTHER; note = 2'-deoxy-2'-fluoroadenosine-3'-phosphate
  modified_base 10: mod_base = OTHER; note = 2'-deoxy-2'-fluoroguanosine-3'-phosphate
  modified_base 11: mod_base = OTHER; note = 2'-deoxy-2'-fluorocytidine-3'-phosphate
  modified_base 12: mod_base = OTHER; note = 2'-O-methyladenosine-3'-phosphate
  modified_base 13: mod_base = OTHER; note = 2'-O-methyluridine-3'-phosphate
  modified_base 14: mod_base = OTHER; note = 2'-O-methylcytidine-3'-phosphate
  modified_base 15: mod_base = OTHER; note = 2'-O-methyladenosine-3'-phosphate
  modified_base 16: mod_base = OTHER; note = 2'-O-methylcytidine-3'-phosphate
  modified_base 17: mod_base = OTHER; note = 2'-O-methylcytidine-3'-phosphate
  modified_base 18: mod_base = OTHER; note = 2'-O-methyladenosine-3'-phosphate
  modified_base 19: mod_base = OTHER; note = 2'-O-methyladenosine-3'-phosphate
  modified_base 20: mod_base = OTHER; note = 2'-O-methyladenosine-3'-phosphate
  modified_base 21: mod_base = OTHER; note = 2'-O-methyladenosine
cttccaacagcatcaccaaaa

SEQ ID NO: 3142 - RNA, 21 nt, synthetic construct
  source 1..21: mol_type = other RNA
  modified_base 1: mod_base = OTHER; note = 2'-O-methyluridine-3'-phosphate
  modified_base 2: mod_base = OTHER; note = 2'-O-methyluridine-3'-phosphate
  modified_base 3: mod_base = OTHER; note = 2'-O-methylcytidine-3'-phosphate
  modified_base 4: mod_base = OTHER; note = 2'-O-methylcytidine-3'-phosphate
  modified_base 5: mod_base = OTHER; note = 2'-O-methyladenosine-3'-phosphate
  modified_base 6: mod_base = OTHER; note = 2'-O-methyladenosine-3'-phosphate
  modified_base 7: mod_base = OTHER; note = 2'-deoxy-2'-fluorocytidine-3'-phosphate
  modified_base 8: mod_base = OTHER; note = 2'-O-methyladenosine-3'-phosphate
  modified_base 9: mod_base = OTHER; note = 2'-deoxy-2'-fluoroguanosine-3'-phosphate
  modified_base 10: mod_base = OTHER; note = 2'-deoxy-2'-fluorocytidine-3'-phosphate
  modified_base 11: mod_base = OTHER; note = 2'-deoxy-2'-fluoroadenosine-3'-phosphate
  modified_base 12: mod_base = OTHER; note = 2'-O-methyluridine-3'-phosphate
  modified_base 13: mod_base = OTHER; note = 2'-O-methylcytidine-3'-phosphate
  modified_base 14: mod_base = OTHER; note = 2'-O-methyladenosine-3'-phosphate
  modified_base 15: mod_base = OTHER; note = 2'-O-methylcytidine-3'-phosphate
  modified_base 16: mod_base = OTHER; note = 2'-O-methylcytidine-3'-phosphate
  modified_base 17: mod_base = OTHER; note = 2'-O-methyladenosine-3'-phosphate
  modified_base 18: mod_base = OTHER; note = 2'-O-methyladenosine-3'-phosphate
  modified_base 19: mod_base = OTHER; note = 2'-O-methyladenosine-3'-phosphate
  modified_base 20: mod_base = OTHER; note = 2'-O-methyluridine-3'-phosphate
  modified_base 21: mod_base = OTHER; note = 2'-O-methyladenosine
ttccaacagcatcaccaaata

SEQ ID NO: 3143 - RNA, 21 nt, synthetic construct
  source 1..21: mol_type = other RNA
  modified_base 1: mod_base = OTHER; note = 2'-O-methyluridine-3'-phosphate
  modified_base 2: mod_base = OTHER; note = 2'-O-methylcytidine-3'-phosphate
  modified_base 3: mod_base = OTHER; note = 2'-O-methylcytidine-3'-phosphate
  modified_base 4: mod_base = OTHER; note = 2'-O-methyladenosine-3'-phosphate
  modified_base 5: mod_base = OTHER; note = 2'-O-methyladenosine-3'-phosphate
  modified_base 6: mod_base = OTHER; note = 2'-O-methylcytidine-3'-phosphate
  modified_base 7: mod_base = OTHER; note = 2'-deoxy-2'-fluoroadenosine-3'-phosphate
  modified_base 8: mod_base = OTHER; note = 2'-O-methylguanosine-3'-phosphate
  modified_base 9: mod_base = OTHER; note = 2'-deoxy-2'-fluorocytidine-3'-phosphate
  modified_base 10: mod_base = OTHER; note = 2'-deoxy-2'-fluoroadenosine-3'-phosphate
  modified_base 11: mod_base = OTHER; note = 2'-deoxy-2'-fluorouridine-3'-phosphate
  modified_base 12: mod_base = OTHER; note = 2'-O-methylcytidine-3'-phosphate
  modified_base 13: mod_base = OTHER; note = 2'-O-methyladenosine-3'-phosphate
  modified_base 14: mod_base = OTHER; note = 2'-O-methylcytidine-3'-phosphate
  modified_base 15: mod_base = OTHER; note = 2'-O-methylcytidine-3'-phosphate
  modified_base 16: mod_base = OTHER; note = 2'-O-methyladenosine-3'-phosphate
  modified_base 17: mod_base = OTHER; note = 2'-O-methyladenosine-3'-phosphate
  modified_base 18: mod_base = OTHER; note = 2'-O-methyladenosine-3'-phosphate
  modified_base 19: mod_base = OTHER; note = 2'-O-methyluridine-3'-phosphate
  modified_base 20: mod_base = OTHER; note = 2'-O-methylguanosine-3'-phosphate
  modified_base 21: mod_base = OTHER; note = 2'-O-methyladenosine
tccaacagcatcaccaaatga

SEQ ID NO: 3144 - RNA, 21 nt, synthetic construct
  source 1..21: mol_type = other RNA
  modified_base 1: mod_base = OTHER; note = 2'-O-methylcytidine-3'-phosphate
  modified_base 2: mod_base = OTHER; note = 2'-O-methylcytidine-3'-phosphate
  modified_base 3: mod_base = OTHER; note = 2'-O-methyladenosine-3'-phosphate
  modified_base 4: mod_base = OTHER; note = 2'-O-methyladenosine-3'-phosphate
  modified_base 5: mod_base = OTHER; note = 2'-O-methylcytidine-3'-phosphate
  modified_base 6: mod_base = OTHER; note = 2'-O-methyladenosine-3'-phosphate
  modified_base 7: mod_base = OTHER; note = 2'-deoxy-2'-fluoroguanosine-3'-phosphate
  modified_base 8: mod_base = OTHER; note = 2'-O-methylcytidine-3'-phosphate
  modified_base 9: mod_base = OTHER; note = 2'-deoxy-2'-fluoroadenosine-3'-phosphate
  modified_base 10: mod_base = OTHER; note = 2'-deoxy-2'-fluorouridine-3'-phosphate
  modified_base 11: mod_base = OTHER; note = 2'-deoxy-2'-fluorocytidine-3'-phosphate
  modified_base 12: mod_base = OTHER; note = 2'-O-methyladenosine-3'-phosphate
  modified_base 13: mod_base = OTHER; note = 2'-O-methylcytidine-3'-phosphate
  modified_base 14: mod_base = OTHER; note = 2'-O-methylcytidine-3'-phosphate
  modified_base 15: mod_base = OTHER; note = 2'-O-methyladenosine-3'-phosphate
  modified_base 16: mod_base = OTHER; note = 2'-O-methyladenosine-3'-phosphate
  modified_base 17: mod_base = OTHER; note = 2'-O-methyladenosine-3'-phosphate
  modified_base 18: mod_base = OTHER; note = 2'-O-methyluridine-3'-phosphate
  modified_base 19: mod_base = OTHER; note = 2'-O-methylguanosine-3'-phosphate
  modified_base 20: mod_base = OTHER; note = 2'-O-methylcytidine-3'-phosphate
  modified_base 21: mod_base = OTHER; note = 2'-O-methyladenosine
ccaacagcatcaccaaatgca

SEQ ID NO: 3145 - RNA, 21 nt, synthetic construct
  source 1..21: mol_type = other RNA
  modified_base 1: mod_base = OTHER; note = 2'-O-methylcytidine-3'-phosphate
  modified_base 2: mod_base = OTHER; note = 2'-O-methyladenosine-3'-phosphate
  modified_base 3: mod_base = OTHER; note = 2'-O-methyladenosine-3'-phosphate
  modified_base 4: mod_base = OTHER; note = 2'-O-methylcytidine-3'-phosphate
  modified_base 5: mod_base = OTHER; note = 2'-O-methyladenosine-3'-phosphate
  modified_base 6: mod_base = OTHER; note = 2'-O-methylguanosine-3'-phosphate
  modified_base 7: mod_base = OTHER; note = 2'-deoxy-2'-fluorocytidine-3'-phosphate
  modified_base 8: mod_base = OTHER; note = 2'-O-methyladenosine-3'-phosphate
  modified_base 9: mod_base = OTHER; note = 2'-deoxy-2'-fluorouridine-3'-phosphate
  modified_base 10: mod_base = OTHER; note = 2'-deoxy-2'-fluorocytidine-3'-phosphate
  modified_base 11: mod_base = OTHER; note = 2'-deoxy-2'-fluoroadenosine-3'-phosphate
  modified_base 12: mod_base = OTHER; note = 2'-O-methylcytidine-3'-phosphate
  modified_base 13: mod_base = OTHER; note = 2'-O-methylcytidine-3'-phosphate
  modified_base 14: mod_base = OTHER; note = 2'-O-methyladenosine-3'-phosphate
  modified_base 15: mod_base = OTHER; note = 2'-O-methyladenosine-3'-phosphate
  modified_base 16: mod_base = OTHER; note = 2'-O-methyladenosine-3'-phosphate
  modified_base 17: mod_base = OTHER; note = 2'-O-methyluridine-3'-phosphate
  modified_base 18: mod_base = OTHER; note = 2'-O-methylguanosine-3'-phosphate
  modified_base 19: mod_base = OTHER; note = 2'-O-methylcytidine-3'-phosphate
  modified_base 20: mod_base = OTHER; note = 2'-O-methylcytidine-3'-phosphate
  modified_base 21: mod_base = OTHER; note = 2'-O-methyladenosine
caacagcatcaccaaatgcca

SEQ ID NO: 3146 - RNA, 21 nt, synthetic construct
  source 1..21: mol_type = other RNA
  modified_base 1: mod_base = OTHER; note = 2'-O-methylguanosine-3'-phosphate
  modified_base 2: mod_base = OTHER; note = 2'-O-methylguanosine-3'-phosphate
  modified_base 3: mod_base = OTHER; note = 2'-O-methyladenosine-3'-phosphate
  modified_base 4: mod_base = OTHER; note = 2'-O-methylguanosine-3'-phosphate
  modified_base 5: mod_base = OTHER; note = 2'-O-methylcytidine-3'-phosphate
  modified_base 6: mod_base = OTHER; note = 2'-O-methyluridine-3'-phosphate
  modified_base 7: mod_base = OTHER; note = 2'-deoxy-2'-fluoroguanosine-3'-phosphate
  modified_base 8: mod_base = OTHER; note = 2'-O-methylguanosine-3'-phosphate
  modified_base 9: mod_base = OTHER; note = 2'-deoxy-2'-fluorocytidine-3'-phosphate
  modified_base 10: mod_base = OTHER; note = 2'-deoxy-2'-fluorocytidine-3'-phosphate
  modified_base 11: mod_base = OTHER; note = 2'-deoxy-2'-fluoroadenosine-3'-phosphate
  modified_base 12: mod_base = OTHER; note = 2'-O-methyluridine-3'-phosphate
  modified_base 13: mod_base = OTHER; note = 2'-O-methylcytidine-3'-phosphate
  modified_base 14: mod_base = OTHER; note = 2'-O-methyladenosine-3'-phosphate
  modified_base 15: mod_base = OTHER; note = 2'-O-methyluridine-3'-phosphate
  modified_base 16: mod_base = OTHER; note = 2'-O-methyluridine-3'-phosphate
  modified_base 17: mod_base = OTHER; note = 2'-O-methyladenosine-3'-phosphate
  modified_base 18: mod_base = OTHER; note = 2'-O-methyluridine-3'-phosphate
  modified_base 19: mod_base = OTHER; note = 2'-O-methyluridine-3'-phosphate
  modified_base 20: mod_base = OTHER; note = 2'-O-methyladenosine-3'-phosphate
  modified_base 21: mod_base = OTHER; note = 2'-O-methyladenosine
ggagctggccatcattattaa

SEQ ID NO: 3147 - RNA, 21 nt, synthetic construct
  source 1..21: mol_type = other RNA
  modified_base 1: mod_base = OTHER; note = 2'-O-methylguanosine-3'-phosphate
  modified_base 2: mod_base = OTHER; note = 2'-O-methylcytidine-3'-phosphate
  modified_base 3: mod_base = OTHER; note = 2'-O-methyluridine-3'-phosphate
  modified_base 4: mod_base = OTHER; note = 2'-O-methylguanosine-3'-phosphate
  modified_base 5: mod_base = OTHER; note = 2'-O-methylguanosine-3'-phosphate
  modified_base 6: mod_base = OTHER; note = 2'-O-methylcytidine-3'-phosphate
  modified_base 7: mod_base = OTHER; note = 2'-deoxy-2'-fluorocytidine-3'-phosphate
  modified_base 8: mod_base = OTHER; note = 2'-O-methyladenosine-3'-phosphate
  modified_base 9: mod_base = OTHER; note = 2'-deoxy-2'-fluorouridine-3'-phosphate
  modified_base 10: mod_base = OTHER; note = 2'-deoxy-2'-fluorocytidine-3'-phosphate
  modified_base 11: mod_base = OTHER; note = 2'-deoxy-2'-fluoroadenosine-3'-phosphate
  modified_base 12: mod_base = OTHER; note = 2'-O-methyluridine-3'-phosphate
  modified_base 13: mod_base = OTHER; note = 2'-O-methyluridine-3'-phosphate
  modified_base 14: mod_base = OTHER; note = 2'-O-methyladenosine-3'-phosphate
  modified_base 15: mod_base = OTHER; note = 2'-O-methyluridine-3'-phosphate
  modified_base 16: mod_base = OTHER; note = 2'-O-methyluridine-3'-phosphate
  modified_base 17: mod_base = OTHER; note = 2'-O-methyladenosine-3'-phosphate
  modified_base 18: mod_base = OTHER; note = 2'-O-methylcytidine-3'-phosphate
  modified_base 19: mod_base = OTHER; note = 2'-O-methyluridine-3'-phosphate
  modified_base 20: mod_base = OTHER; note = 2'-O-methylguanosine-3'-phosphate
  modified_base 21: mod_base = OTHER; note = 2'-O-methyladenosine
gctggccatcattattactga

SEQ ID NO: 3148 - RNA, 21 nt, synthetic construct
  source 1..21: mol_type = other RNA
  modified_base 1: mod_base = OTHER; note = 2'-O-methylcytidine-3'-phosphate
  modified_base 2: mod_base = OTHER; note = 2'-O-methyluridine-3'-phosphate
  modified_base 3: mod_base = OTHER; note = 2'-O-methylguanosine-3'-phosphate
  modified_base 4: mod_base = OTHER; note = 2'-O-methylguanosine-3'-phosphate
  modified_base 5: mod_base = OTHER; note = 2'-O-methylcytidine-3'-phosphate
  modified_base 6: mod_base = OTHER; note = 2'-O-methylcytidine-3'-phosphate
  modified_base 7: mod_base = OTHER; note = 2'-deoxy-2'-fluoroadenosine-3'-phosphate
  modified_base 8: mod_base = OTHER; note = 2'-O-methyluridine-3'-phosphate
  modified_base 9: mod_base = OTHER; note = 2'-deoxy-2'-fluorocytidine-3'-phosphate
  modified_base 10: mod_base = OTHER; note = 2'-deoxy-2'-fluoroadenosine-3'-phosphate
  modified_base 11: mod_base = OTHER; note = 2'-deoxy-2'-fluorouridine-3'-phosphate
  modified_base 12: mod_base = OTHER; note = 2'-O-methyluridine-3'-phosphate
  modified_base 13: mod_base = OTHER; note = 2'-O-methyladenosine-3'-phosphate
  modified_base 14: mod_base = OTHER; note = 2'-O-methyluridine-3'-phosphate
  modified_base 15: mod_base = OTHER; note = 2'-O-methyluridine-3'-phosphate
  modified_base 16: mod_base = OTHER; note = 2'-O-methyladenosine-3'-phosphate
  modified_base 17: mod_base = OTHER; note = 2'-O-methylcytidine-3'-phosphate
  modified_base 18: mod_base = OTHER; note = 2'-O-methyluridine-3'-phosphate
  modified_base 19: mod_base = OTHER; note = 2'-O-methylguanosine-3'-phosphate
  modified_base 20: mod_base = OTHER; note = 2'-O-methyluridine-3'-phosphate
  modified_base 21: mod_base = OTHER; note = 2'-O-methyladenosine
ctggccatcattattactgta

SEQ ID NO: 3149 - RNA, 21 nt, synthetic construct
  source 1..21: mol_type = other RNA
  modified_base 1: mod_base = OTHER; note = 2'-O-methylguanosine-3'-phosphate
  modified_base 2: mod_base = OTHER; note = 2'-O-methylguanosine-3'-phosphate
  modified_base 3: mod_base = OTHER; note = 2'-O-methylcytidine-3'-phosphate
  modified_base 4: mod_base = OTHER; note = 2'-O-methylcytidine-3'-phosphate
  modified_base 5: mod_base = OTHER; note = 2'-O-methyladenosine-3'-phosphate
  modified_base 6: mod_base = OTHER; note = 2'-O-methyluridine-3'-phosphate
  modified_base 7: mod_base = OTHER; note = 2'-deoxy-2'-fluorocytidine-3'-phosphate
  modified_base 8: mod_base = OTHER; note = 2'-O-methyladenosine-3'-phosphate
  modified_base 9: mod_base = OTHER; note = 2'-deoxy-2'-fluorouridine-3'-phosphate
  modified_base 10: mod_base = OTHER; note = 2'-deoxy-2'-fluorouridine-3'-phosphate
  modified_base 11: mod_base = OTHER; note = 2'-deoxy-2'-fluoroadenosine-3'-phosphate
  modified_base 12: mod_base = OTHER; note = 2'-O-methyluridine-3'-phosphate
  modified_base 13: mod_base = OTHER; note = 2'-O-methyluridine-3'-phosphate
  modified_base 14: mod_base = OTHER; note = 2'-O-methyladenosine-3'-phosphate
  modified_base 15: mod_base = OTHER; note = 2'-O-methylcytidine-3'-phosphate
  modified_base 16: mod_base = OTHER; note = 2'-O-methyluridine-3'-phosphate
  modified_base 17: mod_base = OTHER; note = 2'-O-methylguanosine-3'-phosphate
  modified_base 18: mod_base = OTHER; note = 2'-O-methyluridine-3'-phosphate
  modified_base 19: mod_base = OTHER; note = 2'-O-methylguanosine-3'-phosphate
  modified_base 20: mod_base = OTHER; note = 2'-O-methylcytidine-3'-phosphate
  modified_base 21: mod_base = OTHER; note = 2'-O-methyladenosine
ggccatcattattactgtgca

SEQ ID NO: 3150 - RNA, 21 nt, synthetic construct
  source 1..21: mol_type = other RNA
  modified_base 1: mod_base = OTHER; note = 2'-O-methylcytidine-3'-phosphate
  modified_base 2: mod_base = OTHER; note = 2'-O-methyladenosine-3'-phosphate
  modified_base 3: mod_base = OTHER; note = 2'-O-methyluridine-3'-phosphate
  modified_base 4: mod_base = OTHER; note = 2'-O-methyluridine-3'-phosphate
  modified_base 5: mod_base = OTHER; note = 2'-O-methyladenosine-3'-phosphate
  modified_base 6: mod_base = OTHER; note = 2'-O-methyluridine-3'-phosphate
  modified_base 7: mod_base = OTHER; note = 2'-deoxy-2'-fluorouridine-3'-phosphate
  modified_base 8: mod_base = OTHER; note = 2'-O-methyladenosine-3'-phosphate
  modified_base 9: mod_base = OTHER; note = 2'-deoxy-2'-fluorocytidine-3'-phosphate
  modified_base 10: mod_base = OTHER; note = 2'-deoxy-2'-fluorouridine-3'-phosphate
  modified_base 11: mod_base = OTHER; note = 2'-deoxy-2'-fluoroguanosine-3'-phosphate
  modified_base 12: mod_base = OTHER; note = 2'-O-methyluridine-3'-phosphate
  modified_base 13: mod_base = OTHER; note = 2'-O-methylguanosine-3'-phosphate
  modified_base 14: mod_base = OTHER; note = 2'-O-methylcytidine-3'-phosphate
  modified_base 15: mod_base = OTHER; note = 2'-O-methylcytidine-3'-phosphate
  modified_base 16: mod_base = OTHER; note = 2'-O-methyluridine-3'-phosphate
  modified_base 17: mod_base = OTHER; note = 2'-O-methylguanosine-3'-phosphate
  modified_base 18: mod_base = OTHER; note = 2'-O-methyluridine-3'-phosphate
  modified_base 19: mod_base = OTHER; note = 2'-O-methyluridine-3'-phosphate
  modified_base 20: mod_base = OTHER; note = 2'-O-methyluridine-3'-phosphate
  modified_base 21: mod_base = OTHER; note = 2'-O-methyladenosine
cattattactgtgcctgttta

SEQ ID NO: 3151 - RNA, 21 nt, synthetic construct
  source 1..21: mol_type = other RNA
  modified_base 1: mod_base = OTHER; note = 2'-O-methyladenosine-3'-phosphate
  modified_base 2: mod_base = OTHER; note = 2'-O-methyluridine-3'-phosphate
  modified_base 3: mod_base = OTHER; note = 2'-O-methyluridine-3'-phosphate
  modified_base 4: mod_base = OTHER; note = 2'-O-methyladenosine-3'-phosphate
  modified_base 5: mod_base = OTHER; note = 2'-O-methylcytidine-3'-phosphate
  modified_base 6: mod_base = OTHER; note = 2'-O-methyluridine-3'-phosphate
  modified_base 7: mod_base = OTHER; note = 2'-deoxy-2'-fluoroguanosine-3'-phosphate
  modified_base 8: mod_base = OTHER; note = 2'-O-methyluridine-3'-phosphate
  modified_base 9: mod_base = OTHER; note = 2'-deoxy-2'-fluoroguanosine-3'-phosphate
  modified_base 10: mod_base = OTHER; note = 2'-deoxy-2'-fluorocytidine-3'-phosphate
  modified_base 11: mod_base = OTHER; note = 2'-deoxy-2'-fluorocytidine-3'-phosphate
  modified_base 12: mod_base = OTHER; note = 2'-O-methyluridine-3'-phosphate
  modified_base 13: mod_base = OTHER; note = 2'-O-methylguanosine-3'-phosphate
  modified_base 14: mod_base = OTHER; note = 2'-O-methyluridine-3'-phosphate
  modified_base 15: mod_base = OTHER; note = 2'-O-methyluridine-3'-phosphate
  modified_base 16: mod_base = OTHER; note = 2'-O-methyluridine-3'-phosphate
  modified_base 17: mod_base = OTHER; note = 2'-O-methylguanosine-3'-phosphate
  modified_base 18: mod_base = OTHER; note = 2'-O-methylcytidine-3'-phosphate
  modified_base 19: mod_base = OTHER; note = 2'-O-methylcytidine-3'-phosphate
  modified_base 20: mod_base = OTHER; note = 2'-O-methyluridine-3'-phosphate
  modified_base 21: mod_base = OTHER; note = 2'-O-methyladenosine
attactgtgcctgtttgccta

SEQ ID NO: 3152 - RNA, 21 nt, synthetic construct
  source 1..21: mol_type = other RNA
  modified_base 1: mod_base = OTHER; note = 2'-O-methylguanosine-3'-phosphate
  modified_base 2: mod_base = OTHER; note = 2'-O-methylcytidine-3'-phosphate
  modified_base 3: mod_base = OTHER; note = 2'-O-methylcytidine-3'-phosphate
  modified_base 4: mod_base = OTHER; note = 2'-O-methyluridine-3'-phosphate
  modified_base 5: mod_base = OTHER; note = 2'-O-methylguanosine-3'-phosphate
  modified_base 6: mod_base = OTHER; note = 2'-O-methyluridine-3'-phosphate
  modified_base 7: mod_base = OTHER; note = 2'-deoxy-2'-fluorouridine-3'-phosphate
  modified_base 8: mod_base = OTHER; note = 2'-O-methyluridine-3'-phosphate
  modified_base 9: mod_base = OTHER; note = 2'-deoxy-2'-fluoroguanosine-3'-phosphate
  modified_base 10: mod_base = OTHER; note = 2'-deoxy-2'-fluorocytidine-3'-phosphate
  modified_base 11: mod_base = OTHER; note = 2'-deoxy-2'-fluorocytidine-3'-phosphate
  modified_base 12: mod_base = OTHER; note = 2'-O-methyluridine-3'-phosphate
  modified_base 13: mod_base = OTHER; note = 2'-O-methylcytidine-3'-phosphate
  modified_base 14: mod_base = OTHER; note = 2'-O-methylcytidine-3'-phosphate
  modified_base 15: mod_base = OTHER; note = 2'-O-methyluridine-3'-phosphate
  modified_base 16: mod_base = OTHER; note = 2'-O-methylguanosine-3'-phosphate
  modified_base 17: mod_base = OTHER; note = 2'-O-methyluridine-3'-phosphate
  modified_base 18: mod_base = OTHER; note = 2'-O-methylcytidine-3'-phosphate
  modified_base 19: mod_base = OTHER; note = 2'-O-methylcytidine-3'-phosphate
  modified_base 20: mod_base = OTHER; note = 2'-O-methyladenosine-3'-phosphate
  modified_base 21: mod_base = OTHER; note = 2'-O-methyladenosine
gcctgtttgcctcctgtccaa

SEQ ID NO: 3153 - RNA, 21 nt, synthetic construct
  source 1..21: mol_type = other RNA
  modified_base 1: mod_base = OTHER; note = 2'-O-methyladenosine-3'-phosphate
  modified_base 2: mod_base = OTHER; note = 2'-O-methylguanosine-3'-phosphate
  modified_base 3: mod_base = OTHER; note = 2'-O-methylcytidine-3'-phosphate
  modified_base 4: mod_base = OTHER; note = 2'-O-methyluridine-3'-phosphate
  modified_base 5: mod_base = OTHER; note = 2'-O-methylguanosine-3'-phosphate
  modified_base 6: mod_base = OTHER; note = 2'-O-methylcytidine-3'-phosphate
  modified_base 7: mod_base = OTHER; note = 2'-deoxy-2'-fluoroguanosine-3'-phosphate
  modified_base 8: mod_base = OTHER; note = 2'-O-methyladenosine-3'-phosphate
  modified_base 9: mod_base = OTHER; note = 2'-deoxy-2'-fluorouridine-3'-phosphate
  modified_base 10: mod_base = OTHER; note = 2'-deoxy-2'-fluoroguanosine-3'-phosphate
  modified_base 11: mod_base = OTHER; note = 2'-deoxy-2'-fluorocytidine-3'-phosphate
  modified_base 12: mod_base = OTHER; note = 2'-O-methyluridine-3'-phosphate
  modified_base 13: mod_base = OTHER; note = 2'-O-methylguanosine-3'-phosphate
  modified_base 14: mod_base = OTHER; note = 2'-O-methyladenosine-3'-phosphate
  modified_base 15: mod_base = OTHER; note = 2'-O-methylcytidine-3'-phosphate
  modified_base 16: mod_base = OTHER; note = 2'-O-methyladenosine-3'-phosphate
  modified_base 17: mod_base = OTHER; note = 2'-O-methylguanosine-3'-phosphate
  modified_base 18: mod_base = OTHER; note = 2'-O-methyluridine-3'-phosphate
  modified_base 19: mod_base = OTHER; note = 2'-O-methyladenosine-3'-phosphate
  modified_base 20: mod_base = OTHER; note = 2'-O-methyluridine-3'-phosphate
  modified_base 21: mod_base = OTHER; note = 2'-O-methyladenosine
agctgcgatgctgacagtata

SEQ ID NO: 3154 - RNA, 21 nt, synthetic construct
  source 1..21: mol_type = other RNA
  modified_base 1: mod_base = OTHER; note = 2'-O-methylguanosine-3'-phosphate
  modified_base 2: mod_base = OTHER; note = 2'-O-methyluridine-3'-phosphate
  modified_base 3: mod_base = OTHER; note = 2'-O-methylguanosine-3'-phosphate
  modified_base 4: mod_base = OTHER; note = 2'-O-methylcytidine-3'-phosphate
  modified_base 5: mod_base = OTHER; note = 2'-O-methyluridine-3'-phosphate
  modified_base 6: mod_base = OTHER; note = 2'-O-methylcytidine-3'-phosphate
  modified_base 7: mod_base = OTHER; note = 2'-deoxy-2'-fluorocytidine-3'-phosphate
  modified_base 8: mod_base = OTHER; note = 2'-O-methyluridine-3'-phosphate
  modified_base 9: mod_base = OTHER; note = 2'-deoxy-2'-fluoroadenosine-3'-phosphate
  modified_base 10: mod_base = OTHER; note = 2'-deoxy-2'-fluorocytidine-3'-phosphate
  modified_base 11: mod_base = OTHER; note = 2'-deoxy-2'-fluoroadenosine-3'-phosphate
  modified_base 12: mod_base = OTHER; note = 2'-O-methylguanosine-3'-phosphate
  modified_base 13: mod_base = OTHER; note = 2'-O-methylguanosine-3'-phosphate
  modified_base 14: mod_base = OTHER; note = 2'-O-methyladenosine-3'-phosphate
  modified_base 15: mod_base = OTHER; note = 2'-O-methyladenosine-3'-phosphate
  modified_base 16: mod_base = OTHER; note = 2'-O-methylguanosine-3'-phosphate
  modified_base 17: mod_base = OTHER; note = 2'-O-methyladenosine-3'-phosphate
  modified_base 18: mod_base = OTHER; note = 2'-O-methyladenosine-3'-phosphate
  modified_base 19: mod_base = OTHER; note = 2'-O-methyladenosine-3'-phosphate
  modified_base 20: mod_base = OTHER; note = 2'-O-methyladenosine-3'-phosphate
  modified_base 21: mod_base = OTHER; note = 2'-O-methyladenosine
gtgctcctacaggaagaaaaa

SEQ ID NO: 3155 - RNA, 21 nt, synthetic construct
  source 1..21: mol_type = other RNA
  modified_base 1: mod_base = OTHER; note = 2'-O-methyluridine-3'-phosphate
  modified_base 2: mod_base = OTHER; note = 2'-O-methylguanosine-3'-phosphate
  modified_base 3: mod_base = OTHER; note = 2'-O-methylcytidine-3'-phosphate
  modified_base 4: mod_base = OTHER; note = 2'-O-methyluridine-3'-phosphate
  modified_base 5: mod_base = OTHER; note = 2'-O-methylcytidine-3'-phosphate
  modified_base 6: mod_base = OTHER; note = 2'-O-methylcytidine-3'-phosphate
  modified_base 7: mod_base = OTHER; note = 2'-deoxy-2'-fluorouridine-3'-phosphate
  modified_base 8: mod_base = OTHER; note = 2'-O-methyladenosine-3'-phosphate
  modified_base 9: mod_base = OTHER; note = 2'-deoxy-2'-fluorocytidine-3'-phosphate
  modified_base 10: mod_base = OTHER; note = 2'-deoxy-2'-fluoroadenosine-3'-phosphate
  modified_base 11: mod_base = OTHER; note = 2'-deoxy-2'-fluoroguanosine-3'-phosphate
  modified_base 12: mod_base = OTHER; note = 2'-O-methylguanosine-3'-phosphate
  modified_base 13: mod_base = OTHER; note = 2'-O-methyladenosine-3'-phosphate
  modified_base 14: mod_base = OTHER; note = 2'-O-methyladenosine-3'-phosphate
  modified_base 15: mod_base = OTHER; note = 2'-O-methylguanosine-3'-phosphate
  modified_base 16: mod_base = OTHER; note = 2'-O-methyladenosine-3'-phosphate
  modified_base 17: mod_base = OTHER; note = 2'-O-methyladenosine-3'-phosphate
  modified_base 18: mod_base = OTHER; note = 2'-O-methyladenosine-3'-phosphate
  modified_base 19: mod_base = OTHER; note = 2'-O-methyladenosine-3'-phosphate
  modified_base 20: mod_base = OTHER; note = 2'-O-methyladenosine-3'-phosphate
  modified_base 21: mod_base = OTHER; note = 2'-O-methyladenosine
tgctcctacaggaagaaaaaa

SEQ ID NO: 3156 - RNA, 21 nt, synthetic construct
  source 1..21: mol_type = other RNA
  modified_base 1: mod_base = OTHER; note = 2'-O-methylcytidine-3'-phosphate
  modified_base 2: mod_base = OTHER; note = 2'-O-methyluridine-3'-phosphate
  modified_base 3: mod_base = OTHER; note = 2'-O-methylcytidine-3'-phosphate
  modified_base 4: mod_base = OTHER; note = 2'-O-methylcytidine-3'-phosphate
  modified_base 5: mod_base = OTHER; note = 2'-O-methyluridine-3'-phosphate
  modified_base 6: mod_base = OTHER; note = 2'-O-methyladenosine-3'-phosphate
  modified_base 7: mod_base = OTHER; note = 2'-deoxy-2'-fluorocytidine-3'-phosphate
  modified_base 8: mod_base = OTHER; note = 2'-O-methyladenosine-3'-phosphate
  modified_base 9: mod_base = OTHER; note = 2'-deoxy-2'-fluoroguanosine-3'-phosphate
  modified_base 10: mod_base = OTHER; note = 2'-deoxy-2'-fluoroguanosine-3'-phosphate
  modified_base 11: mod_base = OTHER; note = 2'-deoxy-2'-fluoroadenosine-3'-phosphate
  modified_base 12: mod_base = OTHER; note = 2'-O-methyladenosine-3'-phosphate
  modified_base 13: mod_base = OTHER; note = 2'-O-methylguanosine-3'-phosphate
  modified_base 14: mod_base = OTHER; note = 2'-O-methyladenosine-3'-phosphate
  modified_base 15: mod_base = OTHER; note = 2'-O-methyladenosine-3'-phosphate
  modified_base 16: mod_base = OTHER; note = 2'-O-methyladenosine-3'-phosphate
  modified_base 17: mod_base = OTHER; note = 2'-O-methyladenosine-3'-phosphate
  modified_base 18: mod_base = OTHER; note = 2'-O-methyladenosine-3'-phosphate
  modified_base 19: mod_base = OTHER; note = 2'-O-methylguanosine-3'-phosphate
  modified_base 20: mod_base = OTHER; note = 2'-O-methyladenosine-3'-phosphate
  modified_base 21: mod_base = OTHER; note = 2'-O-methyladenosine
ctcctacaggaagaaaaagaa

SEQ ID NO: 3157 - RNA, 21 nt, synthetic construct
  source 1..21: mol_type = other RNA
  modified_base 1: mod_base = OTHER; note = 2'-O-methylcytidine-3'-phosphate
  modified_base 2: mod_base = OTHER; note = 2'-O-methyluridine-3'-phosphate
  modified_base 3: mod_base = OTHER; note = 2'-O-methyladenosine-3'-phosphate
  modified_base 4: mod_base = OTHER; note = 2'-O-methylcytidine-3'-phosphate
  modified_base 5: mod_base = OTHER; note = 2'-O-methyladenosine-3'-phosphate
  modified_base 6: mod_base = OTHER; note = 2'-O-methylguanosine-3'-phosphate
  modified_base 7: mod_base = OTHER; note = 2'-deoxy-2'-fluoroguanosine-3'-phosphate
  modified_base 8: mod_base = OTHER; note = 2'-O-methyladenosine-3'-phosphate
  modified_base 9: mod_base = OTHER; note = 2'-deoxy-2'-fluoroadenosine-3'-phosphate
  modified_base 10: mod_base = OTHER; note = 2'-deoxy-2'-fluoroguanosine-3'-phosphate
  modified_base 11: mod_base = OTHER; note = 2'-deoxy-2'-fluoroadenosine-3'-phosphate
  modified_base 12: mod_base = OTHER; note = 2'-O-methyladenosine-3'-phosphate
  modified_base 13: mod_base = OTHER; note = 2'-O-methyladenosine-3'-phosphate
  modified_base 14: mod_base = OTHER; note = 2'-O-methyladenosine-3'-phosphate
  modified_base 15: mod_base = OTHER; note = 2'-O-methyladenosine-3'-phosphate
  modified_base 16: mod_base = OTHER; note = 2'-O-methylguanosine-3'-phosphate
  modified_base 17: mod_base = OTHER; note = 2'-O-methyladenosine-3'-phosphate
  modified_base 18: mod_base = OTHER; note = 2'-O-methylguanosine-3'-phosphate
  modified_base 19: mod_base = OTHER; note = 2'-O-methyladenosine-3'-phosphate
  modified_base 20: mod_base = OTHER; note = 2'-O-methylcytidine-3'-phosphate
  modified_base 21: mod_base = OTHER; note = 2'-O-methyladenosine
ctacaggaagaaaaagagaca

SEQ ID NO: 3158 - RNA, 21 nt, synthetic construct
  source 1..21: mol_type = other RNA
  modified_base 1: mod_base = OTHER; note = 2'-O-methylcytidine-3'-phosphate
  modified_base 2: mod_base = OTHER; note = 2'-O-methyladenosine-3'-phosphate
  modified_base 3: mod_base = OTHER; note = 2'-O-methylcytidine-3'-phosphate
  modified_base 4: mod_base = OTHER; note = 2'-O-methyluridine-3'-phosphate
  modified_base 5: mod_base = OTHER; note = 2'-O-methylcytidine-3'-phosphate
  modified_base 6: mod_base = OTHER; note = 2'-O-methyluridine-3'-phosphate
  modified_base 7: mod_base = OTHER; note = 2'-deoxy-2'-fluorocytidine-3'-phosphate
  modified_base 8: mod_base = OTHER; note = 2'-O-methyluridine-3'-phosphate
  modified_base 9: mod_base = OTHER; note = 2'-deoxy-2'-fluoroguanosine-3'-phosphate
  modified_base 10: mod_base = OTHER; note = 2'-deoxy-2'-fluoroadenosine-3'-phosphate
  modified_base 11: mod_base = OTHER; note = 2'-deoxy-2'-fluoroguanosine-3'-phosphate
  modified_base 12: mod_base = OTHER; note = 2'-O-methyluridine-3'-phosphate
  modified_base 13: mod_base = OTHER; note = 2'-O-methylguanosine-3'-phosphate
  modified_base 14: mod_base = OTHER; note = 2'-O-methylcytidine-3'-phosphate
  modified_base 15: mod_base = OTHER; note = 2'-O-methyladenosine-3'-phosphate
  modified_base 16: mod_base = OTHER; note = 2'-O-methyladenosine-3'-phosphate
  modified_base 17: mod_base = OTHER; note = 2'-O-methyluridine-3'-phosphate
  modified_base 18: mod_base = OTHER; note = 2'-O-methylcytidine-3'-phosphate
  modified_base 19: mod_base = OTHER; note = 2'-O-methyluridine-3'-phosphate
  modified_base 20: mod_base = OTHER; note = 2'-O-methylguanosine-3'-phosphate
  modified_base 21: mod_base = OTHER; note = 2'-O-methyladenosine
cactctctgagtgcaatctga

SEQ ID NO: 3159 - RNA, 21 nt, synthetic construct
  source 1..21: mol_type = other RNA
  modified_base 1: mod_base = OTHER; note = 2'-O-methylcytidine-3'-phosphate
  modified_base 2: mod_base = OTHER; note = 2'-O-methyluridine-3'-phosphate
  modified_base 3: mod_base = OTHER; note = 2'-O-methylcytidine-3'-phosphate
  modified_base 4: mod_base = OTHER; note = 2'-O-methyluridine-3'-phosphate
  modified_base 5: mod_base = OTHER; note = 2'-O-methylguanosine-3'-phosphate
  modified_base 6: mod_base = OTHER; note = 2'-O-methyladenosine-3'-phosphate
  modified_base 7: mod_base = OTHER; note = 2'-deoxy-2'-fluoroguanosine-3'-phosphate
  modified_base 8: mod_base = OTHER; note = 2'-O-methyluridine-3'-phosphate
  modified_base 9: mod_base = OTHER; note = 2'-deoxy-2'-fluoroguanosine-3'-phosphate
  modified_base 10: mod_base = OTHER; note = 2'-deoxy-2'-fluorocytidine-3'-phosphate
  modified_base 11: mod_base = OTHER; note = 2'-deoxy-2'-fluoroadenosine-3'-phosphate
  modified_base 12: mod_base = OTHER; note = 2'-O-methyladenosine-3'-phosphate
  modified_base 13: mod_base = OTHER; note = 2'-O-methyluridine-3'-phosphate
  modified_base 14: mod_base = OTHER; note = 2'-O-methylcytidine-3'-phosphate
  modified_base 15: mod_base = OTHER; note = 2'-O-methyluridine-3'-phosphate
  modified_base 16: mod_base = OTHER; note = 2'-O-methylguanosine-3'-phosphate
  modified_base 17: mod_base = OTHER; note = 2'-O-methylguanosine-3'-phosphate
  modified_base 18: mod_base = OTHER; note = 2'-O-methyluridine-3'-phosphate
  modified_base 19: mod_base = OTHER; note = 2'-O-methyladenosine-3'-phosphate
  modified_base 20: mod_base = OTHER; note = 2'-O-methyladenosine-3'-phosphate
  modified_base 21: mod_base = OTHER; note = 2'-O-methyladenosine
ctctgagtgcaatctggtaaa

SEQ ID NO: 3160 - RNA, 21 nt, synthetic construct
  source 1..21: mol_type = other RNA
  modified_base 1: mod_base = OTHER; note = 2'-O-methyluridine-3'-phosphate
  modified_base 2: mod_base = OTHER; note = 2'-O-methylguanosine-3'-phosphate
  modified_base 3: mod_base = OTHER; note = 2'-O-methyladenosine-3'-phosphate
  modified_base 4: mod_base = OTHER; note = 2'-O-methylguanosine-3'-phosphate
  modified_base 5: mod_base = OTHER; note = 2'-O-methyluridine-3'-phosphate
  modified_base 6: mod_base = OTHER; note = 2'-O-methylguanosine-3'-phosphate
  modified_base 7: mod_base = OTHER; note = 2'-deoxy-2'-fluorocytidine-3'-phosphate
  modified_base 8: mod_base = OTHER; note = 2'-O-methyladenosine-3'-phosphate
  modified_base 9: mod_base = OTHER; note = 2'-deoxy-2'-fluoroadenosine-3'-phosphate
  modified_base 10: mod_base = OTHER; note = 2'-deoxy-2'-fluorouridine-3'-phosphate
  modified_base 11: mod_base = OTHER; note = 2'-deoxy-2'-fluorocytidine-3'-phosphate
  modified_base 12: mod_base = OTHER; note = 2'-O-methyluridine-3'-phosphate
  modified_base 13: mod_base = OTHER; note = 2'-O-methylguanosine-3'-phosphate
  modified_base 14: mod_base = OTHER; note = 2'-O-methylguanosine-3'-phosphate
  modified_base 15: mod_base = OTHER; note = 2'-O-methyluridine-3'-phosphate
  modified_base 16: mod_base = OTHER; note = 2'-O-methyladenosine-3'-phosphate
  modified_base 17: mod_base = OTHER; note = 2'-O-methyladenosine-3'-phosphate
  modified_base 18: mod_base = OTHER; note = 2'-O-methyladenosine-3'-phosphate
  modified_base 19: mod_base = OTHER; note = 2'-O-methyluridine-3'-phosphate
  modified_base 20: mod_base = OTHER; note = 2'-O-methylguanosine-3'-phosphate
  modified_base 21: mod_base = OTHER; note = 2'-O-methyladenosine
tgagtgcaatctggtaaatga

SEQ ID NO: 3161 - RNA, 21 nt, synthetic construct
  source 1..21: mol_type = other RNA
  modified_base 1: mod_base = OTHER; note = 2'-O-methyladenosine-3'-phosphate
  modified_base 2: mod_base = OTHER; note = 2'-O-methyladenosine-3'-phosphate
  modified_base 3: mod_base = OTHER; note = 2'-O-methyluridine-3'-phosphate
  modified_base 4: mod_base = OTHER; note = 2'-O-methylcytidine-3'-phosphate
  modified_base 5: mod_base = OTHER; note = 2'-O-methyluridine-3'-phosphate
  modified_base 6: mod_base = OTHER; note = 2'-O-methylguanosine-3'-phosphate
  modified_base 7: mod_base = OTHER; note = 2'-deoxy-2'-fluoroguanosine-3'-phosphate
  modified_base 8: mod_base = OTHER; note = 2'-O-methyluridine-3'-phosphate
  modified_base 9: mod_base = OTHER; note = 2'-deoxy-2'-fluoroadenosine-3'-phosphate
  modified_base 10: mod_base = OTHER; note = 2'-deoxy-2'-fluoroadenosine-3'-phosphate
  modified_base 11: mod_base = OTHER; note = 2'-deoxy-2'-fluoroadenosine-3'-phosphate
  modified_base 12: mod_base = OTHER; note = 2'-O-methyluridine-3'-phosphate
  modified_base 13: mod_base = OTHER; note = 2'-O-methylguanosine-3'-phosphate
  modified_base 14: mod_base = OTHER; note = 2'-O-methylcytidine-3'-phosphate
  modified_base 15: mod_base = OTHER; note = 2'-O-methyluridine-3'-phosphate
  modified_base 16: mod_base = OTHER; note = 2'-O-methylguanosine-3'-phosphate
  modified_base 17: mod_base = OTHER; note = 2'-O-methylguanosine-3'-phosphate
  modified_base 18: mod_base = OTHER; note = 2'-O-methyladenosine-3'-phosphate
  modified_base 19: mod_base = OTHER; note = 2'-O-methyladenosine-3'-phosphate
  modified_base 20: mod_base = OTHER; note = 2'-O-methyladenosine-3'-phosphate
  modified_base 21: mod_base = OTHER; note = 2'-O-methyladenosine
aatctggtaaatgctggaaaa

SEQ ID NO: 3162 - RNA, 21 nt, synthetic construct
  source 1..21: mol_type = other RNA
  modified_base 1: mod_base = OTHER; note = 2'-O-methylcytidine-3'-phosphate
  modified_base 2: mod_base = OTHER; note = 2'-O-methyluridine-3'-phosphate
  modified_base 3: mod_base = OTHER; note = 2'-O-methylguanosine-3'-phosphate
  modified_base 4: mod_base = OTHER; note = 2'-O-methylguanosine-3'-phosphate
  modified_base 5: mod_base = OTHER; note = 2'-O-methyluridine-3'-phosphate
  modified_base 6: mod_base = OTHER; note = 2'-O-methyladenosine-3'-phosphate
  modified_base 7: mod_base = OTHER; note = 2'-deoxy-2'-fluoroadenosine-3'-phosphate
  modified_base 8: mod_base = OTHER; note = 2'-O-methyladenosine-3'-phosphate
  modified_base 9: mod_base = OTHER; note = 2'-deoxy-2'-fluorouridine-3'-phosphate
  modified_base 10: mod_base = OTHER; note = 2'-deoxy-2'-fluoroguanosine-3'-phosphate
  modified_base 11: mod_base = OTHER; note = 2'-deoxy-2'-fluorocytidine-3'-phosphate
  modified_base 12: mod_base = OTHER; note = 2'-O-methyluridine-3'-phosphate
  modified_base 13: mod_base = OTHER; note = 2'-O-methylguanosine-3'-phosphate
  modified_base 14: mod_base = OTHER; note = 2'-O-methylguanosine-3'-phosphate
  modified_base 15: mod_base = OTHER; note = 2'-O-methyladenosine-3'-phosphate
  modified_base 16: mod_base = OTHER; note = 2'-O-methyladenosine-3'-phosphate
  modified_base 17: mod_base = OTHER; note = 2'-O-methyladenosine-3'-phosphate
  modified_base 18: mod_base = OTHER; note = 2'-O-methyladenosine-3'-phosphate
  modified_base 19: mod_base = OTHER; note = 2'-O-methyladenosine-3'-phosphate
  modified_base 20: mod_base = OTHER; note = 2'-O-methylcytidine-3'-phosphate
  modified_base 21: mod_base = OTHER; note = 2'-O-methyladenosine
ctggtaaatgctggaaaaaca

SEQ ID NO: 3163 - RNA, 21 nt, synthetic construct
  source 1..21: mol_type = other RNA
  modified_base 1: mod_base = OTHER; note = 2'-O-methylguanosine-3'-phosphate
  modified_base 2: mod_base = OTHER; note = 2'-O-methylcytidine-3'-phosphate
  modified_base 3: mod_base = OTHER; note = 2'-O-methyluridine-3'-phosphate
  modified_base 4: mod_base = OTHER; note = 2'-O-methylguanosine-3'-phosphate
  modified_base 5: mod_base = OTHER; note = 2'-O-methylguanosine-3'-phosphate
  modified_base 6: mod_base = OTHER; note = 2'-O-methyladenosine-3'-phosphate
  modified_base 7: mod_base = OTHER; note = 2'-deoxy-2'-fluoroadenosine-3'-phosphate
  modified_base 8: mod_base = OTHER; note = 2'-O-methyladenosine-3'-phosphate
  modified_base 9: mod_base = OTHER; note = 2'-deoxy-2'-fluoroadenosine-3'-phosphate
  modified_base 10: mod_base = OTHER; note = 2'-deoxy-2'-fluoroadenosine-3'-phosphate
  modified_base 11: mod_base = OTHER; note = 2'-deoxy-2'-fluorocytidine-3'-phosphate
  modified_base 12: mod_base = OTHER; note = 2'-O-methyluridine-3'-phosphate
  modified_base 13: mod_base = OTHER; note = 2'-O-methylcytidine-3'-phosphate
  modified_base 14: mod_base = OTHER; note = 2'-O-methyluridine-3'-phosphate
  modified_base 15: mod_base = OTHER; note = 2'-O-methylguanosine-3'-phosphate
  modified_base 16: mod_base = OTHER; note = 2'-O-methyladenosine-3'-phosphate
  modified_base 17: mod_base = OTHER; note = 2'-O-methyladenosine-3'-phosphate
  modified_base 18: mod_base = OTHER; note = 2'-O-methyladenosine-3'-phosphate
  modified_base 19: mod_base = OTHER; note = 2'-O-methylguanosine-3'-phosphate
  modified_base 20: mod_base = OTHER; note = 2'-O-methyladenosine-3'-phosphate
  modified_base 21: mod_base = OTHER; note = 2'-O-methyladenosine
gctggaaaaactctgaaagaa

SEQ ID NO: 3164 - RNA, 21 nt, synthetic construct
  source 1..21: mol_type = other RNA
  modified_base 1: mod_base = OTHER; note = 2'-O-methyluridine-3'-phosphate
  modified_base 2: mod_base = OTHER; note = 2'-O-methylguanosine-3'-phosphate
  modified_base 3: mod_base = OTHER; note = 2'-O-methylguanosine-3'-phosphate
  modified_base 4: mod_base = OTHER; note = 2'-O-methyladenosine-3'-phosphate
  modified_base 5: mod_base = OTHER; note = 2'-O-methyladenosine-3'-phosphate
  modified_base 6: mod_base = OTHER; note = 2'-O-methyladenosine-3'-phosphate
  modified_base 7: mod_base = OTHER; note = 2'-deoxy-2'-fluoroadenosine-3'-phosphate
  modified_base 8: mod_base = OTHER; note = 2'-O-methyladenosine-3'-phosphate
  modified_base 9: mod_base = OTHER; note = 2'-deoxy-2'-fluorocytidine-3'-phosphate
  modified_base 10: mod_base = OTHER; note = 2'-deoxy-2'-fluorouridine-3'-phosphate
  modified_base 11: mod_base = OTHER; note = 2'-deoxy-2'-fluorocytidine-3'-phosphate
  modified_base 12: mod_base = OTHER; note = 2'-O-methyluridine-3'-phosphate
  modified_base 13: mod_base = OTHER; note = 2'-O-methylguanosine-3'-phosphate
  modified_base 14: mod_base = OTHER; note = 2'-O-methyladenosine-3'-phosphate
  modified_base 15: mod_base = OTHER; note = 2'-O-methyladenosine-3'-phosphate
  modified_base 16: mod_base = OTHER; note = 2'-O-methyladenosine-3'-phosphate
  modified_base 17: mod_base = OTHER; note = 2'-O-methylguanosine-3'-phosphate
  modified_base 18: mod_base = OTHER; note = 2'-O-methyladenosine-3'-phosphate
  modified_base 19: mod_base = OTHER; note = 2'-O-methyluridine-3'-phosphate
  modified_base 20: mod_base = OTHER; note = 2'-O-methylcytidine-3'-phosphate
  modified_base 21: mod_base = OTHER; note = 2'-O-methyladenosine
tggaaaaactctgaaagatca

SEQ ID NO: 3165 - RNA, 21 nt, synthetic construct
  source 1..21: mol_type = other RNA
  modified_base 1: mod_base = OTHER; note = 2'-O-methylguanosine-3'-phosphate
  modified_base 2: mod_base = OTHER; note = 2'-O-methylguanosine-3'-phosphate
  modified_base 3: mod_base = OTHER; note = 2'-O-methyladenosine-3'-phosphate
  modified_base 4: mod_base = OTHER; note = 2'-O-methyladenosine-3'-phosphate
  modified_base 5: mod_base = OTHER; note = 2'-O-methyladenosine-3'-phosphate
  modified_base 6: mod_base = OTHER; note = 2'-O-methyladenosine-3'-phosphate
  modified_base 7: mod_base = OTHER; note = 2'-deoxy-2'-fluoroadenosine-3'-phosphate
  modified_base 8: mod_base = OTHER; note = 2'-O-methylcytidine-3'-phosphate
  modified_base 9: mod_base = OTHER; note = 2'-deoxy-2'-fluorouridine-3'-phosphate
  modified_base 10: mod_base = OTHER; note = 2'-deoxy-2'-fluorocytidine-3'-phosphate
  modified_base 11: mod_base = OTHER; note = 2'-deoxy-2'-fluorouridine-3'-phosphate
  modified_base 12: mod_base = OTHER; note = 2'-O-methylguanosine-3'-phosphate
  modified_base 13: mod_base = OTHER; note = 2'-O-methyladenosine-3'-phosphate
  modified_base 14: mod_base = OTHER; note = 2'-O-methyladenosine-3'-phosphate
  modified_base 15: mod_base = OTHER; note = 2'-O-methyladenosine-3'-phosphate
  modified_base 16: mod_base = OTHER; note = 2'-O-methylguanosine-3'-phosphate
  modified_base 17: mod_base = OTHER; note = 2'-O-methyladenosine-3'-phosphate
  modified_base 18: mod_base = OTHER; note = 2'-O-methyluridine-3'-phosphate
  modified_base 19: mod_base = OTHER; note = 2'-O-methylcytidine-3'-phosphate
  modified_base 20: mod_base = OTHER; note = 2'-O-methyluridine-3'-phosphate
  modified_base 21: mod_base = OTHER; note = 2'-O-methyladenosine
ggaaaaactctgaaagatcta

SEQ ID NO: 3166 - RNA, 21 nt, synthetic construct
  source 1..21: mol_type = other RNA
  modified_base 1: mod_base = OTHER; note = 2'-O-methylguanosine-3'-phosphate
  modified_base 2: mod_base = OTHER; note = 2'-O-methyladenosine-3'-phosphate
  modified_base 3: mod_base = OTHER; note = 2'-O-methyladenosine-3'-phosphate
  modified_base 4: mod_base = OTHER; note = 2'-O-methyladenosine-3'-phosphate
  modified_base 5: mod_base = OTHER; note = 2'-O-methyladenosine-3'-phosphate
  modified_base 6: mod_base = OTHER; note = 2'-O-methyladenosine-3'-phosphate
  modified_base 7: mod_base = OTHER; note = 2'-deoxy-2'-fluorocytidine-3'-phosphate
  modified_base 8: mod_base = OTHER; note = 2'-O-methyluridine-3'-phosphate
  modified_base 9: mod_base = OTHER; note = 2'-deoxy-2'-fluorocytidine-3'-phosphate
  modified_base 10: mod_base = OTHER; note = 2'-deoxy-2'-fluorouridine-3'-phosphate
  modified_base 11: mod_base = OTHER; note = 2'-deoxy-2'-fluoroguanosine-3'-phosphate
  modified_base 12: mod_base = OTHER; note = 2'-O-methyladenosine-3'-phosphate
  modified_base 13: mod_base = OTHER; note = 2'-O-methyladenosine-3'-phosphate
  modified_base 14: mod_base = OTHER; note = 2'-O-methyladenosine-3'-phosphate
  modified_base 15: mod_base = OTHER; note = 2'-O-methylguanosine-3'-phosphate
  modified_base 16: mod_base = OTHER; note = 2'-O-methyladenosine-3'-phosphate
  modified_base 17: mod_base = OTHER; note = 2'-O-methyluridine-3'-phosphate
  modified_base 18: mod_base = OTHER; note = 2'-O-methylcytidine-3'-phosphate
  modified_base 19: mod_base = OTHER; note = 2'-O-methyluridine-3'-phosphate
  modified_base 20: mod_base = OTHER; note = 2'-O-methylguanosine-3'-phosphate
  modified_base 21: mod_base = OTHER; note = 2'-O-methyladenosine
gaaaaactctgaaagatctga

SEQ ID NO: 3167 - RNA, 21 nt, synthetic construct
  source 1..21: mol_type = other RNA
  modified_base 1: mod_base = OTHER; note = 2'-O-methyladenosine-3'-phosphate
  modified_base 2: mod_base = OTHER; note = 2'-O-methyladenosine-3'-phosphate
  modified_base 3: mod_base = OTHER; note = 2'-O-methyladenosine-3'-phosphate
  modified_base 4: mod_base = OTHER; note = 2'-O-methyladenosine-3'-phosphate
  modified_base 5: mod_base = OTHER; note = 2'-O-methyladenosine-3'-phosphate
  modified_base 6: mod_base = OTHER; note = 2'-O-methylcytidine-3'-phosphate
  modified_base 7: mod_base = OTHER; note = 2'-deoxy-2'-fluorouridine-3'-phosphate
  modified_base 8: mod_base = OTHER; note = 2'-O-methylcytidine-3'-phosphate
  modified_base 9: mod_base = OTHER; note = 2'-deoxy-2'-fluorouridine-3'-phosphate
  modified_base 10: mod_base = OTHER; note = 2'-deoxy-2'-fluoroguanosine-3'-phosphate
  modified_base 11: mod_base = OTHER; note = 2'-deoxy-2'-fluoroadenosine-3'-phosphate
  modified_base 12: mod_base = OTHER; note = 2'-O-methyladenosine-3'-phosphate
  modified_base 13: mod_base = OTHER; note = 2'-O-methyladenosine-3'-phosphate
  modified_base 14: mod_base = OTHER; note = 2'-O-methylguanosine-3'-phosphate
  modified_base 15: mod_base = OTHER; note = 2'-O-methyladenosine-3'-phosphate
  modified_base 16: mod_base = OTHER; note = 2'-O-methyluridine-3'-phosphate
  modified_base 17: mod_base = OTHER; note = 2'-O-methylcytidine-3'-phosphate
  modified_base 18: mod_base = OTHER; note = 2'-O-methyluridine-3'-phosphate
  modified_base 19: mod_base = OTHER; note = 2'-O-methylguanosine-3'-phosphate
  modified_base 20: mod_base = OTHER; note = 2'-O-methyladenosine-3'-phosphate
  modified_base 21: mod_base = OTHER; note = 2'-O-methyladenosine
aaaaactctgaaagatctgaa

SEQ ID NO: 3168 - RNA, 21 nt, synthetic construct
  source 1..21: mol_type = other RNA
  modified_base 1: mod_base = OTHER; note = 2'-O-methyladenosine-3'-phosphate
  modified_base 2: mod_base = OTHER; note = 2'-O-methyladenosine-3'-phosphate
  modified_base 3: mod_base = OTHER; note = 2'-O-methyladenosine-3'-phosphate
  modified_base 4: mod_base = OTHER; note = 2'-O-methyladenosine-3'-phosphate
  modified_base 5: mod_base = OTHER; note = 2'-O-methylcytidine-3'-phosphate
  modified_base 6: mod_base = OTHER; note = 2'-O-methyluridine-3'-phosphate
  modified_base 7: mod_base = OTHER; note = 2'-deoxy-2'-fluorocytidine-3'-phosphate
  modified_base 8: mod_base = OTHER; note = 2'-O-methyluridine-3'-phosphate
  modified_base 9: mod_base = OTHER; note = 2'-deoxy-2'-fluoroguanosine-3'-phosphate
  modified_base 10: mod_base = OTHER; note = 2'-deoxy-2'-fluoroadenosine-3'-phosphate
  modified_base 11: mod_base = OTHER; note = 2'-deoxy-2'-fluoroadenosine-3'-phosphate
  modified_base 12: mod_base = OTHER; note = 2'-O-methyladenosine-3'-phosphate
  modified_base 13: mod_base = OTHER; note = 2'-O-methylguanosine-3'-phosphate
  modified_base 14: mod_base = OTHER; note = 2'-O-methyladenosine-3'-phosphate
  modified_base 15: mod_base = OTHER; note = 2'-O-methyluridine-3'-phosphate
  modified_base 16: mod_base = OTHER; note = 2'-O-methylcytidine-3'-phosphate
  modified_base 17: mod_base = OTHER; note = 2'-O-methyluridine-3'-phosphate
  modified_base 18: mod_base = OTHER; note = 2'-O-methylguanosine-3'-phosphate
  modified_base 19: mod_base = OTHER; note = 2'-O-methyladenosine-3'-phosphate
  modified_base 20: mod_base = OTHER; note = 2'-O-methyluridine-3'-phosphate
  modified_base 21: mod_base = OTHER; note = 2'-O-methyladenosine
aaaactctgaaagatctgata

SEQ ID NO: 3169 - RNA, 21 nt, synthetic construct
  source 1..21: mol_type = other RNA
  modified_base 1: mod_base = OTHER; note = 2'-O-methyladenosine-3'-phosphate
  modified_base 2: mod_base = OTHER; note = 2'-O-methyladenosine-3'-phosphate
  modified_base 3: mod_base = OTHER; note = 2'-O-methyladenosine-3'-phosphate
  modified_base 4: mod_base = OTHER; note = 2'-O-methylcytidine-3'-phosphate
  modified_base 5: mod_base = OTHER; note = 2'-O-methyluridine-3'-phosphate
  modified_base 6: mod_base = OTHER; note = 2'-O-methylcytidine-3'-phosphate
  modified_base 7: mod_base = OTHER; note = 2'-deoxy-2'-fluorouridine-3'-phosphate
  modified_base 8: mod_base = OTHER; note = 2'-O-methylguanosine-3'-phosphate
  modified_base 9: mod_base = OTHER; note = 2'-deoxy-2'-fluoroadenosine-3'-phosphate
  modified_base 10: mod_base = OTHER; note = 2'-deoxy-2'-fluoroadenosine-3'-phosphate
  modified_base 11: mod_base = OTHER; note = 2'-deoxy-2'-fluoroadenosine-3'-phosphate
  modified_base 12: mod_base = OTHER; note = 2'-O-methylguanosine-3'-phosphate
  modified_base 13: mod_base = OTHER; note = 2'-O-methyladenosine-3'-phosphate
  modified_base 14: mod_base = OTHER; note = 2'-O-methyluridine-3'-phosphate
  modified_base 15: mod_base = OTHER; note = 2'-O-methylcytidine-3'-phosphate
  modified_base 16: mod_base = OTHER; note = 2'-O-methyluridine-3'-phosphate
  modified_base 17: mod_base = OTHER; note = 2'-O-methylguanosine-3'-phosphate
  modified_base 18: mod_base = OTHER; note = 2'-O-methyladenosine-3'-phosphate
  modified_base 19: mod_base = OTHER; note = 2'-O-methyluridine-3'-phosphate
  modified_base 20: mod_base = OTHER; note = 2'-O-methyluridine-3'-phosphate
  modified_base 21: mod_base = OTHER; note = 2'-O-methyladenosine
aaactctgaaagatctgatta

SEQ ID NO: 3170 - RNA, 21 nt, synthetic construct
  source 1..21: mol_type = other RNA
  modified_base 1: mod_base = OTHER; note = 2'-O-methyladenosine-3'-phosphate
  modified_base 2: mod_base = OTHER; note = 2'-O-methyladenosine-3'-phosphate
  modified_base 3: mod_base = OTHER; note = 2'-O-methylcytidine-3'-phosphate
  modified_base 4: mod_base = OTHER; note = 2'-O-methyluridine-3'-phosphate
  modified_base 5: mod_base = OTHER; note = 2'-O-methylcytidine-3'-phosphate
  modified_base 6: mod_base = OTHER; note = 2'-O-methyluridine-3'-phosphate
  modified_base 7: mod_base = OTHER; note = 2'-deoxy-2'-fluoroguanosine-3'-phosphate
  modified_base 8: mod_base = OTHER; note = 2'-O-methyladenosine-3'-phosphate
  modified_base 9: mod_base = OTHER; note = 2'-deoxy-2'-fluoroadenosine-3'-phosphate
  modified_base 10: mod_base = OTHER; note = 2'-deoxy-2'-fluoroadenosine-3'-phosphate
  modified_base 11: mod_base = OTHER; note = 2'-deoxy-2'-fluoroguanosine-3'-phosphate
  modified_base 12: mod_base = OTHER; note = 2'-O-methyladenosine-3'-phosphate
  modified_base 13: mod_base = OTHER; note = 2'-O-methyluridine-3'-phosphate
  modified_base 14: mod_base = OTHER; note = 2'-O-methylcytidine-3'-phosphate
  modified_base 15: mod_base = OTHER; note = 2'-O-methyluridine-3'-phosphate
  modified_base 16: mod_base = OTHER; note = 2'-O-methylguanosine-3'-phosphate
  modified_base 17: mod_base = OTHER; note = 2'-O-methyladenosine-3'-phosphate
  modified_base 18: mod_base = OTHER; note = 2'-O-methyluridine-3'-phosphate
  modified_base 19: mod_base = OTHER; note = 2'-O-methyluridine-3'-phosphate
  modified_base 20: mod_base = OTHER; note = 2'-O-methyluridine-3'-phosphate
  modified_base 21: mod_base = OTHER; note = 2'-O-methyladenosine
aactctgaaagatctgattta

SEQ ID NO: 3171 - RNA, 21 nt, synthetic construct
  source 1..21: mol_type = other RNA
  modified_base 1: mod_base = OTHER; note = 2'-O-methyladenosine-3'-phosphate
  modified_base 2: mod_base = OTHER; note = 2'-O-methylcytidine-3'-phosphate
  modified_base 3: mod_base = OTHER; note = 2'-O-methyluridine-3'-phosphate
  modified_base 4: mod_base = OTHER; note = 2'-O-methylcytidine-3'-phosphate
  modified_base 5: mod_base = OTHER; note = 2'-O-methyluridine-3'-phosphate
  modified_base 6: mod_base = OTHER; note = 2'-O-methylguanosine-3'-phosphate
  modified_base 7: mod_base = OTHER; note = 2'-deoxy-2'-fluoroadenosine-3'-phosphate
  modified_base 8: mod_base = OTHER; note = 2'-O-methyladenosine-3'-phosphate
  modified_base 9: mod_base = OTHER; note = 2'-deoxy-2'-fluoroadenosine-3'-phosphate
  modified_base 10: mod_base = OTHER; note = 2'-deoxy-2'-fluoroguanosine-3'-phosphate
  modified_base 11: mod_base = OTHER; note = 2'-deoxy-2'-fluoroadenosine-3'-phosphate
  modified_base 12: mod_base = OTHER; note = 2'-O-methyluridine-3'-phosphate
  modified_base 13: mod_base = OTHER; note = 2'-O-methylcytidine-3'-phosphate
  modified_base 14: mod_base = OTHER; note = 2'-O-methyluridine-3'-phosphate
  modified_base 15: mod_base = OTHER; note = 2'-O-methylguanosine-3'-phosphate
  modified_base 16: mod_base = OTHER; note = 2'-O-methyladenosine-3'-phosphate
  modified_base 17: mod_base = OTHER; note = 2'-O-methyluridine-3'-phosphate
  modified_base 18: mod_base = OTHER; note = 2'-O-methyluridine-3'-phosphate
  modified_base 19: mod_base = OTHER; note = 2'-O-methyluridine-3'-phosphate
  modified_base 20: mod_base = OTHER; note = 2'-O-methyladenosine-3'-phosphate
  modified_base 21: mod_base = OTHER; note = 2'-O-methyladenosine
actctgaaagatctgatttaa

SEQ ID NO: 3172 - RNA, 21 nt, synthetic construct
  source 1..21: mol_type = other RNA
  modified_base 1: mod_base = OTHER; note = 2'-O-methylcytidine-3'-phosphate
  modified_base 2: mod_base = OTHER; note = 2'-O-methyluridine-3'-phosphate
  modified_base 3: mod_base = OTHER; note = 2'-O-methylcytidine-3'-phosphate
  modified_base 4: mod_base = OTHER; note = 2'-O-methyluridine-3'-phosphate
  modified_base 5: mod_base = OTHER; note = 2'-O-methylguanosine-3'-phosphate
  modified_base 6: mod_base = OTHER; note = 2'-O-methyladenosine-3'-phosphate
  modified_base 7: mod_base = OTHER; note = 2'-deoxy-2'-fluoroadenosine-3'-phosphate
  modified_base 8: mod_base = OTHER; note = 2'-O-methyladenosine-3'-phosphate
  modified_base 9: mod_base = OTHER; note = 2'-deoxy-2'-fluoroguanosine-3'-phosphate
  modified_base 10: mod_base = OTHER; note = 2'-deoxy-2'-fluoroadenosine-3'-phosphate
  modified_base 11: mod_base = OTHER; note = 2'-deoxy-2'-fluorouridine-3'-phosphate
  modified_base 12: mod_base = OTHER; note = 2'-O-methylcytidine-3'-phosphate
  modified_base 13: mod_base = OTHER; note = 2'-O-methyluridine-3'-phosphate
  modified_base 14: mod_base = OTHER; note = 2'-O-methylguanosine-3'-phosphate
  modified_base 15: mod_base = OTHER; note = 2'-O-methyladenosine-3'-phosphate
  modified_base 16: mod_base = OTHER; note = 2'-O-methyluridine-3'-phosphate
  modified_base 17: mod_base = OTHER; note = 2'-O-methyluridine-3'-phosphate
  modified_base 18: mod_base = OTHER; note = 2'-O-methyluridine-3'-phosphate
  modified_base 19: mod_base = OTHER; note = 2'-O-methyladenosine-3'-phosphate
  modified_base 20: mod_base = OTHER; note = 2'-O-methyluridine-3'-phosphate
  modified_base 21: mod_base = OTHER; note = 2'-O-methyladenosine
ctctgaaagatctgatttata

SEQ ID NO: 3173 - RNA, 21 nt, synthetic construct
  source 1..21: mol_type = other RNA
  modified_base 1: mod_base = OTHER; note = 2'-O-methyluridine-3'-phosphate
  modified_base 2: mod_base = OTHER; note = 2'-O-methylcytidine-3'-phosphate
  modified_base 3: mod_base = OTHER; note = 2'-O-methyluridine-3'-phosphate
  modified_base 4: mod_base = OTHER; note = 2'-O-methylguanosine-3'-phosphate
  modified_base 5: mod_base = OTHER; note = 2'-O-methyladenosine-3'-phosphate
  modified_base 6: mod_base = OTHER; note = 2'-O-methyladenosine-3'-phosphate
  modified_base 7: mod_base = OTHER; note = 2'-deoxy-2'-fluoroadenosine-3'-phosphate
  modified_base 8: mod_base = OTHER; note = 2'-O-methylguanosine-3'-phosphate
  modified_base 9: mod_base = OTHER; note = 2'-deoxy-2'-fluoroadenosine-3'-phosphate
  modified_base 10: mod_base = OTHER; note = 2'-deoxy-2'-fluorouridine-3'-phosphate
  modified_base 11: mod_base = OTHER; note = 2'-deoxy-2'-fluorocytidine-3'-phosphate
  modified_base 12: mod_base = OTHER; note = 2'-O-methyluridine-3'-phosphate
  modified_base 13: mod_base = OTHER; note = 2'-O-methylguanosine-3'-phosphate
  modified_base 14: mod_base = OTHER; note = 2'-O-methyladenosine-3'-phosphate
  modified_base 15: mod_base = OTHER; note = 2'-O-methyluridine-3'-phosphate
  modified_base 16: mod_base = OTHER; note = 2'-O-methyluridine-3'-phosphate
  modified_base 17: mod_base = OTHER; note = 2'-O-methyluridine-3'-phosphate
  modified_base 18: mod_base = OTHER; note = 2'-O-methyladenosine-3'-phosphate
  modified_base 19: mod_base = OTHER; note = 2'-O-methyluridine-3'-phosphate
  modified_base 20: mod_base = OTHER; note = 2'-O-methylguanosine-3'-phosphate
  modified_base 21: mod_base = OTHER; note = 2'-O-methyladenosine
tctgaaagatctgatttatga

SEQ ID NO: 3174 - RNA, 21 nt, synthetic construct
  source 1..21: mol_type = other RNA
  modified_base 1: mod_base = OTHER; note = 2'-O-methylcytidine-3'-phosphate
  modified_base 2: mod_base = OTHER; note = 2'-O-methyluridine-3'-phosphate
  modified_base 3: mod_base = OTHER; note = 2'-O-methylguanosine-3'-phosphate
  modified_base 4: mod_base = OTHER; note = 2'-O-methyladenosine-3'-phosphate
  modified_base 5: mod_base = OTHER; note = 2'-O-methyladenosine-3'-phosphate
  modified_base 6: mod_base = OTHER; note = 2'-O-methyladenosine-3'-phosphate
  modified_base 7: mod_base = OTHER; note = 2'-deoxy-2'-fluoroguanosine-3'-phosphate
  modified_base 8: mod_base = OTHER; note = 2'-O-methyladenosine-3'-phosphate
  modified_base 9: mod_base = OTHER; note = 2'-deoxy-2'-fluorouridine-3'-phosphate
  modified_base 10: mod_base = OTHER; note = 2'-deoxy-2'-fluorocytidine-3'-phosphate
  modified_base 11: mod_base = OTHER; note = 2'-deoxy-2'-fluorouridine-3'-phosphate
  modified_base 12: mod_base = OTHER; note = 2'-O-methylguanosine-3'-phosphate
  modified_base 13: mod_base = OTHER; note = 2'-O-methyladenosine-3'-phosphate
  modified_base 14: mod_base = OTHER; note = 2'-O-methyluridine-3'-phosphate
  modified_base 15: mod_base = OTHER; note = 2'-O-methyluridine-3'-phosphate
  modified_base 16: mod_base = OTHER; note = 2'-O-methyluridine-3'-phosphate
  modified_base 17: mod_base = OTHER; note = 2'-O-methyladenosine-3'-phosphate
  modified_base 18: mod_base = OTHER; note = 2'-O-methyluridine-3'-phosphate
  modified_base 19: mod_base = OTHER; note = 2'-O-methylguanosine-3'-phosphate
  modified_base 20: mod_base = OTHER; note = 2'-O-methyladenosine-3'-phosphate
  modified_base 21: mod_base = OTHER; note = 2'-O-methyladenosine
ctgaaagatctgatttatgaa

SEQ ID NO: 3175 - RNA, 21 nt, synthetic construct
  source 1..21: mol_type = other RNA
  modified_base 1: mod_base = OTHER; note = 2'-O-methyluridine-3'-phosphate
  modified_base 2: mod_base = OTHER; note = 2'-O-methylguanosine-3'-phosphate
  modified_base 3: mod_base = OTHER; note = 2'-O-methyladenosine-3'-phosphate
  modified_base 4: mod_base = OTHER; note = 2'-O-methyladenosine-3'-phosphate
  modified_base 5: mod_base = OTHER; note = 2'-O-methyladenosine-3'-phosphate
  modified_base 6: mod_base = OTHER; note = 2'-O-methylguanosine-3'-phosphate
  modified_base 7: mod_base = OTHER; note = 2'-deoxy-2'-fluoroadenosine-3'-phosphate
  modified_base 8: mod_base = OTHER; note = 2'-O-methyluridine-3'-phosphate
  modified_base 9: mod_base = OTHER; note = 2'-deoxy-2'-fluorocytidine-3'-phosphate
  modified_base 10: mod_base = OTHER; note = 2'-deoxy-2'-fluorouridine-3'-phosphate
  modified_base 11: mod_base = OTHER; note = 2'-deoxy-2'-fluoroguanosine-3'-phosphate
  modified_base 12: mod_base = OTHER; note = 2'-O-methyladenosine-3'-phosphate
  modified_base 13: mod_base = OTHER; note = 2'-O-methyluridine-3'-phosphate
  modified_base 14: mod_base = OTHER; note = 2'-O-methyluridine-3'-phosphate
  modified_base 15: mod_base = OTHER; note = 2'-O-methyluridine-3'-phosphate
  modified_base 16: mod_base = OTHER; note = 2'-O-methyladenosine-3'-phosphate
  modified_base 17: mod_base = OTHER; note = 2'-O-methyluridine-3'-phosphate
  modified_base 18: mod_base = OTHER; note = 2'-O-methylguanosine-3'-phosphate
  modified_base 19: mod_base = OTHER; note = 2'-O-methyladenosine-3'-phosphate
  modified_base 20: mod_base = OTHER; note = 2'-O-methyluridine-3'-phosphate
  modified_base 21: mod_base = OTHER; note = 2'-O-methyladenosine
tgaaagatctgatttatgata

SEQ ID NO: 3176 - RNA, 21 nt, synthetic construct
  source 1..21: mol_type = other RNA
  modified_base 1: mod_base = OTHER; note = 2'-O-methylguanosine-3'-phosphate
  modified_base 2: mod_base = OTHER; note = 2'-O-methyladenosine-3'-phosphate
  modified_base 3: mod_base = OTHER; note = 2'-O-methyladenosine-3'-phosphate
  modified_base 4: mod_base = OTHER; note = 2'-O-methyladenosine-3'-phosphate
  modified_base 5: mod_base = OTHER; note = 2'-O-methylguanosine-3'-phosphate
  modified_base 6: mod_base = OTHER; note = 2'-O-methyladenosine-3'-phosphate
  modified_base 7: mod_base = OTHER; note = 2'-deoxy-2'-fluorouridine-3'-phosphate
  modified_base 8: mod_base = OTHER; note = 2'-O-methylcytidine-3'-phosphate
  modified_base 9: mod_base = OTHER; note = 2'-deoxy-2'-fluorouridine-3'-phosphate
  modified_base 10: mod_base = OTHER; note = 2'-deoxy-2'-fluoroguanosine-3'-phosphate
  modified_base 11: mod_base = OTHER; note = 2'-deoxy-2'-fluoroadenosine-3'-phosphate
  modified_base 12: mod_base = OTHER; note = 2'-O-methyluridine-3'-phosphate
  modified_base 13: mod_base = OTHER; note = 2'-O-methyluridine-3'-phosphate
  modified_base 14: mod_base = OTHER; note = 2'-O-methyluridine-3'-phosphate
  modified_base 15: mod_base = OTHER; note = 2'-O-methyladenosine-3'-phosphate
  modified_base 16: mod_base = OTHER; note = 2'-O-methyluridine-3'-phosphate
  modified_base 17: mod_base = OTHER; note = 2'-O-methylguanosine-3'-phosphate
  modified_base 18: mod_base = OTHER; note = 2'-O-methyladenosine-3'-phosphate
  modified_base 19: mod_base = OTHER; note = 2'-O-methyluridine-3'-phosphate
  modified_base 20: mod_base = OTHER; note = 2'-O-methylguanosine-3'-phosphate
  modified_base 21: mod_base = OTHER; note = 2'-O-methyladenosine
gaaagatctgatttatgatga

SEQ ID NO: 3177 - RNA, 21 nt, synthetic construct
  source 1..21: mol_type = other RNA
  modified_base 1: mod_base = OTHER; note = 2'-O-methyladenosine-3'-phosphate
  modified_base 2: mod_base = OTHER; note = 2'-O-methyladenosine-3'-phosphate
  modified_base 3: mod_base = OTHER; note = 2'-O-methyladenosine-3'-phosphate
  modified_base 4: mod_base = OTHER; note = 2'-O-methylguanosine-3'-phosphate
  modified_base 5: mod_base = OTHER; note = 2'-O-methyladenosine-3'-phosphate
  modified_base 6: mod_base = OTHER; note = 2'-O-methyluridine-3'-phosphate
  modified_base 7: mod_base = OTHER; note = 2'-deoxy-2'-fluorocytidine-3'-phosphate
  modified_base 8: mod_base = OTHER; note = 2'-O-methyluridine-3'-phosphate
  modified_base 9: mod_base = OTHER; note = 2'-deoxy-2'-fluoroguanosine-3'-phosphate
  modified_base 10: mod_base = OTHER; note = 2'-deoxy-2'-fluoroadenosine-3'-phosphate
  modified_base 11: mod_base = OTHER; note = 2'-deoxy-2'-fluorouridine-3'-phosphate
  modified_base 12: mod_base = OTHER; note = 2'-O-methyluridine-3'-phosphate
  modified_base 13: mod_base = OTHER; note = 2'-O-methyluridine-3'-phosphate
  modified_base 14: mod_base = OTHER; note = 2'-O-methyladenosine-3'-phosphate
  modified_base 15: mod_base = OTHER; note = 2'-O-methyluridine-3'-phosphate
  modified_base 16: mod_base = OTHER; note = 2'-O-methylguanosine-3'-phosphate
  modified_base 17: mod_base = OTHER; note = 2'-O-methyladenosine-3'-phosphate
  modified_base 18: mod_base = OTHER; note = 2'-O-methyluridine-3'-phosphate
  modified_base 19: mod_base = OTHER; note = 2'-O-methylguanosine-3'-phosphate
  modified_base 20: mod_base = OTHER; note = 2'-O-methyluridine-3'-phosphate
  modified_base 21: mod_base = OTHER; note = 2'-O-methyladenosine
aaagatctgatttatgatgta

SEQ ID NO: 3178 - RNA, 21 nt, synthetic construct
  source 1..21: mol_type = other RNA
  modified_base 1: mod_base = OTHER; note = 2'-O-methyladenosine-3'-phosphate
  modified_base 2: mod_base = OTHER; note = 2'-O-methyladenosine-3'-phosphate
  modified_base 3: mod_base = OTHER; note = 2'-O-methylguanosine-3'-phosphate
  modified_base 4: mod_base = OTHER; note = 2'-O-methyladenosine-3'-phosphate
  modified_base 5: mod_base = OTHER; note = 2'-O-methyluridine-3'-phosphate
  modified_base 6: mod_base = OTHER; note = 2'-O-methylcytidine-3'-phosphate
  modified_base 7: mod_base = OTHER; note = 2'-deoxy-2'-fluorouridine-3'-phosphate
  modified_base 8: mod_base = OTHER; note = 2'-O-methylguanosine-3'-phosphate
  modified_base 9: mod_base = OTHER; note = 2'-deoxy-2'-fluoroadenosine-3'-phosphate
  modified_base 10: mod_base = OTHER; note = 2'-deoxy-2'-fluorouridine-3'-phosphate
  modified_base 11: mod_base = OTHER; note = 2'-deoxy-2'-fluorouridine-3'-phosphate
  modified_base 12: mod_base = OTHER; note = 2'-O-methyluridine-3'-phosphate
  modified_base 13: mod_base = OTHER; note = 2'-O-methyladenosine-3'-phosphate
  modified_base 14: mod_base = OTHER; note = 2'-O-methyluridine-3'-phosphate
  modified_base 15: mod_base = OTHER; note = 2'-O-methylguanosine-3'-phosphate
  modified_base 16: mod_base = OTHER; note = 2'-O-methyladenosine-3'-phosphate
  modified_base 17: mod_base = OTHER; note = 2'-O-methyluridine-3'-phosphate
  modified_base 18: mod_base = OTHER; note = 2'-O-methylguanosine-3'-phosphate
  modified_base 19: mod_base = OTHER; note = 2'-O-methyluridine-3'-phosphate
  modified_base 20: mod_base = OTHER; note = 2'-O-methylguanosine-3'-phosphate
  modified_base 21: mod_base = OTHER; note = 2'-O-methyladenosine
aagatctgatttatgatgtga

SEQ ID NO: 3179 - RNA, 21 nt, synthetic construct
  source 1..21: mol_type = other RNA
  modified_base 1: mod_base = OTHER; note = 2'-O-methyladenosine-3'-phosphate
  modified_base 2: mod_base = OTHER; note = 2'-O-methylguanosine-3'-phosphate
  modified_base 3: mod_base = OTHER; note = 2'-O-methyladenosine-3'-phosphate
  modified_base 4: mod_base = OTHER; note = 2'-O-methyluridine-3'-phosphate
  modified_base 5: mod_base = OTHER; note = 2'-O-methylcytidine-3'-phosphate
  modified_base 6: mod_base = OTHER; note = 2'-O-methyluridine-3'-phosphate
  modified_base 7: mod_base = OTHER; note = 2'-deoxy-2'-fluoroguanosine-3'-phosphate
  modified_base 8: mod_base = OTHER; note = 2'-O-methyladenosine-3'-phosphate
  modified_base 9: mod_base = OTHER; note = 2'-deoxy-2'-fluorouridine-3'-phosphate
  modified_base 10: mod_base = OTHER; note = 2'-deoxy-2'-fluorouridine-3'-phosphate
  modified_base 11: mod_base = OTHER; note = 2'-deoxy-2'-fluorouridine-3'-phosphate
  modified_base 12: mod_base = OTHER; note = 2'-O-methyladenosine-3'-phosphate
  modified_base 13: mod_base = OTHER; note = 2'-O-methyluridine-3'-phosphate
  modified_base 14: mod_base = OTHER; note = 2'-O-methylguanosine-3'-phosphate
  modified_base 15: mod_base = OTHER; note = 2'-O-methyladenosine-3'-phosphate
  modified_base 16: mod_base = OTHER; note = 2'-O-methyluridine-3'-phosphate
  modified_base 17: mod_base = OTHER; note = 2'-O-methylguanosine-3'-phosphate
  modified_base 18: mod_base = OTHER; note = 2'-O-methyluridine-3'-phosphate
  modified_base 19: mod_base = OTHER; note = 2'-O-methylguanosine-3'-phosphate
  modified_base 20: mod_base = OTHER; note = 2'-O-methyladenosine-3'-phosphate
  modified_base 21: mod_base = OTHER; note = 2'-O-methyladenosine
agatctgatttatgatgtgaa

SEQ ID NO: 3180 - RNA, 21 nt, synthetic construct
  source 1..21: mol_type = other RNA
  modified_base 1: mod_base = OTHER; note = 2'-O-methylguanosine-3'-phosphate
  modified_base 2: mod_base = OTHER; note = 2'-O-methyladenosine-3'-phosphate
  modified_base 3: mod_base = OTHER; note = 2'-O-methyluridine-3'-phosphate
  modified_base 4: mod_base = OTHER; note = 2'-O-methylcytidine-3'-phosphate
  modified_base 5: mod_base = OTHER; note = 2'-O-methyluridine-3'-phosphate
  modified_base 6: mod_base = OTHER; note = 2'-O-methylguanosine-3'-phosphate
  modified_base 7: mod_base = OTHER; note = 2'-deoxy-2'-fluoroadenosine-3'-phosphate
  modified_base 8: mod_base = OTHER; note = 2'-O-methyluridine-3'-phosphate
  modified_base 9: mod_base = OTHER; note = 2'-deoxy-2'-fluorouridine-3'-phosphate
  modified_base 10: mod_base = OTHER; note = 2'-deoxy-2'-fluorouridine-3'-phosphate
  modified_base 11: mod_base = OTHER; note = 2'-deoxy-2'-fluoroadenosine-3'-phosphate
  modified_base 12: mod_base = OTHER; note = 2'-O-methyluridine-3'-phosphate
  modified_base 13: mod_base = OTHER; note = 2'-O-methylguanosine-3'-phosphate
  modified_base 14: mod_base = OTHER; note = 2'-O-methyladenosine-3'-phosphate
  modified_base 15: mod_base = OTHER; note = 2'-O-methyluridine-3'-phosphate
  modified_base 16: mod_base = OTHER; note = 2'-O-methylguanosine-3'-phosphate
  modified_base 17: mod_base = OTHER; note = 2'-O-methyluridine-3'-phosphate
  modified_base 18: mod_base = OTHER; note = 2'-O-methylguanosine-3'-phosphate
  modified_base 19: mod_base = OTHER; note = 2'-O-methyladenosine-3'-phosphate
  modified_base 20: mod_base = OTHER; note = 2'-O-methylcytidine-3'-phosphate
  modified_base 21: mod_base = OTHER; note = 2'-O-methyladenosine
gatctgatttatgatgtgaca

SEQ ID NO: 3181 - RNA, 21 nt, synthetic construct
  source 1..21: mol_type = other RNA
  modified_base 1: mod_base = OTHER; note = 2'-O-methylguanosine-3'-phosphate
  modified_base 2: mod_base = OTHER; note = 2'-O-methyluridine-3'-phosphate
  modified_base 3: mod_base = OTHER; note = 2'-O-methylcytidine-3'-phosphate
  modified_base 4: mod_base = OTHER; note = 2'-O-methyluridine-3'-phosphate
  modified_base 5: mod_base = OTHER; note = 2'-O-methyladenosine-3'-phosphate
  modified_base 6: mod_base = OTHER; note = 2'-O-methylcytidine-3'-phosphate
  modified_base 7: mod_base = OTHER; note = 2'-deoxy-2'-fluorocytidine-3'-phosphate
  modified_base 8: mod_base = OTHER; note = 2'-O-methyluridine-3'-phosphate
  modified_base 9: mod_base = OTHER; note = 2'-deoxy-2'-fluorocytidine-3'-phosphate
  modified_base 10: mod_base = OTHER; note = 2'-deoxy-2'-fluorouridine-3'-phosphate
  modified_base 11: mod_base = OTHER; note = 2'-deoxy-2'-fluoroguanosine-3'-phosphate
  modified_base 12: mod_base = OTHER; note = 2'-O-methyluridine-3'-phosphate
  modified_base 13: mod_base = OTHER; note = 2'-O-methyluridine-3'-phosphate
  modified_base 14: mod_base = OTHER; note = 2'-O-methylguanosine-3'-phosphate
  modified_base 15: mod_base = OTHER; note = 2'-O-methylguanosine-3'-phosphate
  modified_base 16: mod_base = OTHER; note = 2'-O-methyluridine-3'-phosphate
  modified_base 17: mod_base = OTHER; note = 2'-O-methyluridine-3'-phosphate
  modified_base 18: mod_base = OTHER; note = 2'-O-methylcytidine-3'-phosphate
  modified_base 19: mod_base = OTHER; note = 2'-O-methyladenosine-3'-phosphate
  modified_base 20: mod_base = OTHER; note = 2'-O-methyladenosine-3'-phosphate
  modified_base 21: mod_base = OTHER; note = 2'-O-methyladenosine
gtctacctctgttggttcaaa

SEQ ID NO: 3182 - RNA, 21 nt, synthetic construct
  source 1..21: mol_type = other RNA
  modified_base 1: mod_base = OTHER; note = 2'-O-methyluridine-3'-phosphate
  modified_base 2: mod_base = OTHER; note = 2'-O-methylcytidine-3'-phosphate
  modified_base 3: mod_base = OTHER; note = 2'-O-methyluridine-3'-phosphate
  modified_base 4: mod_base = OTHER; note = 2'-O-methyladenosine-3'-phosphate
  modified_base 5: mod_base = OTHER; note = 2'-O-methylcytidine-3'-phosphate
  modified_base 6: mod_base = OTHER; note = 2'-O-methylcytidine-3'-phosphate
  modified_base 7: mod_base = OTHER; note = 2'-deoxy-2'-fluorouridine-3'-phosphate
  modified_base 8: mod_base = OTHER; note = 2'-O-methylcytidine-3'-phosphate
  modified_base 9: mod_base = OTHER; note = 2'-deoxy-2'-fluorouridine-3'-phosphate
  modified_base 10: mod_base = OTHER; note = 2'-deoxy-2'-fluoroguanosine-3'-phosphate
  modified_base 11: mod_base = OTHER; note = 2'-deoxy-2'-fluorouridine-3'-phosphate
  modified_base 12: mod_base = OTHER; note = 2'-O-methyluridine-3'-phosphate
  modified_base 13: mod_base = OTHER; note = 2'-O-methylguanosine-3'-phosphate
  modified_base 14: mod_base = OTHER; note = 2'-O-methylguanosine-3'-phosphate
  modified_base 15: mod_base = OTHER; note = 2'-O-methyluridine-3'-phosphate
  modified_base 16: mod_base = OTHER; note = 2'-O-methyluridine-3'-phosphate
  modified_base 17: mod_base = OTHER; note = 2'-O-methylcytidine-3'-phosphate
  modified_base 18: mod_base = OTHER; note = 2'-O-methyladenosine-3'-phosphate
  modified_base 19: mod_base = OTHER; note = 2'-O-methyladenosine-3'-phosphate
  modified_base 20: mod_base = OTHER; note = 2'-O-methyladenosine-3'-phosphate
  modified_base 21: mod_base = OTHER; note = 2'-O-methyladenosine
tctacctctgttggttcaaaa

SEQ ID NO: 3183 - RNA, 21 nt, synthetic construct
  source 1..21: mol_type = other RNA
  modified_base 1: mod_base = OTHER; note = 2'-O-methyladenosine-3'-phosphate
  modified_base 2: mod_base = OTHER; note = 2'-O-methylcytidine-3'-phosphate
  modified_base 3: mod_base = OTHER; note = 2'-O-methylcytidine-3'-phosphate
  modified_base 4: mod_base = OTHER; note = 2'-O-methyluridine-3'-phosphate
  modified_base 5: mod_base = OTHER; note = 2'-O-methylcytidine-3'-phosphate
  modified_base 6: mod_base = OTHER; note = 2'-O-methyluridine-3'-phosphate
  modified_base 7: mod_base = OTHER; note = 2'-deoxy-2'-fluoroguanosine-3'-phosphate
  modified_base 8: mod_base = OTHER; note = 2'-O-methyluridine-3'-phosphate
  modified_base 9: mod_base = OTHER; note = 2'-deoxy-2'-fluorouridine-3'-phosphate
  modified_base 10: mod_base = OTHER; note = 2'-deoxy-2'-fluoroguanosine-3'-phosphate
  modified_base 11: mod_base = OTHER; note = 2'-deoxy-2'-fluoroguanosine-3'-phosphate
  modified_base 12: mod_base = OTHER; note = 2'-O-methyluridine-3'-phosphate
  modified_base 13: mod_base = OTHER; note = 2'-O-methyluridine-3'-phosphate
  modified_base 14: mod_base = OTHER; note = 2'-O-methylcytidine-3'-phosphate
  modified_base 15: mod_base = OTHER; note = 2'-O-methyladenosine-3'-phosphate
  modified_base 16: mod_base = OTHER; note = 2'-O-methyladenosine-3'-phosphate
  modified_base 17: mod_base = OTHER; note = 2'-O-methyladenosine-3'-phosphate
  modified_base 18: mod_base = OTHER; note = 2'-O-methylguanosine-3'-phosphate
  modified_base 19: mod_base = OTHER; note = 2'-O-methylguanosine-3'-phosphate
  modified_base 20: mod_base = OTHER; note = 2'-O-methyladenosine-3'-phosphate
  modified_base 21: mod_base = OTHER; note = 2'-O-methyladenosine
acctctgttggttcaaaggaa

SEQ ID NO: 3184 - RNA, 21 nt, synthetic construct
  source 1..21: mol_type = other RNA
  modified_base 1: mod_base = OTHER; note = 2'-O-methylcytidine-3'-phosphate
  modified_base 2: mod_base = OTHER; note = 2'-O-methylcytidine-3'-phosphate
  modified_base 3: mod_base = OTHER; note = 2'-O-methyluridine-3'-phosphate
  modified_base 4: mod_base = OTHER; note = 2'-O-methylcytidine-3'-phosphate
  modified_base 5: mod_base = OTHER; note = 2'-O-methyluridine-3'-phosphate
  modified_base 6: mod_base = OTHER; note = 2'-O-methylguanosine-3'-phosphate
  modified_base 7: mod_base = OTHER; note = 2'-deoxy-2'-fluorouridine-3'-phosphate
  modified_base 8: mod_base = OTHER; note = 2'-O-methyluridine-3'-phosphate
  modified_base 9: mod_base = OTHER; note = 2'-deoxy-2'-fluoroguanosine-3'-phosphate
  modified_base 10: mod_base = OTHER; note = 2'-deoxy-2'-fluoroguanosine-3'-phosphate
  modified_base 11: mod_base = OTHER; note = 2'-deoxy-2'-fluorouridine-3'-phosphate
  modified_base 12: mod_base = OTHER; note = 2'-O-methyluridine-3'-phosphate
  modified_base 13: mod_base = OTHER; note = 2'-O-methylcytidine-3'-phosphate
  modified_base 14: mod_base = OTHER; note = 2'-O-methyladenosine-3'-phosphate
  modified_base 15: mod_base = OTHER; note = 2'-O-methyladenosine-3'-phosphate
  modified_base 16: mod_base = OTHER; note = 2'-O-methyladenosine-3'-phosphate
  modified_base 17: mod_base = OTHER; note = 2'-O-methylguanosine-3'-phosphate
  modified_base 18: mod_base = OTHER; note = 2'-O-methylguanosine-3'-phosphate
  modified_base 19: mod_base = OTHER; note = 2'-O-methyladenosine-3'-phosphate
  modified_base 20: mod_base = OTHER; note = 2'-O-methylcytidine-3'-phosphate
  modified_base 21: mod_base = OTHER; note = 2'-O-methyladenosine
cctctgttggttcaaaggaca

SEQ ID NO: 3185 - RNA, 21 nt, synthetic construct
  source 1..21: mol_type = other RNA
  modified_base 1: mod_base = OTHER; note = 2'-O-methylcytidine-3'-phosphate
  modified_base 2: mod_base = OTHER; note = 2'-O-methyluridine-3'-phosphate
  modified_base 3: mod_base = OTHER; note = 2'-O-methylguanosine-3'-phosphate
  modified_base 4: mod_base = OTHER; note = 2'-O-methyluridine-3'-phosphate
  modified_base 5: mod_base = OTHER; note = 2'-O-methyluridine-3'-phosphate
  modified_base 6: mod_base = OTHER; note = 2'-O-methylguanosine-3'-phosphate
  modified_base 7: mod_base = OTHER; note = 2'-deoxy-2'-fluoroguanosine-3'-phosphate
  modified_base 8: mod_base = OTHER; note = 2'-O-methyluridine-3'-phosphate
  modified_base 9: mod_base = OTHER; note = 2'-deoxy-2'-fluorouridine-3'-phosphate
  modified_base 10: mod_base = OTHER; note = 2'-deoxy-2'-fluorocytidine-3'-phosphate
  modified_base 11: mod_base = OTHER; note = 2'-deoxy-2'-fluoroadenosine-3'-phosphate
  modified_base 12: mod_base = OTHER; note = 2'-O-methyladenosine-3'-phosphate
  modified_base 13: mod_base = OTHER; note = 2'-O-methyladenosine-3'-phosphate
  modified_base 14: mod_base = OTHER; note = 2'-O-methylguanosine-3'-phosphate
  modified_base 15: mod_base = OTHER; note = 2'-O-methylguanosine-3'-phosphate
  modified_base 16: mod_base = OTHER; note = 2'-O-methyladenosine-3'-phosphate
  modified_base 17: mod_base = OTHER; note = 2'-O-methylcytidine-3'-phosphate
  modified_base 18: mod_base = OTHER; note = 2'-O-methyladenosine-3'-phosphate
  modified_base 19: mod_base = OTHER; note = 2'-O-methyladenosine-3'-phosphate
  modified_base 20: mod_base = OTHER; note = 2'-O-methyluridine-3'-phosphate
  modified_base 21: mod_base = OTHER; note = 2'-O-methyladenosine
ctgttggttcaaaggacaata

SEQ ID NO: 3186 - RNA, 21 nt, synthetic construct
  source 1..21: mol_type = other RNA
  modified_base 1: mod_base = OTHER; note = 2'-O-methyluridine-3'-phosphate
  modified_base 2: mod_base = OTHER; note = 2'-O-methylguanosine-3'-phosphate
  modified_base 3: mod_base = OTHER; note = 2'-O-methyluridine-3'-phosphate
  modified_base 4: mod_base = OTHER; note = 2'-O-methyluridine-3'-phosphate
  modified_base 5: mod_base = OTHER; note = 2'-O-methylguanosine-3'-phosphate
  modified_base 6: mod_base = OTHER; note = 2'-O-methylguanosine-3'-phosphate
  modified_base 7: mod_base = OTHER; note = 2'-deoxy-2'-fluorouridine-3'-phosphate
  modified_base 8: mod_base = OTHER; note = 2'-O-methyluridine-3'-phosphate
  modified_base 9: mod_base = OTHER; note = 2'-deoxy-2'-fluorocytidine-3'-phosphate
  modified_base 10: mod_base = OTHER; note = 2'-deoxy-2'-fluoroadenosine-3'-phosphate
  modified_base 11: mod_base = OTHER; note = 2'-deoxy-2'-fluoroadenosine-3'-phosphate
  modified_base 12: mod_base = OTHER; note = 2'-O-methyladenosine-3'-phosphate
  modified_base 13: mod_base = OTHER; note = 2'-O-methylguanosine-3'-phosphate
  modified_base 14: mod_base = OTHER; note = 2'-O-methylguanosine-3'-phosphate
  modified_base 15: mod_base = OTHER; note = 2'-O-methyladenosine-3'-phosphate
  modified_base 16: mod_base = OTHER; note = 2'-O-methylcytidine-3'-phosphate
  modified_base 17: mod_base = OTHER; note = 2'-O-methyladenosine-3'-phosphate
  modified_base 18: mod_base = OTHER; note = 2'-O-methyladenosine-3'-phosphate
  modified_base 19: mod_base = OTHER; note = 2'-O-methyluridine-3'-phosphate
  modified_base 20: mod_base = OTHER; note = 2'-O-methyluridine-3'-phosphate
  modified_base 21: mod_base = OTHER; note = 2'-O-methyladenosine
tgttggttcaaaggacaatta

SEQ ID NO: 3187 - RNA, 21 nt, synthetic construct
  source 1..21: mol_type = other RNA
  modified_base 1: mod_base = OTHER; note = 2'-O-methylguanosine-3'-phosphate
  modified_base 2: mod_base = OTHER; note = 2'-O-methylguanosine-3'-phosphate
  modified_base 3: mod_base = OTHER; note = 2'-O-methyluridine-3'-phosphate
  modified_base 4: mod_base = OTHER; note = 2'-O-methyluridine-3'-phosphate
  modified_base 5: mod_base = OTHER; note = 2'-O-methylcytidine-3'-phosphate
  modified_base 6: mod_base = OTHER; note = 2'-O-methyladenosine-3'-phosphate
  modified_base 7: mod_base = OTHER; note = 2'-deoxy-2'-fluoroadenosine-3'-phosphate
  modified_base 8: mod_base = OTHER; note = 2'-O-methyladenosine-3'-phosphate
  modified_base 9: mod_base = OTHER; note = 2'-deoxy-2'-fluoroguanosine-3'-phosphate
  modified_base 10: mod_base = OTHER; note = 2'-deoxy-2'-fluoroguanosine-3'-phosphate
  modified_base 11: mod_base = OTHER; note = 2'-deoxy-2'-fluoroadenosine-3'-phosphate
  modified_base 12: mod_base = OTHER; note = 2'-O-methylcytidine-3'-phosphate
  modified_base 13: mod_base = OTHER; note = 2'-O-methyladenosine-3'-phosphate
  modified_base 14: mod_base = OTHER; note = 2'-O-methyladenosine-3'-phosphate
  modified_base 15: mod_base = OTHER; note = 2'-O-methyluridine-3'-phosphate
  modified_base 16: mod_base = OTHER; note = 2'-O-methyluridine-3'-phosphate
  modified_base 17: mod_base = OTHER; note = 2'-O-methylguanosine-3'-phosphate
  modified_base 18: mod_base = OTHER; note = 2'-O-methylcytidine-3'-phosphate
  modified_base 19: mod_base = OTHER; note = 2'-O-methyladenosine-3'-phosphate
  modified_base 20: mod_base = OTHER; note = 2'-O-methyladenosine-3'-phosphate
  modified_base 21: mod_base = OTHER; note = 2'-O-methyladenosine
ggttcaaaggacaattgcaaa

SEQ ID NO: 3188 - RNA, 21 nt, synthetic construct
  source 1..21: mol_type = other RNA
  modified_base 1: mod_base = OTHER; note = 2'-O-methyluridine-3'-phosphate
  modified_base 2: mod_base = OTHER; note = 2'-O-methylcytidine-3'-phosphate
  modified_base 3: mod_base = OTHER; note = 2'-O-methyladenosine-3'-phosphate
  modified_base 4: mod_base = OTHER; note = 2'-O-methyladenosine-3'-phosphate
  modified_base 5: mod_base = OTHER; note = 2'-O-methyladenosine-3'-phosphate
  modified_base 6: mod_base = OTHER; note = 2'-O-methylguanosine-3'-phosphate
  modified_base 7: mod_base = OTHER; note = 2'-deoxy-2'-fluoroguanosine-3'-phosphate
  modified_base 8: mod_base = OTHER; note = 2'-O-methyladenosine-3'-phosphate
  modified_base 9: mod_base = OTHER; note = 2'-deoxy-2'-fluorocytidine-3'-phosphate
  modified_base 10: mod_base = OTHER; note = 2'-deoxy-2'-fluoroadenosine-3'-phosphate
  modified_base 11: mod_base = OTHER; note = 2'-deoxy-2'-fluoroadenosine-3'-phosphate
  modified_base 12: mod_base = OTHER; note = 2'-O-methyluridine-3'-phosphate
  modified_base 13: mod_base = OTHER; note = 2'-O-methyluridine-3'-phosphate
  modified_base 14: mod_base = OTHER; note = 2'-O-methylguanosine-3'-phosphate
  modified_base 15: mod_base = OTHER; note = 2'-O-methylcytidine-3'-phosphate
  modified_base 16: mod_base = OTHER; note = 2'-O-methyladenosine-3'-phosphate
  modified_base 17: mod_base = OTHER; note = 2'-O-methyladenosine-3'-phosphate
  modified_base 18: mod_base = OTHER; note = 2'-O-methylguanosine-3'-phosphate
  modified_base 19: mod_base = OTHER; note = 2'-O-methylguanosine-3'-phosphate
  modified_base 20: mod_base = OTHER; note = 2'-O-methyladenosine-3'-phosphate
  modified_base 21: mod_base = OTHER; note = 2'-O-methyladenosine
tcaaaggacaattgcaaggaa

SEQ ID NO: 3189 - RNA, 21 nt, synthetic construct
  source 1..21: mol_type = other RNA
  modified_base 1: mod_base = OTHER; note = 2'-O-methyluridine-3'-phosphate
  modified_base 2: mod_base = OTHER; note = 2'-O-methyladenosine-3'-phosphate
  modified_base 3: mod_base = OTHER; note = 2'-O-methylguanosine-3'-phosphate
  modified_base 4: mod_base = OTHER; note = 2'-O-methyluridine-3'-phosphate
  modified_base 5: mod_base = OTHER; note = 2'-O-methyladenosine-3'-phosphate
  modified_base 6: mod_base = OTHER; note = 2'-O-methylguanosine-3'-phosphate
  modified_base 7: mod_base = OTHER; note = 2'-deoxy-2'-fluoroguanosine-3'-phosphate
  modified_base 8: mod_base = OTHER; note = 2'-O-methyladenosine-3'-phosphate
  modified_base 9: mod_base = OTHER; note = 2'-deoxy-2'-fluoroadenosine-3'-phosphate
  modified_base 10: mod_base = OTHER; note = 2'-deoxy-2'-fluoroadenosine-3'-phosphate
  modified_base 11: mod_base = OTHER; note = 2'-deoxy-2'-fluoroadenosine-3'-phosphate
  modified_base 12: mod_base = OTHER; note = 2'-O-methylguanosine-3'-phosphate
  modified_base 13: mod_base = OTHER; note = 2'-O-methylguanosine-3'-phosphate
  modified_base 14: mod_base = OTHER; note = 2'-O-methyluridine-3'-phosphate
  modified_base 15: mod_base = OTHER; note = 2'-O-methyladenosine-3'-phosphate
  modified_base 16: mod_base = OTHER; note = 2'-O-methylguanosine-3'-phosphate
  modified_base 17: mod_base = OTHER; note = 2'-O-methyladenosine-3'-phosphate
  modified_base 18: mod_base = OTHER; note = 2'-O-methyluridine-3'-phosphate
  modified_base 19: mod_base = OTHER; note = 2'-O-methyluridine-3'-phosphate
  modified_base 20: mod_base = OTHER; note = 2'-O-methyluridine-3'-phosphate
  modified_base 21: mod_base = OTHER; note = 2'-O-methyladenosine
tagtaggaaaaggtagattta

SEQ ID NO: 3190 - RNA, 21 nt, synthetic construct
  source 1..21: mol_type = other RNA
  modified_base 1: mod_base = OTHER; note = 2'-O-methyluridine-3'-phosphate
  modified_base 2: mod_base = OTHER; note = 2'-O-methyladenosine-3'-phosphate
  modified_base 3: mod_base = OTHER; note = 2'-O-methylguanosine-3'-phosphate
  modified_base 4: mod_base = OTHER; note = 2'-O-methylguanosine-3'-phosphate
  modified_base 5: mod_base = OTHER; note = 2'-O-methyladenosine-3'-phosphate
  modified_base 6: mod_base = OTHER; note = 2'-O-methyladenosine-3'-phosphate
  modified_base 7: mod_base = OTHER; note = 2'-deoxy-2'-fluoroadenosine-3'-phosphate
  modified_base 8: mod_base = OTHER; note = 2'-O-methyladenosine-3'-phosphate
  modified_base 9: mod_base = OTHER; note = 2'-deoxy-2'-fluoroguanosine-3'-phosphate
  modified_base 10: mod_base = OTHER; note = 2'-deoxy-2'-fluoroguanosine-3'-phosphate
  modified_base 11: mod_base = OTHER; note = 2'-deoxy-2'-fluorouridine-3'-phosphate
  modified_base 12: mod_base = OTHER; note = 2'-O-methyladenosine-3'-phosphate
  modified_base 13: mod_base = OTHER; note = 2'-O-methylguanosine-3'-phosphate
  modified_base 14: mod_base = OTHER; note = 2'-O-methyladenosine-3'-phosphate
  modified_base 15: mod_base = OTHER; note = 2'-O-methyluridine-3'-phosphate
  modified_base 16: mod_base = OTHER; note = 2'-O-methyluridine-3'-phosphate
  modified_base 17: mod_base = OTHER; note = 2'-O-methyluridine-3'-phosphate
  modified_base 18: mod_base = OTHER; note = 2'-O-methylguanosine-3'-phosphate
  modified_base 19: mod_base = OTHER; note = 2'-O-methylguanosine-3'-phosphate
  modified_base 20: mod_base = OTHER; note = 2'-O-methyluridine-3'-phosphate
  modified_base 21: mod_base = OTHER; note = 2'-O-methyladenosine
taggaaaaggtagatttggta

SEQ ID NO: 3191 - RNA, 21 nt, synthetic construct
  source 1..21: mol_type = other RNA
  modified_base 1: mod_base = OTHER; note = 2'-O-methylguanosine-3'-phosphate
  modified_base 2: mod_base = OTHER; note = 2'-O-methyladenosine-3'-phosphate
  modified_base 3: mod_base = OTHER; note = 2'-O-methyladenosine-3'-phosphate
  modified_base 4: mod_base = OTHER; note = 2'-O-methylguanosine-3'-phosphate
  modified_base 5: mod_base = OTHER; note = 2'-O-methyladenosine-3'-phosphate
  modified_base 6: mod_base = OTHER; note = 2'-O-methyluridine-3'-phosphate
  modified_base 7: mod_base = OTHER; note = 2'-deoxy-2'-fluoroguanosine-3'-phosphate
  modified_base 8: mod_base = OTHER; note = 2'-O-methyluridine-3'-phosphate
  modified_base 9: mod_base = OTHER; note = 2'-deoxy-2'-fluoroguanosine-3'-phosphate
  modified_base 10: mod_base = OTHER; note = 2'-deoxy-2'-fluoroguanosine-3'-phosphate
  modified_base 11: mod_base = OTHER; note = 2'-deoxy-2'-fluorocytidine-3'-phosphate
  modified_base 12: mod_base = OTHER; note = 2'-O-methyluridine-3'-phosphate
  modified_base 13: mod_base = OTHER; note = 2'-O-methylguanosine-3'-phosphate
  modified_base 14: mod_base = OTHER; note = 2'-O-methyluridine-3'-phosphate
  modified_base 15: mod_base = OTHER; note = 2'-O-methylguanosine-3'-phosphate
  modified_base 16: mod_base = OTHER; note = 2'-O-methyladenosine-3'-phosphate
  modified_base 17: mod_base = OTHER; note = 2'-O-methyladenosine-3'-phosphate
  modified_base 18: mod_base = OTHER; note = 2'-O-methyladenosine-3'-phosphate
  modified_base 19: mod_base = OTHER; note = 2'-O-methyladenosine-3'-phosphate
  modified_base 20: mod_base = OTHER; note = 2'-O-methyluridine-3'-phosphate
  modified_base 21: mod_base = OTHER; note = 2'-O-methyladenosine
gaagatgtggctgtgaaaata

SEQ ID NO: 3192 - RNA, 21 nt, synthetic construct
  source 1..21: mol_type = other RNA
  modified_base 1: mod_base = OTHER; note = 2'-O-methyladenosine-3'-phosphate
  modified_base 2: mod_base = OTHER; note = 2'-O-methyladenosine-3'-phosphate
  modified_base 3: mod_base = OTHER; note = 2'-O-methylguanosine-3'-phosphate
  modified_base 4: mod_base = OTHER; note = 2'-O-methyladenosine-3'-phosphate
  modified_base 5: mod_base = OTHER; note = 2'-O-methyluridine-3'-phosphate
  modified_base 6: mod_base = OTHER; note = 2'-O-methylguanosine-3'-phosphate
  modified_base 7: mod_base = OTHER; note = 2'-deoxy-2'-fluorouridine-3'-phosphate
  modified_base 8: mod_base = OTHER; note = 2'-O-methylguanosine-3'-phosphate
  modified_base 9: mod_base = OTHER; note = 2'-deoxy-2'-fluoroguanosine-3'-phosphate
  modified_base 10: mod_base = OTHER; note = 2'-deoxy-2'-fluorocytidine-3'-phosphate
  modified_base 11: mod_base = OTHER; note = 2'-deoxy-2'-fluorouridine-3'-phosphate
  modified_base 12: mod_base = OTHER; note = 2'-O-methylguanosine-3'-phosphate
  modified_base 13: mod_base = OTHER; note = 2'-O-methyluridine-3'-phosphate
  modified_base 14: mod_base = OTHER; note = 2'-O-methylguanosine-3'-phosphate
  modified_base 15: mod_base = OTHER; note = 2'-O-methyladenosine-3'-phosphate
  modified_base 16: mod_base = OTHER; note = 2'-O-methyladenosine-3'-phosphate
  modified_base 17: mod_base = OTHER; note = 2'-O-methyladenosine-3'-phosphate
  modified_base 18: mod_base = OTHER; note = 2'-O-methyladenosine-3'-phosphate
  modified_base 19: mod_base = OTHER; note = 2'-O-methyluridine-3'-phosphate
  modified_base 20: mod_base = OTHER; note = 2'-O-methyladenosine-3'-phosphate
  modified_base 21: mod_base = OTHER; note = 2'-O-methyladenosine
aagatgtggctgtgaaaataa

SEQ ID NO: 3193 - RNA, 21 nt, synthetic construct
  source 1..21: mol_type = other RNA
  modified_base 1: mod_base = OTHER; note = 2'-O-methyladenosine-3'-phosphate
  modified_base 2: mod_base = OTHER; note = 2'-O-methylguanosine-3'-phosphate
  modified_base 3: mod_base = OTHER; note = 2'-O-methyladenosine-3'-phosphate
  modified_base 4: mod_base = OTHER; note = 2'-O-methyluridine-3'-phosphate
  modified_base 5: mod_base = OTHER; note = 2'-O-methylguanosine-3'-phosphate
  modified_base 6: mod_base = OTHER; note = 2'-O-methyluridine-3'-phosphate
  modified_base 7: mod_base = OTHER; note = 2'-deoxy-2'-fluoroguanosine-3'-phosphate
  modified_base 8: mod_base = OTHER; note = 2'-O-methylguanosine-3'-phosphate
  modified_base 9: mod_base = OTHER; note = 2'-deoxy-2'-fluorocytidine-3'-phosphate
  modified_base 10: mod_base = OTHER; note = 2'-deoxy-2'-fluorouridine-3'-phosphate
  modified_base 11: mod_base = OTHER; note = 2'-deoxy-2'-fluoroguanosine-3'-phosphate
  modified_base 12: mod_base = OTHER; note = 2'-O-methyluridine-3'-phosphate
  modified_base 13: mod_base = OTHER; note = 2'-O-methylguanosine-3'-phosphate
  modified_base 14: mod_base = OTHER; note = 2'-O-methyladenosine-3'-phosphate
  modified_base 15: mod_base = OTHER; note = 2'-O-methyladenosine-3'-phosphate
  modified_base 16: mod_base = OTHER; note = 2'-O-methyladenosine-3'-phosphate
  modified_base 17: mod_base = OTHER; note = 2'-O-methyladenosine-3'-phosphate
  modified_base 18: mod_base = OTHER; note = 2'-O-methyluridine-3'-phosphate
  modified_base 19: mod_base = OTHER; note = 2'-O-methyladenosine-3'-phosphate
  modified_base 20: mod_base = OTHER; note = 2'-O-methyluridine-3'-phosphate
  modified_base 21: mod_base = OTHER; note = 2'-O-methyladenosine
agatgtggctgtgaaaatata

SEQ ID NO: 3194 - RNA, 21 nt, synthetic construct
  source 1..21: mol_type = other RNA
  modified_base 1: mod_base = OTHER; note = 2'-O-methylcytidine-3'-phosphate
  modified_base 2: mod_base = OTHER; note = 2'-O-methyluridine-3'-phosphate
  modified_base 3: mod_base = OTHER; note = 2'-O-methylcytidine-3'-phosphate
  modified_base 4: mod_base = OTHER; note = 2'-O-methylcytidine-3'-phosphate
  modified_base 5: mod_base = OTHER; note = 2'-O-methyluridine-3'-phosphate
  modified_base 6: mod_base = OTHER; note = 2'-O-methylcytidine-3'-phosphate
  modified_base 7: mod_base = OTHER; note = 2'-deoxy-2'-fluorocytidine-3'-phosphate
  modified_base 8: mod_base = OTHER; note = 2'-O-methyladenosine-3'-phosphate
  modified_base 9: mod_base = OTHER; note = 2'-deoxy-2'-fluoroguanosine-3'-phosphate
  modified_base 10: mod_base = OTHER; note = 2'-deoxy-2'-fluoroadenosine-3'-phosphate
  modified_base 11: mod_base = OTHER; note = 2'-deoxy-2'-fluoroguanosine-3'-phosphate
  modified_base 12: mod_base = OTHER; note = 2'-O-methyladenosine-3'-phosphate
  modified_base 13: mod_base = OTHER; note = 2'-O-methyluridine-3'-phosphate
  modified_base 14: mod_base = OTHER; note = 2'-O-methylguanosine-3'-phosphate
  modified_base 15: mod_base = OTHER; note = 2'-O-methyladenosine-3'-phosphate
  modified_base 16: mod_base = OTHER; note = 2'-O-methyladenosine-3'-phosphate
  modified_base 17: mod_base = OTHER; note = 2'-O-methyladenosine-3'-phosphate
  modified_base 18: mod_base = OTHER; note = 2'-O-methylguanosine-3'-phosphate
  modified_base 19: mod_base = OTHER; note = 2'-O-methyladenosine-3'-phosphate
  modified_base 20: mod_base = OTHER; note = 2'-O-methyluridine-3'-phosphate
  modified_base 21: mod_base = OTHER; note = 2'-O-methyladenosine
ctcctccagagatgaaagata

SEQ ID NO: 3195 - RNA, 21 nt, synthetic construct
  source 1..21: mol_type = other RNA
  modified_base 1: mod_base = OTHER; note = 2'-O-methyluridine-3'-phosphate
  modified_base 2: mod_base = OTHER; note = 2'-O-methylcytidine-3'-phosphate
  modified_base 3: mod_base = OTHER; note = 2'-O-methylcytidine-3'-phosphate
  modified_base 4: mod_base = OTHER; note = 2'-O-methyluridine-3'-phosphate
  modified_base 5: mod_base = OTHER; note = 2'-O-methylcytidine-3'-phosphate
  modified_base 6: mod_base = OTHER; note = 2'-O-methylcytidine-3'-phosphate
  modified_base 7: mod_base = OTHER; note = 2'-deoxy-2'-fluoroadenosine-3'-phosphate
  modified_base 8: mod_base = OTHER; note = 2'-O-methylguanosine-3'-phosphate
  modified_base 9: mod_base = OTHER; note = 2'-deoxy-2'-fluoroadenosine-3'-phosphate
  modified_base 10: mod_base = OTHER; note = 2'-deoxy-2'-fluoroguanosine-3'-phosphate
  modified_base 11: mod_base = OTHER; note = 2'-deoxy-2'-fluoroadenosine-3'-phosphate
  modified_base 12: mod_base = OTHER; note = 2'-O-methyluridine-3'-phosphate
  modified_base 13: mod_base = OTHER; note = 2'-O-methylguanosine-3'-phosphate
  modified_base 14: mod_base = OTHER; note = 2'-O-methyladenosine-3'-phosphate
  modified_base 15: mod_base = OTHER; note = 2'-O-methyladenosine-3'-phosphate
  modified_base 16: mod_base = OTHER; note = 2'-O-methyladenosine-3'-phosphate
  modified_base 17: mod_base = OTHER; note = 2'-O-methylguanosine-3'-phosphate
  modified_base 18: mod_base = OTHER; note = 2'-O-methyladenosine-3'-phosphate
  modified_base 19: mod_base = OTHER; note = 2'-O-methyluridine-3'-phosphate
  modified_base 20: mod_base = OTHER; note = 2'-O-methylcytidine-3'-phosphate
  modified_base 21: mod_base = OTHER; note = 2'-O-methyladenosine
tcctccagagatgaaagatca

SEQ ID NO: 3196 - RNA, 21 nt, synthetic construct
  source 1..21: mol_type = other RNA
  modified_base 1: mod_base = OTHER; note = 2'-O-methylcytidine-3'-phosphate
  modified_base 2: mod_base = OTHER; note = 2'-O-methylcytidine-3'-phosphate
  modified_base 3: mod_base = OTHER; note = 2'-O-methyluridine-3'-phosphate
  modified_base 4: mod_base = OTHER; note = 2'-O-methylcytidine-3'-phosphate
  modified_base 5: mod_base = OTHER; note = 2'-O-methylcytidine-3'-phosphate
  modified_base 6: mod_base = OTHER; note = 2'-O-methyladenosine-3'-phosphate
  modified_base 7: mod_base = OTHER; note = 2'-deoxy-2'-fluoroguanosine-3'-phosphate
  modified_base 8: mod_base = OTHER; note = 2'-O-methyladenosine-3'-phosphate
  modified_base 9: mod_base = OTHER; note = 2'-deoxy-2'-fluoroguanosine-3'-phosphate
  modified_base 10: mod_base = OTHER; note = 2'-deoxy-2'-fluoroadenosine-3'-phosphate
  modified_base 11: mod_base = OTHER; note = 2'-deoxy-2'-fluorouridine-3'-phosphate
  modified_base 12: mod_base = OTHER; note = 2'-O-methylguanosine-3'-phosphate
  modified_base 13: mod_base = OTHER; note = 2'-O-methyladenosine-3'-phosphate
  modified_base 14: mod_base = OTHER; note = 2'-O-methyladenosine-3'-phosphate
  modified_base 15: mod_base = OTHER; note = 2'-O-methyladenosine-3'-phosphate
  modified_base 16: mod_base = OTHER; note = 2'-O-methylguanosine-3'-phosphate
  modified_base 17: mod_base = OTHER; note = 2'-O-methyladenosine-3'-phosphate
  modified_base 18: mod_base = OTHER; note = 2'-O-methyluridine-3'-phosphate
  modified_base 19: mod_base = OTHER; note = 2'-O-methylcytidine-3'-phosphate
  modified_base 20: mod_base = OTHER; note = 2'-O-methyluridine-3'-phosphate
  modified_base 21: mod_base = OTHER; note = 2'-O-methyladenosine
cctccagagatgaaagatcta

SEQ ID NO: 3197 - RNA, 21 nt, synthetic construct
  source 1..21: mol_type = other RNA
  modified_base 1: mod_base = OTHER; note = 2'-O-methylcytidine-3'-phosphate
  modified_base 2: mod_base = OTHER; note = 2'-O-methyluridine-3'-phosphate
  modified_base 3: mod_base = OTHER; note = 2'-O-methylcytidine-3'-phosphate
  modified_base 4: mod_base = OTHER; note = 2'-O-methylcytidine-3'-phosphate
  modified_base 5: mod_base = OTHER; note = 2'-O-methyladenosine-3'-phosphate
  modified_base 6: mod_base = OTHER; note = 2'-O-methylguanosine-3'-phosphate
  modified_base 7: mod_base = OTHER; note = 2'-deoxy-2'-fluoroadenosine-3'-phosphate
  modified_base 8: mod_base = OTHER; note = 2'-O-methylguanosine-3'-phosphate
  modified_base 9: mod_base = OTHER; note = 2'-deoxy-2'-fluoroadenosine-3'-phosphate
  modified_base 10: mod_base = OTHER; note = 2'-deoxy-2'-fluorouridine-3'-phosphate
  modified_base 11: mod_base = OTHER; note = 2'-deoxy-2'-fluoroguanosine-3'-phosphate
  modified_base 12: mod_base = OTHER; note = 2'-O-methyladenosine-3'-phosphate
  modified_base 13: mod_base = OTHER; note = 2'-O-methyladenosine-3'-phosphate
  modified_base 14: mod_base = OTHER; note = 2'-O-methyladenosine-3'-phosphate
  modified_base 15: mod_base = OTHER; note = 2'-O-methylguanosine-3'-phosphate
  modified_base 16: mod_base = OTHER; note = 2'-O-methyladenosine-3'-phosphate
  modified_base 17: mod_base = OTHER; note = 2'-O-methyluridine-3'-phosphate
  modified_base 18: mod_base = OTHER; note = 2'-O-methylcytidine-3'-phosphate
  modified_base 19: mod_base = OTHER; note = 2'-O-methyluridine-3'-phosphate
  modified_base 20: mod_base = OTHER; note = 2'-O-methyluridine-3'-phosphate
  modified_base 21: mod_base = OTHER; note = 2'-O-methyladenosine
ctccagagatgaaagatctta

SEQ ID NO: 3198 - RNA, 21 nt, synthetic construct
  source 1..21: mol_type = other RNA
  modified_base 1: mod_base = OTHER; note = 2'-O-methyluridine-3'-phosphate
  modified_base 2: mod_base = OTHER; note = 2'-O-methylcytidine-3'-phosphate
  modified_base 3: mod_base = OTHER; note = 2'-O-methylcytidine-3'-phosphate
  modified_base 4: mod_base = OTHER; note = 2'-O-methyladenosine-3'-phosphate
  modified_base 5: mod_base = OTHER; note = 2'-O-methylguanosine-3'-phosphate
  modified_base 6: mod_base = OTHER; note = 2'-O-methyladenosine-3'-phosphate
  modified_base 7: mod_base = OTHER; note = 2'-deoxy-2'-fluoroguanosine-3'-phosphate
  modified_base 8: mod_base = OTHER; note = 2'-O-methyladenosine-3'-phosphate
  modified_base 9: mod_base = OTHER; note = 2'-deoxy-2'-fluorouridine-3'-phosphate
  modified_base 10: mod_base = OTHER; note = 2'-deoxy-2'-fluoroguanosine-3'-phosphate
  modified_base 11: mod_base = OTHER; note = 2'-deoxy-2'-fluoroadenosine-3'-phosphate
  modified_base 12: mod_base = OTHER; note = 2'-O-methyladenosine-3'-phosphate
  modified_base 13: mod_base = OTHER; note = 2'-O-methyladenosine-3'-phosphate
  modified_base 14: mod_base = OTHER; note = 2'-O-methylguanosine-3'-phosphate
  modified_base 15: mod_base = OTHER; note = 2'-O-methyladenosine-3'-phosphate
  modified_base 16: mod_base = OTHER; note = 2'-O-methyluridine-3'-phosphate
  modified_base 17: mod_base = OTHER; note = 2'-O-methylcytidine-3'-phosphate
  modified_base 18: mod_base = OTHER; note = 2'-O-methyluridine-3'-phosphate
  modified_base 19: mod_base = OTHER; note = 2'-O-methyluridine-3'-phosphate
  modified_base 20: mod_base = OTHER; note = 2'-O-methylguanosine-3'-phosphate
  modified_base 21: mod_base = OTHER; note = 2'-O-methyladenosine
tccagagatgaaagatcttga

SEQ ID NO: 3199 - RNA, 21 nt, synthetic construct
  source 1..21: mol_type = other RNA
  modified_base 1: mod_base = OTHER; note = 2'-O-methylcytidine-3'-phosphate
  modified_base 2: mod_base = OTHER; note = 2'-O-methylcytidine-3'-phosphate
  modified_base 3: mod_base = OTHER; note = 2'-O-methyladenosine-3'-phosphate
  modified_base 4: mod_base = OTHER; note = 2'-O-methylguanosine-3'-phosphate
  modified_base 5: mod_base = OTHER; note = 2'-O-methyladenosine-3'-phosphate
  modified_base 6: mod_base = OTHER; note = 2'-O-methylguanosine-3'-phosphate
  modified_base 7: mod_base = OTHER; note = 2'-deoxy-2'-fluoroadenosine-3'-phosphate
  modified_base 8: mod_base = OTHER; note = 2'-O-methyluridine-3'-phosphate
  modified_base 9: mod_base = OTHER; note = 2'-deoxy-2'-fluoroguanosine-3'-phosphate
  modified_base 10: mod_base = OTHER; note = 2'-deoxy-2'-fluoroadenosine-3'-phosphate
  modified_base 11: mod_base = OTHER; note = 2'-deoxy-2'-fluoroadenosine-3'-phosphate
  modified_base 12: mod_base = OTHER; note = 2'-O-methyladenosine-3'-phosphate
  modified_base 13: mod_base = OTHER; note = 2'-O-methylguanosine-3'-phosphate
  modified_base 14: mod_base = OTHER; note = 2'-O-methyladenosine-3'-phosphate
  modified_base 15: mod_base = OTHER; note = 2'-O-methyluridine-3'-phosphate
  modified_base 16: mod_base = OTHER; note = 2'-O-methylcytidine-3'-phosphate
  modified_base 17: mod_base = OTHER; note = 2'-O-methyluridine-3'-phosphate
  modified_base 18: mod_base = OTHER; note = 2'-O-methyluridine-3'-phosphate
  modified_base 19: mod_base = OTHER; note = 2'-O-methylguanosine-3'-phosphate
  modified_base 20: mod_base = OTHER; note = 2'-O-methylguanosine-3'-phosphate
  modified_base 21: mod_base = OTHER; note = 2'-O-methyladenosine
ccagagatgaaagatcttgga

SEQ ID NO: 3200 - RNA, 21 nt, synthetic construct
  source 1..21: mol_type = other RNA
  modified_base 1: mod_base = OTHER; note = 2'-O-methyladenosine-3'-phosphate
  modified_base 2: mod_base = OTHER; note = 2'-O-methylguanosine-3'-phosphate
  modified_base 3: mod_base = OTHER; note = 2'-O-methyladenosine-3'-phosphate
  modified_base 4: mod_base = OTHER; note = 2'-O-methylguanosine-3'-phosphate
  modified_base 5: mod_base = OTHER; note = 2'-O-methyladenosine-3'-phosphate
  modified_base 6: mod_base = OTHER; note = 2'-O-methyluridine-3'-phosphate
  modified_base 7: mod_base = OTHER; note = 2'-deoxy-2'-fluoroguanosine-3'-phosphate
  modified_base 8: mod_base = OTHER; note = 2'-O-methyladenosine-3'-phosphate
  modified_base 9: mod_base = OTHER; note = 2'-deoxy-2'-fluoroadenosine-3'-phosphate
  modified_base 10: mod_base = OTHER; note = 2'-deoxy-2'-fluoroadenosine-3'-phosphate
  modified_base 11: mod_base = OTHER; note = 2'-deoxy-2'-fluoroguanosine-3'-phosphate
  modified_base 12: mod_base = OTHER; note = 2'-O-methyladenosine-3'-phosphate
  modified_base 13: mod_base = OTHER; note = 2'-O-methyluridine-3'-phosphate
  modified_base 14: mod_base = OTHER; note = 2'-O-methylcytidine-3'-phosphate
  modified_base 15: mod_base = OTHER; note = 2'-O-methyluridine-3'-phosphate
  modified_base 16: mod_base = OTHER; note = 2'-O-methyluridine-3'-phosphate
  modified_base 17: mod_base = OTHER; note = 2'-O-methylguanosine-3'-phosphate
  modified_base 18: mod_base = OTHER; note = 2'-O-methylguanosine-3'-phosphate
  modified_base 19: mod_base = OTHER; note = 2'-O-methyluridine-3'-phosphate
  modified_base 20: mod_base = OTHER; note = 2'-O-methyluridine-3'-phosphate
  modified_base 21: mod_base = OTHER; note = 2'-O-methyladenosine
agagatgaaagatcttggtta

SEQ ID NO: 3201 - RNA, 21 nt, synthetic construct
  source 1..21: mol_type = other RNA
  modified_base 1: mod_base = OTHER; note = 2'-O-methylguanosine-3'-phosphate
  modified_base 2: mod_base = OTHER; note = 2'-O-methyladenosine-3'-phosphate
  modified_base 3: mod_base = OTHER; note = 2'-O-methylguanosine-3'-phosphate
  modified_base 4: mod_base = OTHER; note = 2'-O-methyladenosine-3'-phosphate
  modified_base 5: mod_base = OTHER; note = 2'-O-methyluridine-3'-phosphate
  modified_base 6: mod_base = OTHER; note = 2'-O-methylguanosine-3'-phosphate
  modified_base 7: mod_base = OTHER; note = 2'-deoxy-2'-fluoroadenosine-3'-phosphate
  modified_base 8: mod_base = OTHER; note = 2'-O-methyladenosine-3'-phosphate
  modified_base 9: mod_base = OTHER; note = 2'-deoxy-2'-fluoroadenosine-3'-phosphate
  modified_base 10: mod_base = OTHER; note = 2'-deoxy-2'-fluoroguanosine-3'-phosphate
  modified_base 11: mod_base = OTHER; note = 2'-deoxy-2'-fluoroadenosine-3'-phosphate
  modified_base 12: mod_base = OTHER; note = 2'-O-methyluridine-3'-phosphate
  modified_base 13: mod_base = OTHER; note = 2'-O-methylcytidine-3'-phosphate
  modified_base 14: mod_base = OTHER; note = 2'-O-methyluridine-3'-phosphate
  modified_base 15: mod_base = OTHER; note = 2'-O-methyluridine-3'-phosphate
  modified_base 16: mod_base = OTHER; note = 2'-O-methylguanosine-3'-phosphate
  modified_base 17: mod_base = OTHER; note = 2'-O-methylguanosine-3'-phosphate
  modified_base 18: mod_base = OTHER; note = 2'-O-methyluridine-3'-phosphate
  modified_base 19: mod_base = OTHER; note = 2'-O-methyluridine-3'-phosphate
  modified_base 20: mod_base = OTHER; note = 2'-O-methyluridine-3'-phosphate
  modified_base 21: mod_base = OTHER; note = 2'-O-methyladenosine
gagatgaaagatcttggttta

SEQ ID NO: 3202 - RNA, 21 nt, synthetic construct
  source 1..21: mol_type = other RNA
  modified_base 1: mod_base = OTHER; note = 2'-O-methyladenosine-3'-phosphate
  modified_base 2: mod_base = OTHER; note = 2'-O-methyluridine-3'-phosphate
  modified_base 3: mod_base = OTHER; note = 2'-O-methylguanosine-3'-phosphate
  modified_base 4: mod_base = OTHER; note = 2'-O-methyladenosine-3'-phosphate
  modified_base 5: mod_base = OTHER; note = 2'-O-methyladenosine-3'-phosphate
  modified_base 6: mod_base = OTHER; note = 2'-O-methyladenosine-3'-phosphate
  modified_base 7: mod_base = OTHER; note = 2'-deoxy-2'-fluoroguanosine-3'-phosphate
  modified_base 8: mod_base = OTHER; note = 2'-O-methyladenosine-3'-phosphate
  modified_base 9: mod_base = OTHER; note = 2'-deoxy-2'-fluorouridine-3'-phosphate
  modified_base 10: mod_base = OTHER; note = 2'-deoxy-2'-fluorocytidine-3'-phosphate
  modified_base 11: mod_base = OTHER; note = 2'-deoxy-2'-fluorouridine-3'-phosphate
  modified_base 12: mod_base = OTHER; note = 2'-O-methyluridine-3'-phosphate
  modified_base 13: mod_base = OTHER; note = 2'-O-methylguanosine-3'-phosphate
  modified_base 14: mod_base = OTHER; note = 2'-O-methylguanosine-3'-phosphate
  modified_base 15: mod_base = OTHER; note = 2'-O-methyluridine-3'-phosphate
  modified_base 16: mod_base = OTHER; note = 2'-O-methyluridine-3'-phosphate
  modified_base 17: mod_base = OTHER; note = 2'-O-methyluridine-3'-phosphate
  modified_base 18: mod_base = OTHER; note = 2'-O-methylcytidine-3'-phosphate
  modified_base 19: mod_base = OTHER; note = 2'-O-methylguanosine-3'-phosphate
  modified_base 20: mod_base = OTHER; note = 2'-O-methyluridine-3'-phosphate
  modified_base 21: mod_base = OTHER; note = 2'-O-methyladenosine
atgaaagatcttggtttcgta

SEQ ID NO: 3203 - RNA, 21 nt, synthetic construct
  source 1..21: mol_type = other RNA
  modified_base 1: mod_base = OTHER; note = 2'-O-methyluridine-3'-phosphate
  modified_base 2: mod_base = OTHER; note = 2'-O-methyluridine-3'-phosphate
  modified_base 3: mod_base = OTHER; note = 2'-O-methyluridine-3'-phosphate
  modified_base 4: mod_base = OTHER; note = 2'-O-methylcytidine-3'-phosphate
  modified_base 5: mod_base = OTHER; note = 2'-O-methylguanosine-3'-phosphate
  modified_base 6: mod_base = OTHER; note = 2'-O-methyluridine-3'-phosphate
  modified_base 7: mod_base = OTHER; note = 2'-deoxy-2'-fluoroguanosine-3'-phosphate
  modified_base 8: mod_base = OTHER; note = 2'-O-methyladenosine-3'-phosphate
  modified_base 9: mod_base = OTHER; note = 2'-deoxy-2'-fluoroguanosine-3'-phosphate
  modified_base 10: mod_base = OTHER; note = 2'-deoxy-2'-fluoroguanosine-3'-phosphate
  modified_base 11: mod_base = OTHER; note = 2'-deoxy-2'-fluorocytidine-3'-phosphate
  modified_base 12: mod_base = OTHER; note = 2'-O-methyladenosine-3'-phosphate
  modified_base 13: mod_base = OTHER; note = 2'-O-methylguanosine-3'-phosphate
  modified_base 14: mod_base = OTHER; note = 2'-O-methyladenosine-3'-phosphate
  modified_base 15: mod_base = OTHER; note = 2'-O-methyladenosine-3'-phosphate
  modified_base 16: mod_base = OTHER; note = 2'-O-methyladenosine-3'-phosphate
  modified_base 17: mod_base = OTHER; note = 2'-O-methyluridine-3'-phosphate
  modified_base 18: mod_base = OTHER; note = 2'-O-methyluridine-3'-phosphate
  modified_base 19: mod_base = OTHER; note = 2'-O-methyluridine-3'-phosphate
  modified_base 20: mod_base = OTHER; note = 2'-O-methyladenosine-3'-phosphate
  modified_base 21: mod_base = OTHER; note = 2'-O-methyladenosine
tttcgtgaggcagaaatttaa

SEQ ID NO: 3204 - RNA, 21 nt, synthetic construct
  source 1..21: mol_type = other RNA
  modified_base 1: mod_base = OTHER; note = 2'-O-methyladenosine-3'-phosphate
  modified_base 2: mod_base = OTHER; note = 2'-O-methyluridine-3'-phosphate
  modified_base 3: mod_base = OTHER; note = 2'-O-methylguanosine-3'-phosphate
  modified_base 4: mod_base = OTHER; note = 2'-O-methylcytidine-3'-phosphate
  modified_base 5: mod_base = OTHER; note = 2'-O-methyluridine-3'-phosphate
  modified_base 6: mod_base = OTHER; note = 2'-O-methylguanosine-3'-phosphate
  modified_base 7: mod_base = OTHER; note = 2'-deoxy-2'-fluorocytidine-3'-phosphate
  modified_base 8: mod_base = OTHER; note = 2'-O-methylguanosine-3'-phosphate
  modified_base 9: mod_base = OTHER; note = 2'-deoxy-2'-fluoroadenosine-3'-phosphate
  modified_base 10: mod_base = OTHER; note = 2'-deoxy-2'-fluorocytidine-3'-phosphate
  modified_base 11: mod_base = OTHER; note = 2'-deoxy-2'-fluoroadenosine-3'-phosphate
  modified_base 12: mod_base = OTHER; note = 2'-O-methyluridine-3'-phosphate
  modified_base 13: mod_base = OTHER; note = 2'-O-methylguanosine-3'-phosphate
  modified_base 14: mod_base = OTHER; note = 2'-O-methyladenosine-3'-phosphate
  modified_base 15: mod_base = OTHER; note = 2'-O-methyladenosine-3'-phosphate
  modified_base 16: mod_base = OTHER; note = 2'-O-methyladenosine-3'-phosphate
  modified_base 17: mod_base = OTHER; note = 2'-O-methyladenosine-3'-phosphate
  modified_base 18: mod_base = OTHER; note = 2'-O-methylcytidine-3'-phosphate
  modified_base 19: mod_base = OTHER; note = 2'-O-methyladenosine-3'-phosphate
  modified_base 20: mod_base = OTHER; note = 2'-O-methyluridine-3'-phosphate
  modified_base 21: mod_base = OTHER; note = 2'-O-methyladenosine
atgctgcgacatgaaaacata

SEQ ID NO: 3205 - RNA, 21 nt, synthetic construct
  source 1..21: mol_type = other RNA
  modified_base 1: mod_base = OTHER; note = 2'-O-methylcytidine-3'-phosphate
  modified_base 2: mod_base = OTHER; note = 2'-O-methyluridine-3'-phosphate
  modified_base 3: mod_base = OTHER; note = 2'-O-methylguanosine-3'-phosphate
  modified_base 4: mod_base = OTHER; note = 2'-O-methylcytidine-3'-phosphate
  modified_base 5: mod_base = OTHER; note = 2'-O-methylguanosine-3'-phosphate
  modified_base 6: mod_base = OTHER; note = 2'-O-methyladenosine-3'-phosphate
  modified_base 7: mod_base = OTHER; note = 2'-deoxy-2'-fluorocytidine-3'-phosphate
  modified_base 8: mod_base = OTHER; note = 2'-O-methyladenosine-3'-phosphate
  modified_base 9: mod_base = OTHER; note = 2'-deoxy-2'-fluorouridine-3'-phosphate
  modified_base 10: mod_base = OTHER; note = 2'-deoxy-2'-fluoroguanosine-3'-phosphate
  modified_base 11: mod_base = OTHER; note = 2'-deoxy-2'-fluoroadenosine-3'-phosphate
  modified_base 12: mod_base = OTHER; note = 2'-O-methyladenosine-3'-phosphate
  modified_base 13: mod_base = OTHER; note = 2'-O-methyladenosine-3'-phosphate
  modified_base 14: mod_base = OTHER; note = 2'-O-methyladenosine-3'-phosphate
  modified_base 15: mod_base = OTHER; note = 2'-O-methylcytidine-3'-phosphate
  modified_base 16: mod_base = OTHER; note = 2'-O-methyladenosine-3'-phosphate
  modified_base 17: mod_base = OTHER; note = 2'-O-methyluridine-3'-phosphate
  modified_base 18: mod_base = OTHER; note = 2'-O-methylcytidine-3'-phosphate
  modified_base 19: mod_base = OTHER; note = 2'-O-methylcytidine-3'-phosphate
  modified_base 20: mod_base = OTHER; note = 2'-O-methyluridine-3'-phosphate
  modified_base 21: mod_base = OTHER; note = 2'-O-methyladenosine
ctgcgacatgaaaacatccta

SEQ ID NO: 3206 - RNA, 21 nt, synthetic construct
  source 1..21: mol_type = other RNA
  modified_base 1: mod_base = OTHER; note = 2'-O-methyluridine-3'-phosphate
  modified_base 2: mod_base = OTHER; note = 2'-O-methylguanosine-3'-phosphate
  modified_base 3: mod_base = OTHER; note = 2'-O-methylcytidine-3'-phosphate
  modified_base 4: mod_base = OTHER; note = 2'-O-methylguanosine-3'-phosphate
  modified_base 5: mod_base = OTHER; note = 2'-O-methyladenosine-3'-phosphate
  modified_base 6: mod_base = OTHER; note = 2'-O-methylcytidine-3'-phosphate
  modified_base 7: mod_base = OTHER; note = 2'-deoxy-2'-fluoroadenosine-3'-phosphate
  modified_base 8: mod_base = OTHER; note = 2'-O-methyluridine-3'-phosphate
  modified_base 9: mod_base = OTHER; note = 2'-deoxy-2'-fluoroguanosine-3'-phosphate
  modified_base 10: mod_base = OTHER; note = 2'-deoxy-2'-fluoroadenosine-3'-phosphate
  modified_base 11: mod_base = OTHER; note = 2'-deoxy-2'-fluoroadenosine-3'-phosphate
  modified_base 12: mod_base = OTHER; note = 2'-O-methyladenosine-3'-phosphate
  modified_base 13: mod_base = OTHER; note = 2'-O-methyladenosine-3'-phosphate
  modified_base 14: mod_base = OTHER; note = 2'-O-methylcytidine-3'-phosphate
  modified_base 15: mod_base = OTHER; note = 2'-O-methyladenosine-3'-phosphate
  modified_base 16: mod_base = OTHER; note = 2'-O-methyluridine-3'-phosphate
  modified_base 17: mod_base = OTHER; note = 2'-O-methylcytidine-3'-phosphate
  modified_base 18: mod_base = OTHER; note = 2'-O-methylcytidine-3'-phosphate
  modified_base 19: mod_base = OTHER; note = 2'-O-methyluridine-3'-phosphate
  modified_base 20: mod_base = OTHER; note = 2'-O-methyluridine-3'-phosphate
  modified_base 21: mod_base = OTHER; note = 2'-O-methyladenosine
tgcgacatgaaaacatcctta

SEQ ID NO: 3207 - RNA, 21 nt, synthetic construct
  source 1..21: mol_type = other RNA
  modified_base 1: mod_base = OTHER; note = 2'-O-methylguanosine-3'-phosphate
  modified_base 2: mod_base = OTHER; note = 2'-O-methylcytidine-3'-phosphate
  modified_base 3: mod_base = OTHER; note = 2'-O-methylguanosine-3'-phosphate
  modified_base 4: mod_base = OTHER; note = 2'-O-methyladenosine-3'-phosphate
  modified_base 5: mod_base = OTHER; note = 2'-O-methylcytidine-3'-phosphate
  modified_base 6: mod_base = OTHER; note = 2'-O-methyladenosine-3'-phosphate
  modified_base 7: mod_base = OTHER; note = 2'-deoxy-2'-fluorouridine-3'-phosphate
  modified_base 8: mod_base = OTHER; note = 2'-O-methylguanosine-3'-phosphate
  modified_base 9: mod_base = OTHER; note = 2'-deoxy-2'-fluoroadenosine-3'-phosphate
  modified_base 10: mod_base = OTHER; note = 2'-deoxy-2'-fluoroadenosine-3'-phosphate
  modified_base 11: mod_base = OTHER; note = 2'-deoxy-2'-fluoroadenosine-3'-phosphate
  modified_base 12: mod_base = OTHER; note = 2'-O-methyladenosine-3'-phosphate
  modified_base 13: mod_base = OTHER; note = 2'-O-methylcytidine-3'-phosphate
  modified_base 14: mod_base = OTHER; note = 2'-O-methyladenosine-3'-phosphate
  modified_base 15: mod_base = OTHER; note = 2'-O-methyluridine-3'-phosphate
  modified_base 16: mod_base = OTHER; note = 2'-O-methylcytidine-3'-phosphate
  modified_base 17: mod_base = OTHER; note = 2'-O-methylcytidine-3'-phosphate
  modified_base 18: mod_base = OTHER; note = 2'-O-methyluridine-3'-phosphate
  modified_base 19: mod_base = OTHER; note = 2'-O-methyluridine-3'-phosphate
  modified_base 20: mod_base = OTHER; note = 2'-O-methylguanosine-3'-phosphate
  modified_base 21: mod_base = OTHER; note = 2'-O-methyladenosine
gcgacatgaaaacatccttga

SEQ ID NO: 3208 - RNA, 21 nt, synthetic construct
  source 1..21: mol_type = other RNA
  modified_base 1: mod_base = OTHER; note = 2'-O-methylguanosine-3'-phosphate
  modified_base 2: mod_base = OTHER; note = 2'-O-methyladenosine-3'-phosphate
  modified_base 3: mod_base = OTHER; note = 2'-O-methylcytidine-3'-phosphate
  modified_base 4: mod_base = OTHER; note = 2'-O-methyladenosine-3'-phosphate
  modified_base 5: mod_base = OTHER; note = 2'-O-methyluridine-3'-phosphate
  modified_base 6: mod_base = OTHER; note = 2'-O-methylguanosine-3'-phosphate
  modified_base 7: mod_base = OTHER; note = 2'-deoxy-2'-fluoroadenosine-3'-phosphate
  modified_base 8: mod_base = OTHER; note = 2'-O-methyladenosine-3'-phosphate
  modified_base 9: mod_base = OTHER; note = 2'-deoxy-2'-fluoroadenosine-3'-phosphate
  modified_base 10: mod_base = OTHER; note = 2'-deoxy-2'-fluoroadenosine-3'-phosphate
  modified_base 11: mod_base = OTHER; note = 2'-deoxy-2'-fluorocytidine-3'-phosphate
  modified_base 12: mod_base = OTHER; note = 2'-O-methyladenosine-3'-phosphate
  modified_base 13: mod_base = OTHER; note = 2'-O-methyluridine-3'-phosphate
  modified_base 14: mod_base = OTHER; note = 2'-O-methylcytidine-3'-phosphate
  modified_base 15: mod_base = OTHER; note = 2'-O-methylcytidine-3'-phosphate
  modified_base 16: mod_base = OTHER; note = 2'-O-methyluridine-3'-phosphate
  modified_base 17: mod_base = OTHER; note = 2'-O-methyluridine-3'-phosphate
  modified_base 18: mod_base = OTHER; note = 2'-O-methylguanosine-3'-phosphate
  modified_base 19: mod_base = OTHER; note = 2'-O-methylguanosine-3'-phosphate
  modified_base 20: mod_base = OTHER; note = 2'-O-methyluridine-3'-phosphate
  modified_base 21: mod_base = OTHER; note = 2'-O-methyladenosine
gacatgaaaacatccttggta

SEQ ID NO: 3209 - RNA, 21 nt, synthetic construct
  source 1..21: mol_type = other RNA
  modified_base 1: mod_base = OTHER; note = 2'-O-methyladenosine-3'-phosphate
  modified_base 2: mod_base = OTHER; note = 2'-O-methylcytidine-3'-phosphate
  modified_base 3: mod_base = OTHER; note = 2'-O-methyladenosine-3'-phosphate
  modified_base 4: mod_base = OTHER; note = 2'-O-methyluridine-3'-phosphate
  modified_base 5: mod_base = OTHER; note = 2'-O-methylguanosine-3'-phosphate
  modified_base 6: mod_base = OTHER; note = 2'-O-methyladenosine-3'-phosphate
  modified_base 7: mod_base = OTHER; note = 2'-deoxy-2'-fluoroadenosine-3'-phosphate
  modified_base 8: mod_base = OTHER; note = 2'-O-methyladenosine-3'-phosphate
  modified_base 9: mod_base = OTHER; note = 2'-deoxy-2'-fluoroadenosine-3'-phosphate
  modified_base 10: mod_base = OTHER; note = 2'-deoxy-2'-fluorocytidine-3'-phosphate
  modified_base 11: mod_base = OTHER; note = 2'-deoxy-2'-fluoroadenosine-3'-phosphate
  modified_base 12: mod_base = OTHER; note = 2'-O-methyluridine-3'-phosphate
  modified_base 13: mod_base = OTHER; note = 2'-O-methylcytidine-3'-phosphate
  modified_base 14: mod_base = OTHER; note = 2'-O-methylcytidine-3'-phosphate
  modified_base 15: mod_base = OTHER; note = 2'-O-methyluridine-3'-phosphate
  modified_base 16: mod_base = OTHER; note = 2'-O-methyluridine-3'-phosphate
  modified_base 17: mod_base = OTHER; note = 2'-O-methylguanosine-3'-phosphate
  modified_base 18: mod_base = OTHER; note = 2'-O-methylguanosine-3'-phosphate
  modified_base 19: mod_base = OTHER; note = 2'-O-methyluridine-3'-phosphate
  modified_base 20: mod_base = OTHER; note = 2'-O-methyluridine-3'-phosphate
  modified_base 21: mod_base = OTHER; note = 2'-O-methyladenosine
acatgaaaacatccttggtta

SEQ ID NO: 3210 - RNA, 21 nt, synthetic construct
  source 1..21: mol_type = other RNA
  modified_base 1: mod_base = OTHER; note = 2'-O-methylcytidine-3'-phosphate
  modified_base 2: mod_base = OTHER; note = 2'-O-methyladenosine-3'-phosphate
  modified_base 3: mod_base = OTHER; note = 2'-O-methyluridine-3'-phosphate
  modified_base 4: mod_base = OTHER; note = 2'-O-methylguanosine-3'-phosphate
  modified_base 5: mod_base = OTHER; note = 2'-O-methyladenosine-3'-phosphate
  modified_base 6: mod_base = OTHER; note = 2'-O-methyladenosine-3'-phosphate
  modified_base 7: mod_base = OTHER; note = 2'-deoxy-2'-fluoroadenosine-3'-phosphate
  modified_base 8: mod_base = OTHER; note = 2'-O-methyladenosine-3'-phosphate
  modified_base 9: mod_base = OTHER; note = 2'-deoxy-2'-fluorocytidine-3'-phosphate
  modified_base 10: mod_base = OTHER; note = 2'-deoxy-2'-fluoroadenosine-3'-phosphate
  modified_base 11: mod_base = OTHER; note = 2'-deoxy-2'-fluorouridine-3'-phosphate
  modified_base 12: mod_base = OTHER; note = 2'-O-methylcytidine-3'-phosphate
  modified_base 13: mod_base = OTHER; note = 2'-O-methylcytidine-3'-phosphate
  modified_base 14: mod_base = OTHER; note = 2'-O-methyluridine-3'-phosphate
  modified_base 15: mod_base = OTHER; note = 2'-O-methyluridine-3'-phosphate
  modified_base 16: mod_base = OTHER; note = 2'-O-methylguanosine-3'-phosphate
  modified_base 17: mod_base = OTHER; note = 2'-O-methylguanosine-3'-phosphate
  modified_base 18: mod_base = OTHER; note = 2'-O-methyluridine-3'-phosphate
  modified_base 19: mod_base = OTHER; note = 2'-O-methyluridine-3'-phosphate
  modified_base 20: mod_base = OTHER; note = 2'-O-methyluridine-3'-phosphate
  modified_base 21: mod_base = OTHER; note = 2'-O-methyladenosine
catgaaaacatccttggttta

SEQ ID NO: 3211 - RNA, 21 nt, synthetic construct
  source 1..21: mol_type = other RNA
  modified_base 1: mod_base = OTHER; note = 2'-O-methylguanosine-3'-phosphate
  modified_base 2: mod_base = OTHER; note = 2'-O-methyladenosine-3'-phosphate
  modified_base 3: mod_base = OTHER; note = 2'-O-methyladenosine-3'-phosphate
  modified_base 4: mod_base = OTHER; note = 2'-O-methyladenosine-3'-phosphate
  modified_base 5: mod_base = OTHER; note = 2'-O-methyladenosine-3'-phosphate
  modified_base 6: mod_base = OTHER; note = 2'-O-methylcytidine-3'-phosphate
  modified_base 7: mod_base = OTHER; note = 2'-deoxy-2'-fluoroadenosine-3'-phosphate
  modified_base 8: mod_base = OTHER; note = 2'-O-methyluridine-3'-phosphate
  modified_base 9: mod_base = OTHER; note = 2'-deoxy-2'-fluorocytidine-3'-phosphate
  modified_base 10: mod_base = OTHER; note = 2'-deoxy-2'-fluorocytidine-3'-phosphate
  modified_base 11: mod_base = OTHER; note = 2'-deoxy-2'-fluorouridine-3'-phosphate
  modified_base 12: mod_base = OTHER; note = 2'-O-methyluridine-3'-phosphate
  modified_base 13: mod_base = OTHER; note = 2'-O-methylguanosine-3'-phosphate
  modified_base 14: mod_base = OTHER; note = 2'-O-methylguanosine-3'-phosphate
  modified_base 15: mod_base = OTHER; note = 2'-O-methyluridine-3'-phosphate
  modified_base 16: mod_base = OTHER; note = 2'-O-methyluridine-3'-phosphate
  modified_base 17: mod_base = OTHER; note = 2'-O-methyluridine-3'-phosphate
  modified_base 18: mod_base = OTHER; note = 2'-O-methylcytidine-3'-phosphate
  modified_base 19: mod_base = OTHER; note = 2'-O-methyladenosine-3'-phosphate
  modified_base 20: mod_base = OTHER; note = 2'-O-methyluridine-3'-phosphate
  modified_base 21: mod_base = OTHER; note = 2'-O-methyladenosine
gaaaacatccttggtttcata

SEQ ID NO: 3212 - RNA, 21 nt, synthetic construct
  source 1..21: mol_type = other RNA
  modified_base 1: mod_base = OTHER; note = 2'-O-methylcytidine-3'-phosphate
  modified_base 2: mod_base = OTHER; note = 2'-O-methyladenosine-3'-phosphate
  modified_base 3: mod_base = OTHER; note = 2'-O-methyluridine-3'-phosphate
  modified_base 4: mod_base = OTHER; note = 2'-O-methylcytidine-3'-phosphate
  modified_base 5: mod_base = OTHER; note = 2'-O-methylcytidine-3'-phosphate
  modified_base 6: mod_base = OTHER; note = 2'-O-methyluridine-3'-phosphate
  modified_base 7: mod_base = OTHER; note = 2'-deoxy-2'-fluorouridine-3'-phosphate
  modified_base 8: mod_base = OTHER; note = 2'-O-methylguanosine-3'-phosphate
  modified_base 9: mod_base = OTHER; note = 2'-deoxy-2'-fluoroguanosine-3'-phosphate
  modified_base 10: mod_base = OTHER; note = 2'-deoxy-2'-fluorouridine-3'-phosphate
  modified_base 11: mod_base = OTHER; note = 2'-deoxy-2'-fluorouridine-3'-phosphate
  modified_base 12: mod_base = OTHER; note = 2'-O-methyluridine-3'-phosphate
  modified_base 13: mod_base = OTHER; note = 2'-O-methylcytidine-3'-phosphate
  modified_base 14: mod_base = OTHER; note = 2'-O-methyladenosine-3'-phosphate
  modified_base 15: mod_base = OTHER; note = 2'-O-methyluridine-3'-phosphate
  modified_base 16: mod_base = OTHER; note = 2'-O-methyluridine-3'-phosphate
  modified_base 17: mod_base = OTHER; note = 2'-O-methylguanosine-3'-phosphate
  modified_base 18: mod_base = OTHER; note = 2'-O-methylcytidine-3'-phosphate
  modified_base 19: mod_base = OTHER; note = 2'-O-methyluridine-3'-phosphate
  modified_base 20: mod_base = OTHER; note = 2'-O-methylguanosine-3'-phosphate
  modified_base 21: mod_base = OTHER; note = 2'-O-methyladenosine
catccttggtttcattgctga

SEQ ID NO: 3213 - RNA, 21 nt, synthetic construct
  source 1..21: mol_type = other RNA
  modified_base 1: mod_base = OTHER; note = 2'-O-methylcytidine-3'-phosphate
  modified_base 2: mod_base = OTHER; note = 2'-O-methyluridine-3'-phosphate
  modified_base 3: mod_base = OTHER; note = 2'-O-methyluridine-3'-phosphate
  modified_base 4: mod_base = OTHER; note = 2'-O-methylguanosine-3'-phosphate
  modified_base 5: mod_base = OTHER; note = 2'-O-methylguanosine-3'-phosphate
  modified_base 6: mod_base = OTHER; note = 2'-O-methyluridine-3'-phosphate
  modified_base 7: mod_base = OTHER; note = 2'-deoxy-2'-fluorouridine-3'-phosphate
  modified_base 8: mod_base = OTHER; note = 2'-O-methyluridine-3'-phosphate
  modified_base 9: mod_base = OTHER; note = 2'-deoxy-2'-fluorocytidine-3'-phosphate
  modified_base 10: mod_base = OTHER; note = 2'-deoxy-2'-fluoroadenosine-3'-phosphate
  modified_base 11: mod_base = OTHER; note = 2'-deoxy-2'-fluorouridine-3'-phosphate
  modified_base 12: mod_base = OTHER; note = 2'-O-methyluridine-3'-phosphate
  modified_base 13: mod_base = OTHER; note = 2'-O-methylguanosine-3'-phosphate
  modified_base 14: mod_base = OTHER; note = 2'-O-methylcytidine-3'-phosphate
  modified_base 15: mod_base = OTHER; note = 2'-O-methyluridine-3'-phosphate
  modified_base 16: mod_base = OTHER; note = 2'-O-methylguanosine-3'-phosphate
  modified_base 17: mod_base = OTHER; note = 2'-O-methylcytidine-3'-phosphate
  modified_base 18: mod_base = OTHER; note = 2'-O-methyluridine-3'-phosphate
  modified_base 19: mod_base = OTHER; note = 2'-O-methylguanosine-3'-phosphate
  modified_base 20: mod_base = OTHER; note = 2'-O-methyladenosine-3'-phosphate
  modified_base 21: mod_base = OTHER; note = 2'-O-methyladenosine
cttggtttcattgctgctgaa

SEQ ID NO: 3214 - RNA, 21 nt, synthetic construct
  source 1..21: mol_type = other RNA
  modified_base 1: mod_base = OTHER; note = 2'-O-methylguanosine-3'-phosphate
  modified_base 2: mod_base = OTHER; note = 2'-O-methylguanosine-3'-phosphate
  modified_base 3: mod_base = OTHER; note = 2'-O-methyluridine-3'-phosphate
  modified_base 4: mod_base = OTHER; note = 2'-O-methyluridine-3'-phosphate
  modified_base 5: mod_base = OTHER; note = 2'-O-methyluridine-3'-phosphate
  modified_base 6: mod_base = OTHER; note = 2'-O-methylcytidine-3'-phosphate
  modified_base 7: mod_base = OTHER; note = 2'-deoxy-2'-fluoroadenosine-3'-phosphate
  modified_base 8: mod_base = OTHER; note = 2'-O-methyluridine-3'-phosphate
  modified_base 9: mod_base = OTHER; note = 2'-deoxy-2'-fluorouridine-3'-phosphate
  modified_base 10: mod_base = OTHER; note = 2'-deoxy-2'-fluoroguanosine-3'-phosphate
  modified_base 11: mod_base = OTHER; note = 2'-deoxy-2'-fluorocytidine-3'-phosphate
  modified_base 12: mod_base = OTHER; note = 2'-O-methyluridine-3'-phosphate
  modified_base 13: mod_base = OTHER; note = 2'-O-methylguanosine-3'-phosphate
  modified_base 14: mod_base = OTHER; note = 2'-O-methylcytidine-3'-phosphate
  modified_base 15: mod_base = OTHER; note = 2'-O-methyluridine-3'-phosphate
  modified_base 16: mod_base = OTHER; note = 2'-O-methylguanosine-3'-phosphate
  modified_base 17: mod_base = OTHER; note = 2'-O-methyladenosine-3'-phosphate
  modified_base 18: mod_base = OTHER; note = 2'-O-methylcytidine-3'-phosphate
  modified_base 19: mod_base = OTHER; note = 2'-O-methyladenosine-3'-phosphate
  modified_base 20: mod_base = OTHER; note = 2'-O-methyladenosine-3'-phosphate
  modified_base 21: mod_base = OTHER; note = 2'-O-methyladenosine
ggtttcattgctgctgacaaa

SEQ ID NO: 3215 - RNA, 21 nt, synthetic construct
  source 1..21: mol_type = other RNA
  modified_base 1: mod_base = OTHER; note = 2'-O-methyluridine-3'-phosphate
  modified_base 2: mod_base = OTHER; note = 2'-O-methyluridine-3'-phosphate
  modified_base 3: mod_base = OTHER; note = 2'-O-methylcytidine-3'-phosphate
  modified_base 4: mod_base = OTHER; note = 2'-O-methyladenosine-3'-phosphate
  modified_base 5: mod_base = OTHER; note = 2'-O-methyluridine-3'-phosphate
  modified_base 6: mod_base = OTHER; note = 2'-O-methyluridine-3'-phosphate
  modified_base 7: mod_base = OTHER; note = 2'-deoxy-2'-fluoroguanosine-3'-phosphate
  modified_base 8: mod_base = OTHER; note = 2'-O-methylcytidine-3'-phosphate
  modified_base 9: mod_base = OTHER; note = 2'-deoxy-2'-fluorouridine-3'-phosphate
  modified_base 10: mod_base = OTHER; note = 2'-deoxy-2'-fluoroguanosine-3'-phosphate
  modified_base 11: mod_base = OTHER; note = 2'-deoxy-2'-fluorocytidine-3'-phosphate
  modified_base 12: mod_base = OTHER; note = 2'-O-methyluridine-3'-phosphate
  modified_base 13: mod_base = OTHER; note = 2'-O-methylguanosine-3'-phosphate
  modified_base 14: mod_base = OTHER; note = 2'-O-methyladenosine-3'-phosphate
  modified_base 15: mod_base = OTHER; note = 2'-O-methylcytidine-3'-phosphate
  modified_base 16: mod_base = OTHER; note = 2'-O-methyladenosine-3'-phosphate
  modified_base 17: mod_base = OTHER; note = 2'-O-methyladenosine-3'-phosphate
  modified_base 18: mod_base = OTHER; note = 2'-O-methylcytidine-3'-phosphate
  modified_base 19: mod_base = OTHER; note = 2'-O-methyladenosine-3'-phosphate
  modified_base 20: mod_base = OTHER; note = 2'-O-methyladenosine-3'-phosphate
  modified_base 21: mod_base = OTHER; note = 2'-O-methyladenosine
ttcattgctgctgacaacaaa

SEQ ID NO: 3216 - RNA, 21 nt, synthetic construct
  source 1..21: mol_type = other RNA
  modified_base 1: mod_base = OTHER; note = 2'-O-methyluridine-3'-phosphate
  modified_base 2: mod_base = OTHER; note = 2'-O-methylcytidine-3'-phosphate
  modified_base 3: mod_base = OTHER; note = 2'-O-methyladenosine-3'-phosphate
  modified_base 4: mod_base = OTHER; note = 2'-O-methyluridine-3'-phosphate
  modified_base 5: mod_base = OTHER; note = 2'-O-methyluridine-3'-phosphate
  modified_base 6: mod_base = OTHER; note = 2'-O-methylguanosine-3'-phosphate
  modified_base 7: mod_base = OTHER; note = 2'-deoxy-2'-fluorocytidine-3'-phosphate
  modified_base 8: mod_base = OTHER; note = 2'-O-methyluridine-3'-phosphate
  modified_base 9: mod_base = OTHER; note = 2'-deoxy-2'-fluoroguanosine-3'-phosphate
  modified_base 10: mod_base = OTHER; note = 2'-deoxy-2'-fluorocytidine-3'-phosphate
  modified_base 11: mod_base = OTHER; note = 2'-deoxy-2'-fluorouridine-3'-phosphate
  modified_base 12: mod_base = OTHER; note = 2'-O-methylguanosine-3'-phosphate
  modified_base 13: mod_base = OTHER; note = 2'-O-methyladenosine-3'-phosphate
  modified_base 14: mod_base = OTHER; note = 2'-O-methylcytidine-3'-phosphate
  modified_base 15: mod_base = OTHER; note = 2'-O-methyladenosine-3'-phosphate
  modified_base 16: mod_base = OTHER; note = 2'-O-methyladenosine-3'-phosphate
  modified_base 17: mod_base = OTHER; note = 2'-O-methylcytidine-3'-phosphate
  modified_base 18: mod_base = OTHER; note = 2'-O-methyladenosine-3'-phosphate
  modified_base 19: mod_base = OTHER; note = 2'-O-methyladenosine-3'-phosphate
  modified_base 20: mod_base = OTHER; note = 2'-O-methyladenosine-3'-phosphate
  modified_base 21: mod_base = OTHER; note = 2'-O-methyladenosine
tcattgctgctgacaacaaaa

SEQ ID NO: 3217 - RNA, 21 nt, synthetic construct
  source 1..21: mol_type = other RNA
  modified_base 1: mod_base = OTHER; note = 2'-O-methyluridine-3'-phosphate
  modified_base 2: mod_base = OTHER; note = 2'-O-methyluridine-3'-phosphate
  modified_base 3: mod_base = OTHER; note = 2'-O-methylguanosine-3'-phosphate
  modified_base 4: mod_base = OTHER; note = 2'-O-methylcytidine-3'-phosphate
  modified_base 5: mod_base = OTHER; note = 2'-O-methyluridine-3'-phosphate
  modified_base 6: mod_base = OTHER; note = 2'-O-methylguanosine-3'-phosphate
  modified_base 7: mod_base = OTHER; note = 2'-deoxy-2'-fluorocytidine-3'-phosphate
  modified_base 8: mod_base = OTHER; note = 2'-O-methyluridine-3'-phosphate
  modified_base 9: mod_base = OTHER; note = 2'-deoxy-2'-fluoroguanosine-3'-phosphate
  modified_base 10: mod_base = OTHER; note = 2'-deoxy-2'-fluoroadenosine-3'-phosphate
  modified_base 11: mod_base = OTHER; note = 2'-deoxy-2'-fluorocytidine-3'-phosphate
  modified_base 12: mod_base = OTHER; note = 2'-O-methyladenosine-3'-phosphate
  modified_base 13: mod_base = OTHER; note = 2'-O-methyladenosine-3'-phosphate
  modified_base 14: mod_base = OTHER; note = 2'-O-methylcytidine-3'-phosphate
  modified_base 15: mod_base = OTHER; note = 2'-O-methyladenosine-3'-phosphate
  modified_base 16: mod_base = OTHER; note = 2'-O-methyladenosine-3'-phosphate
  modified_base 17: mod_base = OTHER; note = 2'-O-methyladenosine-3'-phosphate
  modified_base 18: mod_base = OTHER; note = 2'-O-methylguanosine-3'-phosphate
  modified_base 19: mod_base = OTHER; note = 2'-O-methyladenosine-3'-phosphate
  modified_base 20: mod_base = OTHER; note = 2'-O-methyluridine-3'-phosphate
  modified_base 21: mod_base = OTHER; note = 2'-O-methyladenosine
ttgctgctgacaacaaagata

SEQ ID NO: 3218 - RNA, 21 nt, synthetic construct
  source 1..21: mol_type = other RNA
  modified_base 1: mod_base = OTHER; note = 2'-O-methyluridine-3'-phosphate
  modified_base 2: mod_base = OTHER; note = 2'-O-methylguanosine-3'-phosphate
  modified_base 3: mod_base = OTHER; note = 2'-O-methylcytidine-3'-phosphate
  modified_base 4: mod_base = OTHER; note = 2'-O-methyluridine-3'-phosphate
  modified_base 5: mod_base = OTHER; note = 2'-O-methylguanosine-3'-phosphate
  modified_base 6: mod_base = OTHER; note = 2'-O-methyladenosine-3'-phosphate
  modified_base 7: mod_base = OTHER; note = 2'-deoxy-2'-fluorocytidine-3'-phosphate
  modified_base 8: mod_base = OTHER; note = 2'-O-methyladenosine-3'-phosphate
  modified_base 9: mod_base = OTHER; note = 2'-deoxy-2'-fluoroadenosine-3'-phosphate
  modified_base 10: mod_base = OTHER; note = 2'-deoxy-2'-fluorocytidine-3'-phosphate
  modified_base 11: mod_base = OTHER; note = 2'-deoxy-2'-fluoroadenosine-3'-phosphate
  modified_base 12: mod_base = OTHER; note = 2'-O-methyladenosine-3'-phosphate
  modified_base 13: mod_base = OTHER; note = 2'-O-methyladenosine-3'-phosphate
  modified_base 14: mod_base = OTHER; note = 2'-O-methylguanosine-3'-phosphate
  modified_base 15: mod_base = OTHER; note = 2'-O-methyladenosine-3'-phosphate
  modified_base 16: mod_base = OTHER; note = 2'-O-methyluridine-3'-phosphate
  modified_base 17: mod_base = OTHER; note = 2'-O-methyladenosine-3'-phosphate
  modified_base 18: mod_base = OTHER; note = 2'-O-methyladenosine-3'-phosphate
  modified_base 19: mod_base = OTHER; note = 2'-O-methyluridine-3'-phosphate
  modified_base 20: mod_base = OTHER; note = 2'-O-methylguanosine-3'-phosphate
  modified_base 21: mod_base = OTHER; note = 2'-O-methyladenosine
tgctgacaacaaagataatga

SEQ ID NO: 3219 - RNA, 21 nt, synthetic construct
  source 1..21: mol_type = other RNA
  modified_base 1: mod_base = OTHER; note = 2'-O-methylguanosine-3'-phosphate
  modified_base 2: mod_base = OTHER; note = 2'-O-methylcytidine-3'-phosphate
  modified_base 3: mod_base = OTHER; note = 2'-O-methyluridine-3'-phosphate
  modified_base 4: mod_base = OTHER; note = 2'-O-methylguanosine-3'-phosphate
  modified_base 5: mod_base = OTHER; note = 2'-O-methyladenosine-3'-phosphate
  modified_base 6: mod_base = OTHER; note = 2'-O-methylcytidine-3'-phosphate
  modified_base 7: mod_base = OTHER; note = 2'-deoxy-2'-fluoroadenosine-3'-phosphate
  modified_base 8: mod_base = OTHER; note = 2'-O-methyladenosine-3'-phosphate
  modified_base 9: mod_base = OTHER; note = 2'-deoxy-2'-fluorocytidine-3'-phosphate
  modified_base 10: mod_base = OTHER; note = 2'-deoxy-2'-fluoroadenosine-3'-phosphate
  modified_base 11: mod_base = OTHER; note = 2'-deoxy-2'-fluoroadenosine-3'-phosphate
  modified_base 12: mod_base = OTHER; note = 2'-O-methyladenosine-3'-phosphate
  modified_base 13: mod_base = OTHER; note = 2'-O-methylguanosine-3'-phosphate
  modified_base 14: mod_base = OTHER; note = 2'-O-methyladenosine-3'-phosphate
  modified_base 15: mod_base = OTHER; note = 2'-O-methyluridine-3'-phosphate
  modified_base 16: mod_base = OTHER; note = 2'-O-methyladenosine-3'-phosphate
  modified_base 17: mod_base = OTHER; note = 2'-O-methyladenosine-3'-phosphate
  modified_base 18: mod_base = OTHER; note = 2'-O-methyluridine-3'-phosphate
  modified_base 19: mod_base = OTHER; note = 2'-O-methylguanosine-3'-phosphate
  modified_base 20: mod_base = OTHER; note = 2'-O-methylguanosine-3'-phosphate
  modified_base 21: mod_base = OTHER; note = 2'-O-methyladenosine
gctgacaacaaagataatgga

SEQ ID NO: 3220 - RNA, 21 nt, synthetic construct
  source 1..21: mol_type = other RNA
  modified_base 1: mod_base = OTHER; note = 2'-O-methyluridine-3'-phosphate
  modified_base 2: mod_base = OTHER; note = 2'-O-methylguanosine-3'-phosphate
  modified_base 3: mod_base = OTHER; note = 2'-O-methyladenosine-3'-phosphate
  modified_base 4: mod_base = OTHER; note = 2'-O-methylcytidine-3'-phosphate
  modified_base 5: mod_base = OTHER; note = 2'-O-methyladenosine-3'-phosphate
  modified_base 6: mod_base = OTHER; note = 2'-O-methyladenosine-3'-phosphate
  modified_base 7: mod_base = OTHER; note = 2'-deoxy-2'-fluorocytidine-3'-phosphate
  modified_base 8: mod_base = OTHER; note = 2'-O-methyladenosine-3'-phosphate
  modified_base 9: mod_base = OTHER; note = 2'-deoxy-2'-fluoroadenosine-3'-phosphate
  modified_base 10: mod_base = OTHER; note = 2'-deoxy-2'-fluoroadenosine-3'-phosphate
  modified_base 11: mod_base = OTHER; note = 2'-deoxy-2'-fluoroguanosine-3'-phosphate
  modified_base 12: mod_base = OTHER; note = 2'-O-methyladenosine-3'-phosphate
  modified_base 13: mod_base = OTHER; note = 2'-O-methyluridine-3'-phosphate
  modified_base 14: mod_base = OTHER; note = 2'-O-methyladenosine-3'-phosphate
  modified_base 15: mod_base = OTHER; note = 2'-O-methyladenosine-3'-phosphate
  modified_base 16: mod_base = OTHER; note = 2'-O-methyluridine-3'-phosphate
  modified_base 17: mod_base = OTHER; note = 2'-O-methylguanosine-3'-phosphate
  modified_base 18: mod_base = OTHER; note = 2'-O-methylguanosine-3'-phosphate
  modified_base 19: mod_base = OTHER; note = 2'-O-methyladenosine-3'-phosphate
  modified_base 20: mod_base = OTHER; note = 2'-O-methyladenosine-3'-phosphate
  modified_base 21: mod_base = OTHER; note = 2'-O-methyladenosine
tgacaacaaagataatggaaa

SEQ ID NO: 3221 - RNA, 21 nt, synthetic construct
  source 1..21: mol_type = other RNA
  modified_base 1: mod_base = OTHER; note = 2'-O-methylguanosine-3'-phosphate
  modified_base 2: mod_base = OTHER; note = 2'-O-methyladenosine-3'-phosphate
  modified_base 3: mod_base = OTHER; note = 2'-O-methylcytidine-3'-phosphate
  modified_base 4: mod_base = OTHER; note = 2'-O-methyladenosine-3'-phosphate
  modified_base 5: mod_base = OTHER; note = 2'-O-methyladenosine-3'-phosphate
  modified_base 6: mod_base = OTHER; note = 2'-O-methylcytidine-3'-phosphate
  modified_base 7: mod_base = OTHER; note = 2'-deoxy-2'-fluoroadenosine-3'-phosphate
  modified_base 8: mod_base = OTHER; note = 2'-O-methyladenosine-3'-phosphate
  modified_base 9: mod_base = OTHER; note = 2'-deoxy-2'-fluoroadenosine-3'-phosphate
  modified_base 10: mod_base = OTHER; note = 2'-deoxy-2'-fluoroguanosine-3'-phosphate
  modified_base 11: mod_base = OTHER; note = 2'-deoxy-2'-fluoroadenosine-3'-phosphate
  modified_base 12: mod_base = OTHER; note = 2'-O-methyluridine-3'-phosphate
  modified_base 13: mod_base = OTHER; note = 2'-O-methyladenosine-3'-phosphate
  modified_base 14: mod_base = OTHER; note = 2'-O-methyladenosine-3'-phosphate
  modified_base 15: mod_base = OTHER; note = 2'-O-methyluridine-3'-phosphate
  modified_base 16: mod_base = OTHER; note = 2'-O-methylguanosine-3'-phosphate
  modified_base 17: mod_base = OTHER; note = 2'-O-methylguanosine-3'-phosphate
  modified_base 18: mod_base = OTHER; note = 2'-O-methyladenosine-3'-phosphate
  modified_base 19: mod_base = OTHER; note = 2'-O-methyladenosine-3'-phosphate
  modified_base 20: mod_base = OTHER; note = 2'-O-methylcytidine-3'-phosphate
  modified_base 21: mod_base = OTHER; note = 2'-O-methyladenosine
gacaacaaagataatggaaca

SEQ ID NO: 3222 - RNA, 21 nt, synthetic construct
  source 1..21: mol_type = other RNA
  modified_base 1: mod_base = OTHER; note = 2'-O-methyladenosine-3'-phosphate
  modified_base 2: mod_base = OTHER; note = 2'-O-methyladenosine-3'-phosphate
  modified_base 3: mod_base = OTHER; note = 2'-O-methylcytidine-3'-phosphate
  modified_base 4: mod_base = OTHER; note = 2'-O-methyladenosine-3'-phosphate
  modified_base 5: mod_base = OTHER; note = 2'-O-methyladenosine-3'-phosphate
  modified_base 6: mod_base = OTHER; note = 2'-O-methyladenosine-3'-phosphate
  modified_base 7: mod_base = OTHER; note = 2'-deoxy-2'-fluoroguanosine-3'-phosphate
  modified_base 8: mod_base = OTHER; note = 2'-O-methyladenosine-3'-phosphate
  modified_base 9: mod_base = OTHER; note = 2'-deoxy-2'-fluorouridine-3'-phosphate
  modified_base 10: mod_base = OTHER; note = 2'-deoxy-2'-fluoroadenosine-3'-phosphate
  modified_base 11: mod_base = OTHER; note = 2'-deoxy-2'-fluoroadenosine-3'-phosphate
  modified_base 12: mod_base = OTHER; note = 2'-O-methyluridine-3'-phosphate
  modified_base 13: mod_base = OTHER; note = 2'-O-methylguanosine-3'-phosphate
  modified_base 14: mod_base = OTHER; note = 2'-O-methylguanosine-3'-phosphate
  modified_base 15: mod_base = OTHER; note = 2'-O-methyladenosine-3'-phosphate
  modified_base 16: mod_base = OTHER; note = 2'-O-methyladenosine-3'-phosphate
  modified_base 17: mod_base = OTHER; note = 2'-O-methylcytidine-3'-phosphate
  modified_base 18: mod_base = OTHER; note = 2'-O-methyluridine-3'-phosphate
  modified_base 19: mod_base = OTHER; note = 2'-O-methyluridine-3'-phosphate
  modified_base 20: mod_base = OTHER; note = 2'-O-methylguanosine-3'-phosphate
  modified_base 21: mod_base = OTHER; note = 2'-O-methyladenosine
aacaaagataatggaacttga

SEQ ID NO: 3223 - RNA, 21 nt, synthetic construct
  source 1..21: mol_type = other RNA
  modified_base 1: mod_base = OTHER; note = 2'-O-methyladenosine-3'-phosphate
  modified_base 2: mod_base = OTHER; note = 2'-O-methylcytidine-3'-phosphate
  modified_base 3: mod_base = OTHER; note = 2'-O-methyluridine-3'-phosphate
  modified_base 4: mod_base = OTHER; note = 2'-O-methyluridine-3'-phosphate
  modified_base 5: mod_base = OTHER; note = 2'-O-methyluridine-3'-phosphate
  modified_base 6: mod_base = OTHER; note = 2'-O-methylguanosine-3'-phosphate
  modified_base 7: mod_base = OTHER; note = 2'-deoxy-2'-fluoroguanosine-3'-phosphate
  modified_base 8: mod_base = OTHER; note = 2'-O-methylcytidine-3'-phosphate
  modified_base 9: mod_base = OTHER; note = 2'-deoxy-2'-fluorouridine-3'-phosphate
  modified_base 10: mod_base = OTHER; note = 2'-deoxy-2'-fluoroguanosine-3'-phosphate
  modified_base 11: mod_base = OTHER; note = 2'-deoxy-2'-fluoroguanosine-3'-phosphate
  modified_base 12: mod_base = OTHER; note = 2'-O-methyluridine-3'-phosphate
  modified_base 13: mod_base = OTHER; note = 2'-O-methyladenosine-3'-phosphate
  modified_base 14: mod_base = OTHER; note = 2'-O-methyluridine-3'-phosphate
  modified_base 15: mod_base = OTHER; note = 2'-O-methylcytidine-3'-phosphate
  modified_base 16: mod_base = OTHER; note = 2'-O-methyluridine-3'-phosphate
  modified_base 17: mod_base = OTHER; note = 2'-O-methylguanosine-3'-phosphate
  modified_base 18: mod_base = OTHER; note = 2'-O-methyladenosine-3'-phosphate
  modified_base 19: mod_base = OTHER; note = 2'-O-methyladenosine-3'-phosphate
  modified_base 20: mod_base = OTHER; note = 2'-O-methyluridine-3'-phosphate
  modified_base 21: mod_base = OTHER; note = 2'-O-methyladenosine
actttggctggtatctgaata

SEQ ID NO: 3224 - RNA, 21 nt, synthetic construct
  source 1..21: mol_type = other RNA
  modified_base 1: mod_base = OTHER; note = 2'-O-methyluridine-3'-phosphate
  modified_base 2: mod_base = OTHER; note = 2'-O-methyluridine-3'-phosphate
  modified_base 3: mod_base = OTHER; note = 2'-O-methyluridine-3'-phosphate
  modified_base 4: mod_base = OTHER; note = 2'-O-methylguanosine-3'-phosphate
  modified_base 5: mod_base = OTHER; note = 2'-O-methylguanosine-3'-phosphate
  modified_base 6: mod_base = OTHER; note = 2'-O-methylcytidine-3'-phosphate
  modified_base 7: mod_base = OTHER; note = 2'-deoxy-2'-fluorouridine-3'-phosphate
  modified_base 8: mod_base = OTHER; note = 2'-O-methylguanosine-3'-phosphate
  modified_base 9: mod_base = OTHER; note = 2'-deoxy-2'-fluoroguanosine-3'-phosphate
  modified_base 10: mod_base = OTHER; note = 2'-deoxy-2'-fluorouridine-3'-phosphate
  modified_base 11: mod_base = OTHER; note = 2'-deoxy-2'-fluoroadenosine-3'-phosphate
  modified_base 12: mod_base = OTHER; note = 2'-O-methyluridine-3'-phosphate
  modified_base 13: mod_base = OTHER; note = 2'-O-methylcytidine-3'-phosphate
  modified_base 14: mod_base = OTHER; note = 2'-O-methyluridine-3'-phosphate
  modified_base 15: mod_base = OTHER; note = 2'-O-methylguanosine-3'-phosphate
  modified_base 16: mod_base = OTHER; note = 2'-O-methyladenosine-3'-phosphate
  modified_base 17: mod_base = OTHER; note = 2'-O-methyladenosine-3'-phosphate
  modified_base 18: mod_base = OTHER; note = 2'-O-methyluridine-3'-phosphate
  modified_base 19: mod_base = OTHER; note = 2'-O-methyladenosine-3'-phosphate
  modified_base 20: mod_base = OTHER; note = 2'-O-methyluridine-3'-phosphate
  modified_base 21: mod_base = OTHER; note = 2'-O-methyladenosine
tttggctggtatctgaatata

SEQ ID NO: 3225 - RNA, 21 nt, synthetic construct
  source 1..21: mol_type = other RNA
  modified_base 1: mod_base = OTHER; note = 2'-O-methyluridine-3'-phosphate
  modified_base 2: mod_base = OTHER; note = 2'-O-methyluridine-3'-phosphate
  modified_base 3: mod_base = OTHER; note = 2'-O-methylguanosine-3'-phosphate
  modified_base 4: mod_base = OTHER; note = 2'-O-methylguanosine-3'-phosphate
  modified_base 5: mod_base = OTHER; note = 2'-O-methylcytidine-3'-phosphate
  modified_base 6: mod_base = OTHER; note = 2'-O-methyluridine-3'-phosphate
  modified_base 7: mod_base = OTHER; note = 2'-deoxy-2'-fluoroguanosine-3'-phosphate
  modified_base 8: mod_base = OTHER; note = 2'-O-methylguanosine-3'-phosphate
  modified_base 9: mod_base = OTHER; note = 2'-deoxy-2'-fluorouridine-3'-phosphate
  modified_base 10: mod_base = OTHER; note = 2'-deoxy-2'-fluoroadenosine-3'-phosphate
  modified_base 11: mod_base = OTHER; note = 2'-deoxy-2'-fluorouridine-3'-phosphate
  modified_base 12: mod_base = OTHER; note = 2'-O-methylcytidine-3'-phosphate
  modified_base 13: mod_base = OTHER; note = 2'-O-methyluridine-3'-phosphate
  modified_base 14: mod_base = OTHER; note = 2'-O-methylguanosine-3'-phosphate
  modified_base 15: mod_base = OTHER; note = 2'-O-methyladenosine-3'-phosphate
  modified_base 16: mod_base = OTHER; note = 2'-O-methyladenosine-3'-phosphate
  modified_base 17: mod_base = OTHER; note = 2'-O-methyluridine-3'-phosphate
  modified_base 18: mod_base = OTHER; note = 2'-O-methyladenosine-3'-phosphate
  modified_base 19: mod_base = OTHER; note = 2'-O-methyluridine-3'-phosphate
  modified_base 20: mod_base = OTHER; note = 2'-O-methylcytidine-3'-phosphate
  modified_base 21: mod_base = OTHER; note = 2'-O-methyladenosine
ttggctggtatctgaatatca

SEQ ID NO: 3226 - RNA, 21 nt, synthetic construct
  source 1..21: mol_type = other RNA
  modified_base 1: mod_base = OTHER; note = 2'-O-methyluridine-3'-phosphate
  modified_base 2: mod_base = OTHER; note = 2'-O-methylguanosine-3'-phosphate
  modified_base 3: mod_base = OTHER; note = 2'-O-methylguanosine-3'-phosphate
  modified_base 4: mod_base = OTHER; note = 2'-O-methylcytidine-3'-phosphate
  modified_base 5: mod_base = OTHER; note = 2'-O-methyluridine-3'-phosphate
  modified_base 6: mod_base = OTHER; note = 2'-O-methylguanosine-3'-phosphate
  modified_base 7: mod_base = OTHER; note = 2'-deoxy-2'-fluoroguanosine-3'-phosphate
  modified_base 8: mod_base = OTHER; note = 2'-O-methyluridine-3'-phosphate
  modified_base 9: mod_base = OTHER; note = 2'-deoxy-2'-fluoroadenosine-3'-phosphate
  modified_base 10: mod_base = OTHER; note = 2'-deoxy-2'-fluorouridine-3'-phosphate
  modified_base 11: mod_base = OTHER; note = 2'-deoxy-2'-fluorocytidine-3'-phosphate
  modified_base 12: mod_base = OTHER; note = 2'-O-methyluridine-3'-phosphate
  modified_base 13: mod_base = OTHER; note = 2'-O-methylguanosine-3'-phosphate
  modified_base 14: mod_base = OTHER; note = 2'-O-methyladenosine-3'-phosphate
  modified_base 15: mod_base = OTHER; note = 2'-O-methyladenosine-3'-phosphate
  modified_base 16: mod_base = OTHER; note = 2'-O-methyluridine-3'-phosphate
  modified_base 17: mod_base = OTHER; note = 2'-O-methyladenosine-3'-phosphate
  modified_base 18: mod_base = OTHER; note = 2'-O-methyluridine-3'-phosphate
  modified_base 19: mod_base = OTHER; note = 2'-O-methylcytidine-3'-phosphate
  modified_base 20: mod_base = OTHER; note = 2'-O-methyladenosine-3'-phosphate
  modified_base 21: mod_base = OTHER; note = 2'-O-methyladenosine
tggctggtatctgaatatcaa

SEQ ID NO: 3227 - RNA, 21 nt, synthetic construct
  source 1..21: mol_type = other RNA
  modified_base 1: mod_base = OTHER; note = 2'-O-methyluridine-3'-phosphate
  modified_base 2: mod_base = OTHER; note = 2'-O-methylguanosine-3'-phosphate
  modified_base 3: mod_base = OTHER; note = 2'-O-methylguanosine-3'-phosphate
  modified_base 4: mod_base = OTHER; note = 2'-O-methyluridine-3'-phosphate
  modified_base 5: mod_base = OTHER; note = 2'-O-methyladenosine-3'-phosphate
  modified_base 6: mod_base = OTHER; note = 2'-O-methyluridine-3'-phosphate
  modified_base 7: mod_base = OTHER; note = 2'-deoxy-2'-fluorocytidine-3'-phosphate
  modified_base 8: mod_base = OTHER; note = 2'-O-methyluridine-3'-phosphate
  modified_base 9: mod_base = OTHER; note = 2'-deoxy-2'-fluoroguanosine-3'-phosphate
  modified_base 10: mod_base = OTHER; note = 2'-deoxy-2'-fluoroadenosine-3'-phosphate
  modified_base 11: mod_base = OTHER; note = 2'-deoxy-2'-fluoroadenosine-3'-phosphate
  modified_base 12: mod_base = OTHER; note = 2'-O-methyluridine-3'-phosphate
  modified_base 13: mod_base = OTHER; note = 2'-O-methyladenosine-3'-phosphate
  modified_base 14: mod_base = OTHER; note = 2'-O-methyluridine-3'-phosphate
  modified_base 15: mod_base = OTHER; note = 2'-O-methylcytidine-3'-phosphate
  modified_base 16: mod_base = OTHER; note = 2'-O-methyladenosine-3'-phosphate
  modified_base 17: mod_base = OTHER; note = 2'-O-methyluridine-3'-phosphate
  modified_base 18: mod_base = OTHER; note = 2'-O-methylguanosine-3'-phosphate
  modified_base 19: mod_base = OTHER; note = 2'-O-methyladenosine-3'-phosphate
  modified_base 20: mod_base = OTHER; note = 2'-O-methyladenosine-3'-phosphate
  modified_base 21: mod_base = OTHER; note = 2'-O-methyladenosine
tggtatctgaatatcatgaaa

SEQ ID NO: 3228 - RNA, 21 nt, synthetic construct
  source 1..21: mol_type = other RNA
  modified_base 1: mod_base = OTHER; note = 2'-O-methylguanosine-3'-phosphate
  modified_base 2: mod_base = OTHER; note = 2'-O-methyluridine-3'-phosphate
  modified_base 3: mod_base = OTHER; note = 2'-O-methyladenosine-3'-phosphate
  modified_base 4: mod_base = OTHER; note = 2'-O-methyluridine-3'-phosphate
  modified_base 5: mod_base = OTHER; note = 2'-O-methylcytidine-3'-phosphate
  modified_base 6: mod_base = OTHER; note = 2'-O-methyluridine-3'-phosphate
  modified_base 7: mod_base = OTHER; note = 2'-deoxy-2'-fluoroguanosine-3'-phosphate
  modified_base 8: mod_base = OTHER; note = 2'-O-methyladenosine-3'-phosphate
  modified_base 9: mod_base = OTHER; note = 2'-deoxy-2'-fluoroadenosine-3'-phosphate
  modified_base 10: mod_base = OTHER; note = 2'-deoxy-2'-fluorouridine-3'-phosphate
  modified_base 11: mod_base = OTHER; note = 2'-deoxy-2'-fluoroadenosine-3'-phosphate
  modified_base 12: mod_base = OTHER; note = 2'-O-methyluridine-3'-phosphate
  modified_base 13: mod_base = OTHER; note = 2'-O-methylcytidine-3'-phosphate
  modified_base 14: mod_base = OTHER; note = 2'-O-methyladenosine-3'-phosphate
  modified_base 15: mod_base = OTHER; note = 2'-O-methyluridine-3'-phosphate
  modified_base 16: mod_base = OTHER; note = 2'-O-methylguanosine-3'-phosphate
  modified_base 17: mod_base = OTHER; note = 2'-O-methyladenosine-3'-phosphate
  modified_base 18: mod_base = OTHER; note = 2'-O-methyladenosine-3'-phosphate
  modified_base 19: mod_base = OTHER; note = 2'-O-methylcytidine-3'-phosphate
  modified_base 20: mod_base = OTHER; note = 2'-O-methyladenosine-3'-phosphate
  modified_base 21: mod_base = OTHER; note = 2'-O-methyladenosine
gtatctgaatatcatgaacaa

SEQ ID NO: 3229 - RNA, 21 nt, synthetic construct
  source 1..21: mol_type = other RNA
  modified_base 1: mod_base = OTHER; note = 2'-O-methylcytidine-3'-phosphate
  modified_base 2: mod_base = OTHER; note = 2'-O-methyladenosine-3'-phosphate
  modified_base 3: mod_base = OTHER; note = 2'-O-methyluridine-3'-phosphate
  modified_base 4: mod_base = OTHER; note = 2'-O-methylguanosine-3'-phosphate
  modified_base 5: mod_base = OTHER; note = 2'-O-methyladenosine-3'-phosphate
  modified_base 6: mod_base = OTHER; note = 2'-O-methyladenosine-3'-phosphate
  modified_base 7: mod_base = OTHER; note = 2'-deoxy-2'-fluorocytidine-3'-phosphate
  modified_base 8: mod_base = OTHER; note = 2'-O-methyladenosine-3'-phosphate
  modified_base 9: mod_base = OTHER; note = 2'-deoxy-2'-fluoroguanosine-3'-phosphate
  modified_base 10: mod_base = OTHER; note = 2'-deoxy-2'-fluoroguanosine-3'-phosphate
  modified_base 11: mod_base = OTHER; note = 2'-deoxy-2'-fluoroguanosine-3'-phosphate
  modified_base 12: mod_base = OTHER; note = 2'-O-methylcytidine-3'-phosphate
  modified_base 13: mod_base = OTHER; note = 2'-O-methyluridine-3'-phosphate
  modified_base 14: mod_base = OTHER; note = 2'-O-methylcytidine-3'-phosphate
  modified_base 15: mod_base = OTHER; note = 2'-O-methylcytidine-3'-phosphate
  modified_base 16: mod_base = OTHER; note = 2'-O-methyluridine-3'-phosphate
  modified_base 17: mod_base = OTHER; note = 2'-O-methyluridine-3'-phosphate
  modified_base 18: mod_base = OTHER; note = 2'-O-methyladenosine-3'-phosphate
  modified_base 19: mod_base = OTHER; note = 2'-O-methyluridine-3'-phosphate
  modified_base 20: mod_base = OTHER; note = 2'-O-methyladenosine-3'-phosphate
  modified_base 21: mod_base = OTHER; note = 2'-O-methyladenosine
catgaacagggctccttataa

SEQ ID NO: 3230 - RNA, 21 nt, synthetic construct
  source 1..21: mol_type = other RNA
  modified_base 1: mod_base = OTHER; note = 2'-O-methyladenosine-3'-phosphate
  modified_base 2: mod_base = OTHER; note = 2'-O-methyluridine-3'-phosphate
  modified_base 3: mod_base = OTHER; note = 2'-O-methylguanosine-3'-phosphate
  modified_base 4: mod_base = OTHER; note = 2'-O-methyladenosine-3'-phosphate
  modified_base 5: mod_base = OTHER; note = 2'-O-methyladenosine-3'-phosphate
  modified_base 6: mod_base = OTHER; note = 2'-O-methylcytidine-3'-phosphate
  modified_base 7: mod_base = OTHER; note = 2'-deoxy-2'-fluoroadenosine-3'-phosphate
  modified_base 8: mod_base = OTHER; note = 2'-O-methylguanosine-3'-phosphate
  modified_base 9: mod_base = OTHER; note = 2'-deoxy-2'-fluoroguanosine-3'-phosphate
  modified_base 10: mod_base = OTHER; note = 2'-deoxy-2'-fluoroguanosine-3'-phosphate
  modified_base 11: mod_base = OTHER; note = 2'-deoxy-2'-fluorocytidine-3'-phosphate
  modified_base 12: mod_base = OTHER; note = 2'-O-methyluridine-3'-phosphate
  modified_base 13: mod_base = OTHER; note = 2'-O-methylcytidine-3'-phosphate
  modified_base 14: mod_base = OTHER; note = 2'-O-methylcytidine-3'-phosphate
  modified_base 15: mod_base = OTHER; note = 2'-O-methyluridine-3'-phosphate
  modified_base 16: mod_base = OTHER; note = 2'-O-methyluridine-3'-phosphate
  modified_base 17: mod_base = OTHER; note = 2'-O-methyladenosine-3'-phosphate
  modified_base 18: mod_base = OTHER; note = 2'-O-methyluridine-3'-phosphate
  modified_base 19: mod_base = OTHER; note = 2'-O-methyladenosine-3'-phosphate
  modified_base 20: mod_base = OTHER; note = 2'-O-methyluridine-3'-phosphate
  modified_base 21: mod_base = OTHER; note = 2'-O-methyladenosine
atgaacagggctccttatata

SEQ ID NO: 3231 - RNA, 21 nt, synthetic construct
  source 1..21: mol_type = other RNA
  modified_base 1: mod_base = OTHER; note = 2'-O-methyladenosine-3'-phosphate
  modified_base 2: mod_base = OTHER; note = 2'-O-methylcytidine-3'-phosphate
  modified_base 3: mod_base = OTHER; note = 2'-O-methyladenosine-3'-phosphate
  modified_base 4: mod_base = OTHER; note = 2'-O-methylguanosine-3'-phosphate
  modified_base 5: mod_base = OTHER; note = 2'-O-methylguanosine-3'-phosphate
  modified_base 6: mod_base = OTHER; note = 2'-O-methylguanosine-3'-phosphate
  modified_base 7: mod_base = OTHER; note = 2'-deoxy-2'-fluorocytidine-3'-phosphate
  modified_base 8: mod_base = OTHER; note = 2'-O-methyluridine-3'-phosphate
  modified_base 9: mod_base = OTHER; note = 2'-deoxy-2'-fluorocytidine-3'-phosphate
  modified_base 10: mod_base = OTHER; note = 2'-deoxy-2'-fluorocytidine-3'-phosphate
  modified_base 11: mod_base = OTHER; note = 2'-deoxy-2'-fluorouridine-3'-phosphate
  modified_base 12: mod_base = OTHER; note = 2'-O-methyluridine-3'-phosphate
  modified_base 13: mod_base = OTHER; note = 2'-O-methyladenosine-3'-phosphate
  modified_base 14: mod_base = OTHER; note = 2'-O-methyluridine-3'-phosphate
  modified_base 15: mod_base = OTHER; note = 2'-O-methyladenosine-3'-phosphate
  modified_base 16: mod_base = OTHER; note = 2'-O-methyluridine-3'-phosphate
  modified_base 17: mod_base = OTHER; note = 2'-O-methylguanosine-3'-phosphate
  modified_base 18: mod_base = OTHER; note = 2'-O-methyladenosine-3'-phosphate
  modified_base 19: mod_base = OTHER; note = 2'-O-methylcytidine-3'-phosphate
  modified_base 20: mod_base = OTHER; note = 2'-O-methyluridine-3'-phosphate
  modified_base 21: mod_base = OTHER; note = 2'-O-methyladenosine
acagggctccttatatgacta

SEQ ID NO: 3232 - RNA, 21 nt, synthetic construct
  source 1..21: mol_type = other RNA
  modified_base 1: mod_base = OTHER; note = 2'-O-methylcytidine-3'-phosphate
  modified_base 2: mod_base = OTHER; note = 2'-O-methyladenosine-3'-phosphate
  modified_base 3: mod_base = OTHER; note = 2'-O-methylguanosine-3'-phosphate
  modified_base 4: mod_base = OTHER; note = 2'-O-methylguanosine-3'-phosphate
  modified_base 5: mod_base = OTHER; note = 2'-O-methylguanosine-3'-phosphate
  modified_base 6: mod_base = OTHER; note = 2'-O-methylcytidine-3'-phosphate
  modified_base 7: mod_base = OTHER; note = 2'-deoxy-2'-fluorouridine-3'-phosphate
  modified_base 8: mod_base = OTHER; note = 2'-O-methylcytidine-3'-phosphate
  modified_base 9: mod_base = OTHER; note = 2'-deoxy-2'-fluorocytidine-3'-phosphate
  modified_base 10: mod_base = OTHER; note = 2'-deoxy-2'-fluorouridine-3'-phosphate
  modified_base 11: mod_base = OTHER; note = 2'-deoxy-2'-fluorouridine-3'-phosphate
  modified_base 12: mod_base = OTHER; note = 2'-O-methyladenosine-3'-phosphate
  modified_base 13: mod_base = OTHER; note = 2'-O-methyluridine-3'-phosphate
  modified_base 14: mod_base = OTHER; note = 2'-O-methyladenosine-3'-phosphate
  modified_base 15: mod_base = OTHER; note = 2'-O-methyluridine-3'-phosphate
  modified_base 16: mod_base = OTHER; note = 2'-O-methylguanosine-3'-phosphate
  modified_base 17: mod_base = OTHER; note = 2'-O-methyladenosine-3'-phosphate
  modified_base 18: mod_base = OTHER; note = 2'-O-methylcytidine-3'-phosphate
  modified_base 19: mod_base = OTHER; note = 2'-O-methyluridine-3'-phosphate
  modified_base 20: mod_base = OTHER; note = 2'-O-methyladenosine-3'-phosphate
  modified_base 21: mod_base = OTHER; note = 2'-O-methyladenosine
cagggctccttatatgactaa

SEQ ID NO: 3233 - RNA, 21 nt, synthetic construct
  source 1..21: mol_type = other RNA
  modified_base 1: mod_base = OTHER; note = 2'-O-methyladenosine-3'-phosphate
  modified_base 2: mod_base = OTHER; note = 2'-O-methylguanosine-3'-phosphate
  modified_base 3: mod_base = OTHER; note = 2'-O-methylguanosine-3'-phosphate
  modified_base 4: mod_base = OTHER; note = 2'-O-methylguanosine-3'-phosphate
  modified_base 5: mod_base = OTHER; note = 2'-O-methylcytidine-3'-phosphate
  modified_base 6: mod_base = OTHER; note = 2'-O-methyluridine-3'-phosphate
  modified_base 7: mod_base = OTHER; note = 2'-deoxy-2'-fluorocytidine-3'-phosphate
  modified_base 8: mod_base = OTHER; note = 2'-O-methylcytidine-3'-phosphate
  modified_base 9: mod_base = OTHER; note = 2'-deoxy-2'-fluorouridine-3'-phosphate
  modified_base 10: mod_base = OTHER; note = 2'-deoxy-2'-fluorouridine-3'-phosphate
  modified_base 11: mod_base = OTHER; note = 2'-deoxy-2'-fluoroadenosine-3'-phosphate
  modified_base 12: mod_base = OTHER; note = 2'-O-methyluridine-3'-phosphate
  modified_base 13: mod_base = OTHER; note = 2'-O-methyladenosine-3'-phosphate
  modified_base 14: mod_base = OTHER; note = 2'-O-methyluridine-3'-phosphate
  modified_base 15: mod_base = OTHER; note = 2'-O-methylguanosine-3'-phosphate
  modified_base 16: mod_base = OTHER; note = 2'-O-methyladenosine-3'-phosphate
  modified_base 17: mod_base = OTHER; note = 2'-O-methylcytidine-3'-phosphate
  modified_base 18: mod_base = OTHER; note = 2'-O-methyluridine-3'-phosphate
  modified_base 19: mod_base = OTHER; note = 2'-O-methyladenosine-3'-phosphate
  modified_base 20: mod_base = OTHER; note = 2'-O-methyluridine-3'-phosphate
  modified_base 21: mod_base = OTHER; note = 2'-O-methyladenosine
agggctccttatatgactata

SEQ ID NO: 3234 - RNA, 21 nt, synthetic construct
  source 1..21: mol_type = other RNA
  modified_base 1: mod_base = OTHER; note = 2'-O-methylguanosine-3'-phosphate
  modified_base 2: mod_base = OTHER; note = 2'-O-methylguanosine-3'-phosphate
  modified_base 3: mod_base = OTHER; note = 2'-O-methylguanosine-3'-phosphate
  modified_base 4: mod_base = OTHER; note = 2'-O-methylcytidine-3'-phosphate
  modified_base 5: mod_base = OTHER; note = 2'-O-methyluridine-3'-phosphate
  modified_base 6: mod_base = OTHER; note = 2'-O-methylcytidine-3'-phosphate
  modified_base 7: mod_base = OTHER; note = 2'-deoxy-2'-fluorocytidine-3'-phosphate
  modified_base 8: mod_base = OTHER; note = 2'-O-methyluridine-3'-phosphate
  modified_base 9: mod_base = OTHER; note = 2'-deoxy-2'-fluorouridine-3'-phosphate
  modified_base 10: mod_base = OTHER; note = 2'-deoxy-2'-fluoroadenosine-3'-phosphate
  modified_base 11: mod_base = OTHER; note = 2'-deoxy-2'-fluorouridine-3'-phosphate
  modified_base 12: mod_base = OTHER; note = 2'-O-methyladenosine-3'-phosphate
  modified_base 13: mod_base = OTHER; note = 2'-O-methyluridine-3'-phosphate
  modified_base 14: mod_base = OTHER; note = 2'-O-methylguanosine-3'-phosphate
  modified_base 15: mod_base = OTHER; note = 2'-O-methyladenosine-3'-phosphate
  modified_base 16: mod_base = OTHER; note = 2'-O-methylcytidine-3'-phosphate
  modified_base 17: mod_base = OTHER; note = 2'-O-methyluridine-3'-phosphate
  modified_base 18: mod_base = OTHER; note = 2'-O-methyladenosine-3'-phosphate
  modified_base 19: mod_base = OTHER; note = 2'-O-methyluridine-3'-phosphate
  modified_base 20: mod_base = OTHER; note = 2'-O-methyluridine-3'-phosphate
  modified_base 21: mod_base = OTHER; note = 2'-O-methyladenosine
gggctccttatatgactatta

SEQ ID NO: 3235 - RNA, 21 nt, synthetic construct
  source 1..21: mol_type = other RNA
  modified_base 1: mod_base = OTHER; note = 2'-O-methylguanosine-3'-phosphate
  modified_base 2: mod_base = OTHER; note = 2'-O-methylguanosine-3'-phosphate
  modified_base 3: mod_base = OTHER; note = 2'-O-methylcytidine-3'-phosphate
  modified_base 4: mod_base = OTHER; note = 2'-O-methyluridine-3'-phosphate
  modified_base 5: mod_base = OTHER; note = 2'-O-methylcytidine-3'-phosphate
  modified_base 6: mod_base = OTHER; note = 2'-O-methylcytidine-3'-phosphate
  modified_base 7: mod_base = OTHER; note = 2'-deoxy-2'-fluorouridine-3'-phosphate
  modified_base 8: mod_base = OTHER; note = 2'-O-methyluridine-3'-phosphate
  modified_base 9: mod_base = OTHER; note = 2'-deoxy-2'-fluoroadenosine-3'-phosphate
  modified_base 10: mod_base = OTHER; note = 2'-deoxy-2'-fluorouridine-3'-phosphate
  modified_base 11: mod_base = OTHER; note = 2'-deoxy-2'-fluoroadenosine-3'-phosphate
  modified_base 12: mod_base = OTHER; note = 2'-O-methyluridine-3'-phosphate
  modified_base 13: mod_base = OTHER; note = 2'-O-methylguanosine-3'-phosphate
  modified_base 14: mod_base = OTHER; note = 2'-O-methyladenosine-3'-phosphate
  modified_base 15: mod_base = OTHER; note = 2'-O-methylcytidine-3'-phosphate
  modified_base 16: mod_base = OTHER; note = 2'-O-methyluridine-3'-phosphate
  modified_base 17: mod_base = OTHER; note = 2'-O-methyladenosine-3'-phosphate
  modified_base 18: mod_base = OTHER; note = 2'-O-methyluridine-3'-phosphate
  modified_base 19: mod_base = OTHER; note = 2'-O-methyluridine-3'-phosphate
  modified_base 20: mod_base = OTHER; note = 2'-O-methyluridine-3'-phosphate
  modified_base 21: mod_base = OTHER; note = 2'-O-methyladenosine
ggctccttatatgactattta

SEQ ID NO: 3236 - RNA, 21 nt, synthetic construct
  source 1..21: mol_type = other RNA
  modified_base 1: mod_base = OTHER; note = 2'-O-methylguanosine-3'-phosphate
  modified_base 2: mod_base = OTHER; note = 2'-O-methylcytidine-3'-phosphate
  modified_base 3: mod_base = OTHER; note = 2'-O-methyluridine-3'-phosphate
  modified_base 4: mod_base = OTHER; note = 2'-O-methylcytidine-3'-phosphate
  modified_base 5: mod_base = OTHER; note = 2'-O-methylcytidine-3'-phosphate
  modified_base 6: mod_base = OTHER; note = 2'-O-methyluridine-3'-phosphate
  modified_base 7: mod_base = OTHER; note = 2'-deoxy-2'-fluorouridine-3'-phosphate
  modified_base 8: mod_base = OTHER; note = 2'-O-methyladenosine-3'-phosphate
  modified_base 9: mod_base = OTHER; note = 2'-deoxy-2'-fluorouridine-3'-phosphate
  modified_base 10: mod_base = OTHER; note = 2'-deoxy-2'-fluoroadenosine-3'-phosphate
  modified_base 11: mod_base = OTHER; note = 2'-deoxy-2'-fluorouridine-3'-phosphate
  modified_base 12: mod_base = OTHER; note = 2'-O-methylguanosine-3'-phosphate
  modified_base 13: mod_base = OTHER; note = 2'-O-methyladenosine-3'-phosphate
  modified_base 14: mod_base = OTHER; note = 2'-O-methylcytidine-3'-phosphate
  modified_base 15: mod_base = OTHER; note = 2'-O-methyluridine-3'-phosphate
  modified_base 16: mod_base = OTHER; note = 2'-O-methyladenosine-3'-phosphate
  modified_base 17: mod_base = OTHER; note = 2'-O-methyluridine-3'-phosphate
  modified_base 18: mod_base = OTHER; note = 2'-O-methyluridine-3'-phosphate
  modified_base 19: mod_base = OTHER; note = 2'-O-methyluridine-3'-phosphate
  modified_base 20: mod_base = OTHER; note = 2'-O-methylguanosine-3'-phosphate
  modified_base 21: mod_base = OTHER; note = 2'-O-methyladenosine
gctccttatatgactatttga

SEQ ID NO: 3237 - RNA, 21 nt, synthetic construct
  source 1..21: mol_type = other RNA
  modified_base 1: mod_base = OTHER; note = 2'-O-methylcytidine-3'-phosphate
  modified_base 2: mod_base = OTHER; note = 2'-O-methyluridine-3'-phosphate
  modified_base 3: mod_base = OTHER; note = 2'-O-methylcytidine-3'-phosphate
  modified_base 4: mod_base = OTHER; note = 2'-O-methylcytidine-3'-phosphate
  modified_base 5: mod_base = OTHER; note = 2'-O-methyluridine-3'-phosphate
  modified_base 6: mod_base = OTHER; note = 2'-O-methyluridine-3'-phosphate
  modified_base 7: mod_base = OTHER; note = 2'-deoxy-2'-fluoroadenosine-3'-phosphate
  modified_base 8: mod_base = OTHER; note = 2'-O-methyluridine-3'-phosphate
  modified_base 9: mod_base = OTHER; note = 2'-deoxy-2'-fluoroadenosine-3'-phosphate
  modified_base 10: mod_base = OTHER; note = 2'-deoxy-2'-fluorouridine-3'-phosphate
  modified_base 11: mod_base = OTHER; note = 2'-deoxy-2'-fluoroguanosine-3'-phosphate
  modified_base 12: mod_base = OTHER; note = 2'-O-methyladenosine-3'-phosphate
  modified_base 13: mod_base = OTHER; note = 2'-O-methylcytidine-3'-phosphate
  modified_base 14: mod_base = OTHER; note = 2'-O-methyluridine-3'-phosphate
  modified_base 15: mod_base = OTHER; note = 2'-O-methyladenosine-3'-phosphate
  modified_base 16: mod_base = OTHER; note = 2'-O-methyluridine-3'-phosphate
  modified_base 17: mod_base = OTHER; note = 2'-O-methyluridine-3'-phosphate
  modified_base 18: mod_base = OTHER; note = 2'-O-methyluridine-3'-phosphate
  modified_base 19: mod_base = OTHER; note = 2'-O-methylguanosine-3'-phosphate
  modified_base 20: mod_base = OTHER; note = 2'-O-methyladenosine-3'-phosphate
  modified_base 21: mod_base = OTHER; note = 2'-O-methyladenosine
ctccttatatgactatttgaa

SEQ ID NO: 3238 - RNA, 21 nt, synthetic construct
  source 1..21: mol_type = other RNA
  modified_base 1: mod_base = OTHER; note = 2'-O-methyluridine-3'-phosphate
  modified_base 2: mod_base = OTHER; note = 2'-O-methylcytidine-3'-phosphate
  modified_base 3: mod_base = OTHER; note = 2'-O-methylcytidine-3'-phosphate
  modified_base 4: mod_base = OTHER; note = 2'-O-methyluridine-3'-phosphate
  modified_base 5: mod_base = OTHER; note = 2'-O-methyluridine-3'-phosphate
  modified_base 6: mod_base = OTHER; note = 2'-O-methyladenosine-3'-phosphate
  modified_base 7: mod_base = OTHER; note = 2'-deoxy-2'-fluorouridine-3'-phosphate
  modified_base 8: mod_base = OTHER; note = 2'-O-methyladenosine-3'-phosphate
  modified_base 9: mod_base = OTHER; note = 2'-deoxy-2'-fluorouridine-3'-phosphate
  modified_base 10: mod_base = OTHER; note = 2'-deoxy-2'-fluoroguanosine-3'-phosphate
  modified_base 11: mod_base = OTHER; note = 2'-deoxy-2'-fluoroadenosine-3'-phosphate
  modified_base 12: mod_base = OTHER; note = 2'-O-methylcytidine-3'-phosphate
  modified_base 13: mod_base = OTHER; note = 2'-O-methyluridine-3'-phosphate
  modified_base 14: mod_base = OTHER; note = 2'-O-methyladenosine-3'-phosphate
  modified_base 15: mod_base = OTHER; note = 2'-O-methyluridine-3'-phosphate
  modified_base 16: mod_base = OTHER; note = 2'-O-methyluridine-3'-phosphate
  modified_base 17: mod_base = OTHER; note = 2'-O-methyluridine-3'-phosphate
  modified_base 18: mod_base = OTHER; note = 2'-O-methylguanosine-3'-phosphate
  modified_base 19: mod_base = OTHER; note = 2'-O-methyladenosine-3'-phosphate
  modified_base 20: mod_base = OTHER; note = 2'-O-methyladenosine-3'-phosphate
  modified_base 21: mod_base = OTHER; note = 2'-O-methyladenosine
tccttatatgactatttgaaa

SEQ ID NO: 3239 - RNA, 21 nt, synthetic construct
  source 1..21: mol_type = other RNA
  modified_base 1: mod_base = OTHER; note = 2'-O-methylcytidine-3'-phosphate
  modified_base 2: mod_base = OTHER; note = 2'-O-methylcytidine-3'-phosphate
  modified_base 3: mod_base = OTHER; note = 2'-O-methyluridine-3'-phosphate
  modified_base 4: mod_base = OTHER; note = 2'-O-methyluridine-3'-phosphate
  modified_base 5: mod_base = OTHER; note = 2'-O-methyladenosine-3'-phosphate
  modified_base 6: mod_base = OTHER; note = 2'-O-methyluridine-3'-phosphate
  modified_base 7: mod_base = OTHER; note = 2'-deoxy-2'-fluoroadenosine-3'-phosphate
  modified_base 8: mod_base = OTHER; note = 2'-O-methyluridine-3'-phosphate
  modified_base 9: mod_base = OTHER; note = 2'-deoxy-2'-fluoroguanosine-3'-phosphate
  modified_base 10: mod_base = OTHER; note = 2'-deoxy-2'-fluoroadenosine-3'-phosphate
  modified_base 11: mod_base = OTHER; note = 2'-deoxy-2'-fluorocytidine-3'-phosphate
  modified_base 12: mod_base = OTHER; note = 2'-O-methyluridine-3'-phosphate
  modified_base 13: mod_base = OTHER; note = 2'-O-methyladenosine-3'-phosphate
  modified_base 14: mod_base = OTHER; note = 2'-O-methyluridine-3'-phosphate
  modified_base 15: mod_base = OTHER; note = 2'-O-methyluridine-3'-phosphate
  modified_base 16: mod_base = OTHER; note = 2'-O-methyluridine-3'-phosphate
  modified_base 17: mod_base = OTHER; note = 2'-O-methylguanosine-3'-phosphate
  modified_base 18: mod_base = OTHER; note = 2'-O-methyladenosine-3'-phosphate
  modified_base 19: mod_base = OTHER; note = 2'-O-methyladenosine-3'-phosphate
  modified_base 20: mod_base = OTHER; note = 2'-O-methyluridine-3'-phosphate
  modified_base 21: mod_base = OTHER; note = 2'-O-methyladenosine
ccttatatgactatttgaata

SEQ ID NO: 3240 - RNA, 21 nt, synthetic construct
  source 1..21: mol_type = other RNA
  modified_base 1: mod_base = OTHER; note = 2'-O-methyluridine-3'-phosphate
  modified_base 2: mod_base = OTHER; note = 2'-O-methyluridine-3'-phosphate
  modified_base 3: mod_base = OTHER; note = 2'-O-methyladenosine-3'-phosphate
  modified_base 4: mod_base = OTHER; note = 2'-O-methyluridine-3'-phosphate
  modified_base 5: mod_base = OTHER; note = 2'-O-methyladenosine-3'-phosphate
  modified_base 6: mod_base = OTHER; note = 2'-O-methyluridine-3'-phosphate
  modified_base 7: mod_base = OTHER; note = 2'-deoxy-2'-fluoroguanosine-3'-phosphate
  modified_base 8: mod_base = OTHER; note = 2'-O-methyladenosine-3'-phosphate
  modified_base 9: mod_base = OTHER; note = 2'-deoxy-2'-fluorocytidine-3'-phosphate
  modified_base 10: mod_base = OTHER; note = 2'-deoxy-2'-fluorouridine-3'-phosphate
  modified_base 11: mod_base = OTHER; note = 2'-deoxy-2'-fluoroadenosine-3'-phosphate
  modified_base 12: mod_base = OTHER; note = 2'-O-methyluridine-3'-phosphate
  modified_base 13: mod_base = OTHER; note = 2'-O-methyluridine-3'-phosphate
  modified_base 14: mod_base = OTHER; note = 2'-O-methyluridine-3'-phosphate
  modified_base 15: mod_base = OTHER; note = 2'-O-methylguanosine-3'-phosphate
  modified_base 16: mod_base = OTHER; note = 2'-O-methyladenosine-3'-phosphate
  modified_base 17: mod_base = OTHER; note = 2'-O-methyladenosine-3'-phosphate
  modified_base 18: mod_base = OTHER; note = 2'-O-methyluridine-3'-phosphate
  modified_base 19: mod_base = OTHER; note = 2'-O-methyladenosine-3'-phosphate
  modified_base 20: mod_base = OTHER; note = 2'-O-methylguanosine-3'-phosphate
  modified_base 21: mod_base = OTHER; note = 2'-O-methyladenosine
ttatatgactatttgaataga

SEQ ID NO: 3241 - RNA, 21 nt, synthetic construct
  source 1..21: mol_type = other RNA
  modified_base 1: mod_base = OTHER; note = 2'-O-methylguanosine-3'-phosphate
  modified_base 2: mod_base = OTHER; note = 2'-O-methyluridine-3'-phosphate
  modified_base 3: mod_base = OTHER; note = 2'-O-methylguanosine-3'-phosphate
  modified_base 4: mod_base = OTHER; note = 2'-O-methyladenosine-3'-phosphate
  modified_base 5: mod_base = OTHER; note = 2'-O-methylcytidine-3'-phosphate
  modified_base 6: mod_base = OTHER; note = 2'-O-methylcytidine-3'-phosphate
  modified_base 7: mod_base = OTHER; note = 2'-deoxy-2'-fluoroguanosine-3'-phosphate
  modified_base 8: mod_base = OTHER; note = 2'-O-methyluridine-3'-phosphate
  modified_base 9: mod_base = OTHER; note = 2'-deoxy-2'-fluoroguanosine-3'-phosphate
  modified_base 10: mod_base = OTHER; note = 2'-deoxy-2'-fluoroguanosine-3'-phosphate
  modified_base 11: mod_base = OTHER; note = 2'-deoxy-2'-fluorocytidine-3'-phosphate
  modified_base 12: mod_base = OTHER; note = 2'-O-methyluridine-3'-phosphate
  modified_base 13: mod_base = OTHER; note = 2'-O-methylguanosine-3'-phosphate
  modified_base 14: mod_base = OTHER; note = 2'-O-methylguanosine-3'-phosphate
  modified_base 15: mod_base = OTHER; note = 2'-O-methyladenosine-3'-phosphate
  modified_base 16: mod_base = OTHER; note = 2'-O-methyladenosine-3'-phosphate
  modified_base 17: mod_base = OTHER; note = 2'-O-methyluridine-3'-phosphate
  modified_base 18: mod_base = OTHER; note = 2'-O-methylguanosine-3'-phosphate
  modified_base 19: mod_base = OTHER; note = 2'-O-methyladenosine-3'-phosphate
  modified_base 20: mod_base = OTHER; note = 2'-O-methyluridine-3'-phosphate
  modified_base 21: mod_base = OTHER; note = 2'-O-methyladenosine
gtgaccgtggctggaatgata

SEQ ID NO: 3242 - RNA, 21 nt, synthetic construct
  source 1..21: mol_type = other RNA
  modified_base 1: mod_base = OTHER; note = 2'-O-methylcytidine-3'-phosphate
  modified_base 2: mod_base = OTHER; note = 2'-O-methylguanosine-3'-phosphate
  modified_base 3: mod_base = OTHER; note = 2'-O-methyluridine-3'-phosphate
  modified_base 4: mod_base = OTHER; note = 2'-O-methylguanosine-3'-phosphate
  modified_base 5: mod_base = OTHER; note = 2'-O-methylguanosine-3'-phosphate
  modified_base 6: mod_base = OTHER; note = 2'-O-methylcytidine-3'-phosphate
  modified_base 7: mod_base = OTHER; note = 2'-deoxy-2'-fluorouridine-3'-phosphate
  modified_base 8: mod_base = OTHER; note = 2'-O-methylguanosine-3'-phosphate
  modified_base 9: mod_base = OTHER; note = 2'-deoxy-2'-fluoroguanosine-3'-phosphate
  modified_base 10: mod_base = OTHER; note = 2'-deoxy-2'-fluoroadenosine-3'-phosphate
  modified_base 11: mod_base = OTHER; note = 2'-deoxy-2'-fluoroadenosine-3'-phosphate
  modified_base 12: mod_base = OTHER; note = 2'-O-methyluridine-3'-phosphate
  modified_base 13: mod_base = OTHER; note = 2'-O-methylguanosine-3'-phosphate
  modified_base 14: mod_base = OTHER; note = 2'-O-methyladenosine-3'-phosphate
  modified_base 15: mod_base = OTHER; note = 2'-O-methyluridine-3'-phosphate
  modified_base 16: mod_base = OTHER; note = 2'-O-methylcytidine-3'-phosphate
  modified_base 17: mod_base = OTHER; note = 2'-O-methyladenosine-3'-phosphate
  modified_base 18: mod_base = OTHER; note = 2'-O-methyladenosine-3'-phosphate
  modified_base 19: mod_base = OTHER; note = 2'-O-methylguanosine-3'-phosphate
  modified_base 20: mod_base = OTHER; note = 2'-O-methylcytidine-3'-phosphate
  modified_base 21: mod_base = OTHER; note = 2'-O-methyladenosine
cgtggctggaatgatcaagca

SEQ ID NO: 3243 - RNA, 21 nt, synthetic construct
  source 1..21: mol_type = other RNA
  modified_base 1: mod_base = OTHER; note = 2'-O-methyluridine-3'-phosphate
  modified_base 2: mod_base = OTHER; note = 2'-O-methylguanosine-3'-phosphate
  modified_base 3: mod_base = OTHER; note = 2'-O-methylguanosine-3'-phosphate
  modified_base 4: mod_base = OTHER; note = 2'-O-methylcytidine-3'-phosphate
  modified_base 5: mod_base = OTHER; note = 2'-O-methyluridine-3'-phosphate
  modified_base 6: mod_base = OTHER; note = 2'-O-methylguanosine-3'-phosphate
  modified_base 7: mod_base = OTHER; note = 2'-deoxy-2'-fluoroguanosine-3'-phosphate
  modified_base 8: mod_base = OTHER; note = 2'-O-methyladenosine-3'-phosphate
  modified_base 9: mod_base = OTHER; note = 2'-deoxy-2'-fluoroadenosine-3'-phosphate
  modified_base 10: mod_base = OTHER; note = 2'-deoxy-2'-fluorouridine-3'-phosphate
  modified_base 11: mod_base = OTHER; note = 2'-deoxy-2'-fluoroguanosine-3'-phosphate
  modified_base 12: mod_base = OTHER; note = 2'-O-methyladenosine-3'-phosphate
  modified_base 13: mod_base = OTHER; note = 2'-O-methyluridine-3'-phosphate
  modified_base 14: mod_base = OTHER; note = 2'-O-methylcytidine-3'-phosphate
  modified_base 15: mod_base = OTHER; note = 2'-O-methyladenosine-3'-phosphate
  modified_base 16: mod_base = OTHER; note = 2'-O-methyladenosine-3'-phosphate
  modified_base 17: mod_base = OTHER; note = 2'-O-methylguanosine-3'-phosphate
  modified_base 18: mod_base = OTHER; note = 2'-O-methylcytidine-3'-phosphate
  modified_base 19: mod_base = OTHER; note = 2'-O-methyluridine-3'-phosphate
  modified_base 20: mod_base = OTHER; note = 2'-O-methylguanosine-3'-phosphate
  modified_base 21: mod_base = OTHER; note = 2'-O-methyladenosine
tggctggaatgatcaagctga

SEQ ID NO: 3244 - RNA, 21 nt, synthetic construct
  source 1..21: mol_type = other RNA
  modified_base 1: mod_base = OTHER; note = 2'-O-methylguanosine-3'-phosphate
  modified_base 2: mod_base = OTHER; note = 2'-O-methylguanosine-3'-phosphate
  modified_base 3: mod_base = OTHER; note = 2'-O-methylcytidine-3'-phosphate
  modified_base 4: mod_base = OTHER; note = 2'-O-methylguanosine-3'-phosphate
  modified_base 5: mod_base = OTHER; note = 2'-O-methylcytidine-3'-phosphate
  modified_base 6: mod_base = OTHER; note = 2'-O-methyluridine-3'-phosphate
  modified_base 7: mod_base = OTHER; note = 2'-deoxy-2'-fluorocytidine-3'-phosphate
  modified_base 8: mod_base = OTHER; note = 2'-O-methyluridine-3'-phosphate
  modified_base 9: mod_base = OTHER; note = 2'-deoxy-2'-fluorocytidine-3'-phosphate
  modified_base 10: mod_base = OTHER; note = 2'-deoxy-2'-fluoroadenosine-3'-phosphate
  modified_base 11: mod_base = OTHER; note = 2'-deoxy-2'-fluoroadenosine-3'-phosphate
  modified_base 12: mod_base = OTHER; note = 2'-O-methyluridine-3'-phosphate
  modified_base 13: mod_base = OTHER; note = 2'-O-methyluridine-3'-phosphate
  modified_base 14: mod_base = OTHER; note = 2'-O-methylguanosine-3'-phosphate
  modified_base 15: mod_base = OTHER; note = 2'-O-methylcytidine-3'-phosphate
  modified_base 16: mod_base = OTHER; note = 2'-O-methyluridine-3'-phosphate
  modified_base 17: mod_base = OTHER; note = 2'-O-methyladenosine-3'-phosphate
  modified_base 18: mod_base = OTHER; note = 2'-O-methylguanosine-3'-phosphate
  modified_base 19: mod_base = OTHER; note = 2'-O-methyluridine-3'-phosphate
  modified_base 20: mod_base = OTHER; note = 2'-O-methylguanosine-3'-phosphate
  modified_base 21: mod_base = OTHER; note = 2'-O-methyladenosine
ggcgctctcaattgctagtga

SEQ ID NO: 3245 - RNA, 21 nt, synthetic construct
  source 1..21: mol_type = other RNA
  modified_base 1: mod_base = OTHER; note = 2'-O-methylcytidine-3'-phosphate
  modified_base 2: mod_base = OTHER; note = 2'-O-methyluridine-3'-phosphate
  modified_base 3: mod_base = OTHER; note = 2'-O-methylcytidine-3'-phosphate
  modified_base 4: mod_base = OTHER; note = 2'-O-methyluridine-3'-phosphate
  modified_base 5: mod_base = OTHER; note = 2'-O-methylcytidine-3'-phosphate
  modified_base 6: mod_base = OTHER; note = 2'-O-methyladenosine-3'-phosphate
  modified_base 7: mod_base = OTHER; note = 2'-deoxy-2'-fluoroadenosine-3'-phosphate
  modified_base 8: mod_base = OTHER; note = 2'-O-methyluridine-3'-phosphate
  modified_base 9: mod_base = OTHER; note = 2'-deoxy-2'-fluorouridine-3'-phosphate
  modified_base 10: mod_base = OTHER; note = 2'-deoxy-2'-fluoroguanosine-3'-phosphate
  modified_base 11: mod_base = OTHER; note = 2'-deoxy-2'-fluorocytidine-3'-phosphate
  modified_base 12: mod_base = OTHER; note = 2'-O-methyluridine-3'-phosphate
  modified_base 13: mod_base = OTHER; note = 2'-O-methyladenosine-3'-phosphate
  modified_base 14: mod_base = OTHER; note = 2'-O-methylguanosine-3'-phosphate
  modified_base 15: mod_base = OTHER; note = 2'-O-methyluridine-3'-phosphate
  modified_base 16: mod_base = OTHER; note = 2'-O-methylguanosine-3'-phosphate
  modified_base 17: mod_base = OTHER; note = 2'-O-methylguanosine-3'-phosphate
  modified_base 18: mod_base = OTHER; note = 2'-O-methyluridine-3'-phosphate
  modified_base 19: mod_base = OTHER; note = 2'-O-methylcytidine-3'-phosphate
  modified_base 20: mod_base = OTHER; note = 2'-O-methyluridine-3'-phosphate
  modified_base 21: mod_base = OTHER; note = 2'-O-methyladenosine
ctctcaattgctagtggtcta

SEQ ID NO: 3246 - RNA, 21 nt, synthetic construct
  source 1..21: mol_type = other RNA
  modified_base 1: mod_base = OTHER; note = 2'-O-methylcytidine-3'-phosphate
  modified_base 2: mod_base = OTHER; note = 2'-O-methyluridine-3'-phosphate
  modified_base 3: mod_base = OTHER; note = 2'-O-methylguanosine-3'-phosphate
  modified_base 4: mod_base = OTHER; note = 2'-O-methylguanosine-3'-phosphate
  modified_base 5: mod_base = OTHER; note = 2'-O-methylcytidine-3'-phosphate
  modified_base 6: mod_base = OTHER; note = 2'-O-methyladenosine-3'-phosphate
  modified_base 7: mod_base = OTHER; note = 2'-deoxy-2'-fluorocytidine-3'-phosphate
  modified_base 8: mod_base = OTHER; note = 2'-O-methyladenosine-3'-phosphate
  modified_base 9: mod_base = OTHER; note = 2'-deoxy-2'-fluorocytidine-3'-phosphate
  modified_base 10: mod_base = OTHER; note = 2'-deoxy-2'-fluorocytidine-3'-phosphate
  modified_base 11: mod_base = OTHER; note = 2'-deoxy-2'-fluorouridine-3'-phosphate
  modified_base 12: mod_base = OTHER; note = 2'-O-methyluridine-3'-phosphate
  modified_base 13: mod_base = OTHER; note = 2'-O-methylcytidine-3'-phosphate
  modified_base 14: mod_base = OTHER; note = 2'-O-methyladenosine-3'-phosphate
  modified_base 15: mod_base = OTHER; note = 2'-O-methyluridine-3'-phosphate
  modified_base 16: mod_base = OTHER; note = 2'-O-methyladenosine-3'-phosphate
  modified_base 17: mod_base = OTHER; note = 2'-O-methyluridine-3'-phosphate
  modified_base 18: mod_base = OTHER; note = 2'-O-methylguanosine-3'-phosphate
  modified_base 19: mod_base = OTHER; note = 2'-O-methylguanosine-3'-phosphate
  modified_base 20: mod_base = OTHER; note = 2'-O-methyladenosine-3'-phosphate
  modified_base 21: mod_base = OTHER; note = 2'-O-methyladenosine
ctggcacaccttcatatggaa

SEQ ID NO: 3247 - RNA, 21 nt, synthetic construct
  source 1..21: mol_type = other RNA
  modified_base 1: mod_base = OTHER; note = 2'-O-methyluridine-3'-phosphate
  modified_base 2: mod_base = OTHER; note = 2'-O-methylguanosine-3'-phosphate
  modified_base 3: mod_base = OTHER; note = 2'-O-methylguanosine-3'-phosphate
  modified_base 4: mod_base = OTHER; note = 2'-O-methylcytidine-3'-phosphate
  modified_base 5: mod_base = OTHER; note = 2'-O-methyladenosine-3'-phosphate
  modified_base 6: mod_base = OTHER; note = 2'-O-methylcytidine-3'-phosphate
  modified_base 7: mod_base = OTHER; note = 2'-deoxy-2'-fluoroadenosine-3'-phosphate
  modified_base 8: mod_base = OTHER; note = 2'-O-methylcytidine-3'-phosphate
  modified_base 9: mod_base = OTHER; note = 2'-deoxy-2'-fluorocytidine-3'-phosphate
  modified_base 10: mod_base = OTHER; note = 2'-deoxy-2'-fluorouridine-3'-phosphate
  modified_base 11: mod_base = OTHER; note = 2'-deoxy-2'-fluorouridine-3'-phosphate
  modified_base 12: mod_base = OTHER; note = 2'-O-methylcytidine-3'-phosphate
  modified_base 13: mod_base = OTHER; note = 2'-O-methyladenosine-3'-phosphate
  modified_base 14: mod_base = OTHER; note = 2'-O-methyluridine-3'-phosphate
  modified_base 15: mod_base = OTHER; note = 2'-O-methyladenosine-3'-phosphate
  modified_base 16: mod_base = OTHER; note = 2'-O-methyluridine-3'-phosphate
  modified_base 17: mod_base = OTHER; note = 2'-O-methylguanosine-3'-phosphate
  modified_base 18: mod_base = OTHER; note = 2'-O-methylguanosine-3'-phosphate
  modified_base 19: mod_base = OTHER; note = 2'-O-methyladenosine-3'-phosphate
  modified_base 20: mod_base = OTHER; note = 2'-O-methylguanosine-3'-phosphate
  modified_base 21: mod_base = OTHER; note = 2'-O-methyladenosine
tggcacaccttcatatggaga

SEQ ID NO: 3248 - RNA, 21 nt, synthetic construct
  source 1..21: mol_type = other RNA
  modified_base 1: mod_base = OTHER; note = 2'-O-methylguanosine-3'-phosphate
  modified_base 2: mod_base = OTHER; note = 2'-O-methylguanosine-3'-phosphate
  modified_base 3: mod_base = OTHER; note = 2'-O-methylcytidine-3'-phosphate
  modified_base 4: mod_base = OTHER; note = 2'-O-methyladenosine-3'-phosphate
  modified_base 5: mod_base = OTHER; note = 2'-O-methylcytidine-3'-phosphate
  modified_base 6: mod_base = OTHER; note = 2'-O-methyladenosine-3'-phosphate
  modified_base 7: mod_base = OTHER; note = 2'-deoxy-2'-fluorocytidine-3'-phosphate
  modified_base 8: mod_base = OTHER; note = 2'-O-methylcytidine-3'-phosphate
  modified_base 9: mod_base = OTHER; note = 2'-deoxy-2'-fluorouridine-3'-phosphate
  modified_base 10: mod_base = OTHER; note = 2'-deoxy-2'-fluorouridine-3'-phosphate
  modified_base 11: mod_base = OTHER; note = 2'-deoxy-2'-fluorocytidine-3'-phosphate
  modified_base 12: mod_base = OTHER; note = 2'-O-methyladenosine-3'-phosphate
  modified_base 13: mod_base = OTHER; note = 2'-O-methyluridine-3'-phosphate
  modified_base 14: mod_base = OTHER; note = 2'-O-methyladenosine-3'-phosphate
  modified_base 15: mod_base = OTHER; note = 2'-O-methyluridine-3'-phosphate
  modified_base 16: mod_base = OTHER; note = 2'-O-methylguanosine-3'-phosphate
  modified_base 17: mod_base = OTHER; note = 2'-O-methylguanosine-3'-phosphate
  modified_base 18: mod_base = OTHER; note = 2'-O-methyladenosine-3'-phosphate
  modified_base 19: mod_base = OTHER; note = 2'-O-methylguanosine-3'-phosphate
  modified_base 20: mod_base = OTHER; note = 2'-O-methyladenosine-3'-phosphate
  modified_base 21: mod_base = OTHER; note = 2'-O-methyladenosine
ggcacaccttcatatggagaa

SEQ ID NO: 3249 - RNA, 21 nt, synthetic construct
  source 1..21: mol_type = other RNA
  modified_base 1: mod_base = OTHER; note = 2'-O-methylguanosine-3'-phosphate
  modified_base 2: mod_base = OTHER; note = 2'-O-methylcytidine-3'-phosphate
  modified_base 3: mod_base = OTHER; note = 2'-O-methyladenosine-3'-phosphate
  modified_base 4: mod_base = OTHER; note = 2'-O-methylcytidine-3'-phosphate
  modified_base 5: mod_base = OTHER; note = 2'-O-methyladenosine-3'-phosphate
  modified_base 6: mod_base = OTHER; note = 2'-O-methylcytidine-3'-phosphate
  modified_base 7: mod_base = OTHER; note = 2'-deoxy-2'-fluorocytidine-3'-phosphate
  modified_base 8: mod_base = OTHER; note = 2'-O-methyluridine-3'-phosphate
  modified_base 9: mod_base = OTHER; note = 2'-deoxy-2'-fluorouridine-3'-phosphate
  modified_base 10: mod_base = OTHER; note = 2'-deoxy-2'-fluorocytidine-3'-phosphate
  modified_base 11: mod_base = OTHER; note = 2'-deoxy-2'-fluoroadenosine-3'-phosphate
  modified_base 12: mod_base = OTHER; note = 2'-O-methyluridine-3'-phosphate
  modified_base 13: mod_base = OTHER; note = 2'-O-methyladenosine-3'-phosphate
  modified_base 14: mod_base = OTHER; note = 2'-O-methyluridine-3'-phosphate
  modified_base 15: mod_base = OTHER; note = 2'-O-methylguanosine-3'-phosphate
  modified_base 16: mod_base = OTHER; note = 2'-O-methylguanosine-3'-phosphate
  modified_base 17: mod_base = OTHER; note = 2'-O-methyladenosine-3'-phosphate
  modified_base 18: mod_base = OTHER; note = 2'-O-methylguanosine-3'-phosphate
  modified_base 19: mod_base = OTHER; note = 2'-O-methyladenosine-3'-phosphate
  modified_base 20: mod_base = OTHER; note = 2'-O-methyluridine-3'-phosphate
  modified_base 21: mod_base = OTHER; note = 2'-O-methyladenosine
gcacaccttcatatggagata

SEQ ID NO: 3250 - RNA, 21 nt, synthetic construct
  source 1..21: mol_type = other RNA
  modified_base 1: mod_base = OTHER; note = 2'-O-methylcytidine-3'-phosphate
  modified_base 2: mod_base = OTHER; note = 2'-O-methyladenosine-3'-phosphate
  modified_base 3: mod_base = OTHER; note = 2'-O-methylcytidine-3'-phosphate
  modified_base 4: mod_base = OTHER; note = 2'-O-methyladenosine-3'-phosphate
  modified_base 5: mod_base = OTHER; note = 2'-O-methylcytidine-3'-phosphate
  modified_base 6: mod_base = OTHER; note = 2'-O-methylcytidine-3'-phosphate
  modified_base 7: mod_base = OTHER; note = 2'-deoxy-2'-fluorouridine-3'-phosphate
  modified_base 8: mod_base = OTHER; note = 2'-O-methyluridine-3'-phosphate
  modified_base 9: mod_base = OTHER; note = 2'-deoxy-2'-fluorocytidine-3'-phosphate
  modified_base 10: mod_base = OTHER; note = 2'-deoxy-2'-fluoroadenosine-3'-phosphate
  modified_base 11: mod_base = OTHER; note = 2'-deoxy-2'-fluorouridine-3'-phosphate
  modified_base 12: mod_base = OTHER; note = 2'-O-methyladenosine-3'-phosphate
  modified_base 13: mod_base = OTHER; note = 2'-O-methyluridine-3'-phosphate
  modified_base 14: mod_base = OTHER; note = 2'-O-methylguanosine-3'-phosphate
  modified_base 15: mod_base = OTHER; note = 2'-O-methylguanosine-3'-phosphate
  modified_base 16: mod_base = OTHER; note = 2'-O-methyladenosine-3'-phosphate
  modified_base 17: mod_base = OTHER; note = 2'-O-methylguanosine-3'-phosphate
  modified_base 18: mod_base = OTHER; note = 2'-O-methyladenosine-3'-phosphate
  modified_base 19: mod_base = OTHER; note = 2'-O-methyluridine-3'-phosphate
  modified_base 20: mod_base = OTHER; note = 2'-O-methyluridine-3'-phosphate
  modified_base 21: mod_base = OTHER; note = 2'-O-methyladenosine
cacaccttcatatggagatta

SEQ ID NO: 3251 - RNA, 21 nt, synthetic construct
  source 1..21: mol_type = other RNA
  modified_base 1: mod_base = OTHER; note = 2'-O-methyladenosine-3'-phosphate
  modified_base 2: mod_base = OTHER; note = 2'-O-methylcytidine-3'-phosphate
  modified_base 3: mod_base = OTHER; note = 2'-O-methyladenosine-3'-phosphate
  modified_base 4: mod_base = OTHER; note = 2'-O-methylcytidine-3'-phosphate
  modified_base 5: mod_base = OTHER; note = 2'-O-methylcytidine-3'-phosphate
  modified_base 6: mod_base = OTHER; note = 2'-O-methyluridine-3'-phosphate
  modified_base 7: mod_base = OTHER; note = 2'-deoxy-2'-fluorouridine-3'-phosphate
  modified_base 8: mod_base = OTHER; note = 2'-O-methylcytidine-3'-phosphate
  modified_base 9: mod_base = OTHER; note = 2'-deoxy-2'-fluoroadenosine-3'-phosphate
  modified_base 10: mod_base = OTHER; note = 2'-deoxy-2'-fluorouridine-3'-phosphate
  modified_base 11: mod_base = OTHER; note = 2'-deoxy-2'-fluoroadenosine-3'-phosphate
  modified_base 12: mod_base = OTHER; note = 2'-O-methyluridine-3'-phosphate
  modified_base 13: mod_base = OTHER; note = 2'-O-methylguanosine-3'-phosphate
  modified_base 14: mod_base = OTHER; note = 2'-O-methylguanosine-3'-phosphate
  modified_base 15: mod_base = OTHER; note = 2'-O-methyladenosine-3'-phosphate
  modified_base 16: mod_base = OTHER; note = 2'-O-methylguanosine-3'-phosphate
  modified_base 17: mod_base = OTHER; note = 2'-O-methyladenosine-3'-phosphate
  modified_base 18: mod_base = OTHER; note = 2'-O-methyluridine-3'-phosphate
  modified_base 19: mod_base = OTHER; note = 2'-O-methyluridine-3'-phosphate
  modified_base 20: mod_base = OTHER; note = 2'-O-methylguanosine-3'-phosphate
  modified_base 21: mod_base = OTHER; note = 2'-O-methyladenosine
acaccttcatatggagattga

SEQ ID NO: 3252 - RNA, 21 nt, synthetic construct
  source 1..21: mol_type = other RNA
  modified_base 1: mod_base = OTHER; note = 2'-O-methylcytidine-3'-phosphate
  modified_base 2: mod_base = OTHER; note = 2'-O-methyladenosine-3'-phosphate
  modified_base 3: mod_base = OTHER; note = 2'-O-methylcytidine-3'-phosphate
  modified_base 4: mod_base = OTHER; note = 2'-O-methylcytidine-3'-phosphate
  modified_base 5: mod_base = OTHER; note = 2'-O-methyluridine-3'-phosphate
  modified_base 6: mod_base = OTHER; note = 2'-O-methyluridine-3'-phosphate
  modified_base 7: mod_base = OTHER; note = 2'-deoxy-2'-fluorocytidine-3'-phosphate
  modified_base 8: mod_base = OTHER; note = 2'-O-methyladenosine-3'-phosphate
  modified_base 9: mod_base = OTHER; note = 2'-deoxy-2'-fluorouridine-3'-phosphate
  modified_base 10: mod_base = OTHER; note = 2'-deoxy-2'-fluoroadenosine-3'-phosphate
  modified_base 11: mod_base = OTHER; note = 2'-deoxy-2'-fluorouridine-3'-phosphate
  modified_base 12: mod_base = OTHER; note = 2'-O-methylguanosine-3'-phosphate
  modified_base 13: mod_base = OTHER; note = 2'-O-methylguanosine-3'-phosphate
  modified_base 14: mod_base = OTHER; note = 2'-O-methyladenosine-3'-phosphate
  modified_base 15: mod_base = OTHER; note = 2'-O-methylguanosine-3'-phosphate
  modified_base 16: mod_base = OTHER; note = 2'-O-methyladenosine-3'-phosphate
  modified_base 17: mod_base = OTHER; note = 2'-O-methyluridine-3'-phosphate
  modified_base 18: mod_base = OTHER; note = 2'-O-methyluridine-3'-phosphate
  modified_base 19: mod_base = OTHER; note = 2'-O-methylguanosine-3'-phosphate
  modified_base 20: mod_base = OTHER; note = 2'-O-methyluridine-3'-phosphate
  modified_base 21: mod_base = OTHER; note = 2'-O-methyladenosine
caccttcatatggagattgta

SEQ ID NO: 3253 - RNA, 21 nt, synthetic construct
  source 1..21: mol_type = other RNA
  modified_base 1: mod_base = OTHER; note = 2'-O-methyladenosine-3'-phosphate
  modified_base 2: mod_base = OTHER; note = 2'-O-methylcytidine-3'-phosphate
  modified_base 3: mod_base = OTHER; note = 2'-O-methylcytidine-3'-phosphate
  modified_base 4: mod_base = OTHER; note = 2'-O-methyluridine-3'-phosphate
  modified_base 5: mod_base = OTHER; note = 2'-O-methyluridine-3'-phosphate
  modified_base 6: mod_base = OTHER; note = 2'-O-methylcytidine-3'-phosphate
  modified_base 7: mod_base = OTHER; note = 2'-deoxy-2'-fluoroadenosine-3'-phosphate
  modified_base 8: mod_base = OTHER; note = 2'-O-methyluridine-3'-phosphate
  modified_base 9: mod_base = OTHER; note = 2'-deoxy-2'-fluoroadenosine-3'-phosphate
  modified_base 10: mod_base = OTHER; note = 2'-deoxy-2'-fluorouridine-3'-phosphate
  modified_base 11: mod_base = OTHER; note = 2'-deoxy-2'-fluoroguanosine-3'-phosphate
  modified_base 12: mod_base = OTHER; note = 2'-O-methylguanosine-3'-phosphate
  modified_base 13: mod_base = OTHER; note = 2'-O-methyladenosine-3'-phosphate
  modified_base 14: mod_base = OTHER; note = 2'-O-methylguanosine-3'-phosphate
  modified_base 15: mod_base = OTHER; note = 2'-O-methyladenosine-3'-phosphate
  modified_base 16: mod_base = OTHER; note = 2'-O-methyluridine-3'-phosphate
  modified_base 17: mod_base = OTHER; note = 2'-O-methyluridine-3'-phosphate
  modified_base 18: mod_base = OTHER; note = 2'-O-methylguanosine-3'-phosphate
  modified_base 19: mod_base = OTHER; note = 2'-O-methyluridine-3'-phosphate
  modified_base 20: mod_base = OTHER; note = 2'-O-methyluridine-3'-phosphate
  modified_base 21: mod_base = OTHER; note = 2'-O-methyladenosine
accttcatatggagattgtta

SEQ ID NO: 3254 - RNA, 21 nt, synthetic construct
  source 1..21: mol_type = other RNA
  modified_base 1: mod_base = OTHER; note = 2'-O-methylcytidine-3'-phosphate
  modified_base 2: mod_base = OTHER; note = 2'-O-methylcytidine-3'-phosphate
  modified_base 3: mod_base = OTHER; note = 2'-O-methyluridine-3'-phosphate
  modified_base 4: mod_base = OTHER; note = 2'-O-methyluridine-3'-phosphate
  modified_base 5: mod_base = OTHER; note = 2'-O-methylcytidine-3'-phosphate
  modified_base 6: mod_base = OTHER; note = 2'-O-methyladenosine-3'-phosphate
  modified_base 7: mod_base = OTHER; note = 2'-deoxy-2'-fluorouridine-3'-phosphate
  modified_base 8: mod_base = OTHER; note = 2'-O-methyladenosine-3'-phosphate
  modified_base 9: mod_base = OTHER; note = 2'-deoxy-2'-fluorouridine-3'-phosphate
  modified_base 10: mod_base = OTHER; note = 2'-deoxy-2'-fluoroguanosine-3'-phosphate
  modified_base 11: mod_base = OTHER; note = 2'-deoxy-2'-fluoroguanosine-3'-phosphate
  modified_base 12: mod_base = OTHER; note = 2'-O-methyladenosine-3'-phosphate
  modified_base 13: mod_base = OTHER; note = 2'-O-methylguanosine-3'-phosphate
  modified_base 14: mod_base = OTHER; note = 2'-O-methyladenosine-3'-phosphate
  modified_base 15: mod_base = OTHER; note = 2'-O-methyluridine-3'-phosphate
  modified_base 16: mod_base = OTHER; note = 2'-O-methyluridine-3'-phosphate
  modified_base 17: mod_base = OTHER; note = 2'-O-methylguanosine-3'-phosphate
  modified_base 18: mod_base = OTHER; note = 2'-O-methyluridine-3'-phosphate
  modified_base 19: mod_base = OTHER; note = 2'-O-methyluridine-3'-phosphate
  modified_base 20: mod_base = OTHER; note = 2'-O-methylguanosine-3'-phosphate
  modified_base 21: mod_base = OTHER; note = 2'-O-methyladenosine
ccttcatatggagattgttga

SEQ ID NO: 3255 - RNA, 21 nt, synthetic construct
  source 1..21: mol_type = other RNA
  modified_base 1: mod_base = OTHER; note = 2'-O-methylcytidine-3'-phosphate
  modified_base 2: mod_base = OTHER; note = 2'-O-methyluridine-3'-phosphate
  modified_base 3: mod_base = OTHER; note = 2'-O-methyluridine-3'-phosphate
  modified_base 4: mod_base = OTHER; note = 2'-O-methylcytidine-3'-phosphate
  modified_base 5: mod_base = OTHER; note = 2'-O-methyladenosine-3'-phosphate
  modified_base 6: mod_base = OTHER; note = 2'-O-methyluridine-3'-phosphate
  modified_base 7: mod_base = OTHER; note = 2'-deoxy-2'-fluoroadenosine-3'-phosphate
  modified_base 8: mod_base = OTHER; note = 2'-O-methyluridine-3'-phosphate
  modified_base 9: mod_base = OTHER; note = 2'-deoxy-2'-fluoroguanosine-3'-phosphate
  modified_base 10: mod_base = OTHER; note = 2'-deoxy-2'-fluoroguanosine-3'-phosphate
  modified_base 11: mod_base = OTHER; note = 2'-deoxy-2'-fluoroadenosine-3'-phosphate
  modified_base 12: mod_base = OTHER; note = 2'-O-methylguanosine-3'-phosphate
  modified_base 13: mod_base = OTHER; note = 2'-O-methyladenosine-3'-phosphate
  modified_base 14: mod_base = OTHER; note = 2'-O-methyluridine-3'-phosphate
  modified_base 15: mod_base = OTHER; note = 2'-O-methyluridine-3'-phosphate
  modified_base 16: mod_base = OTHER; note = 2'-O-methylguanosine-3'-phosphate
  modified_base 17: mod_base = OTHER; note = 2'-O-methyluridine-3'-phosphate
  modified_base 18: mod_base = OTHER; note = 2'-O-methyluridine-3'-phosphate
  modified_base 19: mod_base = OTHER; note = 2'-O-methylguanosine-3'-phosphate
  modified_base 20: mod_base = OTHER; note = 2'-O-methylguanosine-3'-phosphate
  modified_base 21: mod_base = OTHER; note = 2'-O-methyladenosine
cttcatatggagattgttgga

SEQ ID NO: 3256 - RNA, 21 nt, synthetic construct
  source 1..21: mol_type = other RNA
  modified_base 1: mod_base = OTHER; note = 2'-O-methyluridine-3'-phosphate
  modified_base 2: mod_base = OTHER; note = 2'-O-methyluridine-3'-phosphate
  modified_base 3: mod_base = OTHER; note = 2'-O-methylcytidine-3'-phosphate
  modified_base 4: mod_base = OTHER; note = 2'-O-methyladenosine-3'-phosphate
  modified_base 5: mod_base = OTHER; note = 2'-O-methyluridine-3'-phosphate
  modified_base 6: mod_base = OTHER; note = 2'-O-methyladenosine-3'-phosphate
  modified_base 7: mod_base = OTHER; note = 2'-deoxy-2'-fluorouridine-3'-phosphate
  modified_base 8: mod_base = OTHER; note = 2'-O-methylguanosine-3'-phosphate
  modified_base 9: mod_base = OTHER; note = 2'-deoxy-2'-fluoroguanosine-3'-phosphate
  modified_base 10: mod_base = OTHER; note = 2'-deoxy-2'-fluoroadenosine-3'-phosphate
  modified_base 11: mod_base = OTHER; note = 2'-deoxy-2'-fluoroguanosine-3'-phosphate
  modified_base 12: mod_base = OTHER; note = 2'-O-methyladenosine-3'-phosphate
  modified_base 13: mod_base = OTHER; note = 2'-O-methyluridine-3'-phosphate
  modified_base 14: mod_base = OTHER; note = 2'-O-methyluridine-3'-phosphate
  modified_base 15: mod_base = OTHER; note = 2'-O-methylguanosine-3'-phosphate
  modified_base 16: mod_base = OTHER; note = 2'-O-methyluridine-3'-phosphate
  modified_base 17: mod_base = OTHER; note = 2'-O-methyluridine-3'-phosphate
  modified_base 18: mod_base = OTHER; note = 2'-O-methylguanosine-3'-phosphate
  modified_base 19: mod_base = OTHER; note = 2'-O-methylguanosine-3'-phosphate
  modified_base 20: mod_base = OTHER; note = 2'-O-methyluridine-3'-phosphate
  modified_base 21: mod_base = OTHER; note = 2'-O-methyladenosine
ttcatatggagattgttggta

SEQ ID NO: 3257 - RNA, 21 nt, synthetic construct
  source 1..21: mol_type = other RNA
  modified_base 1: mod_base = OTHER; note = 2'-O-methyluridine-3'-phosphate
  modified_base 2: mod_base = OTHER; note = 2'-O-methylcytidine-3'-phosphate
  modified_base 3: mod_base = OTHER; note = 2'-O-methyladenosine-3'-phosphate
  modified_base 4: mod_base = OTHER; note = 2'-O-methyluridine-3'-phosphate
  modified_base 5: mod_base = OTHER; note = 2'-O-methyladenosine-3'-phosphate
  modified_base 6: mod_base = OTHER; note = 2'-O-methyluridine-3'-phosphate
  modified_base 7: mod_base = OTHER; note = 2'-deoxy-2'-fluoroguanosine-3'-phosphate
  modified_base 8: mod_base = OTHER; note = 2'-O-methylguanosine-3'-phosphate
  modified_base 9: mod_base = OTHER; note = 2'-deoxy-2'-fluoroadenosine-3'-phosphate
  modified_base 10: mod_base = OTHER; note = 2'-deoxy-2'-fluoroguanosine-3'-phosphate
  modified_base 11: mod_base = OTHER; note = 2'-deoxy-2'-fluoroadenosine-3'-phosphate
  modified_base 12: mod_base = OTHER; note = 2'-O-methyluridine-3'-phosphate
  modified_base 13: mod_base = OTHER; note = 2'-O-methyluridine-3'-phosphate
  modified_base 14: mod_base = OTHER; note = 2'-O-methylguanosine-3'-phosphate
  modified_base 15: mod_base = OTHER; note = 2'-O-methyluridine-3'-phosphate
  modified_base 16: mod_base = OTHER; note = 2'-O-methyluridine-3'-phosphate
  modified_base 17: mod_base = OTHER; note = 2'-O-methylguanosine-3'-phosphate
  modified_base 18: mod_base = OTHER; note = 2'-O-methylguanosine-3'-phosphate
  modified_base 19: mod_base = OTHER; note = 2'-O-methyluridine-3'-phosphate
  modified_base 20: mod_base = OTHER; note = 2'-O-methyladenosine-3'-phosphate
  modified_base 21: mod_base = OTHER; note = 2'-O-methyladenosine
tcatatggagattgttggtaa

SEQ ID NO: 3258 - RNA, 21 nt, synthetic construct
  source 1..21: mol_type = other RNA
  modified_base 1: mod_base = OTHER; note = 2'-O-methylcytidine-3'-phosphate
  modified_base 2: mod_base = OTHER; note = 2'-O-methyladenosine-3'-phosphate
  modified_base 3: mod_base = OTHER; note = 2'-O-methyluridine-3'-phosphate
  modified_base 4: mod_base = OTHER; note = 2'-O-methyladenosine-3'-phosphate
  modified_base 5: mod_base = OTHER; note = 2'-O-methyluridine-3'-phosphate
  modified_base 6: mod_base = OTHER; note = 2'-O-methylguanosine-3'-phosphate
  modified_base 7: mod_base = OTHER; note = 2'-deoxy-2'-fluoroguanosine-3'-phosphate
  modified_base 8: mod_base = OTHER; note = 2'-O-methyladenosine-3'-phosphate
  modified_base 9: mod_base = OTHER; note = 2'-deoxy-2'-fluoroguanosine-3'-phosphate
  modified_base 10: mod_base = OTHER; note = 2'-deoxy-2'-fluoroadenosine-3'-phosphate
  modified_base 11: mod_base = OTHER; note = 2'-deoxy-2'-fluorouridine-3'-phosphate
  modified_base 12: mod_base = OTHER; note = 2'-O-methyluridine-3'-phosphate
  modified_base 13: mod_base = OTHER; note = 2'-O-methylguanosine-3'-phosphate
  modified_base 14: mod_base = OTHER; note = 2'-O-methyluridine-3'-phosphate
  modified_base 15: mod_base = OTHER; note = 2'-O-methyluridine-3'-phosphate
  modified_base 16: mod_base = OTHER; note = 2'-O-methylguanosine-3'-phosphate
  modified_base 17: mod_base = OTHER; note = 2'-O-methylguanosine-3'-phosphate
  modified_base 18: mod_base = OTHER; note = 2'-O-methyluridine-3'-phosphate
  modified_base 19: mod_base = OTHER; note = 2'-O-methyladenosine-3'-phosphate
  modified_base 20: mod_base = OTHER; note = 2'-O-methylcytidine-3'-phosphate
  modified_base 21: mod_base = OTHER; note = 2'-O-methyladenosine
catatggagattgttggtaca

SEQ ID NO: 3259 - RNA, 21 nt, synthetic construct
  source 1..21: mol_type = other RNA
  modified_base 1: mod_base = OTHER; note = 2'-O-methyladenosine-3'-phosphate
  modified_base 2: mod_base = OTHER; note = 2'-O-methyluridine-3'-phosphate
  modified_base 3: mod_base = OTHER; note = 2'-O-methyladenosine-3'-phosphate
  modified_base 4: mod_base = OTHER; note = 2'-O-methyluridine-3'-phosphate
  modified_base 5: mod_base = OTHER; note = 2'-O-methylguanosine-3'-phosphate
  modified_base 6: mod_base = OTHER; note = 2'-O-methylguanosine-3'-phosphate
  modified_base 7: mod_base = OTHER; note = 2'-deoxy-2'-fluoroadenosine-3'-phosphate
  modified_base 8: mod_base = OTHER; note = 2'-O-methylguanosine-3'-phosphate
  modified_base 9: mod_base = OTHER; note = 2'-deoxy-2'-fluoroadenosine-3'-phosphate
  modified_base 10: mod_base = OTHER; note = 2'-deoxy-2'-fluorouridine-3'-phosphate
  modified_base 11: mod_base = OTHER; note = 2'-deoxy-2'-fluorouridine-3'-phosphate
  modified_base 12: mod_base = OTHER; note = 2'-O-methylguanosine-3'-phosphate
  modified_base 13: mod_base = OTHER; note = 2'-O-methyluridine-3'-phosphate
  modified_base 14: mod_base = OTHER; note = 2'-O-methyluridine-3'-phosphate
  modified_base 15: mod_base = OTHER; note = 2'-O-methylguanosine-3'-phosphate
  modified_base 16: mod_base = OTHER; note = 2'-O-methylguanosine-3'-phosphate
  modified_base 17: mod_base = OTHER; note = 2'-O-methyluridine-3'-phosphate
  modified_base 18: mod_base = OTHER; note = 2'-O-methyladenosine-3'-phosphate
  modified_base 19: mod_base = OTHER; note = 2'-O-methylcytidine-3'-phosphate
  modified_base 20: mod_base = OTHER; note = 2'-O-methyladenosine-3'-phosphate
  modified_base 21: mod_base = OTHER; note = 2'-O-methyladenosine
atatggagattgttggtacaa

SEQ ID NO: 3260 - RNA, 21 nt, synthetic construct
  source 1..21: mol_type = other RNA
  modified_base 1: mod_base = OTHER; note = 2'-O-methyluridine-3'-phosphate
  modified_base 2: mod_base = OTHER; note = 2'-O-methyladenosine-3'-phosphate
  modified_base 3: mod_base = OTHER; note = 2'-O-methyluridine-3'-phosphate
  modified_base 4: mod_base = OTHER; note = 2'-O-methylguanosine-3'-phosphate
  modified_base 5: mod_base = OTHER; note = 2'-O-methylguanosine-3'-phosphate
  modified_base 6: mod_base = OTHER; note = 2'-O-methyladenosine-3'-phosphate
  modified_base 7: mod_base = OTHER; note = 2'-deoxy-2'-fluoroguanosine-3'-phosphate
  modified_base 8: mod_base = OTHER; note = 2'-O-methyladenosine-3'-phosphate
  modified_base 9: mod_base = OTHER; note = 2'-deoxy-2'-fluorouridine-3'-phosphate
  modified_base 10: mod_base = OTHER; note = 2'-deoxy-2'-fluorouridine-3'-phosphate
  modified_base 11: mod_base = OTHER; note = 2'-deoxy-2'-fluoroguanosine-3'-phosphate
  modified_base 12: mod_base = OTHER; note = 2'-O-methyluridine-3'-phosphate
  modified_base 13: mod_base = OTHER; note = 2'-O-methyluridine-3'-phosphate
  modified_base 14: mod_base = OTHER; note = 2'-O-methylguanosine-3'-phosphate
  modified_base 15: mod_base = OTHER; note = 2'-O-methylguanosine-3'-phosphate
  modified_base 16: mod_base = OTHER; note = 2'-O-methyluridine-3'-phosphate
  modified_base 17: mod_base = OTHER; note = 2'-O-methyladenosine-3'-phosphate
  modified_base 18: mod_base = OTHER; note = 2'-O-methylcytidine-3'-phosphate
  modified_base 19: mod_base = OTHER; note = 2'-O-methyladenosine-3'-phosphate
  modified_base 20: mod_base = OTHER; note = 2'-O-methylcytidine-3'-phosphate
  modified_base 21: mod_base = OTHER; note = 2'-O-methyladenosine
tatggagattgttggtacaca

SEQ ID NO: 3261 - RNA, 21 nt, synthetic construct
  source 1..21: mol_type = other RNA
  modified_base 1: mod_base = OTHER; note = 2'-O-methyladenosine-3'-phosphate
  modified_base 2: mod_base = OTHER; note = 2'-O-methyluridine-3'-phosphate
  modified_base 3: mod_base = OTHER; note = 2'-O-methylguanosine-3'-phosphate
  modified_base 4: mod_base = OTHER; note = 2'-O-methylguanosine-3'-phosphate
  modified_base 5: mod_base = OTHER; note = 2'-O-methyladenosine-3'-phosphate
  modified_base 6: mod_base = OTHER; note = 2'-O-methylguanosine-3'-phosphate
  modified_base 7: mod_base = OTHER; note = 2'-deoxy-2'-fluoroadenosine-3'-phosphate
  modified_base 8: mod_base = OTHER; note = 2'-O-methyluridine-3'-phosphate
  modified_base 9: mod_base = OTHER; note = 2'-deoxy-2'-fluorouridine-3'-phosphate
  modified_base 10: mod_base = OTHER; note = 2'-deoxy-2'-fluoroguanosine-3'-phosphate
  modified_base 11: mod_base = OTHER; note = 2'-deoxy-2'-fluorouridine-3'-phosphate
  modified_base 12: mod_base = OTHER; note = 2'-O-methyluridine-3'-phosphate
  modified_base 13: mod_base = OTHER; note = 2'-O-methylguanosine-3'-phosphate
  modified_base 14: mod_base = OTHER; note = 2'-O-methylguanosine-3'-phosphate
  modified_base 15: mod_base = OTHER; note = 2'-O-methyluridine-3'-phosphate
  modified_base 16: mod_base = OTHER; note = 2'-O-methyladenosine-3'-phosphate
  modified_base 17: mod_base = OTHER; note = 2'-O-methylcytidine-3'-phosphate
  modified_base 18: mod_base = OTHER; note = 2'-O-methyladenosine-3'-phosphate
  modified_base 19: mod_base = OTHER; note = 2'-O-methylcytidine-3'-phosphate
  modified_base 20: mod_base = OTHER; note = 2'-O-methyladenosine-3'-phosphate
  modified_base 21: mod_base = OTHER; note = 2'-O-methyladenosine
atggagattgttggtacacaa

SEQ ID NO: 3262 - RNA, 21 nt, synthetic construct
  source 1..21: mol_type = other RNA
  modified_base 1: mod_base = OTHER; note = 2'-O-methyluridine-3'-phosphate
  modified_base 2: mod_base = OTHER; note = 2'-O-methylguanosine-3'-phosphate
  modified_base 3: mod_base = OTHER; note = 2'-O-methylguanosine-3'-phosphate
  modified_base 4: mod_base = OTHER; note = 2'-O-methyladenosine-3'-phosphate
  modified_base 5: mod_base = OTHER; note = 2'-O-methylguanosine-3'-phosphate
  modified_base 6: mod_base = OTHER; note = 2'-O-methyladenosine-3'-phosphate
  modified_base 7: mod_base = OTHER; note = 2'-deoxy-2'-fluorouridine-3'-phosphate
  modified_base 8: mod_base = OTHER; note = 2'-O-methyluridine-3'-phosphate
  modified_base 9: mod_base = OTHER; note = 2'-deoxy-2'-fluoroguanosine-3'-phosphate
  modified_base 10: mod_base = OTHER; note = 2'-deoxy-2'-fluorouridine-3'-phosphate
  modified_base 11: mod_base = OTHER; note = 2'-deoxy-2'-fluorouridine-3'-phosphate
  modified_base 12: mod_base = OTHER; note = 2'-O-methylguanosine-3'-phosphate
  modified_base 13: mod_base = OTHER; note = 2'-O-methylguanosine-3'-phosphate
  modified_base 14: mod_base = OTHER; note = 2'-O-methyluridine-3'-phosphate
  modified_base 15: mod_base = OTHER; note = 2'-O-methyladenosine-3'-phosphate
  modified_base 16: mod_base = OTHER; note = 2'-O-methylcytidine-3'-phosphate
  modified_base 17: mod_base = OTHER; note = 2'-O-methyladenosine-3'-phosphate
  modified_base 18: mod_base = OTHER; note = 2'-O-methylcytidine-3'-phosphate
  modified_base 19: mod_base = OTHER; note = 2'-O-methyladenosine-3'-phosphate
  modified_base 20: mod_base = OTHER; note = 2'-O-methyladenosine-3'-phosphate
  modified_base 21: mod_base = OTHER; note = 2'-O-methyladenosine
tggagattgttggtacacaaa

SEQ ID NO: 3263 - RNA, 21 nt, synthetic construct
  source 1..21: mol_type = other RNA
  modified_base 1: mod_base = OTHER; note = 2'-O-methylguanosine-3'-phosphate
  modified_base 2: mod_base = OTHER; note = 2'-O-methylguanosine-3'-phosphate
  modified_base 3: mod_base = OTHER; note = 2'-O-methyladenosine-3'-phosphate
  modified_base 4: mod_base = OTHER; note = 2'-O-methylguanosine-3'-phosphate
  modified_base 5: mod_base = OTHER; note = 2'-O-methyladenosine-3'-phosphate
  modified_base 6: mod_base = OTHER; note = 2'-O-methyluridine-3'-phosphate
  modified_base 7: mod_base = OTHER; note = 2'-deoxy-2'-fluorouridine-3'-phosphate
  modified_base 8: mod_base = OTHER; note = 2'-O-methylguanosine-3'-phosphate
  modified_base 9: mod_base = OTHER; note = 2'-deoxy-2'-fluorouridine-3'-phosphate
  modified_base 10: mod_base = OTHER; note = 2'-deoxy-2'-fluorouridine-3'-phosphate
  modified_base 11: mod_base = OTHER; note = 2'-deoxy-2'-fluoroguanosine-3'-phosphate
  modified_base 12: mod_base = OTHER; note = 2'-O-methylguanosine-3'-phosphate
  modified_base 13: mod_base = OTHER; note = 2'-O-methyluridine-3'-phosphate
  modified_base 14: mod_base = OTHER; note = 2'-O-methyladenosine-3'-phosphate
  modified_base 15: mod_base = OTHER; note = 2'-O-methylcytidine-3'-phosphate
  modified_base 16: mod_base = OTHER; note = 2'-O-methyladenosine-3'-phosphate
  modified_base 17: mod_base = OTHER; note = 2'-O-methylcytidine-3'-phosphate
  modified_base 18: mod_base = OTHER; note = 2'-O-methyladenosine-3'-phosphate
  modified_base 19: mod_base = OTHER; note = 2'-O-methyladenosine-3'-phosphate
  modified_base 20: mod_base = OTHER; note = 2'-O-methylguanosine-3'-phosphate
  modified_base 21: mod_base = OTHER; note = 2'-O-methyladenosine
ggagattgttggtacacaaga

SEQ ID NO: 3264 - RNA, 21 nt, synthetic construct
  source 1..21: mol_type = other RNA
  modified_base 1: mod_base = OTHER; note = 2'-O-methylguanosine-3'-phosphate
  modified_base 2: mod_base = OTHER; note = 2'-O-methyladenosine-3'-phosphate
  modified_base 3: mod_base = OTHER; note = 2'-O-methylguanosine-3'-phosphate
  modified_base 4: mod_base = OTHER; note = 2'-O-methyladenosine-3'-phosphate
  modified_base 5: mod_base = OTHER; note = 2'-O-methyluridine-3'-phosphate
  modified_base 6: mod_base = OTHER; note = 2'-O-methyluridine-3'-phosphate
  modified_base 7: mod_base = OTHER; note = 2'-deoxy-2'-fluoroguanosine-3'-phosphate
  modified_base 8: mod_base = OTHER; note = 2'-O-methyluridine-3'-phosphate
  modified_base 9: mod_base = OTHER; note = 2'-deoxy-2'-fluorouridine-3'-phosphate
  modified_base 10: mod_base = OTHER; note = 2'-deoxy-2'-fluoroguanosine-3'-phosphate
  modified_base 11: mod_base = OTHER; note = 2'-deoxy-2'-fluoroguanosine-3'-phosphate
  modified_base 12: mod_base = OTHER; note = 2'-O-methyluridine-3'-phosphate
  modified_base 13: mod_base = OTHER; note = 2'-O-methyladenosine-3'-phosphate
  modified_base 14: mod_base = OTHER; note = 2'-O-methylcytidine-3'-phosphate
  modified_base 15: mod_base = OTHER; note = 2'-O-methyladenosine-3'-phosphate
  modified_base 16: mod_base = OTHER; note = 2'-O-methylcytidine-3'-phosphate
  modified_base 17: mod_base = OTHER; note = 2'-O-methyladenosine-3'-phosphate
  modified_base 18: mod_base = OTHER; note = 2'-O-methyladenosine-3'-phosphate
  modified_base 19: mod_base = OTHER; note = 2'-O-methylguanosine-3'-phosphate
  modified_base 20: mod_base = OTHER; note = 2'-O-methylguanosine-3'-phosphate
  modified_base 21: mod_base = OTHER; note = 2'-O-methyladenosine
gagattgttggtacacaagga

SEQ ID NO: 3265 - RNA, 21 nt, synthetic construct
  source 1..21: mol_type = other RNA
  modified_base 1: mod_base = OTHER; note = 2'-O-methyladenosine-3'-phosphate
  modified_base 2: mod_base = OTHER; note = 2'-O-methyluridine-3'-phosphate
  modified_base 3: mod_base = OTHER; note = 2'-O-methyluridine-3'-phosphate
  modified_base 4: mod_base = OTHER; note = 2'-O-methylguanosine-3'-phosphate
  modified_base 5: mod_base = OTHER; note = 2'-O-methyluridine-3'-phosphate
  modified_base 6: mod_base = OTHER; note = 2'-O-methyluridine-3'-phosphate
  modified_base 7: mod_base = OTHER; note = 2'-deoxy-2'-fluoroguanosine-3'-phosphate
  modified_base 8: mod_base = OTHER; note = 2'-O-methylguanosine-3'-phosphate
  modified_base 9: mod_base = OTHER; note = 2'-deoxy-2'-fluorouridine-3'-phosphate
  modified_base 10: mod_base = OTHER; note = 2'-deoxy-2'-fluoroadenosine-3'-phosphate
  modified_base 11: mod_base = OTHER; note = 2'-deoxy-2'-fluorocytidine-3'-phosphate
  modified_base 12: mod_base = OTHER; note = 2'-O-methyladenosine-3'-phosphate
  modified_base 13: mod_base = OTHER; note = 2'-O-methylcytidine-3'-phosphate
  modified_base 14: mod_base = OTHER; note = 2'-O-methyladenosine-3'-phosphate
  modified_base 15: mod_base = OTHER; note = 2'-O-methyladenosine-3'-phosphate
  modified_base 16: mod_base = OTHER; note = 2'-O-methylguanosine-3'-phosphate
  modified_base 17: mod_base = OTHER; note = 2'-O-methylguanosine-3'-phosphate
  modified_base 18: mod_base = OTHER; note = 2'-O-methyluridine-3'-phosphate
  modified_base 19: mod_base = OTHER; note = 2'-O-methyladenosine-3'-phosphate
  modified_base 20: mod_base = OTHER; note = 2'-O-methyladenosine-3'-phosphate
  modified_base 21: mod_base = OTHER; note = 2'-O-methyladenosine
attgttggtacacaaggtaaa

SEQ ID NO: 3266 - RNA, 21 nt, synthetic construct
  source 1..21: mol_type = other RNA
  modified_base 1: mod_base = OTHER; note = 2'-O-methyluridine-3'-phosphate
  modified_base 2: mod_base = OTHER; note = 2'-O-methyluridine-3'-phosphate
  modified_base 3: mod_base = OTHER; note = 2'-O-methylguanosine-3'-phosphate
  modified_base 4: mod_base = OTHER; note = 2'-O-methylguanosine-3'-phosphate
  modified_base 5: mod_base = OTHER; note = 2'-O-methyluridine-3'-phosphate
  modified_base 6: mod_base = OTHER; note = 2'-O-methyladenosine-3'-phosphate
  modified_base 7: mod_base = OTHER; note = 2'-deoxy-2'-fluorocytidine-3'-phosphate
  modified_base 8: mod_base = OTHER; note = 2'-O-methyladenosine-3'-phosphate
  modified_base 9: mod_base = OTHER; note = 2'-deoxy-2'-fluorocytidine-3'-phosphate
  modified_base 10: mod_base = OTHER; note = 2'-deoxy-2'-fluoroadenosine-3'-phosphate
  modified_base 11: mod_base = OTHER; note = 2'-deoxy-2'-fluoroadenosine-3'-phosphate
  modified_base 12: mod_base = OTHER; note = 2'-O-methylguanosine-3'-phosphate
  modified_base 13: mod_base = OTHER; note = 2'-O-methylguanosine-3'-phosphate
  modified_base 14: mod_base = OTHER; note = 2'-O-methyluridine-3'-phosphate
  modified_base 15: mod_base = OTHER; note = 2'-O-methyladenosine-3'-phosphate
  modified_base 16: mod_base = OTHER; note = 2'-O-methyladenosine-3'-phosphate
  modified_base 17: mod_base = OTHER; note = 2'-O-methyladenosine-3'-phosphate
  modified_base 18: mod_base = OTHER; note = 2'-O-methylcytidine-3'-phosphate
  modified_base 19: mod_base = OTHER; note = 2'-O-methylcytidine-3'-phosphate
  modified_base 20: mod_base = OTHER; note = 2'-O-methyluridine-3'-phosphate
  modified_base 21: mod_base = OTHER; note = 2'-O-methyladenosine
ttggtacacaaggtaaaccta

SEQ ID NO: 3267 - RNA, 21 nt, synthetic construct
  source 1..21: mol_type = other RNA
  modified_base 1: mod_base = OTHER; note = 2'-O-methylguanosine-3'-phosphate
  modified_base 2: mod_base = OTHER; note = 2'-O-methyluridine-3'-phosphate
  modified_base 3: mod_base = OTHER; note = 2'-O-methyladenosine-3'-phosphate
  modified_base 4: mod_base = OTHER; note = 2'-O-methylcytidine-3'-phosphate
  modified_base 5: mod_base = OTHER; note = 2'-O-methyladenosine-3'-phosphate
  modified_base 6: mod_base = OTHER; note = 2'-O-methylcytidine-3'-phosphate
  modified_base 7: mod_base = OTHER; note = 2'-deoxy-2'-fluoroadenosine-3'-phosphate
  modified_base 8: mod_base = OTHER; note = 2'-O-methyladenosine-3'-phosphate
  modified_base 9: mod_base = OTHER; note = 2'-deoxy-2'-fluoroguanosine-3'-phosphate
  modified_base 10: mod_base = OTHER; note = 2'-deoxy-2'-fluoroguanosine-3'-phosphate
  modified_base 11: mod_base = OTHER; note = 2'-deoxy-2'-fluorouridine-3'-phosphate
  modified_base 12: mod_base = OTHER; note = 2'-O-methyladenosine-3'-phosphate
  modified_base 13: mod_base = OTHER; note = 2'-O-methyladenosine-3'-phosphate
  modified_base 14: mod_base = OTHER; note = 2'-O-methyladenosine-3'-phosphate
  modified_base 15: mod_base = OTHER; note = 2'-O-methylcytidine-3'-phosphate
  modified_base 16: mod_base = OTHER; note = 2'-O-methylcytidine-3'-phosphate
  modified_base 17: mod_base = OTHER; note = 2'-O-methyluridine-3'-phosphate
  modified_base 18: mod_base = OTHER; note = 2'-O-methylguanosine-3'-phosphate
  modified_base 19: mod_base = OTHER; note = 2'-O-methylcytidine-3'-phosphate
  modified_base 20: mod_base = OTHER; note = 2'-O-methyluridine-3'-phosphate
  modified_base 21: mod_base = OTHER; note = 2'-O-methyladenosine
gtacacaaggtaaacctgcta

SEQ ID NO: 3268 - RNA, 21 nt, synthetic construct
  source 1..21: mol_type = other RNA
  modified_base 1: mod_base = OTHER; note = 2'-O-methyluridine-3'-phosphate
  modified_base 2: mod_base = OTHER; note = 2'-O-methyladenosine-3'-phosphate
  modified_base 3: mod_base = OTHER; note = 2'-O-methylcytidine-3'-phosphate
  modified_base 4: mod_base = OTHER; note = 2'-O-methyladenosine-3'-phosphate
  modified_base 5: mod_base = OTHER; note = 2'-O-methylcytidine-3'-phosphate
  modified_base 6: mod_base = OTHER; note = 2'-O-methyladenosine-3'-phosphate
  modified_base 7: mod_base = OTHER; note = 2'-deoxy-2'-fluoroadenosine-3'-phosphate
  modified_base 8: mod_base = OTHER; note = 2'-O-methylguanosine-3'-phosphate
  modified_base 9: mod_base = OTHER; note = 2'-deoxy-2'-fluoroguanosine-3'-phosphate
  modified_base 10: mod_base = OTHER; note = 2'-deoxy-2'-fluorouridine-3'-phosphate
  modified_base 11: mod_base = OTHER; note = 2'-deoxy-2'-fluoroadenosine-3'-phosphate
  modified_base 12: mod_base = OTHER; note = 2'-O-methyladenosine-3'-phosphate
  modified_base 13: mod_base = OTHER; note = 2'-O-methyladenosine-3'-phosphate
  modified_base 14: mod_base = OTHER; note = 2'-O-methylcytidine-3'-phosphate
  modified_base 15: mod_base = OTHER; note = 2'-O-methylcytidine-3'-phosphate
  modified_base 16: mod_base = OTHER; note = 2'-O-methyluridine-3'-phosphate
  modified_base 17: mod_base = OTHER; note = 2'-O-methylguanosine-3'-phosphate
  modified_base 18: mod_base = OTHER; note = 2'-O-methylcytidine-3'-phosphate
  modified_base 19: mod_base = OTHER; note = 2'-O-methyluridine-3'-phosphate
  modified_base 20: mod_base = OTHER; note = 2'-O-methyladenosine-3'-phosphate
  modified_base 21: mod_base = OTHER; note = 2'-O-methyladenosine
tacacaaggtaaacctgctaa

SEQ ID NO: 3269 - RNA, 21 nt, synthetic construct
  source 1..21: mol_type = other RNA
  modified_base 1: mod_base = OTHER; note = 2'-O-methyladenosine-3'-phosphate
  modified_base 2: mod_base = OTHER; note = 2'-O-methylcytidine-3'-phosphate
  modified_base 3: mod_base = OTHER; note = 2'-O-methyladenosine-3'-phosphate
  modified_base 4: mod_base = OTHER; note = 2'-O-methylcytidine-3'-phosphate
  modified_base 5: mod_base = OTHER; note = 2'-O-methyladenosine-3'-phosphate
  modified_base 6: mod_base = OTHER; note = 2'-O-methyladenosine-3'-phosphate
  modified_base 7: mod_base = OTHER; note = 2'-deoxy-2'-fluoroguanosine-3'-phosphate
  modified_base 8: mod_base = OTHER; note = 2'-O-methylguanosine-3'-phosphate
  modified_base 9: mod_base = OTHER; note = 2'-deoxy-2'-fluorouridine-3'-phosphate
  modified_base 10: mod_base = OTHER; note = 2'-deoxy-2'-fluoroadenosine-3'-phosphate
  modified_base 11: mod_base = OTHER; note = 2'-deoxy-2'-fluoroadenosine-3'-phosphate
  modified_base 12: mod_base = OTHER; note = 2'-O-methyladenosine-3'-phosphate
  modified_base 13: mod_base = OTHER; note = 2'-O-methylcytidine-3'-phosphate
  modified_base 14: mod_base = OTHER; note = 2'-O-methylcytidine-3'-phosphate
  modified_base 15: mod_base = OTHER; note = 2'-O-methyluridine-3'-phosphate
  modified_base 16: mod_base = OTHER; note = 2'-O-methylguanosine-3'-phosphate
  modified_base 17: mod_base = OTHER; note = 2'-O-methylcytidine-3'-phosphate
  modified_base 18: mod_base = OTHER; note = 2'-O-methyluridine-3'-phosphate
  modified_base 19: mod_base = OTHER; note = 2'-O-methyladenosine-3'-phosphate
  modified_base 20: mod_base = OTHER; note = 2'-O-methyluridine-3'-phosphate
  modified_base 21: mod_base = OTHER; note = 2'-O-methyladenosine
acacaaggtaaacctgctata

SEQ ID NO: 3270 - RNA, 21 nt, synthetic construct
  source 1..21: mol_type = other RNA
  modified_base 1: mod_base = OTHER; note = 2'-O-methylcytidine-3'-phosphate
  modified_base 2: mod_base = OTHER; note = 2'-O-methyladenosine-3'-phosphate
  modified_base 3: mod_base = OTHER; note = 2'-O-methylcytidine-3'-phosphate
  modified_base 4: mod_base = OTHER; note = 2'-O-methyladenosine-3'-phosphate
  modified_base 5: mod_base = OTHER; note = 2'-O-methyladenosine-3'-phosphate
  modified_base 6: mod_base = OTHER; note = 2'-O-methylguanosine-3'-phosphate
  modified_base 7: mod_base = OTHER; note = 2'-deoxy-2'-fluoroguanosine-3'-phosphate
  modified_base 8: mod_base = OTHER; note = 2'-O-methyluridine-3'-phosphate
  modified_base 9: mod_base = OTHER; note = 2'-deoxy-2'-fluoroadenosine-3'-phosphate
  modified_base 10: mod_base = OTHER; note = 2'-deoxy-2'-fluoroadenosine-3'-phosphate
  modified_base 11: mod_base = OTHER; note = 2'-deoxy-2'-fluoroadenosine-3'-phosphate
  modified_base 12: mod_base = OTHER; note = 2'-O-methylcytidine-3'-phosphate
  modified_base 13: mod_base = OTHER; note = 2'-O-methylcytidine-3'-phosphate
  modified_base 14: mod_base = OTHER; note = 2'-O-methyluridine-3'-phosphate
  modified_base 15: mod_base = OTHER; note = 2'-O-methylguanosine-3'-phosphate
  modified_base 16: mod_base = OTHER; note = 2'-O-methylcytidine-3'-phosphate
  modified_base 17: mod_base = OTHER; note = 2'-O-methyluridine-3'-phosphate
  modified_base 18: mod_base = OTHER; note = 2'-O-methyladenosine-3'-phosphate
  modified_base 19: mod_base = OTHER; note = 2'-O-methyluridine-3'-phosphate
  modified_base 20: mod_base = OTHER; note = 2'-O-methyluridine-3'-phosphate
  modified_base 21: mod_base = OTHER; note = 2'-O-methyladenosine
cacaaggtaaacctgctatta

SEQ ID NO: 3271 - RNA, 21 nt, synthetic construct
  source 1..21: mol_type = other RNA
  modified_base 1: mod_base = OTHER; note = 2'-O-methyladenosine-3'-phosphate
  modified_base 2: mod_base = OTHER; note = 2'-O-methylcytidine-3'-phosphate
  modified_base 3: mod_base = OTHER; note = 2'-O-methyladenosine-3'-phosphate
  modified_base 4: mod_base = OTHER; note = 2'-O-methyladenosine-3'-phosphate
  modified_base 5: mod_base = OTHER; note = 2'-O-methylguanosine-3'-phosphate
  modified_base 6: mod_base = OTHER; note = 2'-O-methylguanosine-3'-phosphate
  modified_base 7: mod_base = OTHER; note = 2'-deoxy-2'-fluorouridine-3'-phosphate
  modified_base 8: mod_base = OTHER; note = 2'-O-methyladenosine-3'-phosphate
  modified_base 9: mod_base = OTHER; note = 2'-deoxy-2'-fluoroadenosine-3'-phosphate
  modified_base 10: mod_base = OTHER; note = 2'-deoxy-2'-fluoroadenosine-3'-phosphate
  modified_base 11: mod_base = OTHER; note = 2'-deoxy-2'-fluorocytidine-3'-phosphate
  modified_base 12: mod_base = OTHER; note = 2'-O-methylcytidine-3'-phosphate
  modified_base 13: mod_base = OTHER; note = 2'-O-methyluridine-3'-phosphate
  modified_base 14: mod_base = OTHER; note = 2'-O-methylguanosine-3'-phosphate
  modified_base 15: mod_base = OTHER; note = 2'-O-methylcytidine-3'-phosphate
  modified_base 16: mod_base = OTHER; note = 2'-O-methyluridine-3'-phosphate
  modified_base 17: mod_base = OTHER; note = 2'-O-methyladenosine-3'-phosphate
  modified_base 18: mod_base = OTHER; note = 2'-O-methyluridine-3'-phosphate
  modified_base 19: mod_base = OTHER; note = 2'-O-methyluridine-3'-phosphate
  modified_base 20: mod_base = OTHER; note = 2'-O-methylguanosine-3'-phosphate
  modified_base 21: mod_base = OTHER; note = 2'-O-methyladenosine
acaaggtaaacctgctattga

SEQ ID NO: 3272 - RNA, 21 nt, synthetic construct
  source 1..21: mol_type = other RNA
  modified_base 1: mod_base = OTHER; note = 2'-O-methylcytidine-3'-phosphate
  modified_base 2: mod_base = OTHER; note = 2'-O-methyladenosine-3'-phosphate
  modified_base 3: mod_base = OTHER; note = 2'-O-methyladenosine-3'-phosphate
  modified_base 4: mod_base = OTHER; note = 2'-O-methylguanosine-3'-phosphate
  modified_base 5: mod_base = OTHER; note = 2'-O-methylguanosine-3'-phosphate
  modified_base 6: mod_base = OTHER; note = 2'-O-methyluridine-3'-phosphate
  modified_base 7: mod_base = OTHER; note = 2'-deoxy-2'-fluoroadenosine-3'-phosphate
  modified_base 8: mod_base = OTHER; note = 2'-O-methyladenosine-3'-phosphate
  modified_base 9: mod_base = OTHER; note = 2'-deoxy-2'-fluoroadenosine-3'-phosphate
  modified_base 10: mod_base = OTHER; note = 2'-deoxy-2'-fluorocytidine-3'-phosphate
  modified_base 11: mod_base = OTHER; note = 2'-deoxy-2'-fluorocytidine-3'-phosphate
  modified_base 12: mod_base = OTHER; note = 2'-O-methyluridine-3'-phosphate
  modified_base 13: mod_base = OTHER; note = 2'-O-methylguanosine-3'-phosphate
  modified_base 14: mod_base = OTHER; note = 2'-O-methylcytidine-3'-phosphate
  modified_base 15: mod_base = OTHER; note = 2'-O-methyluridine-3'-phosphate
  modified_base 16: mod_base = OTHER; note = 2'-O-methyladenosine-3'-phosphate
  modified_base 17: mod_base = OTHER; note = 2'-O-methyluridine-3'-phosphate
  modified_base 18: mod_base = OTHER; note = 2'-O-methyluridine-3'-phosphate
  modified_base 19: mod_base = OTHER; note = 2'-O-methylguanosine-3'-phosphate
  modified_base 20: mod_base = OTHER; note = 2'-O-methylcytidine-3'-phosphate
  modified_base 21: mod_base = OTHER; note = 2'-O-methyladenosine
caaggtaaacctgctattgca

SEQ ID NO: 3273 - RNA, 21 nt, synthetic construct
  source 1..21: mol_type = other RNA
  modified_base 1: mod_base = OTHER; note = 2'-O-methyladenosine-3'-phosphate
  modified_base 2: mod_base = OTHER; note = 2'-O-methyladenosine-3'-phosphate
  modified_base 3: mod_base = OTHER; note = 2'-O-methylguanosine-3'-phosphate
  modified_base 4: mod_base = OTHER; note = 2'-O-methylguanosine-3'-phosphate
  modified_base 5: mod_base = OTHER; note = 2'-O-methyluridine-3'-phosphate
  modified_base 6: mod_base = OTHER; note = 2'-O-methyladenosine-3'-phosphate
  modified_base 7: mod_base = OTHER; note = 2'-deoxy-2'-fluoroadenosine-3'-phosphate
  modified_base 8: mod_base = OTHER; note = 2'-O-methyladenosine-3'-phosphate
  modified_base 9: mod_base = OTHER; note = 2'-deoxy-2'-fluorocytidine-3'-phosphate
  modified_base 10: mod_base = OTHER; note = 2'-deoxy-2'-fluorocytidine-3'-phosphate
  modified_base 11: mod_base = OTHER; note = 2'-deoxy-2'-fluorouridine-3'-phosphate
  modified_base 12: mod_base = OTHER; note = 2'-O-methylguanosine-3'-phosphate
  modified_base 13: mod_base = OTHER; note = 2'-O-methylcytidine-3'-phosphate
  modified_base 14: mod_base = OTHER; note = 2'-O-methyluridine-3'-phosphate
  modified_base 15: mod_base = OTHER; note = 2'-O-methyladenosine-3'-phosphate
  modified_base 16: mod_base = OTHER; note = 2'-O-methyluridine-3'-phosphate
  modified_base 17: mod_base = OTHER; note = 2'-O-methyluridine-3'-phosphate
  modified_base 18: mod_base = OTHER; note = 2'-O-methylguanosine-3'-phosphate
  modified_base 19: mod_base = OTHER; note = 2'-O-methylcytidine-3'-phosphate
  modified_base 20: mod_base = OTHER; note = 2'-O-methyluridine-3'-phosphate
  modified_base 21: mod_base = OTHER; note = 2'-O-methyladenosine
aaggtaaacctgctattgcta

SEQ ID NO: 3274 - RNA, 21 nt, synthetic construct
  source 1..21: mol_type = other RNA
  modified_base 1: mod_base = OTHER; note = 2'-O-methyladenosine-3'-phosphate
  modified_base 2: mod_base = OTHER; note = 2'-O-methylguanosine-3'-phosphate
  modified_base 3: mod_base = OTHER; note = 2'-O-methylguanosine-3'-phosphate
  modified_base 4: mod_base = OTHER; note = 2'-O-methyluridine-3'-phosphate
  modified_base 5: mod_base = OTHER; note = 2'-O-methyladenosine-3'-phosphate
  modified_base 6: mod_base = OTHER; note = 2'-O-methyladenosine-3'-phosphate
  modified_base 7: mod_base = OTHER; note = 2'-deoxy-2'-fluoroadenosine-3'-phosphate
  modified_base 8: mod_base = OTHER; note = 2'-O-methylcytidine-3'-phosphate
  modified_base 9: mod_base = OTHER; note = 2'-deoxy-2'-fluorocytidine-3'-phosphate
  modified_base 10: mod_base = OTHER; note = 2'-deoxy-2'-fluorouridine-3'-phosphate
  modified_base 11: mod_base = OTHER; note = 2'-deoxy-2'-fluoroguanosine-3'-phosphate
  modified_base 12: mod_base = OTHER; note = 2'-O-methylcytidine-3'-phosphate
  modified_base 13: mod_base = OTHER; note = 2'-O-methyluridine-3'-phosphate
  modified_base 14: mod_base = OTHER; note = 2'-O-methyladenosine-3'-phosphate
  modified_base 15: mod_base = OTHER; note = 2'-O-methyluridine-3'-phosphate
  modified_base 16: mod_base = OTHER; note = 2'-O-methyluridine-3'-phosphate
  modified_base 17: mod_base = OTHER; note = 2'-O-methylguanosine-3'-phosphate
  modified_base 18: mod_base = OTHER; note = 2'-O-methylcytidine-3'-phosphate
  modified_base 19: mod_base = OTHER; note = 2'-O-methyluridine-3'-phosphate
  modified_base 20: mod_base = OTHER; note = 2'-O-methylcytidine-3'-phosphate
  modified_base 21: mod_base = OTHER; note = 2'-O-methyladenosine
aggtaaacctgctattgctca

SEQ ID NO: 3275 - RNA, 21 nt, synthetic construct
  source 1..21: mol_type = other RNA
  modified_base 1: mod_base = OTHER; note = 2'-O-methylguanosine-3'-phosphate
  modified_base 2: mod_base = OTHER; note = 2'-O-methylguanosine-3'-phosphate
  modified_base 3: mod_base = OTHER; note = 2'-O-methyluridine-3'-phosphate
  modified_base 4: mod_base = OTHER; note = 2'-O-methyladenosine-3'-phosphate
  modified_base 5: mod_base = OTHER; note = 2'-O-methyladenosine-3'-phosphate
  modified_base 6: mod_base = OTHER; note = 2'-O-methyladenosine-3'-phosphate
  modified_base 7: mod_base = OTHER; note = 2'-deoxy-2'-fluorocytidine-3'-phosphate
  modified_base 8: mod_base = OTHER; note = 2'-O-methylcytidine-3'-phosphate
  modified_base 9: mod_base = OTHER; note = 2'-deoxy-2'-fluorouridine-3'-phosphate
  modified_base 10: mod_base = OTHER; note = 2'-deoxy-2'-fluoroguanosine-3'-phosphate
  modified_base 11: mod_base = OTHER; note = 2'-deoxy-2'-fluorocytidine-3'-phosphate
  modified_base 12: mod_base = OTHER; note = 2'-O-methyluridine-3'-phosphate
  modified_base 13: mod_base = OTHER; note = 2'-O-methyladenosine-3'-phosphate
  modified_base 14: mod_base = OTHER; note = 2'-O-methyluridine-3'-phosphate
  modified_base 15: mod_base = OTHER; note = 2'-O-methyluridine-3'-phosphate
  modified_base 16: mod_base = OTHER; note = 2'-O-methylguanosine-3'-phosphate
  modified_base 17: mod_base = OTHER; note = 2'-O-methylcytidine-3'-phosphate
  modified_base 18: mod_base = OTHER; note = 2'-O-methyluridine-3'-phosphate
  modified_base 19: mod_base = OTHER; note = 2'-O-methylcytidine-3'-phosphate
  modified_base 20: mod_base = OTHER; note = 2'-O-methyladenosine-3'-phosphate
  modified_base 21: mod_base = OTHER; note = 2'-O-methyladenosine
ggtaaacctgctattgctcaa

SEQ ID NO: 3276 - RNA, 21 nt, synthetic construct
  source 1..21: mol_type = other RNA
  modified_base 1: mod_base = OTHER; note = 2'-O-methylguanosine-3'-phosphate
  modified_base 2: mod_base = OTHER; note = 2'-O-methyluridine-3'-phosphate
  modified_base 3: mod_base = OTHER; note = 2'-O-methyladenosine-3'-phosphate
  modified_base 4: mod_base = OTHER; note = 2'-O-methyladenosine-3'-phosphate
  modified_base 5: mod_base = OTHER; note = 2'-O-methyladenosine-3'-phosphate
  modified_base 6: mod_base = OTHER; note = 2'-O-methylcytidine-3'-phosphate
  modified_base 7: mod_base = OTHER; note = 2'-deoxy-2'-fluorocytidine-3'-phosphate
  modified_base 8: mod_base = OTHER; note = 2'-O-methyluridine-3'-phosphate
  modified_base 9: mod_base = OTHER; note = 2'-deoxy-2'-fluoroguanosine-3'-phosphate
  modified_base 10: mod_base = OTHER; note = 2'-deoxy-2'-fluorocytidine-3'-phosphate
  modified_base 11: mod_base = OTHER; note = 2'-deoxy-2'-fluorouridine-3'-phosphate
  modified_base 12: mod_base = OTHER; note = 2'-O-methyladenosine-3'-phosphate
  modified_base 13: mod_base = OTHER; note = 2'-O-methyluridine-3'-phosphate
  modified_base 14: mod_base = OTHER; note = 2'-O-methyluridine-3'-phosphate
  modified_base 15: mod_base = OTHER; note = 2'-O-methylguanosine-3'-phosphate
  modified_base 16: mod_base = OTHER; note = 2'-O-methylcytidine-3'-phosphate
  modified_base 17: mod_base = OTHER; note = 2'-O-methyluridine-3'-phosphate
  modified_base 18: mod_base = OTHER; note = 2'-O-methylcytidine-3'-phosphate
  modified_base 19: mod_base = OTHER; note = 2'-O-methyladenosine-3'-phosphate
  modified_base 20: mod_base = OTHER; note = 2'-O-methyluridine-3'-phosphate
  modified_base 21: mod_base = OTHER; note = 2'-O-methyladenosine
gtaaacctgctattgctcata

SEQ ID NO: 3277 - RNA, 21 nt, synthetic construct
  source 1..21: mol_type = other RNA
  modified_base 1: mod_base = OTHER; note = 2'-O-methyluridine-3'-phosphate
  modified_base 2: mod_base = OTHER; note = 2'-O-methyladenosine-3'-phosphate
  modified_base 3: mod_base = OTHER; note = 2'-O-methyladenosine-3'-phosphate
  modified_base 4: mod_base = OTHER; note = 2'-O-methyladenosine-3'-phosphate
  modified_base 5: mod_base = OTHER; note = 2'-O-methylcytidine-3'-phosphate
  modified_base 6: mod_base = OTHER; note = 2'-O-methylcytidine-3'-phosphate
  modified_base 7: mod_base = OTHER; note = 2'-deoxy-2'-fluorouridine-3'-phosphate
  modified_base 8: mod_base = OTHER; note = 2'-O-methylguanosine-3'-phosphate
  modified_base 9: mod_base = OTHER; note = 2'-deoxy-2'-fluorocytidine-3'-phosphate
  modified_base 10: mod_base = OTHER; note = 2'-deoxy-2'-fluorouridine-3'-phosphate
  modified_base 11: mod_base = OTHER; note = 2'-deoxy-2'-fluoroadenosine-3'-phosphate
  modified_base 12: mod_base = OTHER; note = 2'-O-methyluridine-3'-phosphate
  modified_base 13: mod_base = OTHER; note = 2'-O-methyluridine-3'-phosphate
  modified_base 14: mod_base = OTHER; note = 2'-O-methylguanosine-3'-phosphate
  modified_base 15: mod_base = OTHER; note = 2'-O-methylcytidine-3'-phosphate
  modified_base 16: mod_base = OTHER; note = 2'-O-methyluridine-3'-phosphate
  modified_base 17: mod_base = OTHER; note = 2'-O-methylcytidine-3'-phosphate
  modified_base 18: mod_base = OTHER; note = 2'-O-methyladenosine-3'-phosphate
  modified_base 19: mod_base = OTHER; note = 2'-O-methyluridine-3'-phosphate
  modified_base 20: mod_base = OTHER; note = 2'-O-methylcytidine-3'-phosphate
  modified_base 21: mod_base = OTHER; note = 2'-O-methyladenosine
taaacctgctattgctcatca

SEQ ID NO: 3278 - RNA, 21 nt, synthetic construct
  source 1..21: mol_type = other RNA
  modified_base 1: mod_base = OTHER; note = 2'-O-methyladenosine-3'-phosphate
  modified_base 2: mod_base = OTHER; note = 2'-O-methyladenosine-3'-phosphate
  modified_base 3: mod_base = OTHER; note = 2'-O-methyladenosine-3'-phosphate
  modified_base 4: mod_base = OTHER; note = 2'-O-methylcytidine-3'-phosphate
  modified_base 5: mod_base = OTHER; note = 2'-O-methylcytidine-3'-phosphate
  modified_base 6: mod_base = OTHER; note = 2'-O-methyluridine-3'-phosphate
  modified_base 7: mod_base = OTHER; note = 2'-deoxy-2'-fluoroguanosine-3'-phosphate
  modified_base 8: mod_base = OTHER; note = 2'-O-methylcytidine-3'-phosphate
  modified_base 9: mod_base = OTHER; note = 2'-deoxy-2'-fluorouridine-3'-phosphate
  modified_base 10: mod_base = OTHER; note = 2'-deoxy-2'-fluoroadenosine-3'-phosphate
  modified_base 11: mod_base = OTHER; note = 2'-deoxy-2'-fluorouridine-3'-phosphate
  modified_base 12: mod_base = OTHER; note = 2'-O-methyluridine-3'-phosphate
  modified_base 13: mod_base = OTHER; note = 2'-O-methylguanosine-3'-phosphate
  modified_base 14: mod_base = OTHER; note = 2'-O-methylcytidine-3'-phosphate
  modified_base 15: mod_base = OTHER; note = 2'-O-methyluridine-3'-phosphate
  modified_base 16: mod_base = OTHER; note = 2'-O-methylcytidine-3'-phosphate
  modified_base 17: mod_base = OTHER; note = 2'-O-methyladenosine-3'-phosphate
  modified_base 18: mod_base = OTHER; note = 2'-O-methyluridine-3'-phosphate
  modified_base 19: mod_base = OTHER; note = 2'-O-methylcytidine-3'-phosphate
  modified_base 20: mod_base = OTHER; note = 2'-O-methylguanosine-3'-phosphate
  modified_base 21: mod_base = OTHER; note = 2'-O-methyladenosine
aaacctgctattgctcatcga

SEQ ID NO: 3279 - RNA, 21 nt, synthetic construct
  source 1..21: mol_type = other RNA
  modified_base 1: mod_base = OTHER; note = 2'-O-methyladenosine-3'-phosphate
  modified_base 2: mod_base = OTHER; note = 2'-O-methyladenosine-3'-phosphate
  modified_base 3: mod_base = OTHER; note = 2'-O-methylcytidine-3'-phosphate
  modified_base 4: mod_base = OTHER; note = 2'-O-methylcytidine-3'-phosphate
  modified_base 5: mod_base = OTHER; note = 2'-O-methyluridine-3'-phosphate
  modified_base 6: mod_base = OTHER; note = 2'-O-methylguanosine-3'-phosphate
  modified_base 7: mod_base = OTHER; note = 2'-deoxy-2'-fluorocytidine-3'-phosphate
  modified_base 8: mod_base = OTHER; note = 2'-O-methyluridine-3'-phosphate
  modified_base 9: mod_base = OTHER; note = 2'-deoxy-2'-fluoroadenosine-3'-phosphate
  modified_base 10: mod_base = OTHER; note = 2'-deoxy-2'-fluorouridine-3'-phosphate
  modified_base 11: mod_base = OTHER; note = 2'-deoxy-2'-fluorouridine-3'-phosphate
  modified_base 12: mod_base = OTHER; note = 2'-O-methylguanosine-3'-phosphate
  modified_base 13: mod_base = OTHER; note = 2'-O-methylcytidine-3'-phosphate
  modified_base 14: mod_base = OTHER; note = 2'-O-methyluridine-3'-phosphate
  modified_base 15: mod_base = OTHER; note = 2'-O-methylcytidine-3'-phosphate
  modified_base 16: mod_base = OTHER; note = 2'-O-methyladenosine-3'-phosphate
  modified_base 17: mod_base = OTHER; note = 2'-O-methyluridine-3'-phosphate
  modified_base 18: mod_base = OTHER; note = 2'-O-methylcytidine-3'-phosphate
  modified_base 19: mod_base = OTHER; note = 2'-O-methylguanosine-3'-phosphate
  modified_base 20: mod_base = OTHER; note = 2'-O-methyladenosine-3'-phosphate
  modified_base 21: mod_base = OTHER; note = 2'-O-methyladenosine
aacctgctattgctcatcgaa

SEQ ID NO: 3280 - RNA, 21 nt, synthetic construct
  source 1..21: mol_type = other RNA
  modified_base 1: mod_base = OTHER; note = 2'-O-methyladenosine-3'-phosphate
  modified_base 2: mod_base = OTHER; note = 2'-O-methylcytidine-3'-phosphate
  modified_base 3: mod_base = OTHER; note = 2'-O-methylcytidine-3'-phosphate
  modified_base 4: mod_base = OTHER; note = 2'-O-methyluridine-3'-phosphate
  modified_base 5: mod_base = OTHER; note = 2'-O-methylguanosine-3'-phosphate
  modified_base 6: mod_base = OTHER; note = 2'-O-methylcytidine-3'-phosphate
  modified_base 7: mod_base = OTHER; note = 2'-deoxy-2'-fluorouridine-3'-phosphate
  modified_base 8: mod_base = OTHER; note = 2'-O-methyladenosine-3'-phosphate
  modified_base 9: mod_base = OTHER; note = 2'-deoxy-2'-fluorouridine-3'-phosphate
  modified_base 10: mod_base = OTHER; note = 2'-deoxy-2'-fluorouridine-3'-phosphate
  modified_base 11: mod_base = OTHER; note = 2'-deoxy-2'-fluoroguanosine-3'-phosphate
  modified_base 12: mod_base = OTHER; note = 2'-O-methylcytidine-3'-phosphate
  modified_base 13: mod_base = OTHER; note = 2'-O-methyluridine-3'-phosphate
  modified_base 14: mod_base = OTHER; note = 2'-O-methylcytidine-3'-phosphate
  modified_base 15: mod_base = OTHER; note = 2'-O-methyladenosine-3'-phosphate
  modified_base 16: mod_base = OTHER; note = 2'-O-methyluridine-3'-phosphate
  modified_base 17: mod_base = OTHER; note = 2'-O-methylcytidine-3'-phosphate
  modified_base 18: mod_base = OTHER; note = 2'-O-methylguanosine-3'-phosphate
  modified_base 19: mod_base = OTHER; note = 2'-O-methyladenosine-3'-phosphate
  modified_base 20: mod_base = OTHER; note = 2'-O-methylguanosine-3'-phosphate
  modified_base 21: mod_base = OTHER; note = 2'-O-methyladenosine
acctgctattgctcatcgaga

SEQ ID NO: 3281 - RNA, 21 nt, synthetic construct
  source 1..21: mol_type = other RNA
  modified_base 1: mod_base = OTHER; note = 2'-O-methylcytidine-3'-phosphate
  modified_base 2: mod_base = OTHER; note = 2'-O-methylcytidine-3'-phosphate
  modified_base 3: mod_base = OTHER; note = 2'-O-methyluridine-3'-phosphate
  modified_base 4: mod_base = OTHER; note = 2'-O-methylguanosine-3'-phosphate
  modified_base 5: mod_base = OTHER; note = 2'-O-methylcytidine-3'-phosphate
  modified_base 6: mod_base = OTHER; note = 2'-O-methyluridine-3'-phosphate
  modified_base 7: mod_base = OTHER; note = 2'-deoxy-2'-fluoroadenosine-3'-phosphate
  modified_base 8: mod_base = OTHER; note = 2'-O-methyluridine-3'-phosphate
  modified_base 9: mod_base = OTHER; note = 2'-deoxy-2'-fluorouridine-3'-phosphate
  modified_base 10: mod_base = OTHER; note = 2'-deoxy-2'-fluoroguanosine-3'-phosphate
  modified_base 11: mod_base = OTHER; note = 2'-deoxy-2'-fluorocytidine-3'-phosphate
  modified_base 12: mod_base = OTHER; note = 2'-O-methyluridine-3'-phosphate
  modified_base 13: mod_base = OTHER; note = 2'-O-methylcytidine-3'-phosphate
  modified_base 14: mod_base = OTHER; note = 2'-O-methyladenosine-3'-phosphate
  modified_base 15: mod_base = OTHER; note = 2'-O-methyluridine-3'-phosphate
  modified_base 16: mod_base = OTHER; note = 2'-O-methylcytidine-3'-phosphate
  modified_base 17: mod_base = OTHER; note = 2'-O-methylguanosine-3'-phosphate
  modified_base 18: mod_base = OTHER; note = 2'-O-methyladenosine-3'-phosphate
  modified_base 19: mod_base = OTHER; note = 2'-O-methylguanosine-3'-phosphate
  modified_base 20: mod_base = OTHER; note = 2'-O-methyladenosine-3'-phosphate
  modified_base 21: mod_base = OTHER; note = 2'-O-methyladenosine
cctgctattgctcatcgagaa

SEQ ID NO: 3282 - RNA, 21 nt, synthetic construct
  source 1..21: mol_type = other RNA
  modified_base 1: mod_base = OTHER; note = 2'-O-methylcytidine-3'-phosphate
  modified_base 2: mod_base = OTHER; note = 2'-O-methyluridine-3'-phosphate
  modified_base 3: mod_base = OTHER; note = 2'-O-methylguanosine-3'-phosphate
  modified_base 4: mod_base = OTHER; note = 2'-O-methylcytidine-3'-phosphate
  modified_base 5: mod_base = OTHER; note = 2'-O-methyluridine-3'-phosphate
  modified_base 6: mod_base = OTHER; note = 2'-O-methyladenosine-3'-phosphate
  modified_base 7: mod_base = OTHER; note = 2'-deoxy-2'-fluorouridine-3'-phosphate
  modified_base 8: mod_base = OTHER; note = 2'-O-methyluridine-3'-phosphate
  modified_base 9: mod_base = OTHER; note = 2'-deoxy-2'-fluoroguanosine-3'-phosphate
  modified_base 10: mod_base = OTHER; note = 2'-deoxy-2'-fluorocytidine-3'-phosphate
  modified_base 11: mod_base = OTHER; note = 2'-deoxy-2'-fluorouridine-3'-phosphate
  modified_base 12: mod_base = OTHER; note = 2'-O-methylcytidine-3'-phosphate
  modified_base 13: mod_base = OTHER; note = 2'-O-methyladenosine-3'-phosphate
  modified_base 14: mod_base = OTHER; note = 2'-O-methyluridine-3'-phosphate
  modified_base 15: mod_base = OTHER; note = 2'-O-methylcytidine-3'-phosphate
  modified_base 16: mod_base = OTHER; note = 2'-O-methylguanosine-3'-phosphate
  modified_base 17: mod_base = OTHER; note = 2'-O-methyladenosine-3'-phosphate
  modified_base 18: mod_base = OTHER; note = 2'-O-methylguanosine-3'-phosphate
  modified_base 19: mod_base = OTHER; note = 2'-O-methyladenosine-3'-phosphate
  modified_base 20: mod_base = OTHER; note = 2'-O-methylcytidine-3'-phosphate
  modified_base 21: mod_base = OTHER; note = 2'-O-methyladenosine
ctgctattgctcatcgagaca

SEQ ID NO: 3283 - RNA, 21 nt, synthetic construct
  source 1..21: mol_type = other RNA
  modified_base 1: mod_base = OTHER; note = 2'-O-methyluridine-3'-phosphate
  modified_base 2: mod_base = OTHER; note = 2'-O-methylguanosine-3'-phosphate
  modified_base 3: mod_base = OTHER; note = 2'-O-methylcytidine-3'-phosphate
  modified_base 4: mod_base = OTHER; note = 2'-O-methyluridine-3'-phosphate
  modified_base 5: mod_base = OTHER; note = 2'-O-methyladenosine-3'-phosphate
  modified_base 6: mod_base = OTHER; note = 2'-O-methyluridine-3'-phosphate
  modified_base 7: mod_base = OTHER; note = 2'-deoxy-2'-fluorouridine-3'-phosphate
  modified_base 8: mod_base = OTHER; note = 2'-O-methylguanosine-3'-phosphate
  modified_base 9: mod_base = OTHER; note = 2'-deoxy-2'-fluorocytidine-3'-phosphate
  modified_base 10: mod_base = OTHER; note = 2'-deoxy-2'-fluorouridine-3'-phosphate
  modified_base 11: mod_base = OTHER; note = 2'-deoxy-2'-fluorocytidine-3'-phosphate
  modified_base 12: mod_base = OTHER; note = 2'-O-methyladenosine-3'-phosphate
  modified_base 13: mod_base = OTHER; note = 2'-O-methyluridine-3'-phosphate
  modified_base 14: mod_base = OTHER; note = 2'-O-methylcytidine-3'-phosphate
  modified_base 15: mod_base = OTHER; note = 2'-O-methylguanosine-3'-phosphate
  modified_base 16: mod_base = OTHER; note = 2'-O-methyladenosine-3'-phosphate
  modified_base 17: mod_base = OTHER; note = 2'-O-methylguanosine-3'-phosphate
  modified_base 18: mod_base = OTHER; note = 2'-O-methyladenosine-3'-phosphate
  modified_base 19: mod_base = OTHER; note = 2'-O-methylcytidine-3'-phosphate
  modified_base 20: mod_base = OTHER; note = 2'-O-methyladenosine-3'-phosphate
  modified_base 21: mod_base = OTHER; note = 2'-O-methyladenosine
tgctattgctcatcgagacaa

SEQ ID NO: 3284 - RNA, 21 nt, synthetic construct
  source 1..21: mol_type = other RNA
  modified_base 1: mod_base = OTHER; note = 2'-O-methylguanosine-3'-phosphate
  modified_base 2: mod_base = OTHER; note = 2'-O-methylcytidine-3'-phosphate
  modified_base 3: mod_base = OTHER; note = 2'-O-methyluridine-3'-phosphate
  modified_base 4: mod_base = OTHER; note = 2'-O-methyladenosine-3'-phosphate
  modified_base 5: mod_base = OTHER; note = 2'-O-methyluridine-3'-phosphate
  modified_base 6: mod_base = OTHER; note = 2'-O-methyluridine-3'-phosphate
  modified_base 7: mod_base = OTHER; note = 2'-deoxy-2'-fluoroguanosine-3'-phosphate
  modified_base 8: mod_base = OTHER; note = 2'-O-methylcytidine-3'-phosphate
  modified_base 9: mod_base = OTHER; note = 2'-deoxy-2'-fluorouridine-3'-phosphate
  modified_base 10: mod_base = OTHER; note = 2'-deoxy-2'-fluorocytidine-3'-phosphate
  modified_base 11: mod_base = OTHER; note = 2'-deoxy-2'-fluoroadenosine-3'-phosphate
  modified_base 12: mod_base = OTHER; note = 2'-O-methyluridine-3'-phosphate
  modified_base 13: mod_base = OTHER; note = 2'-O-methylcytidine-3'-phosphate
  modified_base 14: mod_base = OTHER; note = 2'-O-methylguanosine-3'-phosphate
  modified_base 15: mod_base = OTHER; note = 2'-O-methyladenosine-3'-phosphate
  modified_base 16: mod_base = OTHER; note = 2'-O-methylguanosine-3'-phosphate
  modified_base 17: mod_base = OTHER; note = 2'-O-methyladenosine-3'-phosphate
  modified_base 18: mod_base = OTHER; note = 2'-O-methylcytidine-3'-phosphate
  modified_base 19: mod_base = OTHER; note = 2'-O-methyladenosine-3'-phosphate
  modified_base 20: mod_base = OTHER; note = 2'-O-methyluridine-3'-phosphate
  modified_base 21: mod_base = OTHER; note = 2'-O-methyladenosine
gctattgctcatcgagacata

SEQ ID NO: 3285 - RNA, 21 nt, synthetic construct
  source 1..21: mol_type = other RNA
  modified_base 1: mod_base = OTHER; note = 2'-O-methylcytidine-3'-phosphate
  modified_base 2: mod_base = OTHER; note = 2'-O-methyluridine-3'-phosphate
  modified_base 3: mod_base = OTHER; note = 2'-O-methyladenosine-3'-phosphate
  modified_base 4: mod_base = OTHER; note = 2'-O-methyluridine-3'-phosphate
  modified_base 5: mod_base = OTHER; note = 2'-O-methyluridine-3'-phosphate
  modified_base 6: mod_base = OTHER; note = 2'-O-methylguanosine-3'-phosphate
  modified_base 7: mod_base = OTHER; note = 2'-deoxy-2'-fluorocytidine-3'-phosphate
  modified_base 8: mod_base = OTHER; note = 2'-O-methyluridine-3'-phosphate
  modified_base 9: mod_base = OTHER; note = 2'-deoxy-2'-fluorocytidine-3'-phosphate
  modified_base 10: mod_base = OTHER; note = 2'-deoxy-2'-fluoroadenosine-3'-phosphate
  modified_base 11: mod_base = OTHER; note = 2'-deoxy-2'-fluorouridine-3'-phosphate
  modified_base 12: mod_base = OTHER; note = 2'-O-methylcytidine-3'-phosphate
  modified_base 13: mod_base = OTHER; note = 2'-O-methylguanosine-3'-phosphate
  modified_base 14: mod_base = OTHER; note = 2'-O-methyladenosine-3'-phosphate
  modified_base 15: mod_base = OTHER; note = 2'-O-methylguanosine-3'-phosphate
  modified_base 16: mod_base = OTHER; note = 2'-O-methyladenosine-3'-phosphate
  modified_base 17: mod_base = OTHER; note = 2'-O-methylcytidine-3'-phosphate
  modified_base 18: mod_base = OTHER; note = 2'-O-methyladenosine-3'-phosphate
  modified_base 19: mod_base = OTHER; note = 2'-O-methyluridine-3'-phosphate
  modified_base 20: mod_base = OTHER; note = 2'-O-methyladenosine-3'-phosphate
  modified_base 21: mod_base = OTHER; note = 2'-O-methyladenosine
ctattgctcatcgagacataa

SEQ ID NO: 3286 - RNA, 21 nt, synthetic construct
  source 1..21: mol_type = other RNA
  modified_base 1: mod_base = OTHER; note = 2'-O-methyluridine-3'-phosphate
  modified_base 2: mod_base = OTHER; note = 2'-O-methyladenosine-3'-phosphate
  modified_base 3: mod_base = OTHER; note = 2'-O-methyluridine-3'-phosphate
  modified_base 4: mod_base = OTHER; note = 2'-O-methyluridine-3'-phosphate
  modified_base 5: mod_base = OTHER; note = 2'-O-methylguanosine-3'-phosphate
  modified_base 6: mod_base = OTHER; note = 2'-O-methylcytidine-3'-phosphate
  modified_base 7: mod_base = OTHER; note = 2'-deoxy-2'-fluorouridine-3'-phosphate
  modified_base 8: mod_base = OTHER; note = 2'-O-methylcytidine-3'-phosphate
  modified_base 9: mod_base = OTHER; note = 2'-deoxy-2'-fluoroadenosine-3'-phosphate
  modified_base 10: mod_base = OTHER; note = 2'-deoxy-2'-fluorouridine-3'-phosphate
  modified_base 11: mod_base = OTHER; note = 2'-deoxy-2'-fluorocytidine-3'-phosphate
  modified_base 12: mod_base = OTHER; note = 2'-O-methylguanosine-3'-phosphate
  modified_base 13: mod_base = OTHER; note = 2'-O-methyladenosine-3'-phosphate
  modified_base 14: mod_base = OTHER; note = 2'-O-methylguanosine-3'-phosphate
  modified_base 15: mod_base = OTHER; note = 2'-O-methyladenosine-3'-phosphate
  modified_base 16: mod_base = OTHER; note = 2'-O-methylcytidine-3'-phosphate
  modified_base 17: mod_base = OTHER; note = 2'-O-methyladenosine-3'-phosphate
  modified_base 18: mod_base = OTHER; note = 2'-O-methyluridine-3'-phosphate
  modified_base 19: mod_base = OTHER; note = 2'-O-methyladenosine-3'-phosphate
  modified_base 20: mod_base = OTHER; note = 2'-O-methyladenosine-3'-phosphate
  modified_base 21: mod_base = OTHER; note = 2'-O-methyladenosine
tattgctcatcgagacataaa

SEQ ID NO: 3287 - RNA, 21 nt, synthetic construct
  source 1..21: mol_type = other RNA
  modified_base 1: mod_base = OTHER; note = 2'-O-methyladenosine-3'-phosphate
  modified_base 2: mod_base = OTHER; note = 2'-O-methyluridine-3'-phosphate
  modified_base 3: mod_base = OTHER; note = 2'-O-methyluridine-3'-phosphate
  modified_base 4: mod_base = OTHER; note = 2'-O-methylguanosine-3'-phosphate
  modified_base 5: mod_base = OTHER; note = 2'-O-methylcytidine-3'-phosphate
  modified_base 6: mod_base = OTHER; note = 2'-O-methyluridine-3'-phosphate
  modified_base 7: mod_base = OTHER; note = 2'-deoxy-2'-fluorocytidine-3'-phosphate
  modified_base 8: mod_base = OTHER; note = 2'-O-methyladenosine-3'-phosphate
  modified_base 9: mod_base = OTHER; note = 2'-deoxy-2'-fluorouridine-3'-phosphate
  modified_base 10: mod_base = OTHER; note = 2'-deoxy-2'-fluorocytidine-3'-phosphate
  modified_base 11: mod_base = OTHER; note = 2'-deoxy-2'-fluoroguanosine-3'-phosphate
  modified_base 12: mod_base = OTHER; note = 2'-O-methyladenosine-3'-phosphate
  modified_base 13: mod_base = OTHER; note = 2'-O-methylguanosine-3'-phosphate
  modified_base 14: mod_base = OTHER; note = 2'-O-methyladenosine-3'-phosphate
  modified_base 15: mod_base = OTHER; note = 2'-O-methylcytidine-3'-phosphate
  modified_base 16: mod_base = OTHER; note = 2'-O-methyladenosine-3'-phosphate
  modified_base 17: mod_base = OTHER; note = 2'-O-methyluridine-3'-phosphate
  modified_base 18: mod_base = OTHER; note = 2'-O-methyladenosine-3'-phosphate
  modified_base 19: mod_base = OTHER; note = 2'-O-methyladenosine-3'-phosphate
  modified_base 20: mod_base = OTHER; note = 2'-O-methyladenosine-3'-phosphate
  modified_base 21: mod_base = OTHER; note = 2'-O-methyladenosine
attgctcatcgagacataaaa

SEQ ID NO: 3288 - RNA, 21 nt, synthetic construct
  source 1..21: mol_type = other RNA
  modified_base 1: mod_base = OTHER; note = 2'-O-methyluridine-3'-phosphate
  modified_base 2: mod_base = OTHER; note = 2'-O-methyluridine-3'-phosphate
  modified_base 3: mod_base = OTHER; note = 2'-O-methylguanosine-3'-phosphate
  modified_base 4: mod_base = OTHER; note = 2'-O-methylcytidine-3'-phosphate
  modified_base 5: mod_base = OTHER; note = 2'-O-methyluridine-3'-phosphate
  modified_base 6: mod_base = OTHER; note = 2'-O-methylcytidine-3'-phosphate
  modified_base 7: mod_base = OTHER; note = 2'-deoxy-2'-fluoroadenosine-3'-phosphate
  modified_base 8: mod_base = OTHER; note = 2'-O-methyluridine-3'-phosphate
  modified_base 9: mod_base = OTHER; note = 2'-deoxy-2'-fluorocytidine-3'-phosphate
  modified_base 10: mod_base = OTHER; note = 2'-deoxy-2'-fluoroguanosine-3'-phosphate
  modified_base 11: mod_base = OTHER; note = 2'-deoxy-2'-fluoroadenosine-3'-phosphate
  modified_base 12: mod_base = OTHER; note = 2'-O-methylguanosine-3'-phosphate
  modified_base 13: mod_base = OTHER; note = 2'-O-methyladenosine-3'-phosphate
  modified_base 14: mod_base = OTHER; note = 2'-O-methylcytidine-3'-phosphate
  modified_base 15: mod_base = OTHER; note = 2'-O-methyladenosine-3'-phosphate
  modified_base 16: mod_base = OTHER; note = 2'-O-methyluridine-3'-phosphate
  modified_base 17: mod_base = OTHER; note = 2'-O-methyladenosine-3'-phosphate
  modified_base 18: mod_base = OTHER; note = 2'-O-methyladenosine-3'-phosphate
  modified_base 19: mod_base = OTHER; note = 2'-O-methyladenosine-3'-phosphate
  modified_base 20: mod_base = OTHER; note = 2'-O-methyladenosine-3'-phosphate
  modified_base 21: mod_base = OTHER; note = 2'-O-methyladenosine
ttgctcatcgagacataaaaa

SEQ ID NO: 3289 - RNA, 21 nt, synthetic construct
  source 1..21: mol_type = other RNA
  modified_base 1: mod_base = OTHER; note = 2'-O-methyluridine-3'-phosphate
  modified_base 2: mod_base = OTHER; note = 2'-O-methylguanosine-3'-phosphate
  modified_base 3: mod_base = OTHER; note = 2'-O-methylcytidine-3'-phosphate
  modified_base 4: mod_base = OTHER; note = 2'-O-methyluridine-3'-phosphate
  modified_base 5: mod_base = OTHER; note = 2'-O-methylcytidine-3'-phosphate
  modified_base 6: mod_base = OTHER; note = 2'-O-methyladenosine-3'-phosphate
  modified_base 7: mod_base = OTHER; note = 2'-deoxy-2'-fluorouridine-3'-phosphate
  modified_base 8: mod_base = OTHER; note = 2'-O-methylcytidine-3'-phosphate
  modified_base 9: mod_base = OTHER; note = 2'-deoxy-2'-fluoroguanosine-3'-phosphate
  modified_base 10: mod_base = OTHER; note = 2'-deoxy-2'-fluoroadenosine-3'-phosphate
  modified_base 11: mod_base = OTHER; note = 2'-deoxy-2'-fluoroguanosine-3'-phosphate
  modified_base 12: mod_base = OTHER; note = 2'-O-methyladenosine-3'-phosphate
  modified_base 13: mod_base = OTHER; note = 2'-O-methylcytidine-3'-phosphate
  modified_base 14: mod_base = OTHER; note = 2'-O-methyladenosine-3'-phosphate
  modified_base 15: mod_base = OTHER; note = 2'-O-methyluridine-3'-phosphate
  modified_base 16: mod_base = OTHER; note = 2'-O-methyladenosine-3'-phosphate
  modified_base 17: mod_base = OTHER; note = 2'-O-methyladenosine-3'-phosphate
  modified_base 18: mod_base = OTHER; note = 2'-O-methyladenosine-3'-phosphate
  modified_base 19: mod_base = OTHER; note = 2'-O-methyladenosine-3'-phosphate
  modified_base 20: mod_base = OTHER; note = 2'-O-methyluridine-3'-phosphate
  modified_base 21: mod_base = OTHER; note = 2'-O-methyladenosine
tgctcatcgagacataaaata

SEQ ID NO: 3290 - RNA, 21 nt, synthetic construct
  source 1..21: mol_type = other RNA
  modified_base 1: mod_base = OTHER; note = 2'-O-methylguanosine-3'-phosphate
  modified_base 2: mod_base = OTHER; note = 2'-O-methylcytidine-3'-phosphate
  modified_base 3: mod_base = OTHER; note = 2'-O-methyluridine-3'-phosphate
  modified_base 4: mod_base = OTHER; note = 2'-O-methylcytidine-3'-phosphate
  modified_base 5: mod_base = OTHER; note = 2'-O-methyladenosine-3'-phosphate
  modified_base 6: mod_base = OTHER; note = 2'-O-methyluridine-3'-phosphate
  modified_base 7: mod_base = OTHER; note = 2'-deoxy-2'-fluorocytidine-3'-phosphate
  modified_base 8: mod_base = OTHER; note = 2'-O-methylguanosine-3'-phosphate
  modified_base 9: mod_base = OTHER; note = 2'-deoxy-2'-fluoroadenosine-3'-phosphate
  modified_base 10: mod_base = OTHER; note = 2'-deoxy-2'-fluoroguanosine-3'-phosphate
  modified_base 11: mod_base = OTHER; note = 2'-deoxy-2'-fluoroadenosine-3'-phosphate
  modified_base 12: mod_base = OTHER; note = 2'-O-methylcytidine-3'-phosphate
  modified_base 13: mod_base = OTHER; note = 2'-O-methyladenosine-3'-phosphate
  modified_base 14: mod_base = OTHER; note = 2'-O-methyluridine-3'-phosphate
  modified_base 15: mod_base = OTHER; note = 2'-O-methyladenosine-3'-phosphate
  modified_base 16: mod_base = OTHER; note = 2'-O-methyladenosine-3'-phosphate
  modified_base 17: mod_base = OTHER; note = 2'-O-methyladenosine-3'-phosphate
  modified_base 18: mod_base = OTHER; note = 2'-O-methyladenosine-3'-phosphate
  modified_base 19: mod_base = OTHER; note = 2'-O-methyluridine-3'-phosphate
  modified_base 20: mod_base = OTHER; note = 2'-O-methylcytidine-3'-phosphate
  modified_base 21: mod_base = OTHER; note = 2'-O-methyladenosine
gctcatcgagacataaaatca

SEQ ID NO: 3291 - RNA, 21 nt, synthetic construct
  source 1..21: mol_type = other RNA
  modified_base 1: mod_base = OTHER; note = 2'-O-methylcytidine-3'-phosphate
  modified_base 2: mod_base = OTHER; note = 2'-O-methyluridine-3'-phosphate
  modified_base 3: mod_base = OTHER; note = 2'-O-methylcytidine-3'-phosphate
  modified_base 4: mod_base = OTHER; note = 2'-O-methyladenosine-3'-phosphate
  modified_base 5: mod_base = OTHER; note = 2'-O-methyluridine-3'-phosphate
  modified_base 6: mod_base = OTHER; note = 2'-O-methylcytidine-3'-phosphate
  modified_base 7: mod_base = OTHER; note = 2'-deoxy-2'-fluoroguanosine-3'-phosphate
  modified_base 8: mod_base = OTHER; note = 2'-O-methyladenosine-3'-phosphate
  modified_base 9: mod_base = OTHER; note = 2'-deoxy-2'-fluoroguanosine-3'-phosphate
  modified_base 10: mod_base = OTHER; note = 2'-deoxy-2'-fluoroadenosine-3'-phosphate
  modified_base 11: mod_base = OTHER; note = 2'-deoxy-2'-fluorocytidine-3'-phosphate
  modified_base 12: mod_base = OTHER; note = 2'-O-methyladenosine-3'-phosphate
  modified_base 13: mod_base = OTHER; note = 2'-O-methyluridine-3'-phosphate
  modified_base 14: mod_base = OTHER; note = 2'-O-methyladenosine-3'-phosphate
  modified_base 15: mod_base = OTHER; note = 2'-O-methyladenosine-3'-phosphate
  modified_base 16: mod_base = OTHER; note = 2'-O-methyladenosine-3'-phosphate
  modified_base 17: mod_base = OTHER; note = 2'-O-methyladenosine-3'-phosphate
  modified_base 18: mod_base = OTHER; note = 2'-O-methyluridine-3'-phosphate
  modified_base 19: mod_base = OTHER; note = 2'-O-methylcytidine-3'-phosphate
  modified_base 20: mod_base = OTHER; note = 2'-O-methyladenosine-3'-phosphate
  modified_base 21: mod_base = OTHER; note = 2'-O-methyladenosine
ctcatcgagacataaaatcaa

SEQ ID NO: 3292 - RNA, 21 nt, synthetic construct
  source 1..21: mol_type = other RNA
  modified_base 1: mod_base = OTHER; note = 2'-O-methyluridine-3'-phosphate
  modified_base 2: mod_base = OTHER; note = 2'-O-methylcytidine-3'-phosphate
  modified_base 3: mod_base = OTHER; note = 2'-O-methyladenosine-3'-phosphate
  modified_base 4: mod_base = OTHER; note = 2'-O-methyluridine-3'-phosphate
  modified_base 5: mod_base = OTHER; note = 2'-O-methylcytidine-3'-phosphate
  modified_base 6: mod_base = OTHER; note = 2'-O-methylguanosine-3'-phosphate
  modified_base 7: mod_base = OTHER; note = 2'-deoxy-2'-fluoroadenosine-3'-phosphate
  modified_base 8: mod_base = OTHER; note = 2'-O-methylguanosine-3'-phosphate
  modified_base 9: mod_base = OTHER; note = 2'-deoxy-2'-fluoroadenosine-3'-phosphate
  modified_base 10: mod_base = OTHER; note = 2'-deoxy-2'-fluorocytidine-3'-phosphate
  modified_base 11: mod_base = OTHER; note = 2'-deoxy-2'-fluoroadenosine-3'-phosphate
  modified_base 12: mod_base = OTHER; note = 2'-O-methyluridine-3'-phosphate
  modified_base 13: mod_base = OTHER; note = 2'-O-methyladenosine-3'-phosphate
  modified_base 14: mod_base = OTHER; note = 2'-O-methyladenosine-3'-phosphate
  modified_base 15: mod_base = OTHER; note = 2'-O-methyladenosine-3'-phosphate
  modified_base 16: mod_base = OTHER; note = 2'-O-methyladenosine-3'-phosphate
  modified_base 17: mod_base = OTHER; note = 2'-O-methyluridine-3'-phosphate
  modified_base 18: mod_base = OTHER; note = 2'-O-methylcytidine-3'-phosphate
  modified_base 19: mod_base = OTHER; note = 2'-O-methyladenosine-3'-phosphate
  modified_base 20: mod_base = OTHER; note = 2'-O-methyladenosine-3'-phosphate
  modified_base 21: mod_base = OTHER; note = 2'-O-methyladenosine
tcatcgagacataaaatcaaa

SEQ ID NO: 3293 - RNA, 21 nt, synthetic construct
  source 1..21: mol_type = other RNA
  modified_base 1: mod_base = OTHER; note = 2'-O-methylcytidine-3'-phosphate
  modified_base 2: mod_base = OTHER; note = 2'-O-methyladenosine-3'-phosphate
  modified_base 3: mod_base = OTHER; note = 2'-O-methyluridine-3'-phosphate
  modified_base 4: mod_base = OTHER; note = 2'-O-methylcytidine-3'-phosphate
  modified_base 5: mod_base = OTHER; note = 2'-O-methylguanosine-3'-phosphate
  modified_base 6: mod_base = OTHER; note = 2'-O-methyladenosine-3'-phosphate
  modified_base 7: mod_base = OTHER; note = 2'-deoxy-2'-fluoroguanosine-3'-phosphate
  modified_base 8: mod_base = OTHER; note = 2'-O-methyladenosine-3'-phosphate
  modified_base 9: mod_base = OTHER; note = 2'-deoxy-2'-fluorocytidine-3'-phosphate
  modified_base 10: mod_base = OTHER; note = 2'-deoxy-2'-fluoroadenosine-3'-phosphate
  modified_base 11: mod_base = OTHER; note = 2'-deoxy-2'-fluorouridine-3'-phosphate
  modified_base 12: mod_base = OTHER; note = 2'-O-methyladenosine-3'-phosphate
  modified_base 13: mod_base = OTHER; note = 2'-O-methyladenosine-3'-phosphate
  modified_base 14: mod_base = OTHER; note = 2'-O-methyladenosine-3'-phosphate
  modified_base 15: mod_base = OTHER; note = 2'-O-methyladenosine-3'-phosphate
  modified_base 16: mod_base = OTHER; note = 2'-O-methyluridine-3'-phosphate
  modified_base 17: mod_base = OTHER; note = 2'-O-methylcytidine-3'-phosphate
  modified_base 18: mod_base = OTHER; note = 2'-O-methyladenosine-3'-phosphate
  modified_base 19: mod_base = OTHER; note = 2'-O-methyladenosine-3'-phosphate
  modified_base 20: mod_base = OTHER; note = 2'-O-methyladenosine-3'-phosphate
  modified_base 21: mod_base = OTHER; note = 2'-O-methyladenosine
catcgagacataaaatcaaaa

SEQ ID NO: 3294 - RNA, 21 nt, synthetic construct
  source 1..21: mol_type = other RNA
  modified_base 1: mod_base = OTHER; note = 2'-O-methyladenosine-3'-phosphate
  modified_base 2: mod_base = OTHER; note = 2'-O-methyluridine-3'-phosphate
  modified_base 3: mod_base = OTHER; note = 2'-O-methylcytidine-3'-phosphate
  modified_base 4: mod_base = OTHER; note = 2'-O-methylguanosine-3'-phosphate
  modified_base 5: mod_base = OTHER; note = 2'-O-methyladenosine-3'-phosphate
  modified_base 6: mod_base = OTHER; note = 2'-O-methylguanosine-3'-phosphate
  modified_base 7: mod_base = OTHER; note = 2'-deoxy-2'-fluoroadenosine-3'-phosphate
  modified_base 8: mod_base = OTHER; note = 2'-O-methylcytidine-3'-phosphate
  modified_base 9: mod_base = OTHER; note = 2'-deoxy-2'-fluoroadenosine-3'-phosphate
  modified_base 10: mod_base = OTHER; note = 2'-deoxy-2'-fluorouridine-3'-phosphate
  modified_base 11: mod_base = OTHER; note = 2'-deoxy-2'-fluoroadenosine-3'-phosphate
  modified_base 12: mod_base = OTHER; note = 2'-O-methyladenosine-3'-phosphate
  modified_base 13: mod_base = OTHER; note = 2'-O-methyladenosine-3'-phosphate
  modified_base 14: mod_base = OTHER; note = 2'-O-methyladenosine-3'-phosphate
  modified_base 15: mod_base = OTHER; note = 2'-O-methyluridine-3'-phosphate
  modified_base 16: mod_base = OTHER; note = 2'-O-methylcytidine-3'-phosphate
  modified_base 17: mod_base = OTHER; note = 2'-O-methyladenosine-3'-phosphate
  modified_base 18: mod_base = OTHER; note = 2'-O-methyladenosine-3'-phosphate
  modified_base 19: mod_base = OTHER; note = 2'-O-methyladenosine-3'-phosphate
  modified_base 20: mod_base = OTHER; note = 2'-O-methylguanosine-3'-phosphate
  modified_base 21: mod_base = OTHER; note = 2'-O-methyladenosine
atcgagacataaaatcaaaga

SEQ ID NO: 3295 - RNA, 21 nt, synthetic construct
  source 1..21: mol_type = other RNA
  modified_base 1: mod_base = OTHER; note = 2'-O-methyluridine-3'-phosphate
  modified_base 2: mod_base = OTHER; note = 2'-O-methylcytidine-3'-phosphate
  modified_base 3: mod_base = OTHER; note = 2'-O-methylguanosine-3'-phosphate
  modified_base 4: mod_base = OTHER; note = 2'-O-methyladenosine-3'-phosphate
  modified_base 5: mod_base = OTHER; note = 2'-O-methylguanosine-3'-phosphate
  modified_base 6: mod_base = OTHER; note = 2'-O-methyladenosine-3'-phosphate
  modified_base 7: mod_base = OTHER; note = 2'-deoxy-2'-fluorocytidine-3'-phosphate
  modified_base 8: mod_base = OTHER; note = 2'-O-methyladenosine-3'-phosphate
  modified_base 9: mod_base = OTHER; note = 2'-deoxy-2'-fluorouridine-3'-phosphate
  modified_base 10: mod_base = OTHER; note = 2'-deoxy-2'-fluoroadenosine-3'-phosphate
  modified_base 11: mod_base = OTHER; note = 2'-deoxy-2'-fluoroadenosine-3'-phosphate
  modified_base 12: mod_base = OTHER; note = 2'-O-methyladenosine-3'-phosphate
  modified_base 13: mod_base = OTHER; note = 2'-O-methyladenosine-3'-phosphate
  modified_base 14: mod_base = OTHER; note = 2'-O-methyluridine-3'-phosphate
  modified_base 15: mod_base = OTHER; note = 2'-O-methylcytidine-3'-phosphate
  modified_base 16: mod_base = OTHER; note = 2'-O-methyladenosine-3'-phosphate
  modified_base 17: mod_base = OTHER; note = 2'-O-methyladenosine-3'-phosphate
  modified_base 18: mod_base = OTHER; note = 2'-O-methyladenosine-3'-phosphate
  modified_base 19: mod_base = OTHER; note = 2'-O-methylguanosine-3'-phosphate
  modified_base 20: mod_base = OTHER; note = 2'-O-methyladenosine-3'-phosphate
  modified_base 21: mod_base = OTHER; note = 2'-O-methyladenosine
tcgagacataaaatcaaagaa

SEQ ID NO: 3296 - RNA, 21 nt, synthetic construct
  source 1..21: mol_type = other RNA
  modified_base 1: mod_base = OTHER; note = 2'-O-methylcytidine-3'-phosphate
  modified_base 2: mod_base = OTHER; note = 2'-O-methylguanosine-3'-phosphate
  modified_base 3: mod_base = OTHER; note = 2'-O-methyladenosine-3'-phosphate
  modified_base 4: mod_base = OTHER; note = 2'-O-methylguanosine-3'-phosphate
  modified_base 5: mod_base = OTHER; note = 2'-O-methyladenosine-3'-phosphate
  modified_base 6: mod_base = OTHER; note = 2'-O-methylcytidine-3'-phosphate
  modified_base 7: mod_base = OTHER; note = 2'-deoxy-2'-fluoroadenosine-3'-phosphate
  modified_base 8: mod_base = OTHER; note = 2'-O-methyluridine-3'-phosphate
  modified_base 9: mod_base = OTHER; note = 2'-deoxy-2'-fluoroadenosine-3'-phosphate
  modified_base 10: mod_base = OTHER; note = 2'-deoxy-2'-fluoroadenosine-3'-phosphate
  modified_base 11: mod_base = OTHER; note = 2'-deoxy-2'-fluoroadenosine-3'-phosphate
  modified_base 12: mod_base = OTHER; note = 2'-O-methyladenosine-3'-phosphate
  modified_base 13: mod_base = OTHER; note = 2'-O-methyluridine-3'-phosphate
  modified_base 14: mod_base = OTHER; note = 2'-O-methylcytidine-3'-phosphate
  modified_base 15: mod_base = OTHER; note = 2'-O-methyladenosine-3'-phosphate
  modified_base 16: mod_base = OTHER; note = 2'-O-methyladenosine-3'-phosphate
  modified_base 17: mod_base = OTHER; note = 2'-O-methyladenosine-3'-phosphate
  modified_base 18: mod_base = OTHER; note = 2'-O-methylguanosine-3'-phosphate
  modified_base 19: mod_base = OTHER; note = 2'-O-methyladenosine-3'-phosphate
  modified_base 20: mod_base = OTHER; note = 2'-O-methyladenosine-3'-phosphate
  modified_base 21: mod_base = OTHER; note = 2'-O-methyladenosine
cgagacataaaatcaaagaaa

SEQ ID NO: 3297 - RNA, 21 nt, synthetic construct
  source 1..21: mol_type = other RNA
  modified_base 1: mod_base = OTHER; note = 2'-O-methylguanosine-3'-phosphate
  modified_base 2: mod_base = OTHER; note = 2'-O-methyladenosine-3'-phosphate
  modified_base 3: mod_base = OTHER; note = 2'-O-methylguanosine-3'-phosphate
  modified_base 4: mod_base = OTHER; note = 2'-O-methyladenosine-3'-phosphate
  modified_base 5: mod_base = OTHER; note = 2'-O-methylcytidine-3'-phosphate
  modified_base 6: mod_base = OTHER; note = 2'-O-methyladenosine-3'-phosphate
  modified_base 7: mod_base = OTHER; note = 2'-deoxy-2'-fluorouridine-3'-phosphate
  modified_base 8: mod_base = OTHER; note = 2'-O-methyladenosine-3'-phosphate
  modified_base 9: mod_base = OTHER; note = 2'-deoxy-2'-fluoroadenosine-3'-phosphate
  modified_base 10: mod_base = OTHER; note = 2'-deoxy-2'-fluoroadenosine-3'-phosphate
  modified_base 11: mod_base = OTHER; note = 2'-deoxy-2'-fluoroadenosine-3'-phosphate
  modified_base 12: mod_base = OTHER; note = 2'-O-methyluridine-3'-phosphate
  modified_base 13: mod_base = OTHER; note = 2'-O-methylcytidine-3'-phosphate
  modified_base 14: mod_base = OTHER; note = 2'-O-methyladenosine-3'-phosphate
  modified_base 15: mod_base = OTHER; note = 2'-O-methyladenosine-3'-phosphate
  modified_base 16: mod_base = OTHER; note = 2'-O-methyladenosine-3'-phosphate
  modified_base 17: mod_base = OTHER; note = 2'-O-methylguanosine-3'-phosphate
  modified_base 18: mod_base = OTHER; note = 2'-O-methyladenosine-3'-phosphate
  modified_base 19: mod_base = OTHER; note = 2'-O-methyladenosine-3'-phosphate
  modified_base 20: mod_base = OTHER; note = 2'-O-methyluridine-3'-phosphate
  modified_base 21: mod_base = OTHER; note = 2'-O-methyladenosine
gagacataaaatcaaagaata

SEQ ID NO: 3298 - RNA, 21 nt, synthetic construct
  source 1..21: mol_type = other RNA
  modified_base 1: mod_base = OTHER; note = 2'-O-methyladenosine-3'-phosphate
  modified_base 2: mod_base = OTHER; note = 2'-O-methylguanosine-3'-phosphate
  modified_base 3: mod_base = OTHER; note = 2'-O-methyladenosine-3'-phosphate
  modified_base 4: mod_base = OTHER; note = 2'-O-methylcytidine-3'-phosphate
  modified_base 5: mod_base = OTHER; note = 2'-O-methyladenosine-3'-phosphate
  modified_base 6: mod_base = OTHER; note = 2'-O-methyluridine-3'-phosphate
  modified_base 7: mod_base = OTHER; note = 2'-deoxy-2'-fluoroadenosine-3'-phosphate
  modified_base 8: mod_base = OTHER; note = 2'-O-methyladenosine-3'-phosphate
  modified_base 9: mod_base = OTHER; note = 2'-deoxy-2'-fluoroadenosine-3'-phosphate
  modified_base 10: mod_base = OTHER; note = 2'-deoxy-2'-fluoroadenosine-3'-phosphate
  modified_base 11: mod_base = OTHER; note = 2'-deoxy-2'-fluorouridine-3'-phosphate
  modified_base 12: mod_base = OTHER; note = 2'-O-methylcytidine-3'-phosphate
  modified_base 13: mod_base = OTHER; note = 2'-O-methyladenosine-3'-phosphate
  modified_base 14: mod_base = OTHER; note = 2'-O-methyladenosine-3'-phosphate
  modified_base 15: mod_base = OTHER; note = 2'-O-methyladenosine-3'-phosphate
  modified_base 16: mod_base = OTHER; note = 2'-O-methylguanosine-3'-phosphate
  modified_base 17: mod_base = OTHER; note = 2'-O-methyladenosine-3'-phosphate
  modified_base 18: mod_base = OTHER; note = 2'-O-methyladenosine-3'-phosphate
  modified_base 19: mod_base = OTHER; note = 2'-O-methyluridine-3'-phosphate
  modified_base 20: mod_base = OTHER; note = 2'-O-methyladenosine-3'-phosphate
  modified_base 21: mod_base = OTHER; note = 2'-O-methyladenosine
agacataaaatcaaagaataa

SEQ ID NO: 3299 - RNA, 21 nt, synthetic construct
  source 1..21: mol_type = other RNA
  modified_base 1: mod_base = OTHER; note = 2'-O-methyladenosine-3'-phosphate
  modified_base 2: mod_base = OTHER; note = 2'-O-methyladenosine-3'-phosphate
  modified_base 3: mod_base = OTHER; note = 2'-O-methyluridine-3'-phosphate
  modified_base 4: mod_base = OTHER; note = 2'-O-methyladenosine-3'-phosphate
  modified_base 5: mod_base = OTHER; note = 2'-O-methyluridine-3'-phosphate
  modified_base 6: mod_base = OTHER; note = 2'-O-methylcytidine-3'-phosphate
  modified_base 7: mod_base = OTHER; note = 2'-deoxy-2'-fluorouridine-3'-phosphate
  modified_base 8: mod_base = OTHER; note = 2'-O-methyluridine-3'-phosphate
  modified_base 9: mod_base = OTHER; note = 2'-deoxy-2'-fluoroadenosine-3'-phosphate
  modified_base 10: mod_base = OTHER; note = 2'-deoxy-2'-fluoroguanosine-3'-phosphate
  modified_base 11: mod_base = OTHER; note = 2'-deoxy-2'-fluorouridine-3'-phosphate
  modified_base 12: mod_base = OTHER; note = 2'-O-methylguanosine-3'-phosphate
  modified_base 13: mod_base = OTHER; note = 2'-O-methyladenosine-3'-phosphate
  modified_base 14: mod_base = OTHER; note = 2'-O-methyladenosine-3'-phosphate
  modified_base 15: mod_base = OTHER; note = 2'-O-methyladenosine-3'-phosphate
  modified_base 16: mod_base = OTHER; note = 2'-O-methyladenosine-3'-phosphate
  modified_base 17: mod_base = OTHER; note = 2'-O-methyladenosine-3'-phosphate
  modified_base 18: mod_base = OTHER; note = 2'-O-methylguanosine-3'-phosphate
  modified_base 19: mod_base = OTHER; note = 2'-O-methyluridine-3'-phosphate
  modified_base 20: mod_base = OTHER; note = 2'-O-methylguanosine-3'-phosphate
  modified_base 21: mod_base = OTHER; note = 2'-O-methyladenosine
aatatcttagtgaaaaagtga

SEQ ID NO: 3300 - RNA, 21 nt, synthetic construct
  source 1..21: mol_type = other RNA
  modified_base 1: mod_base = OTHER; note = 2'-O-methyladenosine-3'-phosphate
  modified_base 2: mod_base = OTHER; note = 2'-O-methyluridine-3'-phosphate
  modified_base 3: mod_base = OTHER; note = 2'-O-methyladenosine-3'-phosphate
  modified_base 4: mod_base = OTHER; note = 2'-O-methyluridine-3'-phosphate
  modified_base 5: mod_base = OTHER; note = 2'-O-methylcytidine-3'-phosphate
  modified_base 6: mod_base = OTHER; note = 2'-O-methyluridine-3'-phosphate
  modified_base 7: mod_base = OTHER; note = 2'-deoxy-2'-fluorouridine-3'-phosphate
  modified_base 8: mod_base = OTHER; note = 2'-O-methyladenosine-3'-phosphate
  modified_base 9: mod_base = OTHER; note = 2'-deoxy-2'-fluoroguanosine-3'-phosphate
  modified_base 10: mod_base = OTHER; note = 2'-deoxy-2'-fluorouridine-3'-phosphate
  modified_base 11: mod_base = OTHER; note = 2'-deoxy-2'-fluoroguanosine-3'-phosphate
  modified_base 12: mod_base = OTHER; note = 2'-O-methyladenosine-3'-phosphate
  modified_base 13: mod_base = OTHER; note = 2'-O-methyladenosine-3'-phosphate
  modified_base 14: mod_base = OTHER; note = 2'-O-methyladenosine-3'-phosphate
  modified_base 15: mod_base = OTHER; note = 2'-O-methyladenosine-3'-phosphate
  modified_base 16: mod_base = OTHER; note = 2'-O-methyladenosine-3'-phosphate
  modified_base 17: mod_base = OTHER; note = 2'-O-methylguanosine-3'-phosphate
  modified_base 18: mod_base = OTHER; note = 2'-O-methyluridine-3'-phosphate
  modified_base 19: mod_base = OTHER; note = 2'-O-methylguanosine-3'-phosphate
  modified_base 20: mod_base = OTHER; note = 2'-O-methyluridine-3'-phosphate
  modified_base 21: mod_base = OTHER; note = 2'-O-methyladenosine
atatcttagtgaaaaagtgta

SEQ ID NO: 3301 - RNA, 21 nt, synthetic construct
  source 1..21: mol_type = other RNA
  modified_base 1: mod_base = OTHER; note = 2'-O-methyluridine-3'-phosphate
  modified_base 2: mod_base = OTHER; note = 2'-O-methyladenosine-3'-phosphate
  modified_base 3: mod_base = OTHER; note = 2'-O-methyluridine-3'-phosphate
  modified_base 4: mod_base = OTHER; note = 2'-O-methylcytidine-3'-phosphate
  modified_base 5: mod_base = OTHER; note = 2'-O-methyluridine-3'-phosphate
  modified_base 6: mod_base = OTHER; note = 2'-O-methyluridine-3'-phosphate
  modified_base 7: mod_base = OTHER; note = 2'-deoxy-2'-fluoroadenosine-3'-phosphate
  modified_base 8: mod_base = OTHER; note = 2'-O-methylguanosine-3'-phosphate
  modified_base 9: mod_base = OTHER; note = 2'-deoxy-2'-fluorouridine-3'-phosphate
  modified_base 10: mod_base = OTHER; note = 2'-deoxy-2'-fluoroguanosine-3'-phosphate
  modified_base 11: mod_base = OTHER; note = 2'-deoxy-2'-fluoroadenosine-3'-phosphate
  modified_base 12: mod_base = OTHER; note = 2'-O-methyladenosine-3'-phosphate
  modified_base 13: mod_base = OTHER; note = 2'-O-methyladenosine-3'-phosphate
  modified_base 14: mod_base = OTHER; note = 2'-O-methyladenosine-3'-phosphate
  modified_base 15: mod_base = OTHER; note = 2'-O-methyladenosine-3'-phosphate
  modified_base 16: mod_base = OTHER; note = 2'-O-methylguanosine-3'-phosphate
  modified_base 17: mod_base = OTHER; note = 2'-O-methyluridine-3'-phosphate
  modified_base 18: mod_base = OTHER; note = 2'-O-methylguanosine-3'-phosphate
  modified_base 19: mod_base = OTHER; note = 2'-O-methyluridine-3'-phosphate
  modified_base 20: mod_base = OTHER; note = 2'-O-methylguanosine-3'-phosphate
  modified_base 21: mod_base = OTHER; note = 2'-O-methyladenosine
tatcttagtgaaaaagtgtga

SEQ ID NO: 3302 - RNA, 21 nt, synthetic construct
  source 1..21: mol_type = other RNA
  modified_base 1: mod_base = OTHER; note = 2'-O-methyladenosine-3'-phosphate
  modified_base 2: mod_base = OTHER; note = 2'-O-methyluridine-3'-phosphate
  modified_base 3: mod_base = OTHER; note = 2'-O-methylcytidine-3'-phosphate
  modified_base 4: mod_base = OTHER; note = 2'-O-methyluridine-3'-phosphate
  modified_base 5: mod_base = OTHER; note = 2'-O-methyluridine-3'-phosphate
  modified_base 6: mod_base = OTHER; note = 2'-O-methyladenosine-3'-phosphate
  modified_base 7: mod_base = OTHER; note = 2'-deoxy-2'-fluoroguanosine-3'-phosphate
  modified_base 8: mod_base = OTHER; note = 2'-O-methyluridine-3'-phosphate
  modified_base 9: mod_base = OTHER; note = 2'-deoxy-2'-fluoroguanosine-3'-phosphate
  modified_base 10: mod_base = OTHER; note = 2'-deoxy-2'-fluoroadenosine-3'-phosphate
  modified_base 11: mod_base = OTHER; note = 2'-deoxy-2'-fluoroadenosine-3'-phosphate
  modified_base 12: mod_base = OTHER; note = 2'-O-methyladenosine-3'-phosphate
  modified_base 13: mod_base = OTHER; note = 2'-O-methyladenosine-3'-phosphate
  modified_base 14: mod_base = OTHER; note = 2'-O-methyladenosine-3'-phosphate
  modified_base 15: mod_base = OTHER; note = 2'-O-methylguanosine-3'-phosphate
  modified_base 16: mod_base = OTHER; note = 2'-O-methyluridine-3'-phosphate
  modified_base 17: mod_base = OTHER; note = 2'-O-methylguanosine-3'-phosphate
  modified_base 18: mod_base = OTHER; note = 2'-O-methyluridine-3'-phosphate
  modified_base 19: mod_base = OTHER; note = 2'-O-methylguanosine-3'-phosphate
  modified_base 20: mod_base = OTHER; note = 2'-O-methyladenosine-3'-phosphate
  modified_base 21: mod_base = OTHER; note = 2'-O-methyladenosine
atcttagtgaaaaagtgtgaa

SEQ ID NO: 3303 - RNA, 21 nt, synthetic construct
  source 1..21: mol_type = other RNA
  modified_base 1: mod_base = OTHER; note = 2'-O-methyluridine-3'-phosphate
  modified_base 2: mod_base = OTHER; note = 2'-O-methylcytidine-3'-phosphate
  modified_base 3: mod_base = OTHER; note = 2'-O-methyluridine-3'-phosphate
  modified_base 4: mod_base = OTHER; note = 2'-O-methyluridine-3'-phosphate
  modified_base 5: mod_base = OTHER; note = 2'-O-methyladenosine-3'-phosphate
  modified_base 6: mod_base = OTHER; note = 2'-O-methylguanosine-3'-phosphate
  modified_base 7: mod_base = OTHER; note = 2'-deoxy-2'-fluorouridine-3'-phosphate
  modified_base 8: mod_base = OTHER; note = 2'-O-methylguanosine-3'-phosphate
  modified_base 9: mod_base = OTHER; note = 2'-deoxy-2'-fluoroadenosine-3'-phosphate
  modified_base 10: mod_base = OTHER; note = 2'-deoxy-2'-fluoroadenosine-3'-phosphate
  modified_base 11: mod_base = OTHER; note = 2'-deoxy-2'-fluoroadenosine-3'-phosphate
  modified_base 12: mod_base = OTHER; note = 2'-O-methyladenosine-3'-phosphate
  modified_base 13: mod_base = OTHER; note = 2'-O-methyladenosine-3'-phosphate
  modified_base 14: mod_base = OTHER; note = 2'-O-methylguanosine-3'-phosphate
  modified_base 15: mod_base = OTHER; note = 2'-O-methyluridine-3'-phosphate
  modified_base 16: mod_base = OTHER; note = 2'-O-methylguanosine-3'-phosphate
  modified_base 17: mod_base = OTHER; note = 2'-O-methyluridine-3'-phosphate
  modified_base 18: mod_base = OTHER; note = 2'-O-methylguanosine-3'-phosphate
  modified_base 19: mod_base = OTHER; note = 2'-O-methyladenosine-3'-phosphate
  modified_base 20: mod_base = OTHER; note = 2'-O-methyladenosine-3'-phosphate
  modified_base 21: mod_base = OTHER; note = 2'-O-methyladenosine
tcttagtgaaaaagtgtgaaa

SEQ ID NO: 3304 - RNA, 21 nt, synthetic construct
  source 1..21: mol_type = other RNA
  modified_base 1: mod_base = OTHER; note = 2'-O-methylcytidine-3'-phosphate
  modified_base 2: mod_base = OTHER; note = 2'-O-methyluridine-3'-phosphate
  modified_base 3: mod_base = OTHER; note = 2'-O-methyluridine-3'-phosphate
  modified_base 4: mod_base = OTHER; note = 2'-O-methyladenosine-3'-phosphate
  modified_base 5: mod_base = OTHER; note = 2'-O-methylguanosine-3'-phosphate
  modified_base 6: mod_base = OTHER; note = 2'-O-methyluridine-3'-phosphate
  modified_base 7: mod_base = OTHER; note = 2'-deoxy-2'-fluoroguanosine-3'-phosphate
  modified_base 8: mod_base = OTHER; note = 2'-O-methyladenosine-3'-phosphate
  modified_base 9: mod_base = OTHER; note = 2'-deoxy-2'-fluoroadenosine-3'-phosphate
  modified_base 10: mod_base = OTHER; note = 2'-deoxy-2'-fluoroadenosine-3'-phosphate
  modified_base 11: mod_base = OTHER; note = 2'-deoxy-2'-fluoroadenosine-3'-phosphate
  modified_base 12: mod_base = OTHER; note = 2'-O-methyladenosine-3'-phosphate
  modified_base 13: mod_base = OTHER; note = 2'-O-methylguanosine-3'-phosphate
  modified_base 14: mod_base = OTHER; note = 2'-O-methyluridine-3'-phosphate
  modified_base 15: mod_base = OTHER; note = 2'-O-methylguanosine-3'-phosphate
  modified_base 16: mod_base = OTHER; note = 2'-O-methyluridine-3'-phosphate
  modified_base 17: mod_base = OTHER; note = 2'-O-methylguanosine-3'-phosphate
  modified_base 18: mod_base = OTHER; note = 2'-O-methyladenosine-3'-phosphate
  modified_base 19: mod_base = OTHER; note = 2'-O-methyladenosine-3'-phosphate
  modified_base 20: mod_base = OTHER; note = 2'-O-methyladenosine-3'-phosphate
  modified_base 21: mod_base = OTHER; note = 2'-O-methyladenosine
cttagtgaaaaagtgtgaaaa

SEQ ID NO: 3305 - RNA, 21 nt, synthetic construct
  source 1..21: mol_type = other RNA
  modified_base 1: mod_base = OTHER; note = 2'-O-methyluridine-3'-phosphate
  modified_base 2: mod_base = OTHER; note = 2'-O-methyluridine-3'-phosphate
  modified_base 3: mod_base = OTHER; note = 2'-O-methyladenosine-3'-phosphate
  modified_base 4: mod_base = OTHER; note = 2'-O-methylguanosine-3'-phosphate
  modified_base 5: mod_base = OTHER; note = 2'-O-methyluridine-3'-phosphate
  modified_base 6: mod_base = OTHER; note = 2'-O-methylguanosine-3'-phosphate
  modified_base 7: mod_base = OTHER; note = 2'-deoxy-2'-fluoroadenosine-3'-phosphate
  modified_base 8: mod_base = OTHER; note = 2'-O-methyladenosine-3'-phosphate
  modified_base 9: mod_base = OTHER; note = 2'-deoxy-2'-fluoroadenosine-3'-phosphate
  modified_base 10: mod_base = OTHER; note = 2'-deoxy-2'-fluoroadenosine-3'-phosphate
  modified_base 11: mod_base = OTHER; note = 2'-deoxy-2'-fluoroadenosine-3'-phosphate
  modified_base 12: mod_base = OTHER; note = 2'-O-methylguanosine-3'-phosphate
  modified_base 13: mod_base = OTHER; note = 2'-O-methyluridine-3'-phosphate
  modified_base 14: mod_base = OTHER; note = 2'-O-methylguanosine-3'-phosphate
  modified_base 15: mod_base = OTHER; note = 2'-O-methyluridine-3'-phosphate
  modified_base 16: mod_base = OTHER; note = 2'-O-methylguanosine-3'-phosphate
  modified_base 17: mod_base = OTHER; note = 2'-O-methyladenosine-3'-phosphate
  modified_base 18: mod_base = OTHER; note = 2'-O-methyladenosine-3'-phosphate
  modified_base 19: mod_base = OTHER; note = 2'-O-methyladenosine-3'-phosphate
  modified_base 20: mod_base = OTHER; note = 2'-O-methylcytidine-3'-phosphate
  modified_base 21: mod_base = OTHER; note = 2'-O-methyladenosine
ttagtgaaaaagtgtgaaaca

SEQ ID NO: 3306 - RNA, 21 nt, synthetic construct
  source 1..21: mol_type = other RNA
  modified_base 1: mod_base = OTHER; note = 2'-O-methyluridine-3'-phosphate
  modified_base 2: mod_base = OTHER; note = 2'-O-methyladenosine-3'-phosphate
  modified_base 3: mod_base = OTHER; note = 2'-O-methylguanosine-3'-phosphate
  modified_base 4: mod_base = OTHER; note = 2'-O-methyluridine-3'-phosphate
  modified_base 5: mod_base = OTHER; note = 2'-O-methylguanosine-3'-phosphate
  modified_base 6: mod_base = OTHER; note = 2'-O-methyladenosine-3'-phosphate
  modified_base 7: mod_base = OTHER; note = 2'-deoxy-2'-fluoroadenosine-3'-phosphate
  modified_base 8: mod_base = OTHER; note = 2'-O-methyladenosine-3'-phosphate
  modified_base 9: mod_base = OTHER; note = 2'-deoxy-2'-fluoroadenosine-3'-phosphate
  modified_base 10: mod_base = OTHER; note = 2'-deoxy-2'-fluoroadenosine-3'-phosphate
  modified_base 11: mod_base = OTHER; note = 2'-deoxy-2'-fluoroguanosine-3'-phosphate
  modified_base 12: mod_base = OTHER; note = 2'-O-methyluridine-3'-phosphate
  modified_base 13: mod_base = OTHER; note = 2'-O-methylguanosine-3'-phosphate
  modified_base 14: mod_base = OTHER; note = 2'-O-methyluridine-3'-phosphate
  modified_base 15: mod_base = OTHER; note = 2'-O-methylguanosine-3'-phosphate
  modified_base 16: mod_base = OTHER; note = 2'-O-methyladenosine-3'-phosphate
  modified_base 17: mod_base = OTHER; note = 2'-O-methyladenosine-3'-phosphate
  modified_base 18: mod_base = OTHER; note = 2'-O-methyladenosine-3'-phosphate
  modified_base 19: mod_base = OTHER; note = 2'-O-methylcytidine-3'-phosphate
  modified_base 20: mod_base = OTHER; note = 2'-O-methyluridine-3'-phosphate
  modified_base 21: mod_base = OTHER; note = 2'-O-methyladenosine
tagtgaaaaagtgtgaaacta

SEQ ID NO: 3307 - RNA, 21 nt, synthetic construct
  source 1..21: mol_type = other RNA
  modified_base 1: mod_base = OTHER; note = 2'-O-methyladenosine-3'-phosphate
  modified_base 2: mod_base = OTHER; note = 2'-O-methylguanosine-3'-phosphate
  modified_base 3: mod_base = OTHER; note = 2'-O-methyluridine-3'-phosphate
  modified_base 4: mod_base = OTHER; note = 2'-O-methylguanosine-3'-phosphate
  modified_base 5: mod_base = OTHER; note = 2'-O-methyladenosine-3'-phosphate
  modified_base 6: mod_base = OTHER; note = 2'-O-methyladenosine-3'-phosphate
  modified_base 7: mod_base = OTHER; note = 2'-deoxy-2'-fluoroadenosine-3'-phosphate
  modified_base 8: mod_base = OTHER; note = 2'-O-methyladenosine-3'-phosphate
  modified_base 9: mod_base = OTHER; note = 2'-deoxy-2'-fluoroadenosine-3'-phosphate
  modified_base 10: mod_base = OTHER; note = 2'-deoxy-2'-fluoroguanosine-3'-phosphate
  modified_base 11: mod_base = OTHER; note = 2'-deoxy-2'-fluorouridine-3'-phosphate
  modified_base 12: mod_base = OTHER; note = 2'-O-methylguanosine-3'-phosphate
  modified_base 13: mod_base = OTHER; note = 2'-O-methyluridine-3'-phosphate
  modified_base 14: mod_base = OTHER; note = 2'-O-methylguanosine-3'-phosphate
  modified_base 15: mod_base = OTHER; note = 2'-O-methyladenosine-3'-phosphate
  modified_base 16: mod_base = OTHER; note = 2'-O-methyladenosine-3'-phosphate
  modified_base 17: mod_base = OTHER; note = 2'-O-methyladenosine-3'-phosphate
  modified_base 18: mod_base = OTHER; note = 2'-O-methylcytidine-3'-phosphate
  modified_base 19: mod_base = OTHER; note = 2'-O-methyluridine-3'-phosphate
  modified_base 20: mod_base = OTHER; note = 2'-O-methyluridine-3'-phosphate
  modified_base 21: mod_base = OTHER; note = 2'-O-methyladenosine
agtgaaaaagtgtgaaactta

SEQ ID NO: 3308 - RNA, 21 nt, synthetic construct
  source 1..21: mol_type = other RNA
  modified_base 1: mod_base = OTHER; note = 2'-O-methylguanosine-3'-phosphate
  modified_base 2: mod_base = OTHER; note = 2'-O-methyluridine-3'-phosphate
  modified_base 3: mod_base = OTHER; note = 2'-O-methylguanosine-3'-phosphate
  modified_base 4: mod_base = OTHER; note = 2'-O-methyladenosine-3'-phosphate
  modified_base 5: mod_base = OTHER; note = 2'-O-methyladenosine-3'-phosphate
  modified_base 6: mod_base = OTHER; note = 2'-O-methyladenosine-3'-phosphate
  modified_base 7: mod_base = OTHER; note = 2'-deoxy-2'-fluoroadenosine-3'-phosphate
  modified_base 8: mod_base = OTHER; note = 2'-O-methyladenosine-3'-phosphate
  modified_base 9: mod_base = OTHER; note = 2'-deoxy-2'-fluoroguanosine-3'-phosphate
  modified_base 10: mod_base = OTHER; note = 2'-deoxy-2'-fluorouridine-3'-phosphate
  modified_base 11: mod_base = OTHER; note = 2'-deoxy-2'-fluoroguanosine-3'-phosphate
  modified_base 12: mod_base = OTHER; note = 2'-O-methyluridine-3'-phosphate
  modified_base 13: mod_base = OTHER; note = 2'-O-methylguanosine-3'-phosphate
  modified_base 14: mod_base = OTHER; note = 2'-O-methyladenosine-3'-phosphate
  modified_base 15: mod_base = OTHER; note = 2'-O-methyladenosine-3'-phosphate
  modified_base 16: mod_base = OTHER; note = 2'-O-methyladenosine-3'-phosphate
  modified_base 17: mod_base = OTHER; note = 2'-O-methylcytidine-3'-phosphate
  modified_base 18: mod_base = OTHER; note = 2'-O-methyluridine-3'-phosphate
  modified_base 19: mod_base = OTHER; note = 2'-O-methyluridine-3'-phosphate
  modified_base 20: mod_base = OTHER; note = 2'-O-methylguanosine-3'-phosphate
  modified_base 21: mod_base = OTHER; note = 2'-O-methyladenosine
gtgaaaaagtgtgaaacttga

SEQ ID NO: 3309 - RNA, 21 nt, synthetic construct
  source 1..21: mol_type = other RNA
  modified_base 1: mod_base = OTHER; note = 2'-O-methyluridine-3'-phosphate
  modified_base 2: mod_base = OTHER; note = 2'-O-methylguanosine-3'-phosphate
  modified_base 3: mod_base = OTHER; note = 2'-O-methyladenosine-3'-phosphate
  modified_base 4: mod_base = OTHER; note = 2'-O-methyladenosine-3'-phosphate
  modified_base 5: mod_base = OTHER; note = 2'-O-methyladenosine-3'-phosphate
  modified_base 6: mod_base = OTHER; note = 2'-O-methyladenosine-3'-phosphate
  modified_base 7: mod_base = OTHER; note = 2'-deoxy-2'-fluoroadenosine-3'-phosphate
  modified_base 8: mod_base = OTHER; note = 2'-O-methylguanosine-3'-phosphate
  modified_base 9: mod_base = OTHER; note = 2'-deoxy-2'-fluorouridine-3'-phosphate
  modified_base 10: mod_base = OTHER; note = 2'-deoxy-2'-fluoroguanosine-3'-phosphate
  modified_base 11: mod_base = OTHER; note = 2'-deoxy-2'-fluorouridine-3'-phosphate
  modified_base 12: mod_base = OTHER; note = 2'-O-methylguanosine-3'-phosphate
  modified_base 13: mod_base = OTHER; note = 2'-O-methyladenosine-3'-phosphate
  modified_base 14: mod_base = OTHER; note = 2'-O-methyladenosine-3'-phosphate
  modified_base 15: mod_base = OTHER; note = 2'-O-methyladenosine-3'-phosphate
  modified_base 16: mod_base = OTHER; note = 2'-O-methylcytidine-3'-phosphate
  modified_base 17: mod_base = OTHER; note = 2'-O-methyluridine-3'-phosphate
  modified_base 18: mod_base = OTHER; note = 2'-O-methyluridine-3'-phosphate
  modified_base 19: mod_base = OTHER; note = 2'-O-methylguanosine-3'-phosphate
  modified_base 20: mod_base = OTHER; note = 2'-O-methyluridine-3'-phosphate
  modified_base 21: mod_base = OTHER; note = 2'-O-methyladenosine
tgaaaaagtgtgaaacttgta

SEQ ID NO: 3310 - RNA, 21 nt, synthetic construct
  source 1..21: mol_type = other RNA
  modified_base 1: mod_base = OTHER; note = 2'-O-methylguanosine-3'-phosphate
  modified_base 2: mod_base = OTHER; note = 2'-O-methyladenosine-3'-phosphate
  modified_base 3: mod_base = OTHER; note = 2'-O-methyladenosine-3'-phosphate
  modified_base 4: mod_base = OTHER; note = 2'-O-methyladenosine-3'-phosphate
  modified_base 5: mod_base = OTHER; note = 2'-O-methyladenosine-3'-phosphate
  modified_base 6: mod_base = OTHER; note = 2'-O-methyladenosine-3'-phosphate
  modified_base 7: mod_base = OTHER; note = 2'-deoxy-2'-fluoroguanosine-3'-phosphate
  modified_base 8: mod_base = OTHER; note = 2'-O-methyluridine-3'-phosphate
  modified_base 9: mod_base = OTHER; note = 2'-deoxy-2'-fluoroguanosine-3'-phosphate
  modified_base 10: mod_base = OTHER; note = 2'-deoxy-2'-fluorouridine-3'-phosphate
  modified_base 11: mod_base = OTHER; note = 2'-deoxy-2'-fluoroguanosine-3'-phosphate
  modified_base 12: mod_base = OTHER; note = 2'-O-methyladenosine-3'-phosphate
  modified_base 13: mod_base = OTHER; note = 2'-O-methyladenosine-3'-phosphate
  modified_base 14: mod_base = OTHER; note = 2'-O-methyladenosine-3'-phosphate
  modified_base 15: mod_base = OTHER; note = 2'-O-methylcytidine-3'-phosphate
  modified_base 16: mod_base = OTHER; note = 2'-O-methyluridine-3'-phosphate
  modified_base 17: mod_base = OTHER; note = 2'-O-methyluridine-3'-phosphate
  modified_base 18: mod_base = OTHER; note = 2'-O-methylguanosine-3'-phosphate
  modified_base 19: mod_base = OTHER; note = 2'-O-methyluridine-3'-phosphate
  modified_base 20: mod_base = OTHER; note = 2'-O-methylguanosine-3'-phosphate
  modified_base 21: mod_base = OTHER; note = 2'-O-methyladenosine
gaaaaagtgtgaaacttgtga

SEQ ID NO: 3311 - RNA, 21 nt, synthetic construct
  source 1..21: mol_type = other RNA
  modified_base 1: mod_base = OTHER; note = 2'-O-methyladenosine-3'-phosphate
  modified_base 2: mod_base = OTHER; note = 2'-O-methyladenosine-3'-phosphate
  modified_base 3: mod_base = OTHER; note = 2'-O-methyladenosine-3'-phosphate
  modified_base 4: mod_base = OTHER; note = 2'-O-methyladenosine-3'-phosphate
  modified_base 5: mod_base = OTHER; note = 2'-O-methyladenosine-3'-phosphate
  modified_base 6: mod_base = OTHER; note = 2'-O-methylguanosine-3'-phosphate
  modified_base 7: mod_base = OTHER; note = 2'-deoxy-2'-fluorouridine-3'-phosphate
  modified_base 8: mod_base = OTHER; note = 2'-O-methylguanosine-3'-phosphate
  modified_base 9: mod_base = OTHER; note = 2'-deoxy-2'-fluorouridine-3'-phosphate
  modified_base 10: mod_base = OTHER; note = 2'-deoxy-2'-fluoroguanosine-3'-phosphate
  modified_base 11: mod_base = OTHER; note = 2'-deoxy-2'-fluoroadenosine-3'-phosphate
  modified_base 12: mod_base = OTHER; note = 2'-O-methyladenosine-3'-phosphate
  modified_base 13: mod_base = OTHER; note = 2'-O-methyladenosine-3'-phosphate
  modified_base 14: mod_base = OTHER; note = 2'-O-methylcytidine-3'-phosphate
  modified_base 15: mod_base = OTHER; note = 2'-O-methyluridine-3'-phosphate
  modified_base 16: mod_base = OTHER; note = 2'-O-methyluridine-3'-phosphate
  modified_base 17: mod_base = OTHER; note = 2'-O-methylguanosine-3'-phosphate
  modified_base 18: mod_base = OTHER; note = 2'-O-methyluridine-3'-phosphate
  modified_base 19: mod_base = OTHER; note = 2'-O-methylguanosine-3'-phosphate
  modified_base 20: mod_base = OTHER; note = 2'-O-methylcytidine-3'-phosphate
  modified_base 21: mod_base = OTHER; note = 2'-O-methyladenosine
aaaaagtgtgaaacttgtgca

SEQ ID NO: 3312 - RNA, 21 nt, synthetic construct
  source 1..21: mol_type = other RNA
  modified_base 1: mod_base = OTHER; note = 2'-O-methyladenosine-3'-phosphate
  modified_base 2: mod_base = OTHER; note = 2'-O-methyladenosine-3'-phosphate
  modified_base 3: mod_base = OTHER; note = 2'-O-methyladenosine-3'-phosphate
  modified_base 4: mod_base = OTHER; note = 2'-O-methyladenosine-3'-phosphate
  modified_base 5: mod_base = OTHER; note = 2'-O-methylguanosine-3'-phosphate
  modified_base 6: mod_base = OTHER; note = 2'-O-methyluridine-3'-phosphate
  modified_base 7: mod_base = OTHER; note = 2'-deoxy-2'-fluoroguanosine-3'-phosphate
  modified_base 8: mod_base = OTHER; note = 2'-O-methyluridine-3'-phosphate
  modified_base 9: mod_base = OTHER; note = 2'-deoxy-2'-fluoroguanosine-3'-phosphate
  modified_base 10: mod_base = OTHER; note = 2'-deoxy-2'-fluoroadenosine-3'-phosphate
  modified_base 11: mod_base = OTHER; note = 2'-deoxy-2'-fluoroadenosine-3'-phosphate
  modified_base 12: mod_base = OTHER; note = 2'-O-methyladenosine-3'-phosphate
  modified_base 13: mod_base = OTHER; note = 2'-O-methylcytidine-3'-phosphate
  modified_base 14: mod_base = OTHER; note = 2'-O-methyluridine-3'-phosphate
  modified_base 15: mod_base = OTHER; note = 2'-O-methyluridine-3'-phosphate
  modified_base 16: mod_base = OTHER; note = 2'-O-methylguanosine-3'-phosphate
  modified_base 17: mod_base = OTHER; note = 2'-O-methyluridine-3'-phosphate
  modified_base 18: mod_base = OTHER; note = 2'-O-methylguanosine-3'-phosphate
  modified_base 19: mod_base = OTHER; note = 2'-O-methylcytidine-3'-phosphate
  modified_base 20: mod_base = OTHER; note = 2'-O-methylcytidine-3'-phosphate
  modified_base 21: mod_base = OTHER; note = 2'-O-methyladenosine
aaaagtgtgaaacttgtgcca

SEQ ID NO: 3313 - RNA, 21 nt, synthetic construct
  source 1..21: mol_type = other RNA
  modified_base 1: mod_base = OTHER; note = 2'-O-methyladenosine-3'-phosphate
  modified_base 2: mod_base = OTHER; note = 2'-O-methyladenosine-3'-phosphate
  modified_base 3: mod_base = OTHER; note = 2'-O-methylguanosine-3'-phosphate
  modified_base 4: mod_base = OTHER; note = 2'-O-methyluridine-3'-phosphate
  modified_base 5: mod_base = OTHER; note = 2'-O-methylguanosine-3'-phosphate
  modified_base 6: mod_base = OTHER; note = 2'-O-methyluridine-3'-phosphate
  modified_base 7: mod_base = OTHER; note = 2'-deoxy-2'-fluoroguanosine-3'-phosphate
  modified_base 8: mod_base = OTHER; note = 2'-O-methyladenosine-3'-phosphate
  modified_base 9: mod_base = OTHER; note = 2'-deoxy-2'-fluoroadenosine-3'-phosphate
  modified_base 10: mod_base = OTHER; note = 2'-deoxy-2'-fluoroadenosine-3'-phosphate
  modified_base 11: mod_base = OTHER; note = 2'-deoxy-2'-fluorocytidine-3'-phosphate
  modified_base 12: mod_base = OTHER; note = 2'-O-methyluridine-3'-phosphate
  modified_base 13: mod_base = OTHER; note = 2'-O-methyluridine-3'-phosphate
  modified_base 14: mod_base = OTHER; note = 2'-O-methylguanosine-3'-phosphate
  modified_base 15: mod_base = OTHER; note = 2'-O-methyluridine-3'-phosphate
  modified_base 16: mod_base = OTHER; note = 2'-O-methylguanosine-3'-phosphate
  modified_base 17: mod_base = OTHER; note = 2'-O-methylcytidine-3'-phosphate
  modified_base 18: mod_base = OTHER; note = 2'-O-methylcytidine-3'-phosphate
  modified_base 19: mod_base = OTHER; note = 2'-O-methyladenosine-3'-phosphate
  modified_base 20: mod_base = OTHER; note = 2'-O-methyluridine-3'-phosphate
  modified_base 21: mod_base = OTHER; note = 2'-O-methyladenosine
aagtgtgaaacttgtgccata

SEQ ID NO: 3314 - RNA, 21 nt, synthetic construct
  source 1..21: mol_type = other RNA
  modified_base 1: mod_base = OTHER; note = 2'-O-methyladenosine-3'-phosphate
  modified_base 2: mod_base = OTHER; note = 2'-O-methylguanosine-3'-phosphate
  modified_base 3: mod_base = OTHER; note = 2'-O-methyluridine-3'-phosphate
  modified_base 4: mod_base = OTHER; note = 2'-O-methylguanosine-3'-phosphate
  modified_base 5: mod_base = OTHER; note = 2'-O-methyluridine-3'-phosphate
  modified_base 6: mod_base = OTHER; note = 2'-O-methylguanosine-3'-phosphate
  modified_base 7: mod_base = OTHER; note = 2'-deoxy-2'-fluoroadenosine-3'-phosphate
  modified_base 8: mod_base = OTHER; note = 2'-O-methyladenosine-3'-phosphate
  modified_base 9: mod_base = OTHER; note = 2'-deoxy-2'-fluoroadenosine-3'-phosphate
  modified_base 10: mod_base = OTHER; note = 2'-deoxy-2'-fluorocytidine-3'-phosphate
  modified_base 11: mod_base = OTHER; note = 2'-deoxy-2'-fluorouridine-3'-phosphate
  modified_base 12: mod_base = OTHER; note = 2'-O-methyluridine-3'-phosphate
  modified_base 13: mod_base = OTHER; note = 2'-O-methylguanosine-3'-phosphate
  modified_base 14: mod_base = OTHER; note = 2'-O-methyluridine-3'-phosphate
  modified_base 15: mod_base = OTHER; note = 2'-O-methylguanosine-3'-phosphate
  modified_base 16: mod_base = OTHER; note = 2'-O-methylcytidine-3'-phosphate
  modified_base 17: mod_base = OTHER; note = 2'-O-methylcytidine-3'-phosphate
  modified_base 18: mod_base = OTHER; note = 2'-O-methyladenosine-3'-phosphate
  modified_base 19: mod_base = OTHER; note = 2'-O-methyluridine-3'-phosphate
  modified_base 20: mod_base = OTHER; note = 2'-O-methyladenosine-3'-phosphate
  modified_base 21: mod_base = OTHER; note = 2'-O-methyladenosine
agtgtgaaacttgtgccataa

SEQ ID NO: 3315 - RNA, 21 nt, synthetic construct
  source 1..21: mol_type = other RNA
  modified_base 1: mod_base = OTHER; note = 2'-O-methylguanosine-3'-phosphate
  modified_base 2: mod_base = OTHER; note = 2'-O-methylcytidine-3'-phosphate
  modified_base 3: mod_base = OTHER; note = 2'-O-methyluridine-3'-phosphate
  modified_base 4: mod_base = OTHER; note = 2'-O-methylguanosine-3'-phosphate
  modified_base 5: mod_base = OTHER; note = 2'-O-methyluridine-3'-phosphate
  modified_base 6: mod_base = OTHER; note = 2'-O-methylguanosine-3'-phosphate
  modified_base 7: mod_base = OTHER; note = 2'-deoxy-2'-fluoroadenosine-3'-phosphate
  modified_base 8: mod_base = OTHER; note = 2'-O-methyladenosine-3'-phosphate
  modified_base 9: mod_base = OTHER; note = 2'-deoxy-2'-fluoroguanosine-3'-phosphate
  modified_base 10: mod_base = OTHER; note = 2'-deoxy-2'-fluorocytidine-3'-phosphate
  modified_base 11: mod_base = OTHER; note = 2'-deoxy-2'-fluoroadenosine-3'-phosphate
  modified_base 12: mod_base = OTHER; note = 2'-O-methyluridine-3'-phosphate
  modified_base 13: mod_base = OTHER; note = 2'-O-methylguanosine-3'-phosphate
  modified_base 14: mod_base = OTHER; note = 2'-O-methyladenosine-3'-phosphate
  modified_base 15: mod_base = OTHER; note = 2'-O-methyluridine-3'-phosphate
  modified_base 16: mod_base = OTHER; note = 2'-O-methyluridine-3'-phosphate
  modified_base 17: mod_base = OTHER; note = 2'-O-methylcytidine-3'-phosphate
  modified_base 18: mod_base = OTHER; note = 2'-O-methyladenosine-3'-phosphate
  modified_base 19: mod_base = OTHER; note = 2'-O-methyladenosine-3'-phosphate
  modified_base 20: mod_base = OTHER; note = 2'-O-methyluridine-3'-phosphate
  modified_base 21: mod_base = OTHER; note = 2'-O-methyladenosine
gctgtgaagcatgattcaata

SEQ ID NO: 3316 - RNA, 21 nt, synthetic construct
  source 1..21: mol_type = other RNA
  modified_base 1: mod_base = OTHER; note = 2'-O-methylcytidine-3'-phosphate
  modified_base 2: mod_base = OTHER; note = 2'-O-methyluridine-3'-phosphate
  modified_base 3: mod_base = OTHER; note = 2'-O-methylguanosine-3'-phosphate
  modified_base 4: mod_base = OTHER; note = 2'-O-methyluridine-3'-phosphate
  modified_base 5: mod_base = OTHER; note = 2'-O-methylguanosine-3'-phosphate
  modified_base 6: mod_base = OTHER; note = 2'-O-methyladenosine-3'-phosphate
  modified_base 7: mod_base = OTHER; note = 2'-deoxy-2'-fluoroadenosine-3'-phosphate
  modified_base 8: mod_base = OTHER; note = 2'-O-methylguanosine-3'-phosphate
  modified_base 9: mod_base = OTHER; note = 2'-deoxy-2'-fluorocytidine-3'-phosphate
  modified_base 10: mod_base = OTHER; note = 2'-deoxy-2'-fluoroadenosine-3'-phosphate
  modified_base 11: mod_base = OTHER; note = 2'-deoxy-2'-fluorouridine-3'-phosphate
  modified_base 12: mod_base = OTHER; note = 2'-O-methylguanosine-3'-phosphate
  modified_base 13: mod_base = OTHER; note = 2'-O-methyladenosine-3'-phosphate
  modified_base 14: mod_base = OTHER; note = 2'-O-methyluridine-3'-phosphate
  modified_base 15: mod_base = OTHER; note = 2'-O-methyluridine-3'-phosphate
  modified_base 16: mod_base = OTHER; note = 2'-O-methylcytidine-3'-phosphate
  modified_base 17: mod_base = OTHER; note = 2'-O-methyladenosine-3'-phosphate
  modified_base 18: mod_base = OTHER; note = 2'-O-methyladenosine-3'-phosphate
  modified_base 19: mod_base = OTHER; note = 2'-O-methyluridine-3'-phosphate
  modified_base 20: mod_base = OTHER; note = 2'-O-methyladenosine-3'-phosphate
  modified_base 21: mod_base = OTHER; note = 2'-O-methyladenosine
ctgtgaagcatgattcaataa

SEQ ID NO: 3317 - RNA, 21 nt, synthetic construct
  source 1..21: mol_type = other RNA
  modified_base 1: mod_base = OTHER; note = 2'-O-methylguanosine-3'-phosphate
  modified_base 2: mod_base = OTHER; note = 2'-O-methyluridine-3'-phosphate
  modified_base 3: mod_base = OTHER; note = 2'-O-methylguanosine-3'-phosphate
  modified_base 4: mod_base = OTHER; note = 2'-O-methyladenosine-3'-phosphate
  modified_base 5: mod_base = OTHER; note = 2'-O-methyladenosine-3'-phosphate
  modified_base 6: mod_base = OTHER; note = 2'-O-methylguanosine-3'-phosphate
  modified_base 7: mod_base = OTHER; note = 2'-deoxy-2'-fluorocytidine-3'-phosphate
  modified_base 8: mod_base = OTHER; note = 2'-O-methyladenosine-3'-phosphate
  modified_base 9: mod_base = OTHER; note = 2'-deoxy-2'-fluorouridine-3'-phosphate
  modified_base 10: mod_base = OTHER; note = 2'-deoxy-2'-fluoroguanosine-3'-phosphate
  modified_base 11: mod_base = OTHER; note = 2'-deoxy-2'-fluoroadenosine-3'-phosphate
  modified_base 12: mod_base = OTHER; note = 2'-O-methyluridine-3'-phosphate
  modified_base 13: mod_base = OTHER; note = 2'-O-methyluridine-3'-phosphate
  modified_base 14: mod_base = OTHER; note = 2'-O-methylcytidine-3'-phosphate
  modified_base 15: mod_base = OTHER; note = 2'-O-methyladenosine-3'-phosphate
  modified_base 16: mod_base = OTHER; note = 2'-O-methyladenosine-3'-phosphate
  modified_base 17: mod_base = OTHER; note = 2'-O-methyluridine-3'-phosphate
  modified_base 18: mod_base = OTHER; note = 2'-O-methyladenosine-3'-phosphate
  modified_base 19: mod_base = OTHER; note = 2'-O-methylcytidine-3'-phosphate
  modified_base 20: mod_base = OTHER; note = 2'-O-methyluridine-3'-phosphate
  modified_base 21: mod_base = OTHER; note = 2'-O-methyladenosine
gtgaagcatgattcaatacta

SEQ ID NO: 3318 - RNA, 21 nt, synthetic construct
  source 1..21: mol_type = other RNA
  modified_base 1: mod_base = OTHER; note = 2'-O-methyluridine-3'-phosphate
  modified_base 2: mod_base = OTHER; note = 2'-O-methylguanosine-3'-phosphate
  modified_base 3: mod_base = OTHER; note = 2'-O-methyladenosine-3'-phosphate
  modified_base 4: mod_base = OTHER; note = 2'-O-methyladenosine-3'-phosphate
  modified_base 5: mod_base = OTHER; note = 2'-O-methylguanosine-3'-phosphate
  modified_base 6: mod_base = OTHER; note = 2'-O-methylcytidine-3'-phosphate
  modified_base 7: mod_base = OTHER; note = 2'-deoxy-2'-fluoroadenosine-3'-phosphate
  modified_base 8: mod_base = OTHER; note = 2'-O-methyluridine-3'-phosphate
  modified_base 9: mod_base = OTHER; note = 2'-deoxy-2'-fluoroguanosine-3'-phosphate
  modified_base 10: mod_base = OTHER; note = 2'-deoxy-2'-fluoroadenosine-3'-phosphate
  modified_base 11: mod_base = OTHER; note = 2'-deoxy-2'-fluorouridine-3'-phosphate
  modified_base 12: mod_base = OTHER; note = 2'-O-methyluridine-3'-phosphate
  modified_base 13: mod_base = OTHER; note = 2'-O-methylcytidine-3'-phosphate
  modified_base 14: mod_base = OTHER; note = 2'-O-methyladenosine-3'-phosphate
  modified_base 15: mod_base = OTHER; note = 2'-O-methyladenosine-3'-phosphate
  modified_base 16: mod_base = OTHER; note = 2'-O-methyluridine-3'-phosphate
  modified_base 17: mod_base = OTHER; note = 2'-O-methyladenosine-3'-phosphate
  modified_base 18: mod_base = OTHER; note = 2'-O-methylcytidine-3'-phosphate
  modified_base 19: mod_base = OTHER; note = 2'-O-methyluridine-3'-phosphate
  modified_base 20: mod_base = OTHER; note = 2'-O-methylguanosine-3'-phosphate
  modified_base 21: mod_base = OTHER; note = 2'-O-methyladenosine
tgaagcatgattcaatactga

SEQ ID NO: 3319 - RNA, 21 nt, synthetic construct
  source 1..21: mol_type = other RNA
  modified_base 1: mod_base = OTHER; note = 2'-O-methylguanosine-3'-phosphate
  modified_base 2: mod_base = OTHER; note = 2'-O-methylcytidine-3'-phosphate
  modified_base 3: mod_base = OTHER; note = 2'-O-methyladenosine-3'-phosphate
  modified_base 4: mod_base = OTHER; note = 2'-O-methyluridine-3'-phosphate
  modified_base 5: mod_base = OTHER; note = 2'-O-methylguanosine-3'-phosphate
  modified_base 6: mod_base = OTHER; note = 2'-O-methyladenosine-3'-phosphate
  modified_base 7: mod_base = OTHER; note = 2'-deoxy-2'-fluorouridine-3'-phosphate
  modified_base 8: mod_base = OTHER; note = 2'-O-methyluridine-3'-phosphate
  modified_base 9: mod_base = OTHER; note = 2'-deoxy-2'-fluorocytidine-3'-phosphate
  modified_base 10: mod_base = OTHER; note = 2'-deoxy-2'-fluoroadenosine-3'-phosphate
  modified_base 11: mod_base = OTHER; note = 2'-deoxy-2'-fluoroadenosine-3'-phosphate
  modified_base 12: mod_base = OTHER; note = 2'-O-methyluridine-3'-phosphate
  modified_base 13: mod_base = OTHER; note = 2'-O-methyladenosine-3'-phosphate
  modified_base 14: mod_base = OTHER; note = 2'-O-methylcytidine-3'-phosphate
  modified_base 15: mod_base = OTHER; note = 2'-O-methyluridine-3'-phosphate
  modified_base 16: mod_base = OTHER; note = 2'-O-methylguanosine-3'-phosphate
  modified_base 17: mod_base = OTHER; note = 2'-O-methyladenosine-3'-phosphate
  modified_base 18: mod_base = OTHER; note = 2'-O-methyladenosine-3'-phosphate
  modified_base 19: mod_base = OTHER; note = 2'-O-methylcytidine-3'-phosphate
  modified_base 20: mod_base = OTHER; note = 2'-O-methyladenosine-3'-phosphate
  modified_base 21: mod_base = OTHER; note = 2'-O-methyladenosine
gcatgattcaatactgaacaa

SEQ ID NO: 3320 - RNA, 21 nt, synthetic construct
  source 1..21: mol_type = other RNA
  modified_base 1: mod_base = OTHER; note = 2'-O-methyladenosine-3'-phosphate
  modified_base 2: mod_base = OTHER; note = 2'-O-methyluridine-3'-phosphate
  modified_base 3: mod_base = OTHER; note = 2'-O-methylguanosine-3'-phosphate
  modified_base 4: mod_base = OTHER; note = 2'-O-methyladenosine-3'-phosphate
  modified_base 5: mod_base = OTHER; note = 2'-O-methyluridine-3'-phosphate
  modified_base 6: mod_base = OTHER; note = 2'-O-methyluridine-3'-phosphate
  modified_base 7: mod_base = OTHER; note = 2'-deoxy-2'-fluorocytidine-3'-phosphate
  modified_base 8: mod_base = OTHER; note = 2'-O-methyladenosine-3'-phosphate
  modified_base 9: mod_base = OTHER; note = 2'-deoxy-2'-fluoroadenosine-3'-phosphate
  modified_base 10: mod_base = OTHER; note = 2'-deoxy-2'-fluorouridine-3'-phosphate
  modified_base 11: mod_base = OTHER; note = 2'-deoxy-2'-fluoroadenosine-3'-phosphate
  modified_base 12: mod_base = OTHER; note = 2'-O-methylcytidine-3'-phosphate
  modified_base 13: mod_base = OTHER; note = 2'-O-methyluridine-3'-phosphate
  modified_base 14: mod_base = OTHER; note = 2'-O-methylguanosine-3'-phosphate
  modified_base 15: mod_base = OTHER; note = 2'-O-methyladenosine-3'-phosphate
  modified_base 16: mod_base = OTHER; note = 2'-O-methyladenosine-3'-phosphate
  modified_base 17: mod_base = OTHER; note = 2'-O-methylcytidine-3'-phosphate
  modified_base 18: mod_base = OTHER; note = 2'-O-methyladenosine-3'-phosphate
  modified_base 19: mod_base = OTHER; note = 2'-O-methylcytidine-3'-phosphate
  modified_base 20: mod_base = OTHER; note = 2'-O-methyluridine-3'-phosphate
  modified_base 21: mod_base = OTHER; note = 2'-O-methyladenosine
atgattcaatactgaacacta

SEQ ID NO: 3321 - RNA, 21 nt, synthetic construct
  source 1..21: mol_type = other RNA
  modified_base 1: mod_base = OTHER; note = 2'-O-methyluridine-3'-phosphate
  modified_base 2: mod_base = OTHER; note = 2'-O-methylguanosine-3'-phosphate
  modified_base 3: mod_base = OTHER; note = 2'-O-methyladenosine-3'-phosphate
  modified_base 4: mod_base = OTHER; note = 2'-O-methyluridine-3'-phosphate
  modified_base 5: mod_base = OTHER; note = 2'-O-methyluridine-3'-phosphate
  modified_base 6: mod_base = OTHER; note = 2'-O-methylcytidine-3'-phosphate
  modified_base 7: mod_base = OTHER; note = 2'-deoxy-2'-fluoroadenosine-3'-phosphate
  modified_base 8: mod_base = OTHER; note = 2'-O-methyladenosine-3'-phosphate
  modified_base 9: mod_base = OTHER; note = 2'-deoxy-2'-fluorouridine-3'-phosphate
  modified_base 10: mod_base = OTHER; note = 2'-deoxy-2'-fluoroadenosine-3'-phosphate
  modified_base 11: mod_base = OTHER; note = 2'-deoxy-2'-fluorocytidine-3'-phosphate
  modified_base 12: mod_base = OTHER; note = 2'-O-methyluridine-3'-phosphate
  modified_base 13: mod_base = OTHER; note = 2'-O-methylguanosine-3'-phosphate
  modified_base 14: mod_base = OTHER; note = 2'-O-methyladenosine-3'-phosphate
  modified_base 15: mod_base = OTHER; note = 2'-O-methyladenosine-3'-phosphate
  modified_base 16: mod_base = OTHER; note = 2'-O-methylcytidine-3'-phosphate
  modified_base 17: mod_base = OTHER; note = 2'-O-methyladenosine-3'-phosphate
  modified_base 18: mod_base = OTHER; note = 2'-O-methylcytidine-3'-phosphate
  modified_base 19: mod_base = OTHER; note = 2'-O-methyluridine-3'-phosphate
  modified_base 20: mod_base = OTHER; note = 2'-O-methyladenosine-3'-phosphate
  modified_base 21: mod_base = OTHER; note = 2'-O-methyladenosine
tgattcaatactgaacactaa

SEQ ID NO: 3322 - RNA, 21 nt, synthetic construct
  source 1..21: mol_type = other RNA
  modified_base 1: mod_base = OTHER; note = 2'-O-methyladenosine-3'-phosphate
  modified_base 2: mod_base = OTHER; note = 2'-O-methyluridine-3'-phosphate
  modified_base 3: mod_base = OTHER; note = 2'-O-methyladenosine-3'-phosphate
  modified_base 4: mod_base = OTHER; note = 2'-O-methylcytidine-3'-phosphate
  modified_base 5: mod_base = OTHER; note = 2'-O-methyluridine-3'-phosphate
  modified_base 6: mod_base = OTHER; note = 2'-O-methylguanosine-3'-phosphate
  modified_base 7: mod_base = OTHER; note = 2'-deoxy-2'-fluoroadenosine-3'-phosphate
  modified_base 8: mod_base = OTHER; note = 2'-O-methyladenosine-3'-phosphate
  modified_base 9: mod_base = OTHER; note = 2'-deoxy-2'-fluorocytidine-3'-phosphate
  modified_base 10: mod_base = OTHER; note = 2'-deoxy-2'-fluoroadenosine-3'-phosphate
  modified_base 11: mod_base = OTHER; note = 2'-deoxy-2'-fluorocytidine-3'-phosphate
  modified_base 12: mod_base = OTHER; note = 2'-O-methyluridine-3'-phosphate
  modified_base 13: mod_base = OTHER; note = 2'-O-methyladenosine-3'-phosphate
  modified_base 14: mod_base = OTHER; note = 2'-O-methyluridine-3'-phosphate
  modified_base 15: mod_base = OTHER; note = 2'-O-methylcytidine-3'-phosphate
  modified_base 16: mod_base = OTHER; note = 2'-O-methylguanosine-3'-phosphate
  modified_base 17: mod_base = OTHER; note = 2'-O-methyladenosine-3'-phosphate
  modified_base 18: mod_base = OTHER; note = 2'-O-methylcytidine-3'-phosphate
  modified_base 19: mod_base = OTHER; note = 2'-O-methyladenosine-3'-phosphate
  modified_base 20: mod_base = OTHER; note = 2'-O-methyluridine-3'-phosphate
  modified_base 21: mod_base = OTHER; note = 2'-O-methyladenosine
atactgaacactatcgacata

SEQ ID NO: 3323 - RNA, 21 nt, synthetic construct
  source 1..21: mol_type = other RNA
  modified_base 1: mod_base = OTHER; note = 2'-O-methyladenosine-3'-phosphate
  modified_base 2: mod_base = OTHER; note = 2'-O-methylcytidine-3'-phosphate
  modified_base 3: mod_base = OTHER; note = 2'-O-methyluridine-3'-phosphate
  modified_base 4: mod_base = OTHER; note = 2'-O-methylguanosine-3'-phosphate
  modified_base 5: mod_base = OTHER; note = 2'-O-methyladenosine-3'-phosphate
  modified_base 6: mod_base = OTHER; note = 2'-O-methyladenosine-3'-phosphate
  modified_base 7: mod_base = OTHER; note = 2'-deoxy-2'-fluorocytidine-3'-phosphate
  modified_base 8: mod_base = OTHER; note = 2'-O-methyladenosine-3'-phosphate
  modified_base 9: mod_base = OTHER; note = 2'-deoxy-2'-fluorocytidine-3'-phosphate
  modified_base 10: mod_base = OTHER; note = 2'-deoxy-2'-fluorouridine-3'-phosphate
  modified_base 11: mod_base = OTHER; note = 2'-deoxy-2'-fluoroadenosine-3'-phosphate
  modified_base 12: mod_base = OTHER; note = 2'-O-methyluridine-3'-phosphate
  modified_base 13: mod_base = OTHER; note = 2'-O-methylcytidine-3'-phosphate
  modified_base 14: mod_base = OTHER; note = 2'-O-methylguanosine-3'-phosphate
  modified_base 15: mod_base = OTHER; note = 2'-O-methyladenosine-3'-phosphate
  modified_base 16: mod_base = OTHER; note = 2'-O-methylcytidine-3'-phosphate
  modified_base 17: mod_base = OTHER; note = 2'-O-methyladenosine-3'-phosphate
  modified_base 18: mod_base = OTHER; note = 2'-O-methyluridine-3'-phosphate
  modified_base 19: mod_base = OTHER; note = 2'-O-methyladenosine-3'-phosphate
  modified_base 20: mod_base = OTHER; note = 2'-O-methylcytidine-3'-phosphate
  modified_base 21: mod_base = OTHER; note = 2'-O-methyladenosine
actgaacactatcgacataca

SEQ ID NO: 3324 - RNA, 21 nt, synthetic construct
  source 1..21: mol_type = other RNA
  modified_base 1: mod_base = OTHER; note = 2'-O-methyladenosine-3'-phosphate
  modified_base 2: mod_base = OTHER; note = 2'-O-methyluridine-3'-phosphate
  modified_base 3: mod_base = OTHER; note = 2'-O-methyladenosine-3'-phosphate
  modified_base 4: mod_base = OTHER; note = 2'-O-methylcytidine-3'-phosphate
  modified_base 5: mod_base = OTHER; note = 2'-O-methylcytidine-3'-phosphate
  modified_base 6: mod_base = OTHER; note = 2'-O-methyluridine-3'-phosphate
  modified_base 7: mod_base = OTHER; note = 2'-deoxy-2'-fluorocytidine-3'-phosphate
  modified_base 8: mod_base = OTHER; note = 2'-O-methyladenosine-3'-phosphate
  modified_base 9: mod_base = OTHER; note = 2'-deoxy-2'-fluoroguanosine-3'-phosphate
  modified_base 10: mod_base = OTHER; note = 2'-deoxy-2'-fluoroadenosine-3'-phosphate
  modified_base 11: mod_base = OTHER; note = 2'-deoxy-2'-fluoroadenosine-3'-phosphate
  modified_base 12: mod_base = OTHER; note = 2'-O-methyluridine-3'-phosphate
  modified_base 13: mod_base = OTHER; note = 2'-O-methylcytidine-3'-phosphate
  modified_base 14: mod_base = OTHER; note = 2'-O-methylcytidine-3'-phosphate
  modified_base 15: mod_base = OTHER; note = 2'-O-methyluridine-3'-phosphate
  modified_base 16: mod_base = OTHER; note = 2'-O-methyladenosine-3'-phosphate
  modified_base 17: mod_base = OTHER; note = 2'-O-methyladenosine-3'-phosphate
  modified_base 18: mod_base = OTHER; note = 2'-O-methyladenosine-3'-phosphate
  modified_base 19: mod_base = OTHER; note = 2'-O-methylguanosine-3'-phosphate
  modified_base 20: mod_base = OTHER; note = 2'-O-methyluridine-3'-phosphate
  modified_base 21: mod_base = OTHER; note = 2'-O-methyladenosine
atacctcagaatcctaaagta

SEQ ID NO: 3325 - RNA, 21 nt, synthetic construct
  source 1..21: mol_type = other RNA
  modified_base 1: mod_base = OTHER; note = 2'-O-methyluridine-3'-phosphate
  modified_base 2: mod_base = OTHER; note = 2'-O-methyladenosine-3'-phosphate
  modified_base 3: mod_base = OTHER; note = 2'-O-methyluridine-3'-phosphate
  modified_base 4: mod_base = OTHER; note = 2'-O-methyladenosine-3'-phosphate
  modified_base 5: mod_base = OTHER; note = 2'-O-methyluridine-3'-phosphate
  modified_base 6: mod_base = OTHER; note = 2'-O-methylguanosine-3'-phosphate
  modified_base 7: mod_base = OTHER; note = 2'-deoxy-2'-fluoroguanosine-3'-phosphate
  modified_base 8: mod_base = OTHER; note = 2'-O-methylcytidine-3'-phosphate
  modified_base 9: mod_base = OTHER; note = 2'-deoxy-2'-fluorouridine-3'-phosphate
  modified_base 10: mod_base = OTHER; note = 2'-deoxy-2'-fluorocytidine-3'-phosphate
  modified_base 11: mod_base = OTHER; note = 2'-deoxy-2'-fluorocytidine-3'-phosphate
  modified_base 12: mod_base = OTHER; note = 2'-O-methyluridine-3'-phosphate
  modified_base 13: mod_base = OTHER; note = 2'-O-methylguanosine-3'-phosphate
  modified_base 14: mod_base = OTHER; note = 2'-O-methyladenosine-3'-phosphate
  modified_base 15: mod_base = OTHER; note = 2'-O-methyladenosine-3'-phosphate
  modified_base 16: mod_base = OTHER; note = 2'-O-methyladenosine-3'-phosphate
  modified_base 17: mod_base = OTHER; note = 2'-O-methyluridine-3'-phosphate
  modified_base 18: mod_base = OTHER; note = 2'-O-methylguanosine-3'-phosphate
  modified_base 19: mod_base = OTHER; note = 2'-O-methylcytidine-3'-phosphate
  modified_base 20: mod_base = OTHER; note = 2'-O-methyluridine-3'-phosphate
  modified_base 21: mod_base = OTHER; note = 2'-O-methyladenosine
tatatggctcctgaaatgcta

SEQ ID NO: 3326 - RNA, 21 nt, synthetic construct
  source 1..21: mol_type = other RNA
  modified_base 1: mod_base = OTHER; note = 2'-O-methyluridine-3'-phosphate
  modified_base 2: mod_base = OTHER; note = 2'-O-methylguanosine-3'-phosphate
  modified_base 3: mod_base = OTHER; note = 2'-O-methylguanosine-3'-phosphate
  modified_base 4: mod_base = OTHER; note = 2'-O-methylcytidine-3'-phosphate
  modified_base 5: mod_base = OTHER; note = 2'-O-methyluridine-3'-phosphate
  modified_base 6: mod_base = OTHER; note = 2'-O-methylcytidine-3'-phosphate
  modified_base 7: mod_base = OTHER; note = 2'-deoxy-2'-fluorocytidine-3'-phosphate
  modified_base 8: mod_base = OTHER; note = 2'-O-methyluridine-3'-phosphate
  modified_base 9: mod_base = OTHER; note = 2'-deoxy-2'-fluoroguanosine-3'-phosphate
  modified_base 10: mod_base = OTHER; note = 2'-deoxy-2'-fluoroadenosine-3'-phosphate
  modified_base 11: mod_base = OTHER; note = 2'-deoxy-2'-fluoroadenosine-3'-phosphate
  modified_base 12: mod_base = OTHER; note = 2'-O-methyladenosine-3'-phosphate
  modified_base 13: mod_base = OTHER; note = 2'-O-methyluridine-3'-phosphate
  modified_base 14: mod_base = OTHER; note = 2'-O-methylguanosine-3'-phosphate
  modified_base 15: mod_base = OTHER; note = 2'-O-methylcytidine-3'-phosphate
  modified_base 16: mod_base = OTHER; note = 2'-O-methyluridine-3'-phosphate
  modified_base 17: mod_base = OTHER; note = 2'-O-methyluridine-3'-phosphate
  modified_base 18: mod_base = OTHER; note = 2'-O-methylguanosine-3'-phosphate
  modified_base 19: mod_base = OTHER; note = 2'-O-methyladenosine-3'-phosphate
  modified_base 20: mod_base = OTHER; note = 2'-O-methyluridine-3'-phosphate
  modified_base 21: mod_base = OTHER; note = 2'-O-methyladenosine
tggctcctgaaatgcttgata

SEQ ID NO: 3327 - RNA, 21 nt, synthetic construct
  source 1..21: mol_type = other RNA
  modified_base 1: mod_base = OTHER; note = 2'-O-methylguanosine-3'-phosphate
  modified_base 2: mod_base = OTHER; note = 2'-O-methylguanosine-3'-phosphate
  modified_base 3: mod_base = OTHER; note = 2'-O-methylcytidine-3'-phosphate
  modified_base 4: mod_base = OTHER; note = 2'-O-methyluridine-3'-phosphate
  modified_base 5: mod_base = OTHER; note = 2'-O-methylcytidine-3'-phosphate
  modified_base 6: mod_base = OTHER; note = 2'-O-methylcytidine-3'-phosphate
  modified_base 7: mod_base = OTHER; note = 2'-deoxy-2'-fluorouridine-3'-phosphate
  modified_base 8: mod_base = OTHER; note = 2'-O-methylguanosine-3'-phosphate
  modified_base 9: mod_base = OTHER; note = 2'-deoxy-2'-fluoroadenosine-3'-phosphate
  modified_base 10: mod_base = OTHER; note = 2'-deoxy-2'-fluoroadenosine-3'-phosphate
  modified_base 11: mod_base = OTHER; note = 2'-deoxy-2'-fluoroadenosine-3'-phosphate
  modified_base 12: mod_base = OTHER; note = 2'-O-methyluridine-3'-phosphate
  modified_base 13: mod_base = OTHER; note = 2'-O-methylguanosine-3'-phosphate
  modified_base 14: mod_base = OTHER; note = 2'-O-methylcytidine-3'-phosphate
  modified_base 15: mod_base = OTHER; note = 2'-O-methyluridine-3'-phosphate
  modified_base 16: mod_base = OTHER; note = 2'-O-methyluridine-3'-phosphate
  modified_base 17: mod_base = OTHER; note = 2'-O-methylguanosine-3'-phosphate
  modified_base 18: mod_base = OTHER; note = 2'-O-methyladenosine-3'-phosphate
  modified_base 19: mod_base = OTHER; note = 2'-O-methyluridine-3'-phosphate
  modified_base 20: mod_base = OTHER; note = 2'-O-methylguanosine-3'-phosphate
  modified_base 21: mod_base = OTHER; note = 2'-O-methyladenosine
ggctcctgaaatgcttgatga

SEQ ID NO: 3328 - RNA, 21 nt, synthetic construct
  source 1..21: mol_type = other RNA
  modified_base 1: mod_base = OTHER; note = 2'-O-methylguanosine-3'-phosphate
  modified_base 2: mod_base = OTHER; note = 2'-O-methylcytidine-3'-phosphate
  modified_base 3: mod_base = OTHER; note = 2'-O-methyluridine-3'-phosphate
  modified_base 4: mod_base = OTHER; note = 2'-O-methylcytidine-3'-phosphate
  modified_base 5: mod_base = OTHER; note = 2'-O-methylcytidine-3'-phosphate
  modified_base 6: mod_base = OTHER; note = 2'-O-methyluridine-3'-phosphate
  modified_base 7: mod_base = OTHER; note = 2'-deoxy-2'-fluoroguanosine-3'-phosphate
  modified_base 8: mod_base = OTHER; note = 2'-O-methyladenosine-3'-phosphate
  modified_base 9: mod_base = OTHER; note = 2'-deoxy-2'-fluoroadenosine-3'-phosphate
  modified_base 10: mod_base = OTHER; note = 2'-deoxy-2'-fluoroadenosine-3'-phosphate
  modified_base 11: mod_base = OTHER; note = 2'-deoxy-2'-fluorouridine-3'-phosphate
  modified_base 12: mod_base = OTHER; note = 2'-O-methylguanosine-3'-phosphate
  modified_base 13: mod_base = OTHER; note = 2'-O-methylcytidine-3'-phosphate
  modified_base 14: mod_base = OTHER; note = 2'-O-methyluridine-3'-phosphate
  modified_base 15: mod_base = OTHER; note = 2'-O-methyluridine-3'-phosphate
  modified_base 16: mod_base = OTHER; note = 2'-O-methylguanosine-3'-phosphate
  modified_base 17: mod_base = OTHER; note = 2'-O-methyladenosine-3'-phosphate
  modified_base 18: mod_base = OTHER; note = 2'-O-methyluridine-3'-phosphate
  modified_base 19: mod_base = OTHER; note = 2'-O-methylguanosine-3'-phosphate
  modified_base 20: mod_base = OTHER; note = 2'-O-methyladenosine-3'-phosphate
  modified_base 21: mod_base = OTHER; note = 2'-O-methyladenosine
gctcctgaaatgcttgatgaa

SEQ ID NO: 3329 - RNA, 21 nt, synthetic construct
  source 1..21: mol_type = other RNA
  modified_base 1: mod_base = OTHER; note = 2'-O-methylcytidine-3'-phosphate
  modified_base 2: mod_base = OTHER; note = 2'-O-methyluridine-3'-phosphate
  modified_base 3: mod_base = OTHER; note = 2'-O-methylcytidine-3'-phosphate
  modified_base 4: mod_base = OTHER; note = 2'-O-methylcytidine-3'-phosphate
  modified_base 5: mod_base = OTHER; note = 2'-O-methyluridine-3'-phosphate
  modified_base 6: mod_base = OTHER; note = 2'-O-methylguanosine-3'-phosphate
  modified_base 7: mod_base = OTHER; note = 2'-deoxy-2'-fluoroadenosine-3'-phosphate
  modified_base 8: mod_base = OTHER; note = 2'-O-methyladenosine-3'-phosphate
  modified_base 9: mod_base = OTHER; note = 2'-deoxy-2'-fluoroadenosine-3'-phosphate
  modified_base 10: mod_base = OTHER; note = 2'-deoxy-2'-fluorouridine-3'-phosphate
  modified_base 11: mod_base = OTHER; note = 2'-deoxy-2'-fluoroguanosine-3'-phosphate
  modified_base 12: mod_base = OTHER; note = 2'-O-methylcytidine-3'-phosphate
  modified_base 13: mod_base = OTHER; note = 2'-O-methyluridine-3'-phosphate
  modified_base 14: mod_base = OTHER; note = 2'-O-methyluridine-3'-phosphate
  modified_base 15: mod_base = OTHER; note = 2'-O-methylguanosine-3'-phosphate
  modified_base 16: mod_base = OTHER; note = 2'-O-methyladenosine-3'-phosphate
  modified_base 17: mod_base = OTHER; note = 2'-O-methyluridine-3'-phosphate
  modified_base 18: mod_base = OTHER; note = 2'-O-methylguanosine-3'-phosphate
  modified_base 19: mod_base = OTHER; note = 2'-O-methyladenosine-3'-phosphate
  modified_base 20: mod_base = OTHER; note = 2'-O-methyluridine-3'-phosphate
  modified_base 21: mod_base = OTHER; note = 2'-O-methyladenosine
ctcctgaaatgcttgatgata

SEQ ID NO: 3330 - RNA, 21 nt, synthetic construct
  source 1..21: mol_type = other RNA
  modified_base 1: mod_base = OTHER; note = 2'-O-methyluridine-3'-phosphate
  modified_base 2: mod_base = OTHER; note = 2'-O-methylcytidine-3'-phosphate
  modified_base 3: mod_base = OTHER; note = 2'-O-methylcytidine-3'-phosphate
  modified_base 4: mod_base = OTHER; note = 2'-O-methyluridine-3'-phosphate
  modified_base 5: mod_base = OTHER; note = 2'-O-methylguanosine-3'-phosphate
  modified_base 6: mod_base = OTHER; note = 2'-O-methyladenosine-3'-phosphate
  modified_base 7: mod_base = OTHER; note = 2'-deoxy-2'-fluoroadenosine-3'-phosphate
  modified_base 8: mod_base = OTHER; note = 2'-O-methyladenosine-3'-phosphate
  modified_base 9: mod_base = OTHER; note = 2'-deoxy-2'-fluorouridine-3'-phosphate
  modified_base 10: mod_base = OTHER; note = 2'-deoxy-2'-fluoroguanosine-3'-phosphate
  modified_base 11: mod_base = OTHER; note = 2'-deoxy-2'-fluorocytidine-3'-phosphate
  modified_base 12: mod_base = OTHER; note = 2'-O-methyluridine-3'-phosphate
  modified_base 13: mod_base = OTHER; note = 2'-O-methyluridine-3'-phosphate
  modified_base 14: mod_base = OTHER; note = 2'-O-methylguanosine-3'-phosphate
  modified_base 15: mod_base = OTHER; note = 2'-O-methyladenosine-3'-phosphate
  modified_base 16: mod_base = OTHER; note = 2'-O-methyluridine-3'-phosphate
  modified_base 17: mod_base = OTHER; note = 2'-O-methylguanosine-3'-phosphate
  modified_base 18: mod_base = OTHER; note = 2'-O-methyladenosine-3'-phosphate
  modified_base 19: mod_base = OTHER; note = 2'-O-methyluridine-3'-phosphate
  modified_base 20: mod_base = OTHER; note = 2'-O-methyladenosine-3'-phosphate
  modified_base 21: mod_base = OTHER; note = 2'-O-methyladenosine
tcctgaaatgcttgatgataa

SEQ ID NO: 3331 - RNA, 21 nt, synthetic construct
  source 1..21: mol_type = other RNA
  modified_base 1: mod_base = OTHER; note = 2'-O-methylcytidine-3'-phosphate
  modified_base 2: mod_base = OTHER; note = 2'-O-methylcytidine-3'-phosphate
  modified_base 3: mod_base = OTHER; note = 2'-O-methyluridine-3'-phosphate
  modified_base 4: mod_base = OTHER; note = 2'-O-methylguanosine-3'-phosphate
  modified_base 5: mod_base = OTHER; note = 2'-O-methyladenosine-3'-phosphate
  modified_base 6: mod_base = OTHER; note = 2'-O-methyladenosine-3'-phosphate
  modified_base 7: mod_base = OTHER; note = 2'-deoxy-2'-fluoroadenosine-3'-phosphate
  modified_base 8: mod_base = OTHER; note = 2'-O-methyluridine-3'-phosphate
  modified_base 9: mod_base = OTHER; note = 2'-deoxy-2'-fluoroguanosine-3'-phosphate
  modified_base 10: mod_base = OTHER; note = 2'-deoxy-2'-fluorocytidine-3'-phosphate
  modified_base 11: mod_base = OTHER; note = 2'-deoxy-2'-fluorouridine-3'-phosphate
  modified_base 12: mod_base = OTHER; note = 2'-O-methyluridine-3'-phosphate
  modified_base 13: mod_base = OTHER; note = 2'-O-methylguanosine-3'-phosphate
  modified_base 14: mod_base = OTHER; note = 2'-O-methyladenosine-3'-phosphate
  modified_base 15: mod_base = OTHER; note = 2'-O-methyluridine-3'-phosphate
  modified_base 16: mod_base = OTHER; note = 2'-O-methylguanosine-3'-phosphate
  modified_base 17: mod_base = OTHER; note = 2'-O-methyladenosine-3'-phosphate
  modified_base 18: mod_base = OTHER; note = 2'-O-methyluridine-3'-phosphate
  modified_base 19: mod_base = OTHER; note = 2'-O-methyladenosine-3'-phosphate
  modified_base 20: mod_base = OTHER; note = 2'-O-methylcytidine-3'-phosphate
  modified_base 21: mod_base = OTHER; note = 2'-O-methyladenosine
cctgaaatgcttgatgataca

SEQ ID NO: 3332 - RNA, 21 nt, synthetic construct
  source 1..21: mol_type = other RNA
  modified_base 1: mod_base = OTHER; note = 2'-O-methylcytidine-3'-phosphate
  modified_base 2: mod_base = OTHER; note = 2'-O-methyluridine-3'-phosphate
  modified_base 3: mod_base = OTHER; note = 2'-O-methylguanosine-3'-phosphate
  modified_base 4: mod_base = OTHER; note = 2'-O-methyladenosine-3'-phosphate
  modified_base 5: mod_base = OTHER; note = 2'-O-methyladenosine-3'-phosphate
  modified_base 6: mod_base = OTHER; note = 2'-O-methyladenosine-3'-phosphate
  modified_base 7: mod_base = OTHER; note = 2'-deoxy-2'-fluorouridine-3'-phosphate
  modified_base 8: mod_base = OTHER; note = 2'-O-methylguanosine-3'-phosphate
  modified_base 9: mod_base = OTHER; note = 2'-deoxy-2'-fluorocytidine-3'-phosphate
  modified_base 10: mod_base = OTHER; note = 2'-deoxy-2'-fluorouridine-3'-phosphate
  modified_base 11: mod_base = OTHER; note = 2'-deoxy-2'-fluorouridine-3'-phosphate
  modified_base 12: mod_base = OTHER; note = 2'-O-methylguanosine-3'-phosphate
  modified_base 13: mod_base = OTHER; note = 2'-O-methyladenosine-3'-phosphate
  modified_base 14: mod_base = OTHER; note = 2'-O-methyluridine-3'-phosphate
  modified_base 15: mod_base = OTHER; note = 2'-O-methylguanosine-3'-phosphate
  modified_base 16: mod_base = OTHER; note = 2'-O-methyladenosine-3'-phosphate
  modified_base 17: mod_base = OTHER; note = 2'-O-methyluridine-3'-phosphate
  modified_base 18: mod_base = OTHER; note = 2'-O-methyladenosine-3'-phosphate
  modified_base 19: mod_base = OTHER; note = 2'-O-methylcytidine-3'-phosphate
  modified_base 20: mod_base = OTHER; note = 2'-O-methyladenosine-3'-phosphate
  modified_base 21: mod_base = OTHER; note = 2'-O-methyladenosine
ctgaaatgcttgatgatacaa

SEQ ID NO: 3333 - RNA, 21 nt, synthetic construct
  source 1..21: mol_type = other RNA
  modified_base 1: mod_base = OTHER; note = 2'-O-methyluridine-3'-phosphate
  modified_base 2: mod_base = OTHER; note = 2'-O-methylguanosine-3'-phosphate
  modified_base 3: mod_base = OTHER; note = 2'-O-methyladenosine-3'-phosphate
  modified_base 4: mod_base = OTHER; note = 2'-O-methyladenosine-3'-phosphate
  modified_base 5: mod_base = OTHER; note = 2'-O-methyladenosine-3'-phosphate
  modified_base 6: mod_base = OTHER; note = 2'-O-methyluridine-3'-phosphate
  modified_base 7: mod_base = OTHER; note = 2'-deoxy-2'-fluoroguanosine-3'-phosphate
  modified_base 8: mod_base = OTHER; note = 2'-O-methylcytidine-3'-phosphate
  modified_base 9: mod_base = OTHER; note = 2'-deoxy-2'-fluorouridine-3'-phosphate
  modified_base 10: mod_base = OTHER; note = 2'-deoxy-2'-fluorouridine-3'-phosphate
  modified_base 11: mod_base = OTHER; note = 2'-deoxy-2'-fluoroguanosine-3'-phosphate
  modified_base 12: mod_base = OTHER; note = 2'-O-methyladenosine-3'-phosphate
  modified_base 13: mod_base = OTHER; note = 2'-O-methyluridine-3'-phosphate
  modified_base 14: mod_base = OTHER; note = 2'-O-methylguanosine-3'-phosphate
  modified_base 15: mod_base = OTHER; note = 2'-O-methyladenosine-3'-phosphate
  modified_base 16: mod_base = OTHER; note = 2'-O-methyluridine-3'-phosphate
  modified_base 17: mod_base = OTHER; note = 2'-O-methyladenosine-3'-phosphate
  modified_base 18: mod_base = OTHER; note = 2'-O-methylcytidine-3'-phosphate
  modified_base 19: mod_base = OTHER; note = 2'-O-methyladenosine-3'-phosphate
  modified_base 20: mod_base = OTHER; note = 2'-O-methyladenosine-3'-phosphate
  modified_base 21: mod_base = OTHER; note = 2'-O-methyladenosine
tgaaatgcttgatgatacaaa

SEQ ID NO: 3334 - RNA, 21 nt, synthetic construct
  source 1..21: mol_type = other RNA
  modified_base 1: mod_base = OTHER; note = 2'-O-methylguanosine-3'-phosphate
  modified_base 2: mod_base = OTHER; note = 2'-O-methyladenosine-3'-phosphate
  modified_base 3: mod_base = OTHER; note = 2'-O-methyladenosine-3'-phosphate
  modified_base 4: mod_base = OTHER; note = 2'-O-methyladenosine-3'-phosphate
  modified_base 5: mod_base = OTHER; note = 2'-O-methyluridine-3'-phosphate
  modified_base 6: mod_base = OTHER; note = 2'-O-methylguanosine-3'-phosphate
  modified_base 7: mod_base = OTHER; note = 2'-deoxy-2'-fluorocytidine-3'-phosphate
  modified_base 8: mod_base = OTHER; note = 2'-O-methyluridine-3'-phosphate
  modified_base 9: mod_base = OTHER; note = 2'-deoxy-2'-fluorouridine-3'-phosphate
  modified_base 10: mod_base = OTHER; note = 2'-deoxy-2'-fluoroguanosine-3'-phosphate
  modified_base 11: mod_base = OTHER; note = 2'-deoxy-2'-fluoroadenosine-3'-phosphate
  modified_base 12: mod_base = OTHER; note = 2'-O-methyluridine-3'-phosphate
  modified_base 13: mod_base = OTHER; note = 2'-O-methylguanosine-3'-phosphate
  modified_base 14: mod_base = OTHER; note = 2'-O-methyladenosine-3'-phosphate
  modified_base 15: mod_base = OTHER; note = 2'-O-methyluridine-3'-phosphate
  modified_base 16: mod_base = OTHER; note = 2'-O-methyladenosine-3'-phosphate
  modified_base 17: mod_base = OTHER; note = 2'-O-methylcytidine-3'-phosphate
  modified_base 18: mod_base = OTHER; note = 2'-O-methyladenosine-3'-phosphate
  modified_base 19: mod_base = OTHER; note = 2'-O-methyladenosine-3'-phosphate
  modified_base 20: mod_base = OTHER; note = 2'-O-methyluridine-3'-phosphate
  modified_base 21: mod_base = OTHER; note = 2'-O-methyladenosine
gaaatgcttgatgatacaata

SEQ ID NO: 3335 - RNA, 21 nt, synthetic construct
  source 1..21: mol_type = other RNA
  modified_base 1: mod_base = OTHER; note = 2'-O-methyladenosine-3'-phosphate
  modified_base 2: mod_base = OTHER; note = 2'-O-methyladenosine-3'-phosphate
  modified_base 3: mod_base = OTHER; note = 2'-O-methyladenosine-3'-phosphate
  modified_base 4: mod_base = OTHER; note = 2'-O-methyluridine-3'-phosphate
  modified_base 5: mod_base = OTHER; note = 2'-O-methylguanosine-3'-phosphate
  modified_base 6: mod_base = OTHER; note = 2'-O-methylcytidine-3'-phosphate
  modified_base 7: mod_base = OTHER; note = 2'-deoxy-2'-fluorouridine-3'-phosphate
  modified_base 8: mod_base = OTHER; note = 2'-O-methyluridine-3'-phosphate
  modified_base 9: mod_base = OTHER; note = 2'-deoxy-2'-fluoroguanosine-3'-phosphate
  modified_base 10: mod_base = OTHER; note = 2'-deoxy-2'-fluoroadenosine-3'-phosphate
  modified_base 11: mod_base = OTHER; note = 2'-deoxy-2'-fluorouridine-3'-phosphate
  modified_base 12: mod_base = OTHER; note = 2'-O-methylguanosine-3'-phosphate
  modified_base 13: mod_base = OTHER; note = 2'-O-methyladenosine-3'-phosphate
  modified_base 14: mod_base = OTHER; note = 2'-O-methyluridine-3'-phosphate
  modified_base 15: mod_base = OTHER; note = 2'-O-methyladenosine-3'-phosphate
  modified_base 16: mod_base = OTHER; note = 2'-O-methylcytidine-3'-phosphate
  modified_base 17: mod_base = OTHER; note = 2'-O-methyladenosine-3'-phosphate
  modified_base 18: mod_base = OTHER; note = 2'-O-methyladenosine-3'-phosphate
  modified_base 19: mod_base = OTHER; note = 2'-O-methyluridine-3'-phosphate
  modified_base 20: mod_base = OTHER; note = 2'-O-methylguanosine-3'-phosphate
  modified_base 21: mod_base = OTHER; note = 2'-O-methyladenosine
aaatgcttgatgatacaatga

SEQ ID NO: 3336 - RNA, 21 nt, synthetic construct
  source 1..21: mol_type = other RNA
  modified_base 1: mod_base = OTHER; note = 2'-O-methyladenosine-3'-phosphate
  modified_base 2: mod_base = OTHER; note = 2'-O-methyladenosine-3'-phosphate
  modified_base 3: mod_base = OTHER; note = 2'-O-methyluridine-3'-phosphate
  modified_base 4: mod_base = OTHER; note = 2'-O-methylguanosine-3'-phosphate
  modified_base 5: mod_base = OTHER; note = 2'-O-methylcytidine-3'-phosphate
  modified_base 6: mod_base = OTHER; note = 2'-O-methyluridine-3'-phosphate
  modified_base 7: mod_base = OTHER; note = 2'-deoxy-2'-fluorouridine-3'-phosphate
  modified_base 8: mod_base = OTHER; note = 2'-O-methylguanosine-3'-phosphate
  modified_base 9: mod_base = OTHER; note = 2'-deoxy-2'-fluoroadenosine-3'-phosphate
  modified_base 10: mod_base = OTHER; note = 2'-deoxy-2'-fluorouridine-3'-phosphate
  modified_base 11: mod_base = OTHER; note = 2'-deoxy-2'-fluoroguanosine-3'-phosphate
  modified_base 12: mod_base = OTHER; note = 2'-O-methyladenosine-3'-phosphate
  modified_base 13: mod_base = OTHER; note = 2'-O-methyluridine-3'-phosphate
  modified_base 14: mod_base = OTHER; note = 2'-O-methyladenosine-3'-phosphate
  modified_base 15: mod_base = OTHER; note = 2'-O-methylcytidine-3'-phosphate
  modified_base 16: mod_base = OTHER; note = 2'-O-methyladenosine-3'-phosphate
  modified_base 17: mod_base = OTHER; note = 2'-O-methyladenosine-3'-phosphate
  modified_base 18: mod_base = OTHER; note = 2'-O-methyluridine-3'-phosphate
  modified_base 19: mod_base = OTHER; note = 2'-O-methylguanosine-3'-phosphate
  modified_base 20: mod_base = OTHER; note = 2'-O-methyladenosine-3'-phosphate
  modified_base 21: mod_base = OTHER; note = 2'-O-methyladenosine
aatgcttgatgatacaatgaa

SEQ ID NO: 3337 - RNA, 21 nt, synthetic construct
  source 1..21: mol_type = other RNA
  modified_base 1: mod_base = OTHER; note = 2'-O-methyladenosine-3'-phosphate
  modified_base 2: mod_base = OTHER; note = 2'-O-methyluridine-3'-phosphate
  modified_base 3: mod_base = OTHER; note = 2'-O-methylguanosine-3'-phosphate
  modified_base 4: mod_base = OTHER; note = 2'-O-methylcytidine-3'-phosphate
  modified_base 5: mod_base = OTHER; note = 2'-O-methyluridine-3'-phosphate
  modified_base 6: mod_base = OTHER; note = 2'-O-methyluridine-3'-phosphate
  modified_base 7: mod_base = OTHER; note = 2'-deoxy-2'-fluoroguanosine-3'-phosphate
  modified_base 8: mod_base = OTHER; note = 2'-O-methyladenosine-3'-phosphate
  modified_base 9: mod_base = OTHER; note = 2'-deoxy-2'-fluorouridine-3'-phosphate
  modified_base 10: mod_base = OTHER; note = 2'-deoxy-2'-fluoroguanosine-3'-phosphate
  modified_base 11: mod_base = OTHER; note = 2'-deoxy-2'-fluoroadenosine-3'-phosphate
  modified_base 12: mod_base = OTHER; note = 2'-O-methyluridine-3'-phosphate
  modified_base 13: mod_base = OTHER; note = 2'-O-methyladenosine-3'-phosphate
  modified_base 14: mod_base = OTHER; note = 2'-O-methylcytidine-3'-phosphate
  modified_base 15: mod_base = OTHER; note = 2'-O-methyladenosine-3'-phosphate
  modified_base 16: mod_base = OTHER; note = 2'-O-methyladenosine-3'-phosphate
  modified_base 17: mod_base = OTHER; note = 2'-O-methyluridine-3'-phosphate
  modified_base 18: mod_base = OTHER; note = 2'-O-methylguanosine-3'-phosphate
  modified_base 19: mod_base = OTHER; note = 2'-O-methyladenosine-3'-phosphate
  modified_base 20: mod_base = OTHER; note = 2'-O-methyladenosine-3'-phosphate
  modified_base 21: mod_base = OTHER; note = 2'-O-methyladenosine
atgcttgatgatacaatgaaa

SEQ ID NO: 3338 - RNA, 21 nt, synthetic construct
  source 1..21: mol_type = other RNA
  modified_base 1: mod_base = OTHER; note = 2'-O-methyluridine-3'-phosphate
  modified_base 2: mod_base = OTHER; note = 2'-O-methylguanosine-3'-phosphate
  modified_base 3: mod_base = OTHER; note = 2'-O-methylcytidine-3'-phosphate
  modified_base 4: mod_base = OTHER; note = 2'-O-methyluridine-3'-phosphate
  modified_base 5: mod_base = OTHER; note = 2'-O-methyluridine-3'-phosphate
  modified_base 6: mod_base = OTHER; note = 2'-O-methylguanosine-3'-phosphate
  modified_base 7: mod_base = OTHER; note = 2'-deoxy-2'-fluoroadenosine-3'-phosphate
  modified_base 8: mod_base = OTHER; note = 2'-O-methyluridine-3'-phosphate
  modified_base 9: mod_base = OTHER; note = 2'-deoxy-2'-fluoroguanosine-3'-phosphate
  modified_base 10: mod_base = OTHER; note = 2'-deoxy-2'-fluoroadenosine-3'-phosphate
  modified_base 11: mod_base = OTHER; note = 2'-deoxy-2'-fluorouridine-3'-phosphate
  modified_base 12: mod_base = OTHER; note = 2'-O-methyladenosine-3'-phosphate
  modified_base 13: mod_base = OTHER; note = 2'-O-methylcytidine-3'-phosphate
  modified_base 14: mod_base = OTHER; note = 2'-O-methyladenosine-3'-phosphate
  modified_base 15: mod_base = OTHER; note = 2'-O-methyladenosine-3'-phosphate
  modified_base 16: mod_base = OTHER; note = 2'-O-methyluridine-3'-phosphate
  modified_base 17: mod_base = OTHER; note = 2'-O-methylguanosine-3'-phosphate
  modified_base 18: mod_base = OTHER; note = 2'-O-methyladenosine-3'-phosphate
  modified_base 19: mod_base = OTHER; note = 2'-O-methyladenosine-3'-phosphate
  modified_base 20: mod_base = OTHER; note = 2'-O-methyluridine-3'-phosphate
  modified_base 21: mod_base = OTHER; note = 2'-O-methyladenosine
tgcttgatgatacaatgaata

SEQ ID NO: 3339 - RNA, 21 nt, synthetic construct
  source 1..21: mol_type = other RNA
  modified_base 1: mod_base = OTHER; note = 2'-O-methylguanosine-3'-phosphate
  modified_base 2: mod_base = OTHER; note = 2'-O-methylcytidine-3'-phosphate
  modified_base 3: mod_base = OTHER; note = 2'-O-methyluridine-3'-phosphate
  modified_base 4: mod_base = OTHER; note = 2'-O-methyluridine-3'-phosphate
  modified_base 5: mod_base = OTHER; note = 2'-O-methylguanosine-3'-phosphate
  modified_base 6: mod_base = OTHER; note = 2'-O-methyladenosine-3'-phosphate
  modified_base 7: mod_base = OTHER; note = 2'-deoxy-2'-fluorouridine-3'-phosphate
  modified_base 8: mod_base = OTHER; note = 2'-O-methylguanosine-3'-phosphate
  modified_base 9: mod_base = OTHER; note = 2'-deoxy-2'-fluoroadenosine-3'-phosphate
  modified_base 10: mod_base = OTHER; note = 2'-deoxy-2'-fluorouridine-3'-phosphate
  modified_base 11: mod_base = OTHER; note = 2'-deoxy-2'-fluoroadenosine-3'-phosphate
  modified_base 12: mod_base = OTHER; note = 2'-O-methylcytidine-3'-phosphate
  modified_base 13: mod_base = OTHER; note = 2'-O-methyladenosine-3'-phosphate
  modified_base 14: mod_base = OTHER; note = 2'-O-methyladenosine-3'-phosphate
  modified_base 15: mod_base = OTHER; note = 2'-O-methyluridine-3'-phosphate
  modified_base 16: mod_base = OTHER; note = 2'-O-methylguanosine-3'-phosphate
  modified_base 17: mod_base = OTHER; note = 2'-O-methyladenosine-3'-phosphate
  modified_base 18: mod_base = OTHER; note = 2'-O-methyladenosine-3'-phosphate
  modified_base 19: mod_base = OTHER; note = 2'-O-methyluridine-3'-phosphate
  modified_base 20: mod_base = OTHER; note = 2'-O-methylguanosine-3'-phosphate
  modified_base 21: mod_base = OTHER; note = 2'-O-methyladenosine
gcttgatgatacaatgaatga

SEQ ID NO: 3340 - RNA, 21 nt, synthetic construct
  source 1..21: mol_type = other RNA
  modified_base 1: mod_base = OTHER; note = 2'-O-methylcytidine-3'-phosphate
  modified_base 2: mod_base = OTHER; note = 2'-O-methyluridine-3'-phosphate
  modified_base 3: mod_base = OTHER; note = 2'-O-methyluridine-3'-phosphate
  modified_base 4: mod_base = OTHER; note = 2'-O-methylguanosine-3'-phosphate
  modified_base 5: mod_base = OTHER; note = 2'-O-methyladenosine-3'-phosphate
  modified_base 6: mod_base = OTHER; note = 2'-O-methyluridine-3'-phosphate
  modified_base 7: mod_base = OTHER; note = 2'-deoxy-2'-fluoroguanosine-3'-phosphate
  modified_base 8: mod_base = OTHER; note = 2'-O-methyladenosine-3'-phosphate
  modified_base 9: mod_base = OTHER; note = 2'-deoxy-2'-fluorouridine-3'-phosphate
  modified_base 10: mod_base = OTHER; note = 2'-deoxy-2'-fluoroadenosine-3'-phosphate
  modified_base 11: mod_base = OTHER; note = 2'-deoxy-2'-fluorocytidine-3'-phosphate
  modified_base 12: mod_base = OTHER; note = 2'-O-methyladenosine-3'-phosphate
  modified_base 13: mod_base = OTHER; note = 2'-O-methyladenosine-3'-phosphate
  modified_base 14: mod_base = OTHER; note = 2'-O-methyluridine-3'-phosphate
  modified_base 15: mod_base = OTHER; note = 2'-O-methylguanosine-3'-phosphate
  modified_base 16: mod_base = OTHER; note = 2'-O-methyladenosine-3'-phosphate
  modified_base 17: mod_base = OTHER; note = 2'-O-methyladenosine-3'-phosphate
  modified_base 18: mod_base = OTHER; note = 2'-O-methyluridine-3'-phosphate
  modified_base 19: mod_base = OTHER; note = 2'-O-methylguanosine-3'-phosphate
  modified_base 20: mod_base = OTHER; note = 2'-O-methyluridine-3'-phosphate
  modified_base 21: mod_base = OTHER; note = 2'-O-methyladenosine
cttgatgatacaatgaatgta

SEQ ID NO: 3341 - RNA, 21 nt, synthetic construct
  source 1..21: mol_type = other RNA
  modified_base 1: mod_base = OTHER; note = 2'-O-methyluridine-3'-phosphate
  modified_base 2: mod_base = OTHER; note = 2'-O-methyluridine-3'-phosphate
  modified_base 3: mod_base = OTHER; note = 2'-O-methylguanosine-3'-phosphate
  modified_base 4: mod_base = OTHER; note = 2'-O-methyladenosine-3'-phosphate
  modified_base 5: mod_base = OTHER; note = 2'-O-methyluridine-3'-phosphate
  modified_base 6: mod_base = OTHER; note = 2'-O-methylguanosine-3'-phosphate
  modified_base 7: mod_base = OTHER; note = 2'-deoxy-2'-fluoroadenosine-3'-phosphate
  modified_base 8: mod_base = OTHER; note = 2'-O-methyluridine-3'-phosphate
  modified_base 9: mod_base = OTHER; note = 2'-deoxy-2'-fluoroadenosine-3'-phosphate
  modified_base 10: mod_base = OTHER; note = 2'-deoxy-2'-fluorocytidine-3'-phosphate
  modified_base 11: mod_base = OTHER; note = 2'-deoxy-2'-fluoroadenosine-3'-phosphate
  modified_base 12: mod_base = OTHER; note = 2'-O-methyladenosine-3'-phosphate
  modified_base 13: mod_base = OTHER; note = 2'-O-methyluridine-3'-phosphate
  modified_base 14: mod_base = OTHER; note = 2'-O-methylguanosine-3'-phosphate
  modified_base 15: mod_base = OTHER; note = 2'-O-methyladenosine-3'-phosphate
  modified_base 16: mod_base = OTHER; note = 2'-O-methyladenosine-3'-phosphate
  modified_base 17: mod_base = OTHER; note = 2'-O-methyluridine-3'-phosphate
  modified_base 18: mod_base = OTHER; note = 2'-O-methylguanosine-3'-phosphate
  modified_base 19: mod_base = OTHER; note = 2'-O-methyluridine-3'-phosphate
  modified_base 20: mod_base = OTHER; note = 2'-O-methylguanosine-3'-phosphate
  modified_base 21: mod_base = OTHER; note = 2'-O-methyladenosine
ttgatgatacaatgaatgtga

SEQ ID NO: 3342 - RNA, 21 nt, synthetic construct
  source 1..21: mol_type = other RNA
  modified_base 1: mod_base = OTHER; note = 2'-O-methyluridine-3'-phosphate
  modified_base 2: mod_base = OTHER; note = 2'-O-methylguanosine-3'-phosphate
  modified_base 3: mod_base = OTHER; note = 2'-O-methyladenosine-3'-phosphate
  modified_base 4: mod_base = OTHER; note = 2'-O-methyluridine-3'-phosphate
  modified_base 5: mod_base = OTHER; note = 2'-O-methylguanosine-3'-phosphate
  modified_base 6: mod_base = OTHER; note = 2'-O-methyladenosine-3'-phosphate
  modified_base 7: mod_base = OTHER; note = 2'-deoxy-2'-fluorouridine-3'-phosphate
  modified_base 8: mod_base = OTHER; note = 2'-O-methyladenosine-3'-phosphate
  modified_base 9: mod_base = OTHER; note = 2'-deoxy-2'-fluorocytidine-3'-phosphate
  modified_base 10: mod_base = OTHER; note = 2'-deoxy-2'-fluoroadenosine-3'-phosphate
  modified_base 11: mod_base = OTHER; note = 2'-deoxy-2'-fluoroadenosine-3'-phosphate
  modified_base 12: mod_base = OTHER; note = 2'-O-methyluridine-3'-phosphate
  modified_base 13: mod_base = OTHER; note = 2'-O-methylguanosine-3'-phosphate
  modified_base 14: mod_base = OTHER; note = 2'-O-methyladenosine-3'-phosphate
  modified_base 15: mod_base = OTHER; note = 2'-O-methyladenosine-3'-phosphate
  modified_base 16: mod_base = OTHER; note = 2'-O-methyluridine-3'-phosphate
  modified_base 17: mod_base = OTHER; note = 2'-O-methylguanosine-3'-phosphate
  modified_base 18: mod_base = OTHER; note = 2'-O-methyluridine-3'-phosphate
  modified_base 19: mod_base = OTHER; note = 2'-O-methylguanosine-3'-phosphate
  modified_base 20: mod_base = OTHER; note = 2'-O-methyladenosine-3'-phosphate
  modified_base 21: mod_base = OTHER; note = 2'-O-methyladenosine
tgatgatacaatgaatgtgaa

SEQ ID NO: 3343 - RNA, 21 nt, synthetic construct
  source 1..21: mol_type = other RNA
  modified_base 1: mod_base = OTHER; note = 2'-O-methylguanosine-3'-phosphate
  modified_base 2: mod_base = OTHER; note = 2'-O-methyladenosine-3'-phosphate
  modified_base 3: mod_base = OTHER; note = 2'-O-methyluridine-3'-phosphate
  modified_base 4: mod_base = OTHER; note = 2'-O-methylguanosine-3'-phosphate
  modified_base 5: mod_base = OTHER; note = 2'-O-methyladenosine-3'-phosphate
  modified_base 6: mod_base = OTHER; note = 2'-O-methyluridine-3'-phosphate
  modified_base 7: mod_base = OTHER; note = 2'-deoxy-2'-fluoroadenosine-3'-phosphate
  modified_base 8: mod_base = OTHER; note = 2'-O-methylcytidine-3'-phosphate
  modified_base 9: mod_base = OTHER; note = 2'-deoxy-2'-fluoroadenosine-3'-phosphate
  modified_base 10: mod_base = OTHER; note = 2'-deoxy-2'-fluoroadenosine-3'-phosphate
  modified_base 11: mod_base = OTHER; note = 2'-deoxy-2'-fluorouridine-3'-phosphate
  modified_base 12: mod_base = OTHER; note = 2'-O-methylguanosine-3'-phosphate
  modified_base 13: mod_base = OTHER; note = 2'-O-methyladenosine-3'-phosphate
  modified_base 14: mod_base = OTHER; note = 2'-O-methyladenosine-3'-phosphate
  modified_base 15: mod_base = OTHER; note = 2'-O-methyluridine-3'-phosphate
  modified_base 16: mod_base = OTHER; note = 2'-O-methylguanosine-3'-phosphate
  modified_base 17: mod_base = OTHER; note = 2'-O-methyluridine-3'-phosphate
  modified_base 18: mod_base = OTHER; note = 2'-O-methylguanosine-3'-phosphate
  modified_base 19: mod_base = OTHER; note = 2'-O-methyladenosine-3'-phosphate
  modified_base 20: mod_base = OTHER; note = 2'-O-methyladenosine-3'-phosphate
  modified_base 21: mod_base = OTHER; note = 2'-O-methyladenosine
gatgatacaatgaatgtgaaa

SEQ ID NO: 3344 - RNA, 21 nt, synthetic construct
  source 1..21: mol_type = other RNA
  modified_base 1: mod_base = OTHER; note = 2'-O-methyladenosine-3'-phosphate
  modified_base 2: mod_base = OTHER; note = 2'-O-methyluridine-3'-phosphate
  modified_base 3: mod_base = OTHER; note = 2'-O-methylguanosine-3'-phosphate
  modified_base 4: mod_base = OTHER; note = 2'-O-methyladenosine-3'-phosphate
  modified_base 5: mod_base = OTHER; note = 2'-O-methyluridine-3'-phosphate
  modified_base 6: mod_base = OTHER; note = 2'-O-methyladenosine-3'-phosphate
  modified_base 7: mod_base = OTHER; note = 2'-deoxy-2'-fluorocytidine-3'-phosphate
  modified_base 8: mod_base = OTHER; note = 2'-O-methyladenosine-3'-phosphate
  modified_base 9: mod_base = OTHER; note = 2'-deoxy-2'-fluoroadenosine-3'-phosphate
  modified_base 10: mod_base = OTHER; note = 2'-deoxy-2'-fluorouridine-3'-phosphate
  modified_base 11: mod_base = OTHER; note = 2'-deoxy-2'-fluoroguanosine-3'-phosphate
  modified_base 12: mod_base = OTHER; note = 2'-O-methyladenosine-3'-phosphate
  modified_base 13: mod_base = OTHER; note = 2'-O-methyladenosine-3'-phosphate
  modified_base 14: mod_base = OTHER; note = 2'-O-methyluridine-3'-phosphate
  modified_base 15: mod_base = OTHER; note = 2'-O-methylguanosine-3'-phosphate
  modified_base 16: mod_base = OTHER; note = 2'-O-methyluridine-3'-phosphate
  modified_base 17: mod_base = OTHER; note = 2'-O-methylguanosine-3'-phosphate
  modified_base 18: mod_base = OTHER; note = 2'-O-methyladenosine-3'-phosphate
  modified_base 19: mod_base = OTHER; note = 2'-O-methyladenosine-3'-phosphate
  modified_base 20: mod_base = OTHER; note = 2'-O-methyluridine-3'-phosphate
  modified_base 21: mod_base = OTHER; note = 2'-O-methyladenosine
atgatacaatgaatgtgaata

SEQ ID NO: 3345 - RNA, 21 nt, synthetic construct
  source 1..21: mol_type = other RNA
  modified_base 1: mod_base = OTHER; note = 2'-O-methyluridine-3'-phosphate
  modified_base 2: mod_base = OTHER; note = 2'-O-methylguanosine-3'-phosphate
  modified_base 3: mod_base = OTHER; note = 2'-O-methyladenosine-3'-phosphate
  modified_base 4: mod_base = OTHER; note = 2'-O-methyluridine-3'-phosphate
  modified_base 5: mod_base = OTHER; note = 2'-O-methyladenosine-3'-phosphate
  modified_base 6: mod_base = OTHER; note = 2'-O-methylcytidine-3'-phosphate
  modified_base 7: mod_base = OTHER; note = 2'-deoxy-2'-fluoroadenosine-3'-phosphate
  modified_base 8: mod_base = OTHER; note = 2'-O-methyladenosine-3'-phosphate
  modified_base 9: mod_base = OTHER; note = 2'-deoxy-2'-fluorouridine-3'-phosphate
  modified_base 10: mod_base = OTHER; note = 2'-deoxy-2'-fluoroguanosine-3'-phosphate
  modified_base 11: mod_base = OTHER; note = 2'-deoxy-2'-fluoroadenosine-3'-phosphate
  modified_base 12: mod_base = OTHER; note = 2'-O-methyladenosine-3'-phosphate
  modified_base 13: mod_base = OTHER; note = 2'-O-methyluridine-3'-phosphate
  modified_base 14: mod_base = OTHER; note = 2'-O-methylguanosine-3'-phosphate
  modified_base 15: mod_base = OTHER; note = 2'-O-methyluridine-3'-phosphate
  modified_base 16: mod_base = OTHER; note = 2'-O-methylguanosine-3'-phosphate
  modified_base 17: mod_base = OTHER; note = 2'-O-methyladenosine-3'-phosphate
  modified_base 18: mod_base = OTHER; note = 2'-O-methyladenosine-3'-phosphate
  modified_base 19: mod_base = OTHER; note = 2'-O-methyluridine-3'-phosphate
  modified_base 20: mod_base = OTHER; note = 2'-O-methyladenosine-3'-phosphate
  modified_base 21: mod_base = OTHER; note = 2'-O-methyladenosine
tgatacaatgaatgtgaataa

SEQ ID NO: 3346 - RNA, 21 nt, synthetic construct
  source 1..21: mol_type = other RNA
  modified_base 1: mod_base = OTHER; note = 2'-O-methyladenosine-3'-phosphate
  modified_base 2: mod_base = OTHER; note = 2'-O-methyluridine-3'-phosphate
  modified_base 3: mod_base = OTHER; note = 2'-O-methyladenosine-3'-phosphate
  modified_base 4: mod_base = OTHER; note = 2'-O-methylcytidine-3'-phosphate
  modified_base 5: mod_base = OTHER; note = 2'-O-methyladenosine-3'-phosphate
  modified_base 6: mod_base = OTHER; note = 2'-O-methyladenosine-3'-phosphate
  modified_base 7: mod_base = OTHER; note = 2'-deoxy-2'-fluorouridine-3'-phosphate
  modified_base 8: mod_base = OTHER; note = 2'-O-methylguanosine-3'-phosphate
  modified_base 9: mod_base = OTHER; note = 2'-deoxy-2'-fluoroadenosine-3'-phosphate
  modified_base 10: mod_base = OTHER; note = 2'-deoxy-2'-fluoroadenosine-3'-phosphate
  modified_base 11: mod_base = OTHER; note = 2'-deoxy-2'-fluorouridine-3'-phosphate
  modified_base 12: mod_base = OTHER; note = 2'-O-methylguanosine-3'-phosphate
  modified_base 13: mod_base = OTHER; note = 2'-O-methyluridine-3'-phosphate
  modified_base 14: mod_base = OTHER; note = 2'-O-methylguanosine-3'-phosphate
  modified_base 15: mod_base = OTHER; note = 2'-O-methyladenosine-3'-phosphate
  modified_base 16: mod_base = OTHER; note = 2'-O-methyladenosine-3'-phosphate
  modified_base 17: mod_base = OTHER; note = 2'-O-methyluridine-3'-phosphate
  modified_base 18: mod_base = OTHER; note = 2'-O-methyladenosine-3'-phosphate
  modified_base 19: mod_base = OTHER; note = 2'-O-methyluridine-3'-phosphate
  modified_base 20: mod_base = OTHER; note = 2'-O-methylcytidine-3'-phosphate
  modified_base 21: mod_base = OTHER; note = 2'-O-methyladenosine
atacaatgaatgtgaatatca

SEQ ID NO: 3347 - RNA, 21 nt, synthetic construct
  source 1..21: mol_type = other RNA
  modified_base 1: mod_base = OTHER; note = 2'-O-methyluridine-3'-phosphate
  modified_base 2: mod_base = OTHER; note = 2'-O-methyladenosine-3'-phosphate
  modified_base 3: mod_base = OTHER; note = 2'-O-methylcytidine-3'-phosphate
  modified_base 4: mod_base = OTHER; note = 2'-O-methyladenosine-3'-phosphate
  modified_base 5: mod_base = OTHER; note = 2'-O-methyladenosine-3'-phosphate
  modified_base 6: mod_base = OTHER; note = 2'-O-methyluridine-3'-phosphate
  modified_base 7: mod_base = OTHER; note = 2'-deoxy-2'-fluoroguanosine-3'-phosphate
  modified_base 8: mod_base = OTHER; note = 2'-O-methyladenosine-3'-phosphate
  modified_base 9: mod_base = OTHER; note = 2'-deoxy-2'-fluoroadenosine-3'-phosphate
  modified_base 10: mod_base = OTHER; note = 2'-deoxy-2'-fluorouridine-3'-phosphate
  modified_base 11: mod_base = OTHER; note = 2'-deoxy-2'-fluoroguanosine-3'-phosphate
  modified_base 12: mod_base = OTHER; note = 2'-O-methyluridine-3'-phosphate
  modified_base 13: mod_base = OTHER; note = 2'-O-methylguanosine-3'-phosphate
  modified_base 14: mod_base = OTHER; note = 2'-O-methyladenosine-3'-phosphate
  modified_base 15: mod_base = OTHER; note = 2'-O-methyladenosine-3'-phosphate
  modified_base 16: mod_base = OTHER; note = 2'-O-methyluridine-3'-phosphate
  modified_base 17: mod_base = OTHER; note = 2'-O-methyladenosine-3'-phosphate
  modified_base 18: mod_base = OTHER; note = 2'-O-methyluridine-3'-phosphate
  modified_base 19: mod_base = OTHER; note = 2'-O-methylcytidine-3'-phosphate
  modified_base 20: mod_base = OTHER; note = 2'-O-methyluridine-3'-phosphate
  modified_base 21: mod_base = OTHER; note = 2'-O-methyladenosine
tacaatgaatgtgaatatcta

SEQ ID NO: 3348 - RNA, 21 nt, synthetic construct
  source 1..21: mol_type = other RNA
  modified_base 1: mod_base = OTHER; note = 2'-O-methyladenosine-3'-phosphate
  modified_base 2: mod_base = OTHER; note = 2'-O-methyladenosine-3'-phosphate
  modified_base 3: mod_base = OTHER; note = 2'-O-methyluridine-3'-phosphate
  modified_base 4: mod_base = OTHER; note = 2'-O-methylguanosine-3'-phosphate
  modified_base 5: mod_base = OTHER; note = 2'-O-methyladenosine-3'-phosphate
  modified_base 6: mod_base = OTHER; note = 2'-O-methyladenosine-3'-phosphate
  modified_base 7: mod_base = OTHER; note = 2'-deoxy-2'-fluorouridine-3'-phosphate
  modified_base 8: mod_base = OTHER; note = 2'-O-methylguanosine-3'-phosphate
  modified_base 9: mod_base = OTHER; note = 2'-deoxy-2'-fluorouridine-3'-phosphate
  modified_base 10: mod_base = OTHER; note = 2'-deoxy-2'-fluoroguanosine-3'-phosphate
  modified_base 11: mod_base = OTHER; note = 2'-deoxy-2'-fluoroadenosine-3'-phosphate
  modified_base 12: mod_base = OTHER; note = 2'-O-methyladenosine-3'-phosphate
  modified_base 13: mod_base = OTHER; note = 2'-O-methyluridine-3'-phosphate
  modified_base 14: mod_base = OTHER; note = 2'-O-methyladenosine-3'-phosphate
  modified_base 15: mod_base = OTHER; note = 2'-O-methyluridine-3'-phosphate
  modified_base 16: mod_base = OTHER; note = 2'-O-methylcytidine-3'-phosphate
  modified_base 17: mod_base = OTHER; note = 2'-O-methyluridine-3'-phosphate
  modified_base 18: mod_base = OTHER; note = 2'-O-methyluridine-3'-phosphate
  modified_base 19: mod_base = OTHER; note = 2'-O-methyluridine-3'-phosphate
  modified_base 20: mod_base = OTHER; note = 2'-O-methylguanosine-3'-phosphate
  modified_base 21: mod_base = OTHER; note = 2'-O-methyladenosine
aatgaatgtgaatatctttga

SEQ ID NO: 3349 - RNA, 21 nt, synthetic construct
  source 1..21: mol_type = other RNA
  modified_base 1: mod_base = OTHER; note = 2'-O-methyladenosine-3'-phosphate
  modified_base 2: mod_base = OTHER; note = 2'-O-methyluridine-3'-phosphate
  modified_base 3: mod_base = OTHER; note = 2'-O-methylguanosine-3'-phosphate
  modified_base 4: mod_base = OTHER; note = 2'-O-methyladenosine-3'-phosphate
  modified_base 5: mod_base = OTHER; note = 2'-O-methyladenosine-3'-phosphate
  modified_base 6: mod_base = OTHER; note = 2'-O-methyluridine-3'-phosphate
  modified_base 7: mod_base = OTHER; note = 2'-deoxy-2'-fluoroguanosine-3'-phosphate
  modified_base 8: mod_base = OTHER; note = 2'-O-methyluridine-3'-phosphate
  modified_base 9: mod_base = OTHER; note = 2'-deoxy-2'-fluoroguanosine-3'-phosphate
  modified_base 10: mod_base = OTHER; note = 2'-deoxy-2'-fluoroadenosine-3'-phosphate
  modified_base 11: mod_base = OTHER; note = 2'-deoxy-2'-fluoroadenosine-3'-phosphate
  modified_base 12: mod_base = OTHER; note = 2'-O-methyluridine-3'-phosphate
  modified_base 13: mod_base = OTHER; note = 2'-O-methyladenosine-3'-phosphate
  modified_base 14: mod_base = OTHER; note = 2'-O-methyluridine-3'-phosphate
  modified_base 15: mod_base = OTHER; note = 2'-O-methylcytidine-3'-phosphate
  modified_base 16: mod_base = OTHER; note = 2'-O-methyluridine-3'-phosphate
  modified_base 17: mod_base = OTHER; note = 2'-O-methyluridine-3'-phosphate
  modified_base 18: mod_base = OTHER; note = 2'-O-methyluridine-3'-phosphate
  modified_base 19: mod_base = OTHER; note = 2'-O-methylguanosine-3'-phosphate
  modified_base 20: mod_base = OTHER; note = 2'-O-methyladenosine-3'-phosphate
  modified_base 21: mod_base = OTHER; note = 2'-O-methyladenosine
atgaatgtgaatatctttgaa

SEQ ID NO: 3350 - RNA, 21 nt, synthetic construct
  source 1..21: mol_type = other RNA
  modified_base 1: mod_base = OTHER; note = 2'-O-methyluridine-3'-phosphate
  modified_base 2: mod_base = OTHER; note = 2'-O-methylguanosine-3'-phosphate
  modified_base 3: mod_base = OTHER; note = 2'-O-methyladenosine-3'-phosphate
  modified_base 4: mod_base = OTHER; note = 2'-O-methyladenosine-3'-phosphate
  modified_base 5: mod_base = OTHER; note = 2'-O-methyluridine-3'-phosphate
  modified_base 6: mod_base = OTHER; note = 2'-O-methylguanosine-3'-phosphate
  modified_base 7: mod_base = OTHER; note = 2'-deoxy-2'-fluorouridine-3'-phosphate
  modified_base 8: mod_base = OTHER; note = 2'-O-methylguanosine-3'-phosphate
  modified_base 9: mod_base = OTHER; note = 2'-deoxy-2'-fluoroadenosine-3'-phosphate
  modified_base 10: mod_base = OTHER; note = 2'-deoxy-2'-fluoroadenosine-3'-phosphate
  modified_base 11: mod_base = OTHER; note = 2'-deoxy-2'-fluorouridine-3'-phosphate
  modified_base 12: mod_base = OTHER; note = 2'-O-methyladenosine-3'-phosphate
  modified_base 13: mod_base = OTHER; note = 2'-O-methyluridine-3'-phosphate
  modified_base 14: mod_base = OTHER; note = 2'-O-methylcytidine-3'-phosphate
  modified_base 15: mod_base = OTHER; note = 2'-O-methyluridine-3'-phosphate
  modified_base 16: mod_base = OTHER; note = 2'-O-methyluridine-3'-phosphate
  modified_base 17: mod_base = OTHER; note = 2'-O-methyluridine-3'-phosphate
  modified_base 18: mod_base = OTHER; note = 2'-O-methylguanosine-3'-phosphate
  modified_base 19: mod_base = OTHER; note = 2'-O-methyladenosine-3'-phosphate
  modified_base 20: mod_base = OTHER; note = 2'-O-methylguanosine-3'-phosphate
  modified_base 21: mod_base = OTHER; note = 2'-O-methyladenosine
tgaatgtgaatatctttgaga

SEQ ID NO: 3351 - RNA, 21 nt, synthetic construct
  source 1..21: mol_type = other RNA
  modified_base 1: mod_base = OTHER; note = 2'-O-methylguanosine-3'-phosphate
  modified_base 2: mod_base = OTHER; note = 2'-O-methyladenosine-3'-phosphate
  modified_base 3: mod_base = OTHER; note = 2'-O-methyladenosine-3'-phosphate
  modified_base 4: mod_base = OTHER; note = 2'-O-methyluridine-3'-phosphate
  modified_base 5: mod_base = OTHER; note = 2'-O-methylguanosine-3'-phosphate
  modified_base 6: mod_base = OTHER; note = 2'-O-methyluridine-3'-phosphate
  modified_base 7: mod_base = OTHER; note = 2'-deoxy-2'-fluoroguanosine-3'-phosphate
  modified_base 8: mod_base = OTHER; note = 2'-O-methyladenosine-3'-phosphate
  modified_base 9: mod_base = OTHER; note = 2'-deoxy-2'-fluoroadenosine-3'-phosphate
  modified_base 10: mod_base = OTHER; note = 2'-deoxy-2'-fluorouridine-3'-phosphate
  modified_base 11: mod_base = OTHER; note = 2'-deoxy-2'-fluoroadenosine-3'-phosphate
  modified_base 12: mod_base = OTHER; note = 2'-O-methyluridine-3'-phosphate
  modified_base 13: mod_base = OTHER; note = 2'-O-methylcytidine-3'-phosphate
  modified_base 14: mod_base = OTHER; note = 2'-O-methyluridine-3'-phosphate
  modified_base 15: mod_base = OTHER; note = 2'-O-methyluridine-3'-phosphate
  modified_base 16: mod_base = OTHER; note = 2'-O-methyluridine-3'-phosphate
  modified_base 17: mod_base = OTHER; note = 2'-O-methylguanosine-3'-phosphate
  modified_base 18: mod_base = OTHER; note = 2'-O-methyladenosine-3'-phosphate
  modified_base 19: mod_base = OTHER; note = 2'-O-methylguanosine-3'-phosphate
  modified_base 20: mod_base = OTHER; note = 2'-O-methyluridine-3'-phosphate
  modified_base 21: mod_base = OTHER; note = 2'-O-methyladenosine
gaatgtgaatatctttgagta

SEQ ID NO: 3352 - RNA, 21 nt, synthetic construct
  source 1..21: mol_type = other RNA
  modified_base 1: mod_base = OTHER; note = 2'-O-methyladenosine-3'-phosphate
  modified_base 2: mod_base = OTHER; note = 2'-O-methyladenosine-3'-phosphate
  modified_base 3: mod_base = OTHER; note = 2'-O-methyluridine-3'-phosphate
  modified_base 4: mod_base = OTHER; note = 2'-O-methylguanosine-3'-phosphate
  modified_base 5: mod_base = OTHER; note = 2'-O-methyluridine-3'-phosphate
  modified_base 6: mod_base = OTHER; note = 2'-O-methylguanosine-3'-phosphate
  modified_base 7: mod_base = OTHER; note = 2'-deoxy-2'-fluoroadenosine-3'-phosphate
  modified_base 8: mod_base = OTHER; note = 2'-O-methyladenosine-3'-phosphate
  modified_base 9: mod_base = OTHER; note = 2'-deoxy-2'-fluorouridine-3'-phosphate
  modified_base 10: mod_base = OTHER; note = 2'-deoxy-2'-fluoroadenosine-3'-phosphate
  modified_base 11: mod_base = OTHER; note = 2'-deoxy-2'-fluorouridine-3'-phosphate
  modified_base 12: mod_base = OTHER; note = 2'-O-methylcytidine-3'-phosphate
  modified_base 13: mod_base = OTHER; note = 2'-O-methyluridine-3'-phosphate
  modified_base 14: mod_base = OTHER; note = 2'-O-methyluridine-3'-phosphate
  modified_base 15: mod_base = OTHER; note = 2'-O-methyluridine-3'-phosphate
  modified_base 16: mod_base = OTHER; note = 2'-O-methylguanosine-3'-phosphate
  modified_base 17: mod_base = OTHER; note = 2'-O-methyladenosine-3'-phosphate
  modified_base 18: mod_base = OTHER; note = 2'-O-methylguanosine-3'-phosphate
  modified_base 19: mod_base = OTHER; note = 2'-O-methyluridine-3'-phosphate
  modified_base 20: mod_base = OTHER; note = 2'-O-methylcytidine-3'-phosphate
  modified_base 21: mod_base = OTHER; note = 2'-O-methyladenosine
aatgtgaatatctttgagtca

SEQ ID NO: 3353 - RNA, 21 nt, synthetic construct
  source 1..21: mol_type = other RNA
  modified_base 1: mod_base = OTHER; note = 2'-O-methyladenosine-3'-phosphate
  modified_base 2: mod_base = OTHER; note = 2'-O-methyluridine-3'-phosphate
  modified_base 3: mod_base = OTHER; note = 2'-O-methylguanosine-3'-phosphate
  modified_base 4: mod_base = OTHER; note = 2'-O-methyluridine-3'-phosphate
  modified_base 5: mod_base = OTHER; note = 2'-O-methylguanosine-3'-phosphate
  modified_base 6: mod_base = OTHER; note = 2'-O-methyladenosine-3'-phosphate
  modified_base 7: mod_base = OTHER; note = 2'-deoxy-2'-fluoroadenosine-3'-phosphate
  modified_base 8: mod_base = OTHER; note = 2'-O-methyluridine-3'-phosphate
  modified_base 9: mod_base = OTHER; note = 2'-deoxy-2'-fluoroadenosine-3'-phosphate
  modified_base 10: mod_base = OTHER; note = 2'-deoxy-2'-fluorouridine-3'-phosphate
  modified_base 11: mod_base = OTHER; note = 2'-deoxy-2'-fluorocytidine-3'-phosphate
  modified_base 12: mod_base = OTHER; note = 2'-O-methyluridine-3'-phosphate
  modified_base 13: mod_base = OTHER; note = 2'-O-methyluridine-3'-phosphate
  modified_base 14: mod_base = OTHER; note = 2'-O-methyluridine-3'-phosphate
  modified_base 15: mod_base = OTHER; note = 2'-O-methylguanosine-3'-phosphate
  modified_base 16: mod_base = OTHER; note = 2'-O-methyladenosine-3'-phosphate
  modified_base 17: mod_base = OTHER; note = 2'-O-methylguanosine-3'-phosphate
  modified_base 18: mod_base = OTHER; note = 2'-O-methyluridine-3'-phosphate
  modified_base 19: mod_base = OTHER; note = 2'-O-methylcytidine-3'-phosphate
  modified_base 20: mod_base = OTHER; note = 2'-O-methylcytidine-3'-phosphate
  modified_base 21: mod_base = OTHER; note = 2'-O-methyladenosine
atgtgaatatctttgagtcca

SEQ ID NO: 3354 - RNA, 21 nt, synthetic construct
  source 1..21: mol_type = other RNA
  modified_base 1: mod_base = OTHER; note = 2'-O-methyluridine-3'-phosphate
  modified_base 2: mod_base = OTHER; note = 2'-O-methylguanosine-3'-phosphate
  modified_base 3: mod_base = OTHER; note = 2'-O-methyluridine-3'-phosphate
  modified_base 4: mod_base = OTHER; note = 2'-O-methylguanosine-3'-phosphate
  modified_base 5: mod_base = OTHER; note = 2'-O-methyladenosine-3'-phosphate
  modified_base 6: mod_base = OTHER; note = 2'-O-methyladenosine-3'-phosphate
  modified_base 7: mod_base = OTHER; note = 2'-deoxy-2'-fluorouridine-3'-phosphate
  modified_base 8: mod_base = OTHER; note = 2'-O-methyladenosine-3'-phosphate
  modified_base 9: mod_base = OTHER; note = 2'-deoxy-2'-fluorouridine-3'-phosphate
  modified_base 10: mod_base = OTHER; note = 2'-deoxy-2'-fluorocytidine-3'-phosphate
  modified_base 11: mod_base = OTHER; note = 2'-deoxy-2'-fluorouridine-3'-phosphate
  modified_base 12: mod_base = OTHER; note = 2'-O-methyluridine-3'-phosphate
  modified_base 13: mod_base = OTHER; note = 2'-O-methyluridine-3'-phosphate
  modified_base 14: mod_base = OTHER; note = 2'-O-methylguanosine-3'-phosphate
  modified_base 15: mod_base = OTHER; note = 2'-O-methyladenosine-3'-phosphate
  modified_base 16: mod_base = OTHER; note = 2'-O-methylguanosine-3'-phosphate
  modified_base 17: mod_base = OTHER; note = 2'-O-methyluridine-3'-phosphate
  modified_base 18: mod_base = OTHER; note = 2'-O-methylcytidine-3'-phosphate
  modified_base 19: mod_base = OTHER; note = 2'-O-methylcytidine-3'-phosphate
  modified_base 20: mod_base = OTHER; note = 2'-O-methyluridine-3'-phosphate
  modified_base 21: mod_base = OTHER; note = 2'-O-methyladenosine
tgtgaatatctttgagtccta

SEQ ID NO: 3355 - RNA, 21 nt, synthetic construct
  source 1..21: mol_type = other RNA
  modified_base 1: mod_base = OTHER; note = 2'-O-methylguanosine-3'-phosphate
  modified_base 2: mod_base = OTHER; note = 2'-O-methyluridine-3'-phosphate
  modified_base 3: mod_base = OTHER; note = 2'-O-methylguanosine-3'-phosphate
  modified_base 4: mod_base = OTHER; note = 2'-O-methyladenosine-3'-phosphate
  modified_base 5: mod_base = OTHER; note = 2'-O-methyladenosine-3'-phosphate
  modified_base 6: mod_base = OTHER; note = 2'-O-methyluridine-3'-phosphate
  modified_base 7: mod_base = OTHER; note = 2'-deoxy-2'-fluoroadenosine-3'-phosphate
  modified_base 8: mod_base = OTHER; note = 2'-O-methyluridine-3'-phosphate
  modified_base 9: mod_base = OTHER; note = 2'-deoxy-2'-fluorocytidine-3'-phosphate
  modified_base 10: mod_base = OTHER; note = 2'-deoxy-2'-fluorouridine-3'-phosphate
  modified_base 11: mod_base = OTHER; note = 2'-deoxy-2'-fluorouridine-3'-phosphate
  modified_base 12: mod_base = OTHER; note = 2'-O-methyluridine-3'-phosphate
  modified_base 13: mod_base = OTHER; note = 2'-O-methylguanosine-3'-phosphate
  modified_base 14: mod_base = OTHER; note = 2'-O-methyladenosine-3'-phosphate
  modified_base 15: mod_base = OTHER; note = 2'-O-methylguanosine-3'-phosphate
  modified_base 16: mod_base = OTHER; note = 2'-O-methyluridine-3'-phosphate
  modified_base 17: mod_base = OTHER; note = 2'-O-methylcytidine-3'-phosphate
  modified_base 18: mod_base = OTHER; note = 2'-O-methylcytidine-3'-phosphate
  modified_base 19: mod_base = OTHER; note = 2'-O-methyluridine-3'-phosphate
  modified_base 20: mod_base = OTHER; note = 2'-O-methyluridine-3'-phosphate
  modified_base 21: mod_base = OTHER; note = 2'-O-methyladenosine
gtgaatatctttgagtcctta

SEQ ID NO: 3356 - RNA, 21 nt, synthetic construct
  source 1..21: mol_type = other RNA
  modified_base 1: mod_base = OTHER; note = 2'-O-methyluridine-3'-phosphate
  modified_base 2: mod_base = OTHER; note = 2'-O-methylguanosine-3'-phosphate
  modified_base 3: mod_base = OTHER; note = 2'-O-methyladenosine-3'-phosphate
  modified_base 4: mod_base = OTHER; note = 2'-O-methyladenosine-3'-phosphate
  modified_base 5: mod_base = OTHER; note = 2'-O-methyluridine-3'-phosphate
  modified_base 6: mod_base = OTHER; note = 2'-O-methyladenosine-3'-phosphate
  modified_base 7: mod_base = OTHER; note = 2'-deoxy-2'-fluorouridine-3'-phosphate
  modified_base 8: mod_base = OTHER; note = 2'-O-methylcytidine-3'-phosphate
  modified_base 9: mod_base = OTHER; note = 2'-deoxy-2'-fluorouridine-3'-phosphate
  modified_base 10: mod_base = OTHER; note = 2'-deoxy-2'-fluorouridine-3'-phosphate
  modified_base 11: mod_base = OTHER; note = 2'-deoxy-2'-fluorouridine-3'-phosphate
  modified_base 12: mod_base = OTHER; note = 2'-O-methylguanosine-3'-phosphate
  modified_base 13: mod_base = OTHER; note = 2'-O-methyladenosine-3'-phosphate
  modified_base 14: mod_base = OTHER; note = 2'-O-methylguanosine-3'-phosphate
  modified_base 15: mod_base = OTHER; note = 2'-O-methyluridine-3'-phosphate
  modified_base 16: mod_base = OTHER; note = 2'-O-methylcytidine-3'-phosphate
  modified_base 17: mod_base = OTHER; note = 2'-O-methylcytidine-3'-phosphate
  modified_base 18: mod_base = OTHER; note = 2'-O-methyluridine-3'-phosphate
  modified_base 19: mod_base = OTHER; note = 2'-O-methyluridine-3'-phosphate
  modified_base 20: mod_base = OTHER; note = 2'-O-methylcytidine-3'-phosphate
  modified_base 21: mod_base = OTHER; note = 2'-O-methyladenosine
tgaatatctttgagtccttca

SEQ ID NO: 3357 - RNA, 21 nt, synthetic construct
  source 1..21: mol_type = other RNA
  modified_base 1: mod_base = OTHER; note = 2'-O-methylguanosine-3'-phosphate
  modified_base 2: mod_base = OTHER; note = 2'-O-methyladenosine-3'-phosphate
  modified_base 3: mod_base = OTHER; note = 2'-O-methyladenosine-3'-phosphate
  modified_base 4: mod_base = OTHER; note = 2'-O-methyluridine-3'-phosphate
  modified_base 5: mod_base = OTHER; note = 2'-O-methyladenosine-3'-phosphate
  modified_base 6: mod_base = OTHER; note = 2'-O-methyluridine-3'-phosphate
  modified_base 7: mod_base = OTHER; note = 2'-deoxy-2'-fluorocytidine-3'-phosphate
  modified_base 8: mod_base = OTHER; note = 2'-O-methyluridine-3'-phosphate
  modified_base 9: mod_base = OTHER; note = 2'-deoxy-2'-fluorouridine-3'-phosphate
  modified_base 10: mod_base = OTHER; note = 2'-deoxy-2'-fluorouridine-3'-phosphate
  modified_base 11: mod_base = OTHER; note = 2'-deoxy-2'-fluoroguanosine-3'-phosphate
  modified_base 12: mod_base = OTHER; note = 2'-O-methyladenosine-3'-phosphate
  modified_base 13: mod_base = OTHER; note = 2'-O-methylguanosine-3'-phosphate
  modified_base 14: mod_base = OTHER; note = 2'-O-methyluridine-3'-phosphate
  modified_base 15: mod_base = OTHER; note = 2'-O-methylcytidine-3'-phosphate
  modified_base 16: mod_base = OTHER; note = 2'-O-methylcytidine-3'-phosphate
  modified_base 17: mod_base = OTHER; note = 2'-O-methyluridine-3'-phosphate
  modified_base 18: mod_base = OTHER; note = 2'-O-methyluridine-3'-phosphate
  modified_base 19: mod_base = OTHER; note = 2'-O-methylcytidine-3'-phosphate
  modified_base 20: mod_base = OTHER; note = 2'-O-methyladenosine-3'-phosphate
  modified_base 21: mod_base = OTHER; note = 2'-O-methyladenosine
gaatatctttgagtccttcaa

SEQ ID NO: 3358 - RNA, 21 nt, synthetic construct
  source 1..21: mol_type = other RNA
  modified_base 1: mod_base = OTHER; note = 2'-O-methyladenosine-3'-phosphate
  modified_base 2: mod_base = OTHER; note = 2'-O-methyladenosine-3'-phosphate
  modified_base 3: mod_base = OTHER; note = 2'-O-methyluridine-3'-phosphate
  modified_base 4: mod_base = OTHER; note = 2'-O-methyladenosine-3'-phosphate
  modified_base 5: mod_base = OTHER; note = 2'-O-methyluridine-3'-phosphate
  modified_base 6: mod_base = OTHER; note = 2'-O-methylcytidine-3'-phosphate
  modified_base 7: mod_base = OTHER; note = 2'-deoxy-2'-fluorouridine-3'-phosphate
  modified_base 8: mod_base = OTHER; note = 2'-O-methyluridine-3'-phosphate
  modified_base 9: mod_base = OTHER; note = 2'-deoxy-2'-fluorouridine-3'-phosphate
  modified_base 10: mod_base = OTHER; note = 2'-deoxy-2'-fluoroguanosine-3'-phosphate
  modified_base 11: mod_base = OTHER; note = 2'-deoxy-2'-fluoroadenosine-3'-phosphate
  modified_base 12: mod_base = OTHER; note = 2'-O-methylguanosine-3'-phosphate
  modified_base 13: mod_base = OTHER; note = 2'-O-methyluridine-3'-phosphate
  modified_base 14: mod_base = OTHER; note = 2'-O-methylcytidine-3'-phosphate
  modified_base 15: mod_base = OTHER; note = 2'-O-methylcytidine-3'-phosphate
  modified_base 16: mod_base = OTHER; note = 2'-O-methyluridine-3'-phosphate
  modified_base 17: mod_base = OTHER; note = 2'-O-methyluridine-3'-phosphate
  modified_base 18: mod_base = OTHER; note = 2'-O-methylcytidine-3'-phosphate
  modified_base 19: mod_base = OTHER; note = 2'-O-methyladenosine-3'-phosphate
  modified_base 20: mod_base = OTHER; note = 2'-O-methyladenosine-3'-phosphate
  modified_base 21: mod_base = OTHER; note = 2'-O-methyladenosine
aatatctttgagtccttcaaa

SEQ ID NO: 3359 - RNA, 21 nt, synthetic construct
  source 1..21: mol_type = other RNA
  modified_base 1: mod_base = OTHER; note = 2'-O-methyladenosine-3'-phosphate
  modified_base 2: mod_base = OTHER; note = 2'-O-methyluridine-3'-phosphate
  modified_base 3: mod_base = OTHER; note = 2'-O-methyladenosine-3'-phosphate
  modified_base 4: mod_base = OTHER; note = 2'-O-methyluridine-3'-phosphate
  modified_base 5: mod_base = OTHER; note = 2'-O-methylcytidine-3'-phosphate
  modified_base 6: mod_base = OTHER; note = 2'-O-methyluridine-3'-phosphate
  modified_base 7: mod_base = OTHER; note = 2'-deoxy-2'-fluorouridine-3'-phosphate
  modified_base 8: mod_base = OTHER; note = 2'-O-methyluridine-3'-phosphate
  modified_base 9: mod_base = OTHER; note = 2'-deoxy-2'-fluoroguanosine-3'-phosphate
  modified_base 10: mod_base = OTHER; note = 2'-deoxy-2'-fluoroadenosine-3'-phosphate
  modified_base 11: mod_base = OTHER; note = 2'-deoxy-2'-fluoroguanosine-3'-phosphate
  modified_base 12: mod_base = OTHER; note = 2'-O-methyluridine-3'-phosphate
  modified_base 13: mod_base = OTHER; note = 2'-O-methylcytidine-3'-phosphate
  modified_base 14: mod_base = OTHER; note = 2'-O-methylcytidine-3'-phosphate
  modified_base 15: mod_base = OTHER; note = 2'-O-methyluridine-3'-phosphate
  modified_base 16: mod_base = OTHER; note = 2'-O-methyluridine-3'-phosphate
  modified_base 17: mod_base = OTHER; note = 2'-O-methylcytidine-3'-phosphate
  modified_base 18: mod_base = OTHER; note = 2'-O-methyladenosine-3'-phosphate
  modified_base 19: mod_base = OTHER; note = 2'-O-methyladenosine-3'-phosphate
  modified_base 20: mod_base = OTHER; note = 2'-O-methyladenosine-3'-phosphate
  modified_base 21: mod_base = OTHER; note = 2'-O-methyladenosine
atatctttgagtccttcaaaa

SEQ ID NO: 3360 - RNA, 21 nt, synthetic construct
  source 1..21: mol_type = other RNA
  modified_base 1: mod_base = OTHER; note = 2'-O-methyluridine-3'-phosphate
  modified_base 2: mod_base = OTHER; note = 2'-O-methyladenosine-3'-phosphate
  modified_base 3: mod_base = OTHER; note = 2'-O-methyluridine-3'-phosphate
  modified_base 4: mod_base = OTHER; note = 2'-O-methylcytidine-3'-phosphate
  modified_base 5: mod_base = OTHER; note = 2'-O-methyluridine-3'-phosphate
  modified_base 6: mod_base = OTHER; note = 2'-O-methyluridine-3'-phosphate
  modified_base 7: mod_base = OTHER; note = 2'-deoxy-2'-fluorouridine-3'-phosphate
  modified_base 8: mod_base = OTHER; note = 2'-O-methylguanosine-3'-phosphate
  modified_base 9: mod_base = OTHER; note = 2'-deoxy-2'-fluoroadenosine-3'-phosphate
  modified_base 10: mod_base = OTHER; note = 2'-deoxy-2'-fluoroguanosine-3'-phosphate
  modified_base 11: mod_base = OTHER; note = 2'-deoxy-2'-fluorouridine-3'-phosphate
  modified_base 12: mod_base = OTHER; note = 2'-O-methylcytidine-3'-phosphate
  modified_base 13: mod_base = OTHER; note = 2'-O-methylcytidine-3'-phosphate
  modified_base 14: mod_base = OTHER; note = 2'-O-methyluridine-3'-phosphate
  modified_base 15: mod_base = OTHER; note = 2'-O-methyluridine-3'-phosphate
  modified_base 16: mod_base = OTHER; note = 2'-O-methylcytidine-3'-phosphate
  modified_base 17: mod_base = OTHER; note = 2'-O-methyladenosine-3'-phosphate
  modified_base 18: mod_base = OTHER; note = 2'-O-methyladenosine-3'-phosphate
  modified_base 19: mod_base = OTHER; note = 2'-O-methyladenosine-3'-phosphate
  modified_base 20: mod_base = OTHER; note = 2'-O-methylcytidine-3'-phosphate
  modified_base 21: mod_base = OTHER; note = 2'-O-methyladenosine
tatctttgagtccttcaaaca

SEQ ID NO: 3361 - RNA, 21 nt, synthetic construct
  source 1..21: mol_type = other RNA
  modified_base 1: mod_base = OTHER; note = 2'-O-methyladenosine-3'-phosphate
  modified_base 2: mod_base = OTHER; note = 2'-O-methyluridine-3'-phosphate
  modified_base 3: mod_base = OTHER; note = 2'-O-methylcytidine-3'-phosphate
  modified_base 4: mod_base = OTHER; note = 2'-O-methyluridine-3'-phosphate
  modified_base 5: mod_base = OTHER; note = 2'-O-methyluridine-3'-phosphate
  modified_base 6: mod_base = OTHER; note = 2'-O-methyluridine-3'-phosphate
  modified_base 7: mod_base = OTHER; note = 2'-deoxy-2'-fluoroguanosine-3'-phosphate
  modified_base 8: mod_base = OTHER; note = 2'-O-methyladenosine-3'-phosphate
  modified_base 9: mod_base = OTHER; note = 2'-deoxy-2'-fluoroguanosine-3'-phosphate
  modified_base 10: mod_base = OTHER; note = 2'-deoxy-2'-fluorouridine-3'-phosphate
  modified_base 11: mod_base = OTHER; note = 2'-deoxy-2'-fluorocytidine-3'-phosphate
  modified_base 12: mod_base = OTHER; note = 2'-O-methylcytidine-3'-phosphate
  modified_base 13: mod_base = OTHER; note = 2'-O-methyluridine-3'-phosphate
  modified_base 14: mod_base = OTHER; note = 2'-O-methyluridine-3'-phosphate
  modified_base 15: mod_base = OTHER; note = 2'-O-methylcytidine-3'-phosphate
  modified_base 16: mod_base = OTHER; note = 2'-O-methyladenosine-3'-phosphate
  modified_base 17: mod_base = OTHER; note = 2'-O-methyladenosine-3'-phosphate
  modified_base 18: mod_base = OTHER; note = 2'-O-methyladenosine-3'-phosphate
  modified_base 19: mod_base = OTHER; note = 2'-O-methylcytidine-3'-phosphate
  modified_base 20: mod_base = OTHER; note = 2'-O-methylguanosine-3'-phosphate
  modified_base 21: mod_base = OTHER; note = 2'-O-methyladenosine
atctttgagtccttcaaacga

SEQ ID NO: 3362 - RNA, 21 nt, synthetic construct
  source 1..21: mol_type = other RNA
  modified_base 1: mod_base = OTHER; note = 2'-O-methyluridine-3'-phosphate
  modified_base 2: mod_base = OTHER; note = 2'-O-methylcytidine-3'-phosphate
  modified_base 3: mod_base = OTHER; note = 2'-O-methyluridine-3'-phosphate
  modified_base 4: mod_base = OTHER; note = 2'-O-methyluridine-3'-phosphate
  modified_base 5: mod_base = OTHER; note = 2'-O-methyluridine-3'-phosphate
  modified_base 6: mod_base = OTHER; note = 2'-O-methylguanosine-3'-phosphate
  modified_base 7: mod_base = OTHER; note = 2'-deoxy-2'-fluoroadenosine-3'-phosphate
  modified_base 8: mod_base = OTHER; note = 2'-O-methylguanosine-3'-phosphate
  modified_base 9: mod_base = OTHER; note = 2'-deoxy-2'-fluorouridine-3'-phosphate
  modified_base 10: mod_base = OTHER; note = 2'-deoxy-2'-fluorocytidine-3'-phosphate
  modified_base 11: mod_base = OTHER; note = 2'-deoxy-2'-fluorocytidine-3'-phosphate
  modified_base 12: mod_base = OTHER; note = 2'-O-methyluridine-3'-phosphate
  modified_base 13: mod_base = OTHER; note = 2'-O-methyluridine-3'-phosphate
  modified_base 14: mod_base = OTHER; note = 2'-O-methylcytidine-3'-phosphate
  modified_base 15: mod_base = OTHER; note = 2'-O-methyladenosine-3'-phosphate
  modified_base 16: mod_base = OTHER; note = 2'-O-methyladenosine-3'-phosphate
  modified_base 17: mod_base = OTHER; note = 2'-O-methyladenosine-3'-phosphate
  modified_base 18: mod_base = OTHER; note = 2'-O-methylcytidine-3'-phosphate
  modified_base 19: mod_base = OTHER; note = 2'-O-methylguanosine-3'-phosphate
  modified_base 20: mod_base = OTHER; note = 2'-O-methyladenosine-3'-phosphate
  modified_base 21: mod_base = OTHER; note = 2'-O-methyladenosine
tctttgagtccttcaaacgaa

SEQ ID NO: 3363 - RNA, 21 nt, synthetic construct
  source 1..21: mol_type = other RNA
  modified_base 1: mod_base = OTHER; note = 2'-O-methylcytidine-3'-phosphate
  modified_base 2: mod_base = OTHER; note = 2'-O-methyluridine-3'-phosphate
  modified_base 3: mod_base = OTHER; note = 2'-O-methyluridine-3'-phosphate
  modified_base 4: mod_base = OTHER; note = 2'-O-methyluridine-3'-phosphate
  modified_base 5: mod_base = OTHER; note = 2'-O-methylguanosine-3'-phosphate
  modified_base 6: mod_base = OTHER; note = 2'-O-methyladenosine-3'-phosphate
  modified_base 7: mod_base = OTHER; note = 2'-deoxy-2'-fluoroguanosine-3'-phosphate
  modified_base 8: mod_base = OTHER; note = 2'-O-methyluridine-3'-phosphate
  modified_base 9: mod_base = OTHER; note = 2'-deoxy-2'-fluorocytidine-3'-phosphate
  modified_base 10: mod_base = OTHER; note = 2'-deoxy-2'-fluorocytidine-3'-phosphate
  modified_base 11: mod_base = OTHER; note = 2'-deoxy-2'-fluorouridine-3'-phosphate
  modified_base 12: mod_base = OTHER; note = 2'-O-methyluridine-3'-phosphate
  modified_base 13: mod_base = OTHER; note = 2'-O-methylcytidine-3'-phosphate
  modified_base 14: mod_base = OTHER; note = 2'-O-methyladenosine-3'-phosphate
  modified_base 15: mod_base = OTHER; note = 2'-O-methyladenosine-3'-phosphate
  modified_base 16: mod_base = OTHER; note = 2'-O-methyladenosine-3'-phosphate
  modified_base 17: mod_base = OTHER; note = 2'-O-methylcytidine-3'-phosphate
  modified_base 18: mod_base = OTHER; note = 2'-O-methylguanosine-3'-phosphate
  modified_base 19: mod_base = OTHER; note = 2'-O-methyladenosine-3'-phosphate
  modified_base 20: mod_base = OTHER; note = 2'-O-methylguanosine-3'-phosphate
  modified_base 21: mod_base = OTHER; note = 2'-O-methyladenosine
ctttgagtccttcaaacgaga

SEQ ID NO: 3364 - RNA, 21 nt, synthetic construct
  source 1..21: mol_type = other RNA
  modified_base 1: mod_base = OTHER; note = 2'-O-methyluridine-3'-phosphate
  modified_base 2: mod_base = OTHER; note = 2'-O-methyluridine-3'-phosphate
  modified_base 3: mod_base = OTHER; note = 2'-O-methylcytidine-3'-phosphate
  modified_base 4: mod_base = OTHER; note = 2'-O-methyladenosine-3'-phosphate
  modified_base 5: mod_base = OTHER; note = 2'-O-methyladenosine-3'-phosphate
  modified_base 6: mod_base = OTHER; note = 2'-O-methyladenosine-3'-phosphate
  modified_base 7: mod_base = OTHER; note = 2'-deoxy-2'-fluorocytidine-3'-phosphate
  modified_base 8: mod_base = OTHER; note = 2'-O-methylguanosine-3'-phosphate
  modified_base 9: mod_base = OTHER; note = 2'-deoxy-2'-fluoroadenosine-3'-phosphate
  modified_base 10: mod_base = OTHER; note = 2'-deoxy-2'-fluoroguanosine-3'-phosphate
  modified_base 11: mod_base = OTHER; note = 2'-deoxy-2'-fluorocytidine-3'-phosphate
  modified_base 12: mod_base = OTHER; note = 2'-O-methyluridine-3'-phosphate
  modified_base 13: mod_base = OTHER; note = 2'-O-methylguanosine-3'-phosphate
  modified_base 14: mod_base = OTHER; note = 2'-O-methyladenosine-3'-phosphate
  modified_base 15: mod_base = OTHER; note = 2'-O-methylcytidine-3'-phosphate
  modified_base 16: mod_base = OTHER; note = 2'-O-methyladenosine-3'-phosphate
  modified_base 17: mod_base = OTHER; note = 2'-O-methyluridine-3'-phosphate
  modified_base 18: mod_base = OTHER; note = 2'-O-methylcytidine-3'-phosphate
  modified_base 19: mod_base = OTHER; note = 2'-O-methyluridine-3'-phosphate
  modified_base 20: mod_base = OTHER; note = 2'-O-methyladenosine-3'-phosphate
  modified_base 21: mod_base = OTHER; note = 2'-O-methyladenosine
ttcaaacgagctgacatctaa

SEQ ID NO: 3365 - RNA, 21 nt, synthetic construct
  source 1..21: mol_type = other RNA
  modified_base 1: mod_base = OTHER; note = 2'-O-methyladenosine-3'-phosphate
  modified_base 2: mod_base = OTHER; note = 2'-O-methyladenosine-3'-phosphate
  modified_base 3: mod_base = OTHER; note = 2'-O-methylcytidine-3'-phosphate
  modified_base 4: mod_base = OTHER; note = 2'-O-methylguanosine-3'-phosphate
  modified_base 5: mod_base = OTHER; note = 2'-O-methyladenosine-3'-phosphate
  modified_base 6: mod_base = OTHER; note = 2'-O-methylguanosine-3'-phosphate
  modified_base 7: mod_base = OTHER; note = 2'-deoxy-2'-fluorocytidine-3'-phosphate
  modified_base 8: mod_base = OTHER; note = 2'-O-methyluridine-3'-phosphate
  modified_base 9: mod_base = OTHER; note = 2'-deoxy-2'-fluoroguanosine-3'-phosphate
  modified_base 10: mod_base = OTHER; note = 2'-deoxy-2'-fluoroadenosine-3'-phosphate
  modified_base 11: mod_base = OTHER; note = 2'-deoxy-2'-fluorocytidine-3'-phosphate
  modified_base 12: mod_base = OTHER; note = 2'-O-methyladenosine-3'-phosphate
  modified_base 13: mod_base = OTHER; note = 2'-O-methyluridine-3'-phosphate
  modified_base 14: mod_base = OTHER; note = 2'-O-methylcytidine-3'-phosphate
  modified_base 15: mod_base = OTHER; note = 2'-O-methyluridine-3'-phosphate
  modified_base 16: mod_base = OTHER; note = 2'-O-methyladenosine-3'-phosphate
  modified_base 17: mod_base = OTHER; note = 2'-O-methyluridine-3'-phosphate
  modified_base 18: mod_base = OTHER; note = 2'-O-methyluridine-3'-phosphate
  modified_base 19: mod_base = OTHER; note = 2'-O-methylcytidine-3'-phosphate
  modified_base 20: mod_base = OTHER; note = 2'-O-methyluridine-3'-phosphate
  modified_base 21: mod_base = OTHER; note = 2'-O-methyladenosine
aacgagctgacatctattcta

SEQ ID NO: 3366 - RNA, 21 nt, synthetic construct
  source 1..21: mol_type = other RNA
  modified_base 1: mod_base = OTHER; note = 2'-O-methyladenosine-3'-phosphate
  modified_base 2: mod_base = OTHER; note = 2'-O-methylcytidine-3'-phosphate
  modified_base 3: mod_base = OTHER; note = 2'-O-methylguanosine-3'-phosphate
  modified_base 4: mod_base = OTHER; note = 2'-O-methyladenosine-3'-phosphate
  modified_base 5: mod_base = OTHER; note = 2'-O-methylguanosine-3'-phosphate
  modified_base 6: mod_base = OTHER; note = 2'-O-methylcytidine-3'-phosphate
  modified_base 7: mod_base = OTHER; note = 2'-deoxy-2'-fluorouridine-3'-phosphate
  modified_base 8: mod_base = OTHER; note = 2'-O-methylguanosine-3'-phosphate
  modified_base 9: mod_base = OTHER; note = 2'-deoxy-2'-fluoroadenosine-3'-phosphate
  modified_base 10: mod_base = OTHER; note = 2'-deoxy-2'-fluorocytidine-3'-phosphate
  modified_base 11: mod_base = OTHER; note = 2'-deoxy-2'-fluoroadenosine-3'-phosphate
  modified_base 12: mod_base = OTHER; note = 2'-O-methyluridine-3'-phosphate
  modified_base 13: mod_base = OTHER; note = 2'-O-methylcytidine-3'-phosphate
  modified_base 14: mod_base = OTHER; note = 2'-O-methyluridine-3'-phosphate
  modified_base 15: mod_base = OTHER; note = 2'-O-methyladenosine-3'-phosphate
  modified_base 16: mod_base = OTHER; note = 2'-O-methyluridine-3'-phosphate
  modified_base 17: mod_base = OTHER; note = 2'-O-methyluridine-3'-phosphate
  modified_base 18: mod_base = OTHER; note = 2'-O-methylcytidine-3'-phosphate
  modified_base 19: mod_base = OTHER; note = 2'-O-methyluridine-3'-phosphate
  modified_base 20: mod_base = OTHER; note = 2'-O-methylguanosine-3'-phosphate
  modified_base 21: mod_base = OTHER; note = 2'-O-methyladenosine
acgagctgacatctattctga

SEQ ID NO: 3367 - RNA, 21 nt, synthetic construct
  source 1..21: mol_type = other RNA
  modified_base 1: mod_base = OTHER; note = 2'-O-methylcytidine-3'-phosphate
  modified_base 2: mod_base = OTHER; note = 2'-O-methylguanosine-3'-phosphate
  modified_base 3: mod_base = OTHER; note = 2'-O-methyladenosine-3'-phosphate
  modified_base 4: mod_base = OTHER; note = 2'-O-methylguanosine-3'-phosphate
  modified_base 5: mod_base = OTHER; note = 2'-O-methylcytidine-3'-phosphate
  modified_base 6: mod_base = OTHER; note = 2'-O-methyluridine-3'-phosphate
  modified_base 7: mod_base = OTHER; note = 2'-deoxy-2'-fluoroguanosine-3'-phosphate
  modified_base 8: mod_base = OTHER; note = 2'-O-methyladenosine-3'-phosphate
  modified_base 9: mod_base = OTHER; note = 2'-deoxy-2'-fluorocytidine-3'-phosphate
  modified_base 10: mod_base = OTHER; note = 2'-deoxy-2'-fluoroadenosine-3'-phosphate
  modified_base 11: mod_base = OTHER; note = 2'-deoxy-2'-fluorouridine-3'-phosphate
  modified_base 12: mod_base = OTHER; note = 2'-O-methylcytidine-3'-phosphate
  modified_base 13: mod_base = OTHER; note = 2'-O-methyluridine-3'-phosphate
  modified_base 14: mod_base = OTHER; note = 2'-O-methyladenosine-3'-phosphate
  modified_base 15: mod_base = OTHER; note = 2'-O-methyluridine-3'-phosphate
  modified_base 16: mod_base = OTHER; note = 2'-O-methyluridine-3'-phosphate
  modified_base 17: mod_base = OTHER; note = 2'-O-methylcytidine-3'-phosphate
  modified_base 18: mod_base = OTHER; note = 2'-O-methyluridine-3'-phosphate
  modified_base 19: mod_base = OTHER; note = 2'-O-methylguanosine-3'-phosphate
  modified_base 20: mod_base = OTHER; note = 2'-O-methyluridine-3'-phosphate
  modified_base 21: mod_base = OTHER; note = 2'-O-methyladenosine
cgagctgacatctattctgta

SEQ ID NO: 3368 - RNA, 21 nt, synthetic construct
  source 1..21: mol_type = other RNA
  modified_base 1: mod_base = OTHER; note = 2'-O-methyladenosine-3'-phosphate
  modified_base 2: mod_base = OTHER; note = 2'-O-methylguanosine-3'-phosphate
  modified_base 3: mod_base = OTHER; note = 2'-O-methylcytidine-3'-phosphate
  modified_base 4: mod_base = OTHER; note = 2'-O-methyluridine-3'-phosphate
  modified_base 5: mod_base = OTHER; note = 2'-O-methylguanosine-3'-phosphate
  modified_base 6: mod_base = OTHER; note = 2'-O-methyladenosine-3'-phosphate
  modified_base 7: mod_base = OTHER; note = 2'-deoxy-2'-fluorocytidine-3'-phosphate
  modified_base 8: mod_base = OTHER; note = 2'-O-methyladenosine-3'-phosphate
  modified_base 9: mod_base = OTHER; note = 2'-deoxy-2'-fluorouridine-3'-phosphate
  modified_base 10: mod_base = OTHER; note = 2'-deoxy-2'-fluorocytidine-3'-phosphate
  modified_base 11: mod_base = OTHER; note = 2'-deoxy-2'-fluorouridine-3'-phosphate
  modified_base 12: mod_base = OTHER; note = 2'-O-methyladenosine-3'-phosphate
  modified_base 13: mod_base = OTHER; note = 2'-O-methyluridine-3'-phosphate
  modified_base 14: mod_base = OTHER; note = 2'-O-methyluridine-3'-phosphate
  modified_base 15: mod_base = OTHER; note = 2'-O-methylcytidine-3'-phosphate
  modified_base 16: mod_base = OTHER; note = 2'-O-methyluridine-3'-phosphate
  modified_base 17: mod_base = OTHER; note = 2'-O-methylguanosine-3'-phosphate
  modified_base 18: mod_base = OTHER; note = 2'-O-methyluridine-3'-phosphate
  modified_base 19: mod_base = OTHER; note = 2'-O-methyluridine-3'-phosphate
  modified_base 20: mod_base = OTHER; note = 2'-O-methylguanosine-3'-phosphate
  modified_base 21: mod_base = OTHER; note = 2'-O-methyladenosine
agctgacatctattctgttga

SEQ ID NO: 3369 - RNA, 21 nt, synthetic construct
  source 1..21: mol_type = other RNA
  modified_base 1: mod_base = OTHER; note = 2'-O-methylguanosine-3'-phosphate
  modified_base 2: mod_base = OTHER; note = 2'-O-methylcytidine-3'-phosphate
  modified_base 3: mod_base = OTHER; note = 2'-O-methyluridine-3'-phosphate
  modified_base 4: mod_base = OTHER; note = 2'-O-methylguanosine-3'-phosphate
  modified_base 5: mod_base = OTHER; note = 2'-O-methyladenosine-3'-phosphate
  modified_base 6: mod_base = OTHER; note = 2'-O-methylcytidine-3'-phosphate
  modified_base 7: mod_base = OTHER; note = 2'-deoxy-2'-fluoroadenosine-3'-phosphate
  modified_base 8: mod_base = OTHER; note = 2'-O-methyluridine-3'-phosphate
  modified_base 9: mod_base = OTHER; note = 2'-deoxy-2'-fluorocytidine-3'-phosphate
  modified_base 10: mod_base = OTHER; note = 2'-deoxy-2'-fluorouridine-3'-phosphate
  modified_base 11: mod_base = OTHER; note = 2'-deoxy-2'-fluoroadenosine-3'-phosphate
  modified_base 12: mod_base = OTHER; note = 2'-O-methyluridine-3'-phosphate
  modified_base 13: mod_base = OTHER; note = 2'-O-methyluridine-3'-phosphate
  modified_base 14: mod_base = OTHER; note = 2'-O-methylcytidine-3'-phosphate
  modified_base 15: mod_base = OTHER; note = 2'-O-methyluridine-3'-phosphate
  modified_base 16: mod_base = OTHER; note = 2'-O-methylguanosine-3'-phosphate
  modified_base 17: mod_base = OTHER; note = 2'-O-methyluridine-3'-phosphate
  modified_base 18: mod_base = OTHER; note = 2'-O-methyluridine-3'-phosphate
  modified_base 19: mod_base = OTHER; note = 2'-O-methylguanosine-3'-phosphate
  modified_base 20: mod_base = OTHER; note = 2'-O-methylguanosine-3'-phosphate
  modified_base 21: mod_base = OTHER; note = 2'-O-methyladenosine
gctgacatctattctgttgga

SEQ ID NO: 3370 - RNA, 21 nt, synthetic construct
  source 1..21: mol_type = other RNA
  modified_base 1: mod_base = OTHER; note = 2'-O-methylguanosine-3'-phosphate
  modified_base 2: mod_base = OTHER; note = 2'-O-methyladenosine-3'-phosphate
  modified_base 3: mod_base = OTHER; note = 2'-O-methylcytidine-3'-phosphate
  modified_base 4: mod_base = OTHER; note = 2'-O-methyladenosine-3'-phosphate
  modified_base 5: mod_base = OTHER; note = 2'-O-methyluridine-3'-phosphate
  modified_base 6: mod_base = OTHER; note = 2'-O-methylcytidine-3'-phosphate
  modified_base 7: mod_base = OTHER; note = 2'-deoxy-2'-fluorouridine-3'-phosphate
  modified_base 8: mod_base = OTHER; note = 2'-O-methyladenosine-3'-phosphate
  modified_base 9: mod_base = OTHER; note = 2'-deoxy-2'-fluorouridine-3'-phosphate
  modified_base 10: mod_base = OTHER; note = 2'-deoxy-2'-fluorouridine-3'-phosphate
  modified_base 11: mod_base = OTHER; note = 2'-deoxy-2'-fluorocytidine-3'-phosphate
  modified_base 12: mod_base = OTHER; note = 2'-O-methyluridine-3'-phosphate
  modified_base 13: mod_base = OTHER; note = 2'-O-methylguanosine-3'-phosphate
  modified_base 14: mod_base = OTHER; note = 2'-O-methyluridine-3'-phosphate
  modified_base 15: mod_base = OTHER; note = 2'-O-methyluridine-3'-phosphate
  modified_base 16: mod_base = OTHER; note = 2'-O-methylguanosine-3'-phosphate
  modified_base 17: mod_base = OTHER; note = 2'-O-methylguanosine-3'-phosphate
  modified_base 18: mod_base = OTHER; note = 2'-O-methyluridine-3'-phosphate
  modified_base 19: mod_base = OTHER; note = 2'-O-methylcytidine-3'-phosphate
  modified_base 20: mod_base = OTHER; note = 2'-O-methyluridine-3'-phosphate
  modified_base 21: mod_base = OTHER; note = 2'-O-methyladenosine
gacatctattctgttggtcta

SEQ ID NO: 3371 - RNA, 21 nt, synthetic construct
  source 1..21: mol_type = other RNA
  modified_base 1: mod_base = OTHER; note = 2'-O-methyluridine-3'-phosphate
  modified_base 2: mod_base = OTHER; note = 2'-O-methyladenosine-3'-phosphate
  modified_base 3: mod_base = OTHER; note = 2'-O-methyluridine-3'-phosphate
  modified_base 4: mod_base = OTHER; note = 2'-O-methyluridine-3'-phosphate
  modified_base 5: mod_base = OTHER; note = 2'-O-methylcytidine-3'-phosphate
  modified_base 6: mod_base = OTHER; note = 2'-O-methyluridine-3'-phosphate
  modified_base 7: mod_base = OTHER; note = 2'-deoxy-2'-fluoroguanosine-3'-phosphate
  modified_base 8: mod_base = OTHER; note = 2'-O-methyluridine-3'-phosphate
  modified_base 9: mod_base = OTHER; note = 2'-deoxy-2'-fluorouridine-3'-phosphate
  modified_base 10: mod_base = OTHER; note = 2'-deoxy-2'-fluoroguanosine-3'-phosphate
  modified_base 11: mod_base = OTHER; note = 2'-deoxy-2'-fluoroguanosine-3'-phosphate
  modified_base 12: mod_base = OTHER; note = 2'-O-methyluridine-3'-phosphate
  modified_base 13: mod_base = OTHER; note = 2'-O-methylcytidine-3'-phosphate
  modified_base 14: mod_base = OTHER; note = 2'-O-methyluridine-3'-phosphate
  modified_base 15: mod_base = OTHER; note = 2'-O-methylguanosine-3'-phosphate
  modified_base 16: mod_base = OTHER; note = 2'-O-methylguanosine-3'-phosphate
  modified_base 17: mod_base = OTHER; note = 2'-O-methyluridine-3'-phosphate
  modified_base 18: mod_base = OTHER; note = 2'-O-methyluridine-3'-phosphate
  modified_base 19: mod_base = OTHER; note = 2'-O-methyluridine-3'-phosphate
  modified_base 20: mod_base = OTHER; note = 2'-O-methyladenosine-3'-phosphate
  modified_base 21: mod_base = OTHER; note = 2'-O-methyladenosine
tattctgttggtctggtttaa

SEQ ID NO: 3372 - RNA, 21 nt, synthetic construct
  source 1..21: mol_type = other RNA
  modified_base 1: mod_base = OTHER; note = 2'-O-methylguanosine-3'-phosphate
  modified_base 2: mod_base = OTHER; note = 2'-O-methyluridine-3'-phosphate
  modified_base 3: mod_base = OTHER; note = 2'-O-methylcytidine-3'-phosphate
  modified_base 4: mod_base = OTHER; note = 2'-O-methyluridine-3'-phosphate
  modified_base 5: mod_base = OTHER; note = 2'-O-methylguanosine-3'-phosphate
  modified_base 6: mod_base = OTHER; note = 2'-O-methylguanosine-3'-phosphate
  modified_base 7: mod_base = OTHER; note = 2'-deoxy-2'-fluorouridine-3'-phosphate
  modified_base 8: mod_base = OTHER; note = 2'-O-methyluridine-3'-phosphate
  modified_base 9: mod_base = OTHER; note = 2'-deoxy-2'-fluorouridine-3'-phosphate
  modified_base 10: mod_base = OTHER; note = 2'-deoxy-2'-fluoroadenosine-3'-phosphate
  modified_base 11: mod_base = OTHER; note = 2'-deoxy-2'-fluorocytidine-3'-phosphate
  modified_base 12: mod_base = OTHER; note = 2'-O-methyluridine-3'-phosphate
  modified_base 13: mod_base = OTHER; note = 2'-O-methylguanosine-3'-phosphate
  modified_base 14: mod_base = OTHER; note = 2'-O-methylguanosine-3'-phosphate
  modified_base 15: mod_base = OTHER; note = 2'-O-methylguanosine-3'-phosphate
  modified_base 16: mod_base = OTHER; note = 2'-O-methyladenosine-3'-phosphate
  modified_base 17: mod_base = OTHER; note = 2'-O-methyladenosine-3'-phosphate
  modified_base 18: mod_base = OTHER; note = 2'-O-methyladenosine-3'-phosphate
  modified_base 19: mod_base = OTHER; note = 2'-O-methyluridine-3'-phosphate
  modified_base 20: mod_base = OTHER; note = 2'-O-methyladenosine-3'-phosphate
  modified_base 21: mod_base = OTHER; note = 2'-O-methyladenosine
gtctggtttactgggaaataa

SEQ ID NO: 3373 - RNA, 21 nt, synthetic construct
  source 1..21: mol_type = other RNA
  modified_base 1: mod_base = OTHER; note = 2'-O-methyluridine-3'-phosphate
  modified_base 2: mod_base = OTHER; note = 2'-O-methylguanosine-3'-phosphate
  modified_base 3: mod_base = OTHER; note = 2'-O-methyladenosine-3'-phosphate
  modified_base 4: mod_base = OTHER; note = 2'-O-methylguanosine-3'-phosphate
  modified_base 5: mod_base = OTHER; note = 2'-O-methylguanosine-3'-phosphate
  modified_base 6: mod_base = OTHER; note = 2'-O-methyladenosine-3'-phosphate
  modified_base 7: mod_base = OTHER; note = 2'-deoxy-2'-fluoroguanosine-3'-phosphate
  modified_base 8: mod_base = OTHER; note = 2'-O-methyluridine-3'-phosphate
  modified_base 9: mod_base = OTHER; note = 2'-deoxy-2'-fluoroadenosine-3'-phosphate
  modified_base 10: mod_base = OTHER; note = 2'-deoxy-2'-fluorocytidine-3'-phosphate
  modified_base 11: mod_base = OTHER; note = 2'-deoxy-2'-fluorocytidine-3'-phosphate
  modified_base 12: mod_base = OTHER; note = 2'-O-methyladenosine-3'-phosphate
  modified_base 13: mod_base = OTHER; note = 2'-O-methyladenosine-3'-phosphate
  modified_base 14: mod_base = OTHER; note = 2'-O-methyluridine-3'-phosphate
  modified_base 15: mod_base = OTHER; note = 2'-O-methyluridine-3'-phosphate
  modified_base 16: mod_base = OTHER; note = 2'-O-methylguanosine-3'-phosphate
  modified_base 17: mod_base = OTHER; note = 2'-O-methylcytidine-3'-phosphate
  modified_base 18: mod_base = OTHER; note = 2'-O-methylcytidine-3'-phosphate
  modified_base 19: mod_base = OTHER; note = 2'-O-methyluridine-3'-phosphate
  modified_base 20: mod_base = OTHER; note = 2'-O-methyluridine-3'-phosphate
  modified_base 21: mod_base = OTHER; note = 2'-O-methyladenosine
tgaggagtaccaattgcctta

SEQ ID NO: 3374 - RNA, 21 nt, synthetic construct
  source 1..21: mol_type = other RNA
  modified_base 1: mod_base = OTHER; note = 2'-O-methylguanosine-3'-phosphate
  modified_base 2: mod_base = OTHER; note = 2'-O-methyladenosine-3'-phosphate
  modified_base 3: mod_base = OTHER; note = 2'-O-methylguanosine-3'-phosphate
  modified_base 4: mod_base = OTHER; note = 2'-O-methylguanosine-3'-phosphate
  modified_base 5: mod_base = OTHER; note = 2'-O-methyladenosine-3'-phosphate
  modified_base 6: mod_base = OTHER; note = 2'-O-methylguanosine-3'-phosphate
  modified_base 7: mod_base = OTHER; note = 2'-deoxy-2'-fluorouridine-3'-phosphate
  modified_base 8: mod_base = OTHER; note = 2'-O-methyladenosine-3'-phosphate
  modified_base 9: mod_base = OTHER; note = 2'-deoxy-2'-fluorocytidine-3'-phosphate
  modified_base 10: mod_base = OTHER; note = 2'-deoxy-2'-fluorocytidine-3'-phosphate
  modified_base 11: mod_base = OTHER; note = 2'-deoxy-2'-fluoroadenosine-3'-phosphate
  modified_base 12: mod_base = OTHER; note = 2'-O-methyladenosine-3'-phosphate
  modified_base 13: mod_base = OTHER; note = 2'-O-methyluridine-3'-phosphate
  modified_base 14: mod_base = OTHER; note = 2'-O-methyluridine-3'-phosphate
  modified_base 15: mod_base = OTHER; note = 2'-O-methylguanosine-3'-phosphate
  modified_base 16: mod_base = OTHER; note = 2'-O-methylcytidine-3'-phosphate
  modified_base 17: mod_base = OTHER; note = 2'-O-methylcytidine-3'-phosphate
  modified_base 18: mod_base = OTHER; note = 2'-O-methyluridine-3'-phosphate
  modified_base 19: mod_base = OTHER; note = 2'-O-methyluridine-3'-phosphate
  modified_base 20: mod_base = OTHER; note = 2'-O-methyladenosine-3'-phosphate
  modified_base 21: mod_base = OTHER; note = 2'-O-methyladenosine
gaggagtaccaattgccttaa

SEQ ID NO: 3375 - RNA, 21 nt, synthetic construct
  source 1..21: mol_type = other RNA
  modified_base 1: mod_base = OTHER; note = 2'-O-methyladenosine-3'-phosphate
  modified_base 2: mod_base = OTHER; note = 2'-O-methylguanosine-3'-phosphate
  modified_base 3: mod_base = OTHER; note = 2'-O-methylguanosine-3'-phosphate
  modified_base 4: mod_base = OTHER; note = 2'-O-methyladenosine-3'-phosphate
  modified_base 5: mod_base = OTHER; note = 2'-O-methylguanosine-3'-phosphate
  modified_base 6: mod_base = OTHER; note = 2'-O-methyluridine-3'-phosphate
  modified_base 7: mod_base = OTHER; note = 2'-deoxy-2'-fluoroadenosine-3'-phosphate
  modified_base 8: mod_base = OTHER; note = 2'-O-methylcytidine-3'-phosphate
  modified_base 9: mod_base = OTHER; note = 2'-deoxy-2'-fluorocytidine-3'-phosphate
  modified_base 10: mod_base = OTHER; note = 2'-deoxy-2'-fluoroadenosine-3'-phosphate
  modified_base 11: mod_base = OTHER; note = 2'-deoxy-2'-fluoroadenosine-3'-phosphate
  modified_base 12: mod_base = OTHER; note = 2'-O-methyluridine-3'-phosphate
  modified_base 13: mod_base = OTHER; note = 2'-O-methyluridine-3'-phosphate
  modified_base 14: mod_base = OTHER; note = 2'-O-methylguanosine-3'-phosphate
  modified_base 15: mod_base = OTHER; note = 2'-O-methylcytidine-3'-phosphate
  modified_base 16: mod_base = OTHER; note = 2'-O-methylcytidine-3'-phosphate
  modified_base 17: mod_base = OTHER; note = 2'-O-methyluridine-3'-phosphate
  modified_base 18: mod_base = OTHER; note = 2'-O-methyluridine-3'-phosphate
  modified_base 19: mod_base = OTHER; note = 2'-O-methyladenosine-3'-phosphate
  modified_base 20: mod_base = OTHER; note = 2'-O-methyluridine-3'-phosphate
  modified_base 21: mod_base = OTHER; note = 2'-O-methyladenosine
aggagtaccaattgccttata

SEQ ID NO: 3376 - RNA, 21 nt, synthetic construct
  source 1..21: mol_type = other RNA
  modified_base 1: mod_base = OTHER; note = 2'-O-methylguanosine-3'-phosphate
  modified_base 2: mod_base = OTHER; note = 2'-O-methylguanosine-3'-phosphate
  modified_base 3: mod_base = OTHER; note = 2'-O-methyladenosine-3'-phosphate
  modified_base 4: mod_base = OTHER; note = 2'-O-methylguanosine-3'-phosphate
  modified_base 5: mod_base = OTHER; note = 2'-O-methyluridine-3'-phosphate
  modified_base 6: mod_base = OTHER; note = 2'-O-methyladenosine-3'-phosphate
  modified_base 7: mod_base = OTHER; note = 2'-deoxy-2'-fluorocytidine-3'-phosphate
  modified_base 8: mod_base = OTHER; note = 2'-O-methylcytidine-3'-phosphate
  modified_base 9: mod_base = OTHER; note = 2'-deoxy-2'-fluoroadenosine-3'-phosphate
  modified_base 10: mod_base = OTHER; note = 2'-deoxy-2'-fluoroadenosine-3'-phosphate
  modified_base 11: mod_base = OTHER; note = 2'-deoxy-2'-fluorouridine-3'-phosphate
  modified_base 12: mod_base = OTHER; note = 2'-O-methyluridine-3'-phosphate
  modified_base 13: mod_base = OTHER; note = 2'-O-methylguanosine-3'-phosphate
  modified_base 14: mod_base = OTHER; note = 2'-O-methylcytidine-3'-phosphate
  modified_base 15: mod_base = OTHER; note = 2'-O-methylcytidine-3'-phosphate
  modified_base 16: mod_base = OTHER; note = 2'-O-methyluridine-3'-phosphate
  modified_base 17: mod_base = OTHER; note = 2'-O-methyluridine-3'-phosphate
  modified_base 18: mod_base = OTHER; note = 2'-O-methyladenosine-3'-phosphate
  modified_base 19: mod_base = OTHER; note = 2'-O-methyluridine-3'-phosphate
  modified_base 20: mod_base = OTHER; note = 2'-O-methyluridine-3'-phosphate
  modified_base 21: mod_base = OTHER; note = 2'-O-methyladenosine
ggagtaccaattgccttatta

SEQ ID NO: 3377 - RNA, 21 nt, synthetic construct
  source 1..21: mol_type = other RNA
  modified_base 1: mod_base = OTHER; note = 2'-O-methylguanosine-3'-phosphate
  modified_base 2: mod_base = OTHER; note = 2'-O-methyladenosine-3'-phosphate
  modified_base 3: mod_base = OTHER; note = 2'-O-methylguanosine-3'-phosphate
  modified_base 4: mod_base = OTHER; note = 2'-O-methyluridine-3'-phosphate
  modified_base 5: mod_base = OTHER; note = 2'-O-methyladenosine-3'-phosphate
  modified_base 6: mod_base = OTHER; note = 2'-O-methylcytidine-3'-phosphate
  modified_base 7: mod_base = OTHER; note = 2'-deoxy-2'-fluorocytidine-3'-phosphate
  modified_base 8: mod_base = OTHER; note = 2'-O-methyladenosine-3'-phosphate
  modified_base 9: mod_base = OTHER; note = 2'-deoxy-2'-fluoroadenosine-3'-phosphate
  modified_base 10: mod_base = OTHER; note = 2'-deoxy-2'-fluorouridine-3'-phosphate
  modified_base 11: mod_base = OTHER; note = 2'-deoxy-2'-fluorouridine-3'-phosphate
  modified_base 12: mod_base = OTHER; note = 2'-O-methylguanosine-3'-phosphate
  modified_base 13: mod_base = OTHER; note = 2'-O-methylcytidine-3'-phosphate
  modified_base 14: mod_base = OTHER; note = 2'-O-methylcytidine-3'-phosphate
  modified_base 15: mod_base = OTHER; note = 2'-O-methyluridine-3'-phosphate
  modified_base 16: mod_base = OTHER; note = 2'-O-methyluridine-3'-phosphate
  modified_base 17: mod_base = OTHER; note = 2'-O-methyladenosine-3'-phosphate
  modified_base 18: mod_base = OTHER; note = 2'-O-methyluridine-3'-phosphate
  modified_base 19: mod_base = OTHER; note = 2'-O-methyluridine-3'-phosphate
  modified_base 20: mod_base = OTHER; note = 2'-O-methyladenosine-3'-phosphate
  modified_base 21: mod_base = OTHER; note = 2'-O-methyladenosine
gagtaccaattgccttattaa

SEQ ID NO: 3378 - RNA, 21 nt, synthetic construct
  source 1..21: mol_type = other RNA
  modified_base 1: mod_base = OTHER; note = 2'-O-methyladenosine-3'-phosphate
  modified_base 2: mod_base = OTHER; note = 2'-O-methylguanosine-3'-phosphate
  modified_base 3: mod_base = OTHER; note = 2'-O-methyluridine-3'-phosphate
  modified_base 4: mod_base = OTHER; note = 2'-O-methyladenosine-3'-phosphate
  modified_base 5: mod_base = OTHER; note = 2'-O-methylcytidine-3'-phosphate
  modified_base 6: mod_base = OTHER; note = 2'-O-methylcytidine-3'-phosphate
  modified_base 7: mod_base = OTHER; note = 2'-deoxy-2'-fluoroadenosine-3'-phosphate
  modified_base 8: mod_base = OTHER; note = 2'-O-methyladenosine-3'-phosphate
  modified_base 9: mod_base = OTHER; note = 2'-deoxy-2'-fluorouridine-3'-phosphate
  modified_base 10: mod_base = OTHER; note = 2'-deoxy-2'-fluorouridine-3'-phosphate
  modified_base 11: mod_base = OTHER; note = 2'-deoxy-2'-fluoroguanosine-3'-phosphate
  modified_base 12: mod_base = OTHER; note = 2'-O-methylcytidine-3'-phosphate
  modified_base 13: mod_base = OTHER; note = 2'-O-methylcytidine-3'-phosphate
  modified_base 14: mod_base = OTHER; note = 2'-O-methyluridine-3'-phosphate
  modified_base 15: mod_base = OTHER; note = 2'-O-methyluridine-3'-phosphate
  modified_base 16: mod_base = OTHER; note = 2'-O-methyladenosine-3'-phosphate
  modified_base 17: mod_base = OTHER; note = 2'-O-methyluridine-3'-phosphate
  modified_base 18: mod_base = OTHER; note = 2'-O-methyluridine-3'-phosphate
  modified_base 19: mod_base = OTHER; note = 2'-O-methyladenosine-3'-phosphate
  modified_base 20: mod_base = OTHER; note = 2'-O-methyluridine-3'-phosphate
  modified_base 21: mod_base = OTHER; note = 2'-O-methyladenosine
agtaccaattgccttattata

SEQ ID NO: 3379 - RNA, 21 nt, synthetic construct
  source 1..21: mol_type = other RNA
  modified_base 1: mod_base = OTHER; note = 2'-O-methylguanosine-3'-phosphate
  modified_base 2: mod_base = OTHER; note = 2'-O-methyluridine-3'-phosphate
  modified_base 3: mod_base = OTHER; note = 2'-O-methyladenosine-3'-phosphate
  modified_base 4: mod_base = OTHER; note = 2'-O-methylcytidine-3'-phosphate
  modified_base 5: mod_base = OTHER; note = 2'-O-methylcytidine-3'-phosphate
  modified_base 6: mod_base = OTHER; note = 2'-O-methyladenosine-3'-phosphate
  modified_base 7: mod_base = OTHER; note = 2'-deoxy-2'-fluoroadenosine-3'-phosphate
  modified_base 8: mod_base = OTHER; note = 2'-O-methyluridine-3'-phosphate
  modified_base 9: mod_base = OTHER; note = 2'-deoxy-2'-fluorouridine-3'-phosphate
  modified_base 10: mod_base = OTHER; note = 2'-deoxy-2'-fluoroguanosine-3'-phosphate
  modified_base 11: mod_base = OTHER; note = 2'-deoxy-2'-fluorocytidine-3'-phosphate
  modified_base 12: mod_base = OTHER; note = 2'-O-methylcytidine-3'-phosphate
  modified_base 13: mod_base = OTHER; note = 2'-O-methyluridine-3'-phosphate
  modified_base 14: mod_base = OTHER; note = 2'-O-methyluridine-3'-phosphate
  modified_base 15: mod_base = OTHER; note = 2'-O-methyladenosine-3'-phosphate
  modified_base 16: mod_base = OTHER; note = 2'-O-methyluridine-3'-phosphate
  modified_base 17: mod_base = OTHER; note = 2'-O-methyluridine-3'-phosphate
  modified_base 18: mod_base = OTHER; note = 2'-O-methyladenosine-3'-phosphate
  modified_base 19: mod_base = OTHER; note = 2'-O-methyluridine-3'-phosphate
  modified_base 20: mod_base = OTHER; note = 2'-O-methylguanosine-3'-phosphate
  modified_base 21: mod_base = OTHER; note = 2'-O-methyladenosine
gtaccaattgccttattatga

SEQ ID NO: 3380 - RNA, 21 nt, synthetic construct
  source 1..21: mol_type = other RNA
  modified_base 1: mod_base = OTHER; note = 2'-O-methyluridine-3'-phosphate
  modified_base 2: mod_base = OTHER; note = 2'-O-methyladenosine-3'-phosphate
  modified_base 3: mod_base = OTHER; note = 2'-O-methylcytidine-3'-phosphate
  modified_base 4: mod_base = OTHER; note = 2'-O-methylcytidine-3'-phosphate
  modified_base 5: mod_base = OTHER; note = 2'-O-methyladenosine-3'-phosphate
  modified_base 6: mod_base = OTHER; note = 2'-O-methyladenosine-3'-phosphate
  modified_base 7: mod_base = OTHER; note = 2'-deoxy-2'-fluorouridine-3'-phosphate
  modified_base 8: mod_base = OTHER; note = 2'-O-methyluridine-3'-phosphate
  modified_base 9: mod_base = OTHER; note = 2'-deoxy-2'-fluoroguanosine-3'-phosphate
  modified_base 10: mod_base = OTHER; note = 2'-deoxy-2'-fluorocytidine-3'-phosphate
  modified_base 11: mod_base = OTHER; note = 2'-deoxy-2'-fluorocytidine-3'-phosphate
  modified_base 12: mod_base = OTHER; note = 2'-O-methyluridine-3'-phosphate
  modified_base 13: mod_base = OTHER; note = 2'-O-methyluridine-3'-phosphate
  modified_base 14: mod_base = OTHER; note = 2'-O-methyladenosine-3'-phosphate
  modified_base 15: mod_base = OTHER; note = 2'-O-methyluridine-3'-phosphate
  modified_base 16: mod_base = OTHER; note = 2'-O-methyluridine-3'-phosphate
  modified_base 17: mod_base = OTHER; note = 2'-O-methyladenosine-3'-phosphate
  modified_base 18: mod_base = OTHER; note = 2'-O-methyluridine-3'-phosphate
  modified_base 19: mod_base = OTHER; note = 2'-O-methylguanosine-3'-phosphate
  modified_base 20: mod_base = OTHER; note = 2'-O-methyladenosine-3'-phosphate
  modified_base 21: mod_base = OTHER; note = 2'-O-methyladenosine
taccaattgccttattatgaa

SEQ ID NO: 3381 - RNA, 21 nt, synthetic construct
  source 1..21: mol_type = other RNA
  modified_base 1: mod_base = OTHER; note = 2'-O-methyladenosine-3'-phosphate
  modified_base 2: mod_base = OTHER; note = 2'-O-methylcytidine-3'-phosphate
  modified_base 3: mod_base = OTHER; note = 2'-O-methylcytidine-3'-phosphate
  modified_base 4: mod_base = OTHER; note = 2'-O-methyladenosine-3'-phosphate
  modified_base 5: mod_base = OTHER; note = 2'-O-methyladenosine-3'-phosphate
  modified_base 6: mod_base = OTHER; note = 2'-O-methyluridine-3'-phosphate
  modified_base 7: mod_base = OTHER; note = 2'-deoxy-2'-fluorouridine-3'-phosphate
  modified_base 8: mod_base = OTHER; note = 2'-O-methylguanosine-3'-phosphate
  modified_base 9: mod_base = OTHER; note = 2'-deoxy-2'-fluorocytidine-3'-phosphate
  modified_base 10: mod_base = OTHER; note = 2'-deoxy-2'-fluorocytidine-3'-phosphate
  modified_base 11: mod_base = OTHER; note = 2'-deoxy-2'-fluorouridine-3'-phosphate
  modified_base 12: mod_base = OTHER; note = 2'-O-methyluridine-3'-phosphate
  modified_base 13: mod_base = OTHER; note = 2'-O-methyladenosine-3'-phosphate
  modified_base 14: mod_base = OTHER; note = 2'-O-methyluridine-3'-phosphate
  modified_base 15: mod_base = OTHER; note = 2'-O-methyluridine-3'-phosphate
  modified_base 16: mod_base = OTHER; note = 2'-O-methyladenosine-3'-phosphate
  modified_base 17: mod_base = OTHER; note = 2'-O-methyluridine-3'-phosphate
  modified_base 18: mod_base = OTHER; note = 2'-O-methylguanosine-3'-phosphate
  modified_base 19: mod_base = OTHER; note = 2'-O-methyladenosine-3'-phosphate
  modified_base 20: mod_base = OTHER; note = 2'-O-methylcytidine-3'-phosphate
  modified_base 21: mod_base = OTHER; note = 2'-O-methyladenosine
accaattgccttattatgaca

SEQ ID NO: 3382 - RNA, 21 nt, synthetic construct
  source 1..21: mol_type = other RNA
  modified_base 1: mod_base = OTHER; note = 2'-O-methylcytidine-3'-phosphate
  modified_base 2: mod_base = OTHER; note = 2'-O-methylcytidine-3'-phosphate
  modified_base 3: mod_base = OTHER; note = 2'-O-methyladenosine-3'-phosphate
  modified_base 4: mod_base = OTHER; note = 2'-O-methyladenosine-3'-phosphate
  modified_base 5: mod_base = OTHER; note = 2'-O-methyluridine-3'-phosphate
  modified_base 6: mod_base = OTHER; note = 2'-O-methyluridine-3'-phosphate
  modified_base 7: mod_base = OTHER; note = 2'-deoxy-2'-fluoroguanosine-3'-phosphate
  modified_base 8: mod_base = OTHER; note = 2'-O-methylcytidine-3'-phosphate
  modified_base 9: mod_base = OTHER; note = 2'-deoxy-2'-fluorocytidine-3'-phosphate
  modified_base 10: mod_base = OTHER; note = 2'-deoxy-2'-fluorouridine-3'-phosphate
  modified_base 11: mod_base = OTHER; note = 2'-deoxy-2'-fluorouridine-3'-phosphate
  modified_base 12: mod_base = OTHER; note = 2'-O-methyladenosine-3'-phosphate
  modified_base 13: mod_base = OTHER; note = 2'-O-methyluridine-3'-phosphate
  modified_base 14: mod_base = OTHER; note = 2'-O-methyluridine-3'-phosphate
  modified_base 15: mod_base = OTHER; note = 2'-O-methyladenosine-3'-phosphate
  modified_base 16: mod_base = OTHER; note = 2'-O-methyluridine-3'-phosphate
  modified_base 17: mod_base = OTHER; note = 2'-O-methylguanosine-3'-phosphate
  modified_base 18: mod_base = OTHER; note = 2'-O-methyladenosine-3'-phosphate
  modified_base 19: mod_base = OTHER; note = 2'-O-methylcytidine-3'-phosphate
  modified_base 20: mod_base = OTHER; note = 2'-O-methyladenosine-3'-phosphate
  modified_base 21: mod_base = OTHER; note = 2'-O-methyladenosine
ccaattgccttattatgacaa

SEQ ID NO: 3383 - RNA, 21 nt, synthetic construct
  source 1..21: mol_type = other RNA
  modified_base 1: mod_base = OTHER; note = 2'-O-methylcytidine-3'-phosphate
  modified_base 2: mod_base = OTHER; note = 2'-O-methyladenosine-3'-phosphate
  modified_base 3: mod_base = OTHER; note = 2'-O-methyladenosine-3'-phosphate
  modified_base 4: mod_base = OTHER; note = 2'-O-methyluridine-3'-phosphate
  modified_base 5: mod_base = OTHER; note = 2'-O-methyluridine-3'-phosphate
  modified_base 6: mod_base = OTHER; note = 2'-O-methylguanosine-3'-phosphate
  modified_base 7: mod_base = OTHER; note = 2'-deoxy-2'-fluorocytidine-3'-phosphate
  modified_base 8: mod_base = OTHER; note = 2'-O-methylcytidine-3'-phosphate
  modified_base 9: mod_base = OTHER; note = 2'-deoxy-2'-fluorouridine-3'-phosphate
  modified_base 10: mod_base = OTHER; note = 2'-deoxy-2'-fluorouridine-3'-phosphate
  modified_base 11: mod_base = OTHER; note = 2'-deoxy-2'-fluoroadenosine-3'-phosphate
  modified_base 12: mod_base = OTHER; note = 2'-O-methyluridine-3'-phosphate
  modified_base 13: mod_base = OTHER; note = 2'-O-methyluridine-3'-phosphate
  modified_base 14: mod_base = OTHER; note = 2'-O-methyladenosine-3'-phosphate
  modified_base 15: mod_base = OTHER; note = 2'-O-methyluridine-3'-phosphate
  modified_base 16: mod_base = OTHER; note = 2'-O-methylguanosine-3'-phosphate
  modified_base 17: mod_base = OTHER; note = 2'-O-methyladenosine-3'-phosphate
  modified_base 18: mod_base = OTHER; note = 2'-O-methylcytidine-3'-phosphate
  modified_base 19: mod_base = OTHER; note = 2'-O-methyladenosine-3'-phosphate
  modified_base 20: mod_base = OTHER; note = 2'-O-methyluridine-3'-phosphate
  modified_base 21: mod_base = OTHER; note = 2'-O-methyladenosine
caattgccttattatgacata

SEQ ID NO: 3384 - RNA, 21 nt, synthetic construct
  source 1..21: mol_type = other RNA
  modified_base 1: mod_base = OTHER; note = 2'-O-methyladenosine-3'-phosphate
  modified_base 2: mod_base = OTHER; note = 2'-O-methyladenosine-3'-phosphate
  modified_base 3: mod_base = OTHER; note = 2'-O-methyluridine-3'-phosphate
  modified_base 4: mod_base = OTHER; note = 2'-O-methyluridine-3'-phosphate
  modified_base 5: mod_base = OTHER; note = 2'-O-methylguanosine-3'-phosphate
  modified_base 6: mod_base = OTHER; note = 2'-O-methylcytidine-3'-phosphate
  modified_base 7: mod_base = OTHER; note = 2'-deoxy-2'-fluorocytidine-3'-phosphate
  modified_base 8: mod_base = OTHER; note = 2'-O-methyluridine-3'-phosphate
  modified_base 9: mod_base = OTHER; note = 2'-deoxy-2'-fluorouridine-3'-phosphate
  modified_base 10: mod_base = OTHER; note = 2'-deoxy-2'-fluoroadenosine-3'-phosphate
  modified_base 11: mod_base = OTHER; note = 2'-deoxy-2'-fluorouridine-3'-phosphate
  modified_base 12: mod_base = OTHER; note = 2'-O-methyluridine-3'-phosphate
  modified_base 13: mod_base = OTHER; note = 2'-O-methyladenosine-3'-phosphate
  modified_base 14: mod_base = OTHER; note = 2'-O-methyluridine-3'-phosphate
  modified_base 15: mod_base = OTHER; note = 2'-O-methylguanosine-3'-phosphate
  modified_base 16: mod_base = OTHER; note = 2'-O-methyladenosine-3'-phosphate
  modified_base 17: mod_base = OTHER; note = 2'-O-methylcytidine-3'-phosphate
  modified_base 18: mod_base = OTHER; note = 2'-O-methyladenosine-3'-phosphate
  modified_base 19: mod_base = OTHER; note = 2'-O-methyluridine-3'-phosphate
  modified_base 20: mod_base = OTHER; note = 2'-O-methylguanosine-3'-phosphate
  modified_base 21: mod_base = OTHER; note = 2'-O-methyladenosine
aattgccttattatgacatga

SEQ ID NO: 3385 - RNA, 21 nt, synthetic construct
  source 1..21: mol_type = other RNA
  modified_base 1: mod_base = OTHER; note = 2'-O-methyladenosine-3'-phosphate
  modified_base 2: mod_base = OTHER; note = 2'-O-methyluridine-3'-phosphate
  modified_base 3: mod_base = OTHER; note = 2'-O-methyluridine-3'-phosphate
  modified_base 4: mod_base = OTHER; note = 2'-O-methylguanosine-3'-phosphate
  modified_base 5: mod_base = OTHER; note = 2'-O-methylcytidine-3'-phosphate
  modified_base 6: mod_base = OTHER; note = 2'-O-methylcytidine-3'-phosphate
  modified_base 7: mod_base = OTHER; note = 2'-deoxy-2'-fluorouridine-3'-phosphate
  modified_base 8: mod_base = OTHER; note = 2'-O-methyluridine-3'-phosphate
  modified_base 9: mod_base = OTHER; note = 2'-deoxy-2'-fluoroadenosine-3'-phosphate
  modified_base 10: mod_base = OTHER; note = 2'-deoxy-2'-fluorouridine-3'-phosphate
  modified_base 11: mod_base = OTHER; note = 2'-deoxy-2'-fluorouridine-3'-phosphate
  modified_base 12: mod_base = OTHER; note = 2'-O-methyladenosine-3'-phosphate
  modified_base 13: mod_base = OTHER; note = 2'-O-methyluridine-3'-phosphate
  modified_base 14: mod_base = OTHER; note = 2'-O-methylguanosine-3'-phosphate
  modified_base 15: mod_base = OTHER; note = 2'-O-methyladenosine-3'-phosphate
  modified_base 16: mod_base = OTHER; note = 2'-O-methylcytidine-3'-phosphate
  modified_base 17: mod_base = OTHER; note = 2'-O-methyladenosine-3'-phosphate
  modified_base 18: mod_base = OTHER; note = 2'-O-methyluridine-3'-phosphate
  modified_base 19: mod_base = OTHER; note = 2'-O-methylguanosine-3'-phosphate
  modified_base 20: mod_base = OTHER; note = 2'-O-methylguanosine-3'-phosphate
  modified_base 21: mod_base = OTHER; note = 2'-O-methyladenosine
attgccttattatgacatgga

SEQ ID NO: 3386 - RNA, 21 nt, synthetic construct
  source 1..21: mol_type = other RNA
  modified_base 1: mod_base = OTHER; note = 2'-O-methyluridine-3'-phosphate
  modified_base 2: mod_base = OTHER; note = 2'-O-methyluridine-3'-phosphate
  modified_base 3: mod_base = OTHER; note = 2'-O-methylguanosine-3'-phosphate
  modified_base 4: mod_base = OTHER; note = 2'-O-methylcytidine-3'-phosphate
  modified_base 5: mod_base = OTHER; note = 2'-O-methylcytidine-3'-phosphate
  modified_base 6: mod_base = OTHER; note = 2'-O-methyluridine-3'-phosphate
  modified_base 7: mod_base = OTHER; note = 2'-deoxy-2'-fluorouridine-3'-phosphate
  modified_base 8: mod_base = OTHER; note = 2'-O-methyladenosine-3'-phosphate
  modified_base 9: mod_base = OTHER; note = 2'-deoxy-2'-fluorouridine-3'-phosphate
  modified_base 10: mod_base = OTHER; note = 2'-deoxy-2'-fluorouridine-3'-phosphate
  modified_base 11: mod_base = OTHER; note = 2'-deoxy-2'-fluoroadenosine-3'-phosphate
  modified_base 12: mod_base = OTHER; note = 2'-O-methyluridine-3'-phosphate
  modified_base 13: mod_base = OTHER; note = 2'-O-methylguanosine-3'-phosphate
  modified_base 14: mod_base = OTHER; note = 2'-O-methyladenosine-3'-phosphate
  modified_base 15: mod_base = OTHER; note = 2'-O-methylcytidine-3'-phosphate
  modified_base 16: mod_base = OTHER; note = 2'-O-methyladenosine-3'-phosphate
  modified_base 17: mod_base = OTHER; note = 2'-O-methyluridine-3'-phosphate
  modified_base 18: mod_base = OTHER; note = 2'-O-methylguanosine-3'-phosphate
  modified_base 19: mod_base = OTHER; note = 2'-O-methylguanosine-3'-phosphate
  modified_base 20: mod_base = OTHER; note = 2'-O-methyluridine-3'-phosphate
  modified_base 21: mod_base = OTHER; note = 2'-O-methyladenosine
ttgccttattatgacatggta

SEQ ID NO: 3387 - RNA, 21 nt, synthetic construct
  source 1..21: mol_type = other RNA
  modified_base 1: mod_base = OTHER; note = 2'-O-methyluridine-3'-phosphate
  modified_base 2: mod_base = OTHER; note = 2'-O-methylguanosine-3'-phosphate
  modified_base 3: mod_base = OTHER; note = 2'-O-methylcytidine-3'-phosphate
  modified_base 4: mod_base = OTHER; note = 2'-O-methylcytidine-3'-phosphate
  modified_base 5: mod_base = OTHER; note = 2'-O-methyluridine-3'-phosphate
  modified_base 6: mod_base = OTHER; note = 2'-O-methyluridine-3'-phosphate
  modified_base 7: mod_base = OTHER; note = 2'-deoxy-2'-fluoroadenosine-3'-phosphate
  modified_base 8: mod_base = OTHER; note = 2'-O-methyluridine-3'-phosphate
  modified_base 9: mod_base = OTHER; note = 2'-deoxy-2'-fluorouridine-3'-phosphate
  modified_base 10: mod_base = OTHER; note = 2'-deoxy-2'-fluoroadenosine-3'-phosphate
  modified_base 11: mod_base = OTHER; note = 2'-deoxy-2'-fluorouridine-3'-phosphate
  modified_base 12: mod_base = OTHER; note = 2'-O-methylguanosine-3'-phosphate
  modified_base 13: mod_base = OTHER; note = 2'-O-methyladenosine-3'-phosphate
  modified_base 14: mod_base = OTHER; note = 2'-O-methylcytidine-3'-phosphate
  modified_base 15: mod_base = OTHER; note = 2'-O-methyladenosine-3'-phosphate
  modified_base 16: mod_base = OTHER; note = 2'-O-methyluridine-3'-phosphate
  modified_base 17: mod_base = OTHER; note = 2'-O-methylguanosine-3'-phosphate
  modified_base 18: mod_base = OTHER; note = 2'-O-methylguanosine-3'-phosphate
  modified_base 19: mod_base = OTHER; note = 2'-O-methyluridine-3'-phosphate
  modified_base 20: mod_base = OTHER; note = 2'-O-methylguanosine-3'-phosphate
  modified_base 21: mod_base = OTHER; note = 2'-O-methyladenosine
tgccttattatgacatggtga

SEQ ID NO: 3388 - RNA, 21 nt, synthetic construct
  source 1..21: mol_type = other RNA
  modified_base 1: mod_base = OTHER; note = 2'-O-methylguanosine-3'-phosphate
  modified_base 2: mod_base = OTHER; note = 2'-O-methylcytidine-3'-phosphate
  modified_base 3: mod_base = OTHER; note = 2'-O-methylcytidine-3'-phosphate
  modified_base 4: mod_base = OTHER; note = 2'-O-methyluridine-3'-phosphate
  modified_base 5: mod_base = OTHER; note = 2'-O-methyluridine-3'-phosphate
  modified_base 6: mod_base = OTHER; note = 2'-O-methyladenosine-3'-phosphate
  modified_base 7: mod_base = OTHER; note = 2'-deoxy-2'-fluorouridine-3'-phosphate
  modified_base 8: mod_base = OTHER; note = 2'-O-methyluridine-3'-phosphate
  modified_base 9: mod_base = OTHER; note = 2'-deoxy-2'-fluoroadenosine-3'-phosphate
  modified_base 10: mod_base = OTHER; note = 2'-deoxy-2'-fluorouridine-3'-phosphate
  modified_base 11: mod_base = OTHER; note = 2'-deoxy-2'-fluoroguanosine-3'-phosphate
  modified_base 12: mod_base = OTHER; note = 2'-O-methyladenosine-3'-phosphate
  modified_base 13: mod_base = OTHER; note = 2'-O-methylcytidine-3'-phosphate
  modified_base 14: mod_base = OTHER; note = 2'-O-methyladenosine-3'-phosphate
  modified_base 15: mod_base = OTHER; note = 2'-O-methyluridine-3'-phosphate
  modified_base 16: mod_base = OTHER; note = 2'-O-methylguanosine-3'-phosphate
  modified_base 17: mod_base = OTHER; note = 2'-O-methylguanosine-3'-phosphate
  modified_base 18: mod_base = OTHER; note = 2'-O-methyluridine-3'-phosphate
  modified_base 19: mod_base = OTHER; note = 2'-O-methylguanosine-3'-phosphate
  modified_base 20: mod_base = OTHER; note = 2'-O-methylcytidine-3'-phosphate
  modified_base 21: mod_base = OTHER; note = 2'-O-methyladenosine
gccttattatgacatggtgca

SEQ ID NO: 3389 - RNA, 21 nt, synthetic construct
  source 1..21: mol_type = other RNA
  modified_base 1: mod_base = OTHER; note = 2'-O-methylcytidine-3'-phosphate
  modified_base 2: mod_base = OTHER; note = 2'-O-methylcytidine-3'-phosphate
  modified_base 3: mod_base = OTHER; note = 2'-O-methyluridine-3'-phosphate
  modified_base 4: mod_base = OTHER; note = 2'-O-methyluridine-3'-phosphate
  modified_base 5: mod_base = OTHER; note = 2'-O-methyladenosine-3'-phosphate
  modified_base 6: mod_base = OTHER; note = 2'-O-methyluridine-3'-phosphate
  modified_base 7: mod_base = OTHER; note = 2'-deoxy-2'-fluorouridine-3'-phosphate
  modified_base 8: mod_base = OTHER; note = 2'-O-methyladenosine-3'-phosphate
  modified_base 9: mod_base = OTHER; note = 2'-deoxy-2'-fluorouridine-3'-phosphate
  modified_base 10: mod_base = OTHER; note = 2'-deoxy-2'-fluoroguanosine-3'-phosphate
  modified_base 11: mod_base = OTHER; note = 2'-deoxy-2'-fluoroadenosine-3'-phosphate
  modified_base 12: mod_base = OTHER; note = 2'-O-methylcytidine-3'-phosphate
  modified_base 13: mod_base = OTHER; note = 2'-O-methyladenosine-3'-phosphate
  modified_base 14: mod_base = OTHER; note = 2'-O-methyluridine-3'-phosphate
  modified_base 15: mod_base = OTHER; note = 2'-O-methylguanosine-3'-phosphate
  modified_base 16: mod_base = OTHER; note = 2'-O-methylguanosine-3'-phosphate
  modified_base 17: mod_base = OTHER; note = 2'-O-methyluridine-3'-phosphate
  modified_base 18: mod_base = OTHER; note = 2'-O-methylguanosine-3'-phosphate
  modified_base 19: mod_base = OTHER; note = 2'-O-methylcytidine-3'-phosphate
  modified_base 20: mod_base = OTHER; note = 2'-O-methylcytidine-3'-phosphate
  modified_base 21: mod_base = OTHER; note = 2'-O-methyladenosine
ccttattatgacatggtgcca

SEQ ID NO: 3390 - RNA, 21 nt, synthetic construct
  source 1..21: mol_type = other RNA
  modified_base 1: mod_base = OTHER; note = 2'-O-methylcytidine-3'-phosphate
  modified_base 2: mod_base = OTHER; note = 2'-O-methyluridine-3'-phosphate
  modified_base 3: mod_base = OTHER; note = 2'-O-methyluridine-3'-phosphate
  modified_base 4: mod_base = OTHER; note = 2'-O-methyladenosine-3'-phosphate
  modified_base 5: mod_base = OTHER; note = 2'-O-methyluridine-3'-phosphate
  modified_base 6: mod_base = OTHER; note = 2'-O-methyluridine-3'-phosphate
  modified_base 7: mod_base = OTHER; note = 2'-deoxy-2'-fluoroadenosine-3'-phosphate
  modified_base 8: mod_base = OTHER; note = 2'-O-methyluridine-3'-phosphate
  modified_base 9: mod_base = OTHER; note = 2'-deoxy-2'-fluoroguanosine-3'-phosphate
  modified_base 10: mod_base = OTHER; note = 2'-deoxy-2'-fluoroadenosine-3'-phosphate
  modified_base 11: mod_base = OTHER; note = 2'-deoxy-2'-fluorocytidine-3'-phosphate
  modified_base 12: mod_base = OTHER; note = 2'-O-methyladenosine-3'-phosphate
  modified_base 13: mod_base = OTHER; note = 2'-O-methyluridine-3'-phosphate
  modified_base 14: mod_base = OTHER; note = 2'-O-methylguanosine-3'-phosphate
  modified_base 15: mod_base = OTHER; note = 2'-O-methylguanosine-3'-phosphate
  modified_base 16: mod_base = OTHER; note = 2'-O-methyluridine-3'-phosphate
  modified_base 17: mod_base = OTHER; note = 2'-O-methylguanosine-3'-phosphate
  modified_base 18: mod_base = OTHER; note = 2'-O-methylcytidine-3'-phosphate
  modified_base 19: mod_base = OTHER; note = 2'-O-methylcytidine-3'-phosphate
  modified_base 20: mod_base = OTHER; note = 2'-O-methyluridine-3'-phosphate
  modified_base 21: mod_base = OTHER; note = 2'-O-methyladenosine
cttattatgacatggtgccta

SEQ ID NO: 3391 - RNA, 21 nt, synthetic construct
  source 1..21: mol_type = other RNA
  modified_base 1: mod_base = OTHER; note = 2'-O-methyluridine-3'-phosphate
  modified_base 2: mod_base = OTHER; note = 2'-O-methyluridine-3'-phosphate
  modified_base 3: mod_base = OTHER; note = 2'-O-methyladenosine-3'-phosphate
  modified_base 4: mod_base = OTHER; note = 2'-O-methyluridine-3'-phosphate
  modified_base 5: mod_base = OTHER; note = 2'-O-methyluridine-3'-phosphate
  modified_base 6: mod_base = OTHER; note = 2'-O-methyladenosine-3'-phosphate
  modified_base 7: mod_base = OTHER; note = 2'-deoxy-2'-fluorouridine-3'-phosphate
  modified_base 8: mod_base = OTHER; note = 2'-O-methylguanosine-3'-phosphate
  modified_base 9: mod_base = OTHER; note = 2'-deoxy-2'-fluoroadenosine-3'-phosphate
  modified_base 10: mod_base = OTHER; note = 2'-deoxy-2'-fluorocytidine-3'-phosphate
  modified_base 11: mod_base = OTHER; note = 2'-deoxy-2'-fluoroadenosine-3'-phosphate
  modified_base 12: mod_base = OTHER; note = 2'-O-methyluridine-3'-phosphate
  modified_base 13: mod_base = OTHER; note = 2'-O-methylguanosine-3'-phosphate
  modified_base 14: mod_base = OTHER; note = 2'-O-methylguanosine-3'-phosphate
  modified_base 15: mod_base = OTHER; note = 2'-O-methyluridine-3'-phosphate
  modified_base 16: mod_base = OTHER; note = 2'-O-methylguanosine-3'-phosphate
  modified_base 17: mod_base = OTHER; note = 2'-O-methylcytidine-3'-phosphate
  modified_base 18: mod_base = OTHER; note = 2'-O-methylcytidine-3'-phosphate
  modified_base 19: mod_base = OTHER; note = 2'-O-methyluridine-3'-phosphate
  modified_base 20: mod_base = OTHER; note = 2'-O-methyluridine-3'-phosphate
  modified_base 21: mod_base = OTHER; note = 2'-O-methyladenosine
ttattatgacatggtgcctta

SEQ ID NO: 3392 - RNA, 21 nt, synthetic construct
  source 1..21: mol_type = other RNA
  modified_base 1: mod_base = OTHER; note = 2'-O-methyluridine-3'-phosphate
  modified_base 2: mod_base = OTHER; note = 2'-O-methyladenosine-3'-phosphate
  modified_base 3: mod_base = OTHER; note = 2'-O-methyluridine-3'-phosphate
  modified_base 4: mod_base = OTHER; note = 2'-O-methyluridine-3'-phosphate
  modified_base 5: mod_base = OTHER; note = 2'-O-methyladenosine-3'-phosphate
  modified_base 6: mod_base = OTHER; note = 2'-O-methyluridine-3'-phosphate
  modified_base 7: mod_base = OTHER; note = 2'-deoxy-2'-fluoroguanosine-3'-phosphate
  modified_base 8: mod_base = OTHER; note = 2'-O-methyladenosine-3'-phosphate
  modified_base 9: mod_base = OTHER; note = 2'-deoxy-2'-fluorocytidine-3'-phosphate
  modified_base 10: mod_base = OTHER; note = 2'-deoxy-2'-fluoroadenosine-3'-phosphate
  modified_base 11: mod_base = OTHER; note = 2'-deoxy-2'-fluorouridine-3'-phosphate
  modified_base 12: mod_base = OTHER; note = 2'-O-methylguanosine-3'-phosphate
  modified_base 13: mod_base = OTHER; note = 2'-O-methylguanosine-3'-phosphate
  modified_base 14: mod_base = OTHER; note = 2'-O-methyluridine-3'-phosphate
  modified_base 15: mod_base = OTHER; note = 2'-O-methylguanosine-3'-phosphate
  modified_base 16: mod_base = OTHER; note = 2'-O-methylcytidine-3'-phosphate
  modified_base 17: mod_base = OTHER; note = 2'-O-methylcytidine-3'-phosphate
  modified_base 18: mod_base = OTHER; note = 2'-O-methyluridine-3'-phosphate
  modified_base 19: mod_base = OTHER; note = 2'-O-methyluridine-3'-phosphate
  modified_base 20: mod_base = OTHER; note = 2'-O-methylcytidine-3'-phosphate
  modified_base 21: mod_base = OTHER; note = 2'-O-methyladenosine
tattatgacatggtgccttca

SEQ ID NO: 3393 - RNA, 21 nt, synthetic construct
  source 1..21: mol_type = other RNA
  modified_base 1: mod_base = OTHER; note = 2'-O-methyladenosine-3'-phosphate
  modified_base 2: mod_base = OTHER; note = 2'-O-methyluridine-3'-phosphate
  modified_base 3: mod_base = OTHER; note = 2'-O-methyluridine-3'-phosphate
  modified_base 4: mod_base = OTHER; note = 2'-O-methyladenosine-3'-phosphate
  modified_base 5: mod_base = OTHER; note = 2'-O-methyluridine-3'-phosphate
  modified_base 6: mod_base = OTHER; note = 2'-O-methylguanosine-3'-phosphate
  modified_base 7: mod_base = OTHER; note = 2'-deoxy-2'-fluoroadenosine-3'-phosphate
  modified_base 8: mod_base = OTHER; note = 2'-O-methylcytidine-3'-phosphate
  modified_base 9: mod_base = OTHER; note = 2'-deoxy-2'-fluoroadenosine-3'-phosphate
  modified_base 10: mod_base = OTHER; note = 2'-deoxy-2'-fluorouridine-3'-phosphate
  modified_base 11: mod_base = OTHER; note = 2'-deoxy-2'-fluoroguanosine-3'-phosphate
  modified_base 12: mod_base = OTHER; note = 2'-O-methylguanosine-3'-phosphate
  modified_base 13: mod_base = OTHER; note = 2'-O-methyluridine-3'-phosphate
  modified_base 14: mod_base = OTHER; note = 2'-O-methylguanosine-3'-phosphate
  modified_base 15: mod_base = OTHER; note = 2'-O-methylcytidine-3'-phosphate
  modified_base 16: mod_base = OTHER; note = 2'-O-methylcytidine-3'-phosphate
  modified_base 17: mod_base = OTHER; note = 2'-O-methyluridine-3'-phosphate
  modified_base 18: mod_base = OTHER; note = 2'-O-methyluridine-3'-phosphate
  modified_base 19: mod_base = OTHER; note = 2'-O-methylcytidine-3'-phosphate
  modified_base 20: mod_base = OTHER; note = 2'-O-methyladenosine-3'-phosphate
  modified_base 21: mod_base = OTHER; note = 2'-O-methyladenosine
attatgacatggtgccttcaa

SEQ ID NO: 3394 - RNA, 21 nt, synthetic construct
  source 1..21: mol_type = other RNA
  modified_base 1: mod_base = OTHER; note = 2'-O-methyladenosine-3'-phosphate
  modified_base 2: mod_base = OTHER; note = 2'-O-methyluridine-3'-phosphate
  modified_base 3: mod_base = OTHER; note = 2'-O-methyladenosine-3'-phosphate
  modified_base 4: mod_base = OTHER; note = 2'-O-methylguanosine-3'-phosphate
  modified_base 5: mod_base = OTHER; note = 2'-O-methyladenosine-3'-phosphate
  modified_base 6: mod_base = OTHER; note = 2'-O-methylguanosine-3'-phosphate
  modified_base 7: mod_base = OTHER; note = 2'-deoxy-2'-fluoroguanosine-3'-phosphate
  modified_base 8: mod_base = OTHER; note = 2'-O-methyladenosine-3'-phosphate
  modified_base 9: mod_base = OTHER; note = 2'-deoxy-2'-fluoroadenosine-3'-phosphate
  modified_base 10: mod_base = OTHER; note = 2'-deoxy-2'-fluoroadenosine-3'-phosphate
  modified_base 11: mod_base = OTHER; note = 2'-deoxy-2'-fluorouridine-3'-phosphate
  modified_base 12: mod_base = OTHER; note = 2'-O-methylguanosine-3'-phosphate
  modified_base 13: mod_base = OTHER; note = 2'-O-methyladenosine-3'-phosphate
  modified_base 14: mod_base = OTHER; note = 2'-O-methylguanosine-3'-phosphate
  modified_base 15: mod_base = OTHER; note = 2'-O-methyladenosine-3'-phosphate
  modified_base 16: mod_base = OTHER; note = 2'-O-methyladenosine-3'-phosphate
  modified_base 17: mod_base = OTHER; note = 2'-O-methyladenosine-3'-phosphate
  modified_base 18: mod_base = OTHER; note = 2'-O-methylguanosine-3'-phosphate
  modified_base 19: mod_base = OTHER; note = 2'-O-methylguanosine-3'-phosphate
  modified_base 20: mod_base = OTHER; note = 2'-O-methyluridine-3'-phosphate
  modified_base 21: mod_base = OTHER; note = 2'-O-methyladenosine
atagaggaaatgagaaaggta

SEQ ID NO: 3395 - RNA, 21 nt, synthetic construct
  source 1..21: mol_type = other RNA
  modified_base 1: mod_base = OTHER; note = 2'-O-methylguanosine-3'-phosphate
  modified_base 2: mod_base = OTHER; note = 2'-O-methyladenosine-3'-phosphate
  modified_base 3: mod_base = OTHER; note = 2'-O-methylguanosine-3'-phosphate
  modified_base 4: mod_base = OTHER; note = 2'-O-methylguanosine-3'-phosphate
  modified_base 5: mod_base = OTHER; note = 2'-O-methyladenosine-3'-phosphate
  modified_base 6: mod_base = OTHER; note = 2'-O-methyladenosine-3'-phosphate
  modified_base 7: mod_base = OTHER; note = 2'-deoxy-2'-fluoroadenosine-3'-phosphate
  modified_base 8: mod_base = OTHER; note = 2'-O-methyluridine-3'-phosphate
  modified_base 9: mod_base = OTHER; note = 2'-deoxy-2'-fluoroguanosine-3'-phosphate
  modified_base 10: mod_base = OTHER; note = 2'-deoxy-2'-fluoroadenosine-3'-phosphate
  modified_base 11: mod_base = OTHER; note = 2'-deoxy-2'-fluoroguanosine-3'-phosphate
  modified_base 12: mod_base = OTHER; note = 2'-O-methyladenosine-3'-phosphate
  modified_base 13: mod_base = OTHER; note = 2'-O-methyladenosine-3'-phosphate
  modified_base 14: mod_base = OTHER; note = 2'-O-methyladenosine-3'-phosphate
  modified_base 15: mod_base = OTHER; note = 2'-O-methylguanosine-3'-phosphate
  modified_base 16: mod_base = OTHER; note = 2'-O-methylguanosine-3'-phosphate
  modified_base 17: mod_base = OTHER; note = 2'-O-methyluridine-3'-phosphate
  modified_base 18: mod_base = OTHER; note = 2'-O-methyluridine-3'-phosphate
  modified_base 19: mod_base = OTHER; note = 2'-O-methylguanosine-3'-phosphate
  modified_base 20: mod_base = OTHER; note = 2'-O-methyluridine-3'-phosphate
  modified_base 21: mod_base = OTHER; note = 2'-O-methyladenosine
gaggaaatgagaaaggttgta

SEQ ID NO: 3396 - RNA, 21 nt, synthetic construct
  source 1..21: mol_type = other RNA
  modified_base 1: mod_base = OTHER; note = 2'-O-methyladenosine-3'-phosphate
  modified_base 2: mod_base = OTHER; note = 2'-O-methylguanosine-3'-phosphate
  modified_base 3: mod_base = OTHER; note = 2'-O-methylguanosine-3'-phosphate
  modified_base 4: mod_base = OTHER; note = 2'-O-methyladenosine-3'-phosphate
  modified_base 5: mod_base = OTHER; note = 2'-O-methyladenosine-3'-phosphate
  modified_base 6: mod_base = OTHER; note = 2'-O-methyladenosine-3'-phosphate
  modified_base 7: mod_base = OTHER; note = 2'-deoxy-2'-fluorouridine-3'-phosphate
  modified_base 8: mod_base = OTHER; note = 2'-O-methylguanosine-3'-phosphate
  modified_base 9: mod_base = OTHER; note = 2'-deoxy-2'-fluoroadenosine-3'-phosphate
  modified_base 10: mod_base = OTHER; note = 2'-deoxy-2'-fluoroguanosine-3'-phosphate
  modified_base 11: mod_base = OTHER; note = 2'-deoxy-2'-fluoroadenosine-3'-phosphate
  modified_base 12: mod_base = OTHER; note = 2'-O-methyladenosine-3'-phosphate
  modified_base 13: mod_base = OTHER; note = 2'-O-methyladenosine-3'-phosphate
  modified_base 14: mod_base = OTHER; note = 2'-O-methylguanosine-3'-phosphate
  modified_base 15: mod_base = OTHER; note = 2'-O-methylguanosine-3'-phosphate
  modified_base 16: mod_base = OTHER; note = 2'-O-methyluridine-3'-phosphate
  modified_base 17: mod_base = OTHER; note = 2'-O-methyluridine-3'-phosphate
  modified_base 18: mod_base = OTHER; note = 2'-O-methylguanosine-3'-phosphate
  modified_base 19: mod_base = OTHER; note = 2'-O-methyluridine-3'-phosphate
  modified_base 20: mod_base = OTHER; note = 2'-O-methyluridine-3'-phosphate
  modified_base 21: mod_base = OTHER; note = 2'-O-methyladenosine
aggaaatgagaaaggttgtta

SEQ ID NO: 3397 - RNA, 21 nt, synthetic construct
  source 1..21: mol_type = other RNA
  modified_base 1: mod_base = OTHER; note = 2'-O-methylguanosine-3'-phosphate
  modified_base 2: mod_base = OTHER; note = 2'-O-methylguanosine-3'-phosphate
  modified_base 3: mod_base = OTHER; note = 2'-O-methyladenosine-3'-phosphate
  modified_base 4: mod_base = OTHER; note = 2'-O-methyladenosine-3'-phosphate
  modified_base 5: mod_base = OTHER; note = 2'-O-methyladenosine-3'-phosphate
  modified_base 6: mod_base = OTHER; note = 2'-O-methyluridine-3'-phosphate
  modified_base 7: mod_base = OTHER; note = 2'-deoxy-2'-fluoroguanosine-3'-phosphate
  modified_base 8: mod_base = OTHER; note = 2'-O-methyladenosine-3'-phosphate
  modified_base 9: mod_base = OTHER; note = 2'-deoxy-2'-fluoroguanosine-3'-phosphate
  modified_base 10: mod_base = OTHER; note = 2'-deoxy-2'-fluoroadenosine-3'-phosphate
  modified_base 11: mod_base = OTHER; note = 2'-deoxy-2'-fluoroadenosine-3'-phosphate
  modified_base 12: mod_base = OTHER; note = 2'-O-methyladenosine-3'-phosphate
  modified_base 13: mod_base = OTHER; note = 2'-O-methylguanosine-3'-phosphate
  modified_base 14: mod_base = OTHER; note = 2'-O-methylguanosine-3'-phosphate
  modified_base 15: mod_base = OTHER; note = 2'-O-methyluridine-3'-phosphate
  modified_base 16: mod_base = OTHER; note = 2'-O-methyluridine-3'-phosphate
  modified_base 17: mod_base = OTHER; note = 2'-O-methylguanosine-3'-phosphate
  modified_base 18: mod_base = OTHER; note = 2'-O-methyluridine-3'-phosphate
  modified_base 19: mod_base = OTHER; note = 2'-O-methyluridine-3'-phosphate
  modified_base 20: mod_base = OTHER; note = 2'-O-methyluridine-3'-phosphate
  modified_base 21: mod_base = OTHER; note = 2'-O-methyladenosine
ggaaatgagaaaggttgttta

SEQ ID NO: 3398 - RNA, 21 nt, synthetic construct
  source 1..21: mol_type = other RNA
  modified_base 1: mod_base = OTHER; note = 2'-O-methylguanosine-3'-phosphate
  modified_base 2: mod_base = OTHER; note = 2'-O-methyladenosine-3'-phosphate
  modified_base 3: mod_base = OTHER; note = 2'-O-methyladenosine-3'-phosphate
  modified_base 4: mod_base = OTHER; note = 2'-O-methyladenosine-3'-phosphate
  modified_base 5: mod_base = OTHER; note = 2'-O-methyluridine-3'-phosphate
  modified_base 6: mod_base = OTHER; note = 2'-O-methylguanosine-3'-phosphate
  modified_base 7: mod_base = OTHER; note = 2'-deoxy-2'-fluoroadenosine-3'-phosphate
  modified_base 8: mod_base = OTHER; note = 2'-O-methylguanosine-3'-phosphate
  modified_base 9: mod_base = OTHER; note = 2'-deoxy-2'-fluoroadenosine-3'-phosphate
  modified_base 10: mod_base = OTHER; note = 2'-deoxy-2'-fluoroadenosine-3'-phosphate
  modified_base 11: mod_base = OTHER; note = 2'-deoxy-2'-fluoroadenosine-3'-phosphate
  modified_base 12: mod_base = OTHER; note = 2'-O-methylguanosine-3'-phosphate
  modified_base 13: mod_base = OTHER; note = 2'-O-methylguanosine-3'-phosphate
  modified_base 14: mod_base = OTHER; note = 2'-O-methyluridine-3'-phosphate
  modified_base 15: mod_base = OTHER; note = 2'-O-methyluridine-3'-phosphate
  modified_base 16: mod_base = OTHER; note = 2'-O-methylguanosine-3'-phosphate
  modified_base 17: mod_base = OTHER; note = 2'-O-methyluridine-3'-phosphate
  modified_base 18: mod_base = OTHER; note = 2'-O-methyluridine-3'-phosphate
  modified_base 19: mod_base = OTHER; note = 2'-O-methyluridine-3'-phosphate
  modified_base 20: mod_base = OTHER; note = 2'-O-methylguanosine-3'-phosphate
  modified_base 21: mod_base = OTHER; note = 2'-O-methyladenosine
gaaatgagaaaggttgtttga

SEQ ID NO: 3399 - RNA, 21 nt, synthetic construct
  source 1..21: mol_type = other RNA
  modified_base 1: mod_base = OTHER; note = 2'-O-methyladenosine-3'-phosphate
  modified_base 2: mod_base = OTHER; note = 2'-O-methyladenosine-3'-phosphate
  modified_base 3: mod_base = OTHER; note = 2'-O-methyladenosine-3'-phosphate
  modified_base 4: mod_base = OTHER; note = 2'-O-methyluridine-3'-phosphate
  modified_base 5: mod_base = OTHER; note = 2'-O-methylguanosine-3'-phosphate
  modified_base 6: mod_base = OTHER; note = 2'-O-methyladenosine-3'-phosphate
  modified_base 7: mod_base = OTHER; note = 2'-deoxy-2'-fluoroguanosine-3'-phosphate
  modified_base 8: mod_base = OTHER; note = 2'-O-methyladenosine-3'-phosphate
  modified_base 9: mod_base = OTHER; note = 2'-deoxy-2'-fluoroadenosine-3'-phosphate
  modified_base 10: mod_base = OTHER; note = 2'-deoxy-2'-fluoroadenosine-3'-phosphate
  modified_base 11: mod_base = OTHER; note = 2'-deoxy-2'-fluoroguanosine-3'-phosphate
  modified_base 12: mod_base = OTHER; note = 2'-O-methylguanosine-3'-phosphate
  modified_base 13: mod_base = OTHER; note = 2'-O-methyluridine-3'-phosphate
  modified_base 14: mod_base = OTHER; note = 2'-O-methyluridine-3'-phosphate
  modified_base 15: mod_base = OTHER; note = 2'-O-methylguanosine-3'-phosphate
  modified_base 16: mod_base = OTHER; note = 2'-O-methyluridine-3'-phosphate
  modified_base 17: mod_base = OTHER; note = 2'-O-methyluridine-3'-phosphate
  modified_base 18: mod_base = OTHER; note = 2'-O-methyluridine-3'-phosphate
  modified_base 19: mod_base = OTHER; note = 2'-O-methylguanosine-3'-phosphate
  modified_base 20: mod_base = OTHER; note = 2'-O-methyluridine-3'-phosphate
  modified_base 21: mod_base = OTHER; note = 2'-O-methyladenosine
aaatgagaaaggttgtttgta

SEQ ID NO: 3400 - RNA, 21 nt, synthetic construct
  source 1..21: mol_type = other RNA
  modified_base 1: mod_base = OTHER; note = 2'-O-methyladenosine-3'-phosphate
  modified_base 2: mod_base = OTHER; note = 2'-O-methyladenosine-3'-phosphate
  modified_base 3: mod_base = OTHER; note = 2'-O-methyluridine-3'-phosphate
  modified_base 4: mod_base = OTHER; note = 2'-O-methylguanosine-3'-phosphate
  modified_base 5: mod_base = OTHER; note = 2'-O-methyladenosine-3'-phosphate
  modified_base 6: mod_base = OTHER; note = 2'-O-methylguanosine-3'-phosphate
  modified_base 7: mod_base = OTHER; note = 2'-deoxy-2'-fluoroadenosine-3'-phosphate
  modified_base 8: mod_base = OTHER; note = 2'-O-methyladenosine-3'-phosphate
  modified_base 9: mod_base = OTHER; note = 2'-deoxy-2'-fluoroadenosine-3'-phosphate
  modified_base 10: mod_base = OTHER; note = 2'-deoxy-2'-fluoroguanosine-3'-phosphate
  modified_base 11: mod_base = OTHER; note = 2'-deoxy-2'-fluoroguanosine-3'-phosphate
  modified_base 12: mod_base = OTHER; note = 2'-O-methyluridine-3'-phosphate
  modified_base 13: mod_base = OTHER; note = 2'-O-methyluridine-3'-phosphate
  modified_base 14: mod_base = OTHER; note = 2'-O-methylguanosine-3'-phosphate
  modified_base 15: mod_base = OTHER; note = 2'-O-methyluridine-3'-phosphate
  modified_base 16: mod_base = OTHER; note = 2'-O-methyluridine-3'-phosphate
  modified_base 17: mod_base = OTHER; note = 2'-O-methyluridine-3'-phosphate
  modified_base 18: mod_base = OTHER; note = 2'-O-methylguanosine-3'-phosphate
  modified_base 19: mod_base = OTHER; note = 2'-O-methyluridine-3'-phosphate
  modified_base 20: mod_base = OTHER; note = 2'-O-methylguanosine-3'-phosphate
  modified_base 21: mod_base = OTHER; note = 2'-O-methyladenosine
aatgagaaaggttgtttgtga

SEQ ID NO: 3401 - RNA, 21 nt, synthetic construct
  source 1..21: mol_type = other RNA
  modified_base 1: mod_base = OTHER; note = 2'-O-methyladenosine-3'-phosphate
  modified_base 2: mod_base = OTHER; note = 2'-O-methyluridine-3'-phosphate
  modified_base 3: mod_base = OTHER; note = 2'-O-methylguanosine-3'-phosphate
  modified_base 4: mod_base = OTHER; note = 2'-O-methyladenosine-3'-phosphate
  modified_base 5: mod_base = OTHER; note = 2'-O-methylguanosine-3'-phosphate
  modified_base 6: mod_base = OTHER; note = 2'-O-methyladenosine-3'-phosphate
  modified_base 7: mod_base = OTHER; note = 2'-deoxy-2'-fluoroadenosine-3'-phosphate
  modified_base 8: mod_base = OTHER; note = 2'-O-methyladenosine-3'-phosphate
  modified_base 9: mod_base = OTHER; note = 2'-deoxy-2'-fluoroguanosine-3'-phosphate
  modified_base 10: mod_base = OTHER; note = 2'-deoxy-2'-fluoroguanosine-3'-phosphate
  modified_base 11: mod_base = OTHER; note = 2'-deoxy-2'-fluorouridine-3'-phosphate
  modified_base 12: mod_base = OTHER; note = 2'-O-methyluridine-3'-phosphate
  modified_base 13: mod_base = OTHER; note = 2'-O-methylguanosine-3'-phosphate
  modified_base 14: mod_base = OTHER; note = 2'-O-methyluridine-3'-phosphate
  modified_base 15: mod_base = OTHER; note = 2'-O-methyluridine-3'-phosphate
  modified_base 16: mod_base = OTHER; note = 2'-O-methyluridine-3'-phosphate
  modified_base 17: mod_base = OTHER; note = 2'-O-methylguanosine-3'-phosphate
  modified_base 18: mod_base = OTHER; note = 2'-O-methyluridine-3'-phosphate
  modified_base 19: mod_base = OTHER; note = 2'-O-methylguanosine-3'-phosphate
  modified_base 20: mod_base = OTHER; note = 2'-O-methyladenosine-3'-phosphate
  modified_base 21: mod_base = OTHER; note = 2'-O-methyladenosine
atgagaaaggttgtttgtgaa

SEQ ID NO: 3402 - RNA, 21 nt, synthetic construct
  source 1..21: mol_type = other RNA
  modified_base 1: mod_base = OTHER; note = 2'-O-methyluridine-3'-phosphate
  modified_base 2: mod_base = OTHER; note = 2'-O-methylguanosine-3'-phosphate
  modified_base 3: mod_base = OTHER; note = 2'-O-methyladenosine-3'-phosphate
  modified_base 4: mod_base = OTHER; note = 2'-O-methylguanosine-3'-phosphate
  modified_base 5: mod_base = OTHER; note = 2'-O-methyladenosine-3'-phosphate
  modified_base 6: mod_base = OTHER; note = 2'-O-methyladenosine-3'-phosphate
  modified_base 7: mod_base = OTHER; note = 2'-deoxy-2'-fluoroadenosine-3'-phosphate
  modified_base 8: mod_base = OTHER; note = 2'-O-methylguanosine-3'-phosphate
  modified_base 9: mod_base = OTHER; note = 2'-deoxy-2'-fluoroguanosine-3'-phosphate
  modified_base 10: mod_base = OTHER; note = 2'-deoxy-2'-fluorouridine-3'-phosphate
  modified_base 11: mod_base = OTHER; note = 2'-deoxy-2'-fluorouridine-3'-phosphate
  modified_base 12: mod_base = OTHER; note = 2'-O-methylguanosine-3'-phosphate
  modified_base 13: mod_base = OTHER; note = 2'-O-methyluridine-3'-phosphate
  modified_base 14: mod_base = OTHER; note = 2'-O-methyluridine-3'-phosphate
  modified_base 15: mod_base = OTHER; note = 2'-O-methyluridine-3'-phosphate
  modified_base 16: mod_base = OTHER; note = 2'-O-methylguanosine-3'-phosphate
  modified_base 17: mod_base = OTHER; note = 2'-O-methyluridine-3'-phosphate
  modified_base 18: mod_base = OTHER; note = 2'-O-methylguanosine-3'-phosphate
  modified_base 19: mod_base = OTHER; note = 2'-O-methyladenosine-3'-phosphate
  modified_base 20: mod_base = OTHER; note = 2'-O-methylcytidine-3'-phosphate
  modified_base 21: mod_base = OTHER; note = 2'-O-methyladenosine
tgagaaaggttgtttgtgaca

SEQ ID NO: 3403 - RNA, 21 nt, synthetic construct
  source 1..21: mol_type = other RNA
  modified_base 1: mod_base = OTHER; note = 2'-O-methylguanosine-3'-phosphate
  modified_base 2: mod_base = OTHER; note = 2'-O-methyladenosine-3'-phosphate
  modified_base 3: mod_base = OTHER; note = 2'-O-methylguanosine-3'-phosphate
  modified_base 4: mod_base = OTHER; note = 2'-O-methyladenosine-3'-phosphate
  modified_base 5: mod_base = OTHER; note = 2'-O-methyladenosine-3'-phosphate
  modified_base 6: mod_base = OTHER; note = 2'-O-methyladenosine-3'-phosphate
  modified_base 7: mod_base = OTHER; note = 2'-deoxy-2'-fluoroguanosine-3'-phosphate
  modified_base 8: mod_base = OTHER; note = 2'-O-methylguanosine-3'-phosphate
  modified_base 9: mod_base = OTHER; note = 2'-deoxy-2'-fluorouridine-3'-phosphate
  modified_base 10: mod_base = OTHER; note = 2'-deoxy-2'-fluorouridine-3'-phosphate
  modified_base 11: mod_base = OTHER; note = 2'-deoxy-2'-fluoroguanosine-3'-phosphate
  modified_base 12: mod_base = OTHER; note = 2'-O-methyluridine-3'-phosphate
  modified_base 13: mod_base = OTHER; note = 2'-O-methyluridine-3'-phosphate
  modified_base 14: mod_base = OTHER; note = 2'-O-methyluridine-3'-phosphate
  modified_base 15: mod_base = OTHER; note = 2'-O-methylguanosine-3'-phosphate
  modified_base 16: mod_base = OTHER; note = 2'-O-methyluridine-3'-phosphate
  modified_base 17: mod_base = OTHER; note = 2'-O-methylguanosine-3'-phosphate
  modified_base 18: mod_base = OTHER; note = 2'-O-methyladenosine-3'-phosphate
  modified_base 19: mod_base = OTHER; note = 2'-O-methylcytidine-3'-phosphate
  modified_base 20: mod_base = OTHER; note = 2'-O-methylcytidine-3'-phosphate
  modified_base 21: mod_base = OTHER; note = 2'-O-methyladenosine
gagaaaggttgtttgtgacca

SEQ ID NO: 3404 - RNA, 21 nt, synthetic construct
  source 1..21: mol_type = other RNA
  modified_base 1: mod_base = OTHER; note = 2'-O-methyladenosine-3'-phosphate
  modified_base 2: mod_base = OTHER; note = 2'-O-methylguanosine-3'-phosphate
  modified_base 3: mod_base = OTHER; note = 2'-O-methyladenosine-3'-phosphate
  modified_base 4: mod_base = OTHER; note = 2'-O-methyladenosine-3'-phosphate
  modified_base 5: mod_base = OTHER; note = 2'-O-methyladenosine-3'-phosphate
  modified_base 6: mod_base = OTHER; note = 2'-O-methylguanosine-3'-phosphate
  modified_base 7: mod_base = OTHER; note = 2'-deoxy-2'-fluoroguanosine-3'-phosphate
  modified_base 8: mod_base = OTHER; note = 2'-O-methyluridine-3'-phosphate
  modified_base 9: mod_base = OTHER; note = 2'-deoxy-2'-fluorouridine-3'-phosphate
  modified_base 10: mod_base = OTHER; note = 2'-deoxy-2'-fluoroguanosine-3'-phosphate
  modified_base 11: mod_base = OTHER; note = 2'-deoxy-2'-fluorouridine-3'-phosphate
  modified_base 12: mod_base = OTHER; note = 2'-O-methyluridine-3'-phosphate
  modified_base 13: mod_base = OTHER; note = 2'-O-methyluridine-3'-phosphate
  modified_base 14: mod_base = OTHER; note = 2'-O-methylguanosine-3'-phosphate
  modified_base 15: mod_base = OTHER; note = 2'-O-methyluridine-3'-phosphate
  modified_base 16: mod_base = OTHER; note = 2'-O-methylguanosine-3'-phosphate
  modified_base 17: mod_base = OTHER; note = 2'-O-methyladenosine-3'-phosphate
  modified_base 18: mod_base = OTHER; note = 2'-O-methylcytidine-3'-phosphate
  modified_base 19: mod_base = OTHER; note = 2'-O-methylcytidine-3'-phosphate
  modified_base 20: mod_base = OTHER; note = 2'-O-methyladenosine-3'-phosphate
  modified_base 21: mod_base = OTHER; note = 2'-O-methyladenosine
agaaaggttgtttgtgaccaa

SEQ ID NO: 3405 - RNA, 21 nt, synthetic construct
  source 1..21: mol_type = other RNA
  modified_base 1: mod_base = OTHER; note = 2'-O-methylguanosine-3'-phosphate
  modified_base 2: mod_base = OTHER; note = 2'-O-methyladenosine-3'-phosphate
  modified_base 3: mod_base = OTHER; note = 2'-O-methyladenosine-3'-phosphate
  modified_base 4: mod_base = OTHER; note = 2'-O-methyladenosine-3'-phosphate
  modified_base 5: mod_base = OTHER; note = 2'-O-methylguanosine-3'-phosphate
  modified_base 6: mod_base = OTHER; note = 2'-O-methylguanosine-3'-phosphate
  modified_base 7: mod_base = OTHER; note = 2'-deoxy-2'-fluorouridine-3'-phosphate
  modified_base 8: mod_base = OTHER; note = 2'-O-methyluridine-3'-phosphate
  modified_base 9: mod_base = OTHER; note = 2'-deoxy-2'-fluoroguanosine-3'-phosphate
  modified_base 10: mod_base = OTHER; note = 2'-deoxy-2'-fluorouridine-3'-phosphate
  modified_base 11: mod_base = OTHER; note = 2'-deoxy-2'-fluorouridine-3'-phosphate
  modified_base 12: mod_base = OTHER; note = 2'-O-methyluridine-3'-phosphate
  modified_base 13: mod_base = OTHER; note = 2'-O-methylguanosine-3'-phosphate
  modified_base 14: mod_base = OTHER; note = 2'-O-methyluridine-3'-phosphate
  modified_base 15: mod_base = OTHER; note = 2'-O-methylguanosine-3'-phosphate
  modified_base 16: mod_base = OTHER; note = 2'-O-methyladenosine-3'-phosphate
  modified_base 17: mod_base = OTHER; note = 2'-O-methylcytidine-3'-phosphate
  modified_base 18: mod_base = OTHER; note = 2'-O-methylcytidine-3'-phosphate
  modified_base 19: mod_base = OTHER; note = 2'-O-methyladenosine-3'-phosphate
  modified_base 20: mod_base = OTHER; note = 2'-O-methylguanosine-3'-phosphate
  modified_base 21: mod_base = OTHER; note = 2'-O-methyladenosine
gaaaggttgtttgtgaccaga

SEQ ID NO: 3406 - RNA, 21 nt, synthetic construct
  source 1..21: mol_type = other RNA
  modified_base 1: mod_base = OTHER; note = 2'-O-methyladenosine-3'-phosphate
  modified_base 2: mod_base = OTHER; note = 2'-O-methyladenosine-3'-phosphate
  modified_base 3: mod_base = OTHER; note = 2'-O-methyladenosine-3'-phosphate
  modified_base 4: mod_base = OTHER; note = 2'-O-methylguanosine-3'-phosphate
  modified_base 5: mod_base = OTHER; note = 2'-O-methylguanosine-3'-phosphate
  modified_base 6: mod_base = OTHER; note = 2'-O-methyluridine-3'-phosphate
  modified_base 7: mod_base = OTHER; note = 2'-deoxy-2'-fluorouridine-3'-phosphate
  modified_base 8: mod_base = OTHER; note = 2'-O-methylguanosine-3'-phosphate
  modified_base 9: mod_base = OTHER; note = 2'-deoxy-2'-fluorouridine-3'-phosphate
  modified_base 10: mod_base = OTHER; note = 2'-deoxy-2'-fluorouridine-3'-phosphate
  modified_base 11: mod_base = OTHER; note = 2'-deoxy-2'-fluorouridine-3'-phosphate
  modified_base 12: mod_base = OTHER; note = 2'-O-methylguanosine-3'-phosphate
  modified_base 13: mod_base = OTHER; note = 2'-O-methyluridine-3'-phosphate
  modified_base 14: mod_base = OTHER; note = 2'-O-methylguanosine-3'-phosphate
  modified_base 15: mod_base = OTHER; note = 2'-O-methyladenosine-3'-phosphate
  modified_base 16: mod_base = OTHER; note = 2'-O-methylcytidine-3'-phosphate
  modified_base 17: mod_base = OTHER; note = 2'-O-methylcytidine-3'-phosphate
  modified_base 18: mod_base = OTHER; note = 2'-O-methyladenosine-3'-phosphate
  modified_base 19: mod_base = OTHER; note = 2'-O-methylguanosine-3'-phosphate
  modified_base 20: mod_base = OTHER; note = 2'-O-methyladenosine-3'-phosphate
  modified_base 21: mod_base = OTHER; note = 2'-O-methyladenosine
aaaggttgtttgtgaccagaa

SEQ ID NO: 3407 - RNA, 21 nt, synthetic construct
  source 1..21: mol_type = other RNA
  modified_base 1: mod_base = OTHER; note = 2'-O-methyladenosine-3'-phosphate
  modified_base 2: mod_base = OTHER; note = 2'-O-methyladenosine-3'-phosphate
  modified_base 3: mod_base = OTHER; note = 2'-O-methylguanosine-3'-phosphate
  modified_base 4: mod_base = OTHER; note = 2'-O-methylguanosine-3'-phosphate
  modified_base 5: mod_base = OTHER; note = 2'-O-methyluridine-3'-phosphate
  modified_base 6: mod_base = OTHER; note = 2'-O-methyluridine-3'-phosphate
  modified_base 7: mod_base = OTHER; note = 2'-deoxy-2'-fluoroguanosine-3'-phosphate
  modified_base 8: mod_base = OTHER; note = 2'-O-methyluridine-3'-phosphate
  modified_base 9: mod_base = OTHER; note = 2'-deoxy-2'-fluorouridine-3'-phosphate
  modified_base 10: mod_base = OTHER; note = 2'-deoxy-2'-fluorouridine-3'-phosphate
  modified_base 11: mod_base = OTHER; note = 2'-deoxy-2'-fluoroguanosine-3'-phosphate
  modified_base 12: mod_base = OTHER; note = 2'-O-methyluridine-3'-phosphate
  modified_base 13: mod_base = OTHER; note = 2'-O-methylguanosine-3'-phosphate
  modified_base 14: mod_base = OTHER; note = 2'-O-methyladenosine-3'-phosphate
  modified_base 15: mod_base = OTHER; note = 2'-O-methylcytidine-3'-phosphate
  modified_base 16: mod_base = OTHER; note = 2'-O-methylcytidine-3'-phosphate
  modified_base 17: mod_base = OTHER; note = 2'-O-methyladenosine-3'-phosphate
  modified_base 18: mod_base = OTHER; note = 2'-O-methylguanosine-3'-phosphate
  modified_base 19: mod_base = OTHER; note = 2'-O-methyladenosine-3'-phosphate
  modified_base 20: mod_base = OTHER; note = 2'-O-methyladenosine-3'-phosphate
  modified_base 21: mod_base = OTHER; note = 2'-O-methyladenosine
aaggttgtttgtgaccagaaa

SEQ ID NO: 3408 - RNA, 21 nt, synthetic construct
  source 1..21: mol_type = other RNA
  modified_base 1: mod_base = OTHER; note = 2'-O-methyladenosine-3'-phosphate
  modified_base 2: mod_base = OTHER; note = 2'-O-methylguanosine-3'-phosphate
  modified_base 3: mod_base = OTHER; note = 2'-O-methylguanosine-3'-phosphate
  modified_base 4: mod_base = OTHER; note = 2'-O-methyluridine-3'-phosphate
  modified_base 5: mod_base = OTHER; note = 2'-O-methyluridine-3'-phosphate
  modified_base 6: mod_base = OTHER; note = 2'-O-methylguanosine-3'-phosphate
  modified_base 7: mod_base = OTHER; note = 2'-deoxy-2'-fluorouridine-3'-phosphate
  modified_base 8: mod_base = OTHER; note = 2'-O-methyluridine-3'-phosphate
  modified_base 9: mod_base = OTHER; note = 2'-deoxy-2'-fluorouridine-3'-phosphate
  modified_base 10: mod_base = OTHER; note = 2'-deoxy-2'-fluoroguanosine-3'-phosphate
  modified_base 11: mod_base = OTHER; note = 2'-deoxy-2'-fluorouridine-3'-phosphate
  modified_base 12: mod_base = OTHER; note = 2'-O-methylguanosine-3'-phosphate
  modified_base 13: mod_base = OTHER; note = 2'-O-methyladenosine-3'-phosphate
  modified_base 14: mod_base = OTHER; note = 2'-O-methylcytidine-3'-phosphate
  modified_base 15: mod_base = OTHER; note = 2'-O-methylcytidine-3'-phosphate
  modified_base 16: mod_base = OTHER; note = 2'-O-methyladenosine-3'-phosphate
  modified_base 17: mod_base = OTHER; note = 2'-O-methylguanosine-3'-phosphate
  modified_base 18: mod_base = OTHER; note = 2'-O-methyladenosine-3'-phosphate
  modified_base 19: mod_base = OTHER; note = 2'-O-methyladenosine-3'-phosphate
  modified_base 20: mod_base = OTHER; note = 2'-O-methylguanosine-3'-phosphate
  modified_base 21: mod_base = OTHER; note = 2'-O-methyladenosine
aggttgtttgtgaccagaaga

SEQ ID NO: 3409 - RNA, 21 nt, synthetic construct
  source 1..21: mol_type = other RNA
  modified_base 1: mod_base = OTHER; note = 2'-O-methylguanosine-3'-phosphate
  modified_base 2: mod_base = OTHER; note = 2'-O-methylguanosine-3'-phosphate
  modified_base 3: mod_base = OTHER; note = 2'-O-methyluridine-3'-phosphate
  modified_base 4: mod_base = OTHER; note = 2'-O-methyluridine-3'-phosphate
  modified_base 5: mod_base = OTHER; note = 2'-O-methylguanosine-3'-phosphate
  modified_base 6: mod_base = OTHER; note = 2'-O-methyluridine-3'-phosphate
  modified_base 7: mod_base = OTHER; note = 2'-deoxy-2'-fluorouridine-3'-phosphate
  modified_base 8: mod_base = OTHER; note = 2'-O-methyluridine-3'-phosphate
  modified_base 9: mod_base = OTHER; note = 2'-deoxy-2'-fluoroguanosine-3'-phosphate
  modified_base 10: mod_base = OTHER; note = 2'-deoxy-2'-fluorouridine-3'-phosphate
  modified_base 11: mod_base = OTHER; note = 2'-deoxy-2'-fluoroguanosine-3'-phosphate
  modified_base 12: mod_base = OTHER; note = 2'-O-methyladenosine-3'-phosphate
  modified_base 13: mod_base = OTHER; note = 2'-O-methylcytidine-3'-phosphate
  modified_base 14: mod_base = OTHER; note = 2'-O-methylcytidine-3'-phosphate
  modified_base 15: mod_base = OTHER; note = 2'-O-methyladenosine-3'-phosphate
  modified_base 16: mod_base = OTHER; note = 2'-O-methylguanosine-3'-phosphate
  modified_base 17: mod_base = OTHER; note = 2'-O-methyladenosine-3'-phosphate
  modified_base 18: mod_base = OTHER; note = 2'-O-methyladenosine-3'-phosphate
  modified_base 19: mod_base = OTHER; note = 2'-O-methylguanosine-3'-phosphate
  modified_base 20: mod_base = OTHER; note = 2'-O-methyluridine-3'-phosphate
  modified_base 21: mod_base = OTHER; note = 2'-O-methyladenosine
ggttgtttgtgaccagaagta

SEQ ID NO: 3410 - RNA, 21 nt, synthetic construct
  source 1..21: mol_type = other RNA
  modified_base 1: mod_base = OTHER; note = 2'-O-methylguanosine-3'-phosphate
  modified_base 2: mod_base = OTHER; note = 2'-O-methyluridine-3'-phosphate
  modified_base 3: mod_base = OTHER; note = 2'-O-methyluridine-3'-phosphate
  modified_base 4: mod_base = OTHER; note = 2'-O-methylguanosine-3'-phosphate
  modified_base 5: mod_base = OTHER; note = 2'-O-methyluridine-3'-phosphate
  modified_base 6: mod_base = OTHER; note = 2'-O-methyluridine-3'-phosphate
  modified_base 7: mod_base = OTHER; note = 2'-deoxy-2'-fluorouridine-3'-phosphate
  modified_base 8: mod_base = OTHER; note = 2'-O-methylguanosine-3'-phosphate
  modified_base 9: mod_base = OTHER; note = 2'-deoxy-2'-fluorouridine-3'-phosphate
  modified_base 10: mod_base = OTHER; note = 2'-deoxy-2'-fluoroguanosine-3'-phosphate
  modified_base 11: mod_base = OTHER; note = 2'-deoxy-2'-fluoroadenosine-3'-phosphate
  modified_base 12: mod_base = OTHER; note = 2'-O-methylcytidine-3'-phosphate
  modified_base 13: mod_base = OTHER; note = 2'-O-methylcytidine-3'-phosphate
  modified_base 14: mod_base = OTHER; note = 2'-O-methyladenosine-3'-phosphate
  modified_base 15: mod_base = OTHER; note = 2'-O-methylguanosine-3'-phosphate
  modified_base 16: mod_base = OTHER; note = 2'-O-methyladenosine-3'-phosphate
  modified_base 17: mod_base = OTHER; note = 2'-O-methyladenosine-3'-phosphate
  modified_base 18: mod_base = OTHER; note = 2'-O-methylguanosine-3'-phosphate
  modified_base 19: mod_base = OTHER; note = 2'-O-methyluridine-3'-phosphate
  modified_base 20: mod_base = OTHER; note = 2'-O-methyluridine-3'-phosphate
  modified_base 21: mod_base = OTHER; note = 2'-O-methyladenosine
gttgtttgtgaccagaagtta

SEQ ID NO: 3411 - RNA, 21 nt, synthetic construct
  source 1..21: mol_type = other RNA
  modified_base 1: mod_base = OTHER; note = 2'-O-methyluridine-3'-phosphate
  modified_base 2: mod_base = OTHER; note = 2'-O-methyluridine-3'-phosphate
  modified_base 3: mod_base = OTHER; note = 2'-O-methylguanosine-3'-phosphate
  modified_base 4: mod_base = OTHER; note = 2'-O-methyluridine-3'-phosphate
  modified_base 5: mod_base = OTHER; note = 2'-O-methyluridine-3'-phosphate
  modified_base 6: mod_base = OTHER; note = 2'-O-methyluridine-3'-phosphate
  modified_base 7: mod_base = OTHER; note = 2'-deoxy-2'-fluoroguanosine-3'-phosphate
  modified_base 8: mod_base = OTHER; note = 2'-O-methyluridine-3'-phosphate
  modified_base 9: mod_base = OTHER; note = 2'-deoxy-2'-fluoroguanosine-3'-phosphate
  modified_base 10: mod_base = OTHER; note = 2'-deoxy-2'-fluoroadenosine-3'-phosphate
  modified_base 11: mod_base = OTHER; note = 2'-deoxy-2'-fluorocytidine-3'-phosphate
  modified_base 12: mod_base = OTHER; note = 2'-O-methylcytidine-3'-phosphate
  modified_base 13: mod_base = OTHER; note = 2'-O-methyladenosine-3'-phosphate
  modified_base 14: mod_base = OTHER; note = 2'-O-methylguanosine-3'-phosphate
  modified_base 15: mod_base = OTHER; note = 2'-O-methyladenosine-3'-phosphate
  modified_base 16: mod_base = OTHER; note = 2'-O-methyladenosine-3'-phosphate
  modified_base 17: mod_base = OTHER; note = 2'-O-methylguanosine-3'-phosphate
  modified_base 18: mod_base = OTHER; note = 2'-O-methyluridine-3'-phosphate
  modified_base 19: mod_base = OTHER; note = 2'-O-methyluridine-3'-phosphate
  modified_base 20: mod_base = OTHER; note = 2'-O-methyluridine-3'-phosphate
  modified_base 21: mod_base = OTHER; note = 2'-O-methyladenosine
ttgtttgtgaccagaagttta

SEQ ID NO: 3412 - RNA, 21 nt, synthetic construct
  source 1..21: mol_type = other RNA
  modified_base 1: mod_base = OTHER; note = 2'-O-methylcytidine-3'-phosphate
  modified_base 2: mod_base = OTHER; note = 2'-O-methyladenosine-3'-phosphate
  modified_base 3: mod_base = OTHER; note = 2'-O-methylguanosine-3'-phosphate
  modified_base 4: mod_base = OTHER; note = 2'-O-methyladenosine-3'-phosphate
  modified_base 5: mod_base = OTHER; note = 2'-O-methyladenosine-3'-phosphate
  modified_base 6: mod_base = OTHER; note = 2'-O-methylguanosine-3'-phosphate
  modified_base 7: mod_base = OTHER; note = 2'-deoxy-2'-fluorouridine-3'-phosphate
  modified_base 8: mod_base = OTHER; note = 2'-O-methyluridine-3'-phosphate
  modified_base 9: mod_base = OTHER; note = 2'-deoxy-2'-fluorouridine-3'-phosphate
  modified_base 10: mod_base = OTHER; note = 2'-deoxy-2'-fluorocytidine-3'-phosphate
  modified_base 11: mod_base = OTHER; note = 2'-deoxy-2'-fluoroguanosine-3'-phosphate
  modified_base 12: mod_base = OTHER; note = 2'-O-methyladenosine-3'-phosphate
  modified_base 13: mod_base = OTHER; note = 2'-O-methylcytidine-3'-phosphate
  modified_base 14: mod_base = OTHER; note = 2'-O-methylcytidine-3'-phosphate
  modified_base 15: mod_base = OTHER; note = 2'-O-methyladenosine-3'-phosphate
  modified_base 16: mod_base = OTHER; note = 2'-O-methyladenosine-3'-phosphate
  modified_base 17: mod_base = OTHER; note = 2'-O-methylguanosine-3'-phosphate
  modified_base 18: mod_base = OTHER; note = 2'-O-methyluridine-3'-phosphate
  modified_base 19: mod_base = OTHER; note = 2'-O-methyladenosine-3'-phosphate
  modified_base 20: mod_base = OTHER; note = 2'-O-methyluridine-3'-phosphate
  modified_base 21: mod_base = OTHER; note = 2'-O-methyladenosine
cagaagtttcgaccaagtata

SEQ ID NO: 3413 - RNA, 21 nt, synthetic construct
  source 1..21: mol_type = other RNA
  modified_base 1: mod_base = OTHER; note = 2'-O-methyladenosine-3'-phosphate
  modified_base 2: mod_base = OTHER; note = 2'-O-methylguanosine-3'-phosphate
  modified_base 3: mod_base = OTHER; note = 2'-O-methyluridine-3'-phosphate
  modified_base 4: mod_base = OTHER; note = 2'-O-methylguanosine-3'-phosphate
  modified_base 5: mod_base = OTHER; note = 2'-O-methylguanosine-3'-phosphate
  modified_base 6: mod_base = OTHER; note = 2'-O-methylcytidine-3'-phosphate
  modified_base 7: mod_base = OTHER; note = 2'-deoxy-2'-fluoroadenosine-3'-phosphate
  modified_base 8: mod_base = OTHER; note = 2'-O-methyladenosine-3'-phosphate
  modified_base 9: mod_base = OTHER; note = 2'-deoxy-2'-fluoroadenosine-3'-phosphate
  modified_base 10: mod_base = OTHER; note = 2'-deoxy-2'-fluoroguanosine-3'-phosphate
  modified_base 11: mod_base = OTHER; note = 2'-deoxy-2'-fluorouridine-3'-phosphate
  modified_base 12: mod_base = OTHER; note = 2'-O-methyluridine-3'-phosphate
  modified_base 13: mod_base = OTHER; note = 2'-O-methylguanosine-3'-phosphate
  modified_base 14: mod_base = OTHER; note = 2'-O-methyluridine-3'-phosphate
  modified_base 15: mod_base = OTHER; note = 2'-O-methylguanosine-3'-phosphate
  modified_base 16: mod_base = OTHER; note = 2'-O-methyladenosine-3'-phosphate
  modified_base 17: mod_base = OTHER; note = 2'-O-methyladenosine-3'-phosphate
  modified_base 18: mod_base = OTHER; note = 2'-O-methylguanosine-3'-phosphate
  modified_base 19: mod_base = OTHER; note = 2'-O-methylcytidine-3'-phosphate
  modified_base 20: mod_base = OTHER; note = 2'-O-methyladenosine-3'-phosphate
  modified_base 21: mod_base = OTHER; note = 2'-O-methyladenosine
agtggcaaagttgtgaagcaa

SEQ ID NO: 3414 - RNA, 21 nt, synthetic construct
  source 1..21: mol_type = other RNA
  modified_base 1: mod_base = OTHER; note = 2'-O-methyluridine-3'-phosphate
  modified_base 2: mod_base = OTHER; note = 2'-O-methylguanosine-3'-phosphate
  modified_base 3: mod_base = OTHER; note = 2'-O-methylguanosine-3'-phosphate
  modified_base 4: mod_base = OTHER; note = 2'-O-methylcytidine-3'-phosphate
  modified_base 5: mod_base = OTHER; note = 2'-O-methyladenosine-3'-phosphate
  modified_base 6: mod_base = OTHER; note = 2'-O-methyladenosine-3'-phosphate
  modified_base 7: mod_base = OTHER; note = 2'-deoxy-2'-fluoroadenosine-3'-phosphate
  modified_base 8: mod_base = OTHER; note = 2'-O-methylguanosine-3'-phosphate
  modified_base 9: mod_base = OTHER; note = 2'-deoxy-2'-fluorouridine-3'-phosphate
  modified_base 10: mod_base = OTHER; note = 2'-deoxy-2'-fluorouridine-3'-phosphate
  modified_base 11: mod_base = OTHER; note = 2'-deoxy-2'-fluoroguanosine-3'-phosphate
  modified_base 12: mod_base = OTHER; note = 2'-O-methyluridine-3'-phosphate
  modified_base 13: mod_base = OTHER; note = 2'-O-methylguanosine-3'-phosphate
  modified_base 14: mod_base = OTHER; note = 2'-O-methyladenosine-3'-phosphate
  modified_base 15: mod_base = OTHER; note = 2'-O-methyladenosine-3'-phosphate
  modified_base 16: mod_base = OTHER; note = 2'-O-methylguanosine-3'-phosphate
  modified_base 17: mod_base = OTHER; note = 2'-O-methylcytidine-3'-phosphate
  modified_base 18: mod_base = OTHER; note = 2'-O-methyladenosine-3'-phosphate
  modified_base 19: mod_base = OTHER; note = 2'-O-methylcytidine-3'-phosphate
  modified_base 20: mod_base = OTHER; note = 2'-O-methyluridine-3'-phosphate
  modified_base 21: mod_base = OTHER; note = 2'-O-methyladenosine
tggcaaagttgtgaagcacta

SEQ ID NO: 3415 - RNA, 21 nt, synthetic construct
  source 1..21: mol_type = other RNA
  modified_base 1: mod_base = OTHER; note = 2'-O-methyluridine-3'-phosphate
  modified_base 2: mod_base = OTHER; note = 2'-O-methyladenosine-3'-phosphate
  modified_base 3: mod_base = OTHER; note = 2'-O-methyladenosine-3'-phosphate
  modified_base 4: mod_base = OTHER; note = 2'-O-methyluridine-3'-phosphate
  modified_base 5: mod_base = OTHER; note = 2'-O-methylguanosine-3'-phosphate
  modified_base 6: mod_base = OTHER; note = 2'-O-methylcytidine-3'-phosphate
  modified_base 7: mod_base = OTHER; note = 2'-deoxy-2'-fluoroguanosine-3'-phosphate
  modified_base 8: mod_base = OTHER; note = 2'-O-methyluridine-3'-phosphate
  modified_base 9: mod_base = OTHER; note = 2'-deoxy-2'-fluoroguanosine-3'-phosphate
  modified_base 10: mod_base = OTHER; note = 2'-deoxy-2'-fluoroadenosine-3'-phosphate
  modified_base 11: mod_base = OTHER; note = 2'-deoxy-2'-fluoroguanosine-3'-phosphate
  modified_base 12: mod_base = OTHER; note = 2'-O-methyluridine-3'-phosphate
  modified_base 13: mod_base = OTHER; note = 2'-O-methylguanosine-3'-phosphate
  modified_base 14: mod_base = OTHER; note = 2'-O-methyluridine-3'-phosphate
  modified_base 15: mod_base = OTHER; note = 2'-O-methyluridine-3'-phosphate
  modified_base 16: mod_base = OTHER; note = 2'-O-methylguanosine-3'-phosphate
  modified_base 17: mod_base = OTHER; note = 2'-O-methylguanosine-3'-phosphate
  modified_base 18: mod_base = OTHER; note = 2'-O-methyluridine-3'-phosphate
  modified_base 19: mod_base = OTHER; note = 2'-O-methyladenosine-3'-phosphate
  modified_base 20: mod_base = OTHER; note = 2'-O-methyluridine-3'-phosphate
  modified_base 21: mod_base = OTHER; note = 2'-O-methyladenosine
taatgcgtgagtgttggtata

SEQ ID NO: 3416 - RNA, 21 nt, synthetic construct
  source 1..21: mol_type = other RNA
  modified_base 1: mod_base = OTHER; note = 2'-O-methylguanosine-3'-phosphate
  modified_base 2: mod_base = OTHER; note = 2'-O-methylcytidine-3'-phosphate
  modified_base 3: mod_base = OTHER; note = 2'-O-methylcytidine-3'-phosphate
  modified_base 4: mod_base = OTHER; note = 2'-O-methyluridine-3'-phosphate
  modified_base 5: mod_base = OTHER; note = 2'-O-methyladenosine-3'-phosphate
  modified_base 6: mod_base = OTHER; note = 2'-O-methyladenosine-3'-phosphate
  modified_base 7: mod_base = OTHER; note = 2'-deoxy-2'-fluorocytidine-3'-phosphate
  modified_base 8: mod_base = OTHER; note = 2'-O-methyluridine-3'-phosphate
  modified_base 9: mod_base = OTHER; note = 2'-deoxy-2'-fluoroguanosine-3'-phosphate
  modified_base 10: mod_base = OTHER; note = 2'-deoxy-2'-fluorocytidine-3'-phosphate
  modified_base 11: mod_base = OTHER; note = 2'-deoxy-2'-fluorouridine-3'-phosphate
  modified_base 12: mod_base = OTHER; note = 2'-O-methylcytidine-3'-phosphate
  modified_base 13: mod_base = OTHER; note = 2'-O-methyluridine-3'-phosphate
  modified_base 14: mod_base = OTHER; note = 2'-O-methyluridine-3'-phosphate
  modified_base 15: mod_base = OTHER; note = 2'-O-methylcytidine-3'-phosphate
  modified_base 16: mod_base = OTHER; note = 2'-O-methylguanosine-3'-phosphate
  modified_base 17: mod_base = OTHER; note = 2'-O-methyluridine-3'-phosphate
  modified_base 18: mod_base = OTHER; note = 2'-O-methyladenosine-3'-phosphate
  modified_base 19: mod_base = OTHER; note = 2'-O-methyluridine-3'-phosphate
  modified_base 20: mod_base = OTHER; note = 2'-O-methyluridine-3'-phosphate
  modified_base 21: mod_base = OTHER; note = 2'-O-methyladenosine
gcctaactgctcttcgtatta

SEQ ID NO: 3417 - RNA, 21 nt, synthetic construct
  source 1..21: mol_type = other RNA
  modified_base 1: mod_base = OTHER; note = 2'-O-methylcytidine-3'-phosphate
  modified_base 2: mod_base = OTHER; note = 2'-O-methylcytidine-3'-phosphate
  modified_base 3: mod_base = OTHER; note = 2'-O-methyluridine-3'-phosphate
  modified_base 4: mod_base = OTHER; note = 2'-O-methyladenosine-3'-phosphate
  modified_base 5: mod_base = OTHER; note = 2'-O-methyladenosine-3'-phosphate
  modified_base 6: mod_base = OTHER; note = 2'-O-methylcytidine-3'-phosphate
  modified_base 7: mod_base = OTHER; note = 2'-deoxy-2'-fluorouridine-3'-phosphate
  modified_base 8: mod_base = OTHER; note = 2'-O-methylguanosine-3'-phosphate
  modified_base 9: mod_base = OTHER; note = 2'-deoxy-2'-fluorocytidine-3'-phosphate
  modified_base 10: mod_base = OTHER; note = 2'-deoxy-2'-fluorouridine-3'-phosphate
  modified_base 11: mod_base = OTHER; note = 2'-deoxy-2'-fluorocytidine-3'-phosphate
  modified_base 12: mod_base = OTHER; note = 2'-O-methyluridine-3'-phosphate
  modified_base 13: mod_base = OTHER; note = 2'-O-methyluridine-3'-phosphate
  modified_base 14: mod_base = OTHER; note = 2'-O-methylcytidine-3'-phosphate
  modified_base 15: mod_base = OTHER; note = 2'-O-methylguanosine-3'-phosphate
  modified_base 16: mod_base = OTHER; note = 2'-O-methyluridine-3'-phosphate
  modified_base 17: mod_base = OTHER; note = 2'-O-methyladenosine-3'-phosphate
  modified_base 18: mod_base = OTHER; note = 2'-O-methyluridine-3'-phosphate
  modified_base 19: mod_base = OTHER; note = 2'-O-methyluridine-3'-phosphate
  modified_base 20: mod_base = OTHER; note = 2'-O-methyladenosine-3'-phosphate
  modified_base 21: mod_base = OTHER; note = 2'-O-methyladenosine
cctaactgctcttcgtattaa

SEQ ID NO: 3418 - RNA, 21 nt, synthetic construct
  source 1..21: mol_type = other RNA
  modified_base 1: mod_base = OTHER; note = 2'-O-methylcytidine-3'-phosphate
  modified_base 2: mod_base = OTHER; note = 2'-O-methyluridine-3'-phosphate
  modified_base 3: mod_base = OTHER; note = 2'-O-methyladenosine-3'-phosphate
  modified_base 4: mod_base = OTHER; note = 2'-O-methyladenosine-3'-phosphate
  modified_base 5: mod_base = OTHER; note = 2'-O-methylcytidine-3'-phosphate
  modified_base 6: mod_base = OTHER; note = 2'-O-methyluridine-3'-phosphate
  modified_base 7: mod_base = OTHER; note = 2'-deoxy-2'-fluoroguanosine-3'-phosphate
  modified_base 8: mod_base = OTHER; note = 2'-O-methylcytidine-3'-phosphate
  modified_base 9: mod_base = OTHER; note = 2'-deoxy-2'-fluorouridine-3'-phosphate
  modified_base 10: mod_base = OTHER; note = 2'-deoxy-2'-fluorocytidine-3'-phosphate
  modified_base 11: mod_base = OTHER; note = 2'-deoxy-2'-fluorouridine-3'-phosphate
  modified_base 12: mod_base = OTHER; note = 2'-O-methyluridine-3'-phosphate
  modified_base 13: mod_base = OTHER; note = 2'-O-methylcytidine-3'-phosphate
  modified_base 14: mod_base = OTHER; note = 2'-O-methylguanosine-3'-phosphate
  modified_base 15: mod_base = OTHER; note = 2'-O-methyluridine-3'-phosphate
  modified_base 16: mod_base = OTHER; note = 2'-O-methyladenosine-3'-phosphate
  modified_base 17: mod_base = OTHER; note = 2'-O-methyluridine-3'-phosphate
  modified_base 18: mod_base = OTHER; note = 2'-O-methyluridine-3'-phosphate
  modified_base 19: mod_base = OTHER; note = 2'-O-methyladenosine-3'-phosphate
  modified_base 20: mod_base = OTHER; note = 2'-O-methyladenosine-3'-phosphate
  modified_base 21: mod_base = OTHER; note = 2'-O-methyladenosine
ctaactgctcttcgtattaaa

SEQ ID NO: 3419 - RNA, 21 nt, synthetic construct
  source 1..21: mol_type = other RNA
  modified_base 1: mod_base = OTHER; note = 2'-O-methyladenosine-3'-phosphate
  modified_base 2: mod_base = OTHER; note = 2'-O-methylcytidine-3'-phosphate
  modified_base 3: mod_base = OTHER; note = 2'-O-methyluridine-3'-phosphate
  modified_base 4: mod_base = OTHER; note = 2'-O-methylguanosine-3'-phosphate
  modified_base 5: mod_base = OTHER; note = 2'-O-methylcytidine-3'-phosphate
  modified_base 6: mod_base = OTHER; note = 2'-O-methyluridine-3'-phosphate
  modified_base 7: mod_base = OTHER; note = 2'-deoxy-2'-fluorocytidine-3'-phosphate
  modified_base 8: mod_base = OTHER; note = 2'-O-methyluridine-3'-phosphate
  modified_base 9: mod_base = OTHER; note = 2'-deoxy-2'-fluorouridine-3'-phosphate
  modified_base 10: mod_base = OTHER; note = 2'-deoxy-2'-fluorocytidine-3'-phosphate
  modified_base 11: mod_base = OTHER; note = 2'-deoxy-2'-fluoroguanosine-3'-phosphate
  modified_base 12: mod_base = OTHER; note = 2'-O-methyluridine-3'-phosphate
  modified_base 13: mod_base = OTHER; note = 2'-O-methyladenosine-3'-phosphate
  modified_base 14: mod_base = OTHER; note = 2'-O-methyluridine-3'-phosphate
  modified_base 15: mod_base = OTHER; note = 2'-O-methyluridine-3'-phosphate
  modified_base 16: mod_base = OTHER; note = 2'-O-methyladenosine-3'-phosphate
  modified_base 17: mod_base = OTHER; note = 2'-O-methyladenosine-3'-phosphate
  modified_base 18: mod_base = OTHER; note = 2'-O-methylguanosine-3'-phosphate
  modified_base 19: mod_base = OTHER; note = 2'-O-methyladenosine-3'-phosphate
  modified_base 20: mod_base = OTHER; note = 2'-O-methyladenosine-3'-phosphate
  modified_base 21: mod_base = OTHER; note = 2'-O-methyladenosine
actgctcttcgtattaagaaa

SEQ ID NO: 3420 - RNA, 21 nt, synthetic construct
  source 1..21: mol_type = other RNA
  modified_base 1: mod_base = OTHER; note = 2'-O-methylguanosine-3'-phosphate
  modified_base 2: mod_base = OTHER; note = 2'-O-methylcytidine-3'-phosphate
  modified_base 3: mod_base = OTHER; note = 2'-O-methyluridine-3'-phosphate
  modified_base 4: mod_base = OTHER; note = 2'-O-methylcytidine-3'-phosphate
  modified_base 5: mod_base = OTHER; note = 2'-O-methyluridine-3'-phosphate
  modified_base 6: mod_base = OTHER; note = 2'-O-methyluridine-3'-phosphate
  modified_base 7: mod_base = OTHER; note = 2'-deoxy-2'-fluorocytidine-3'-phosphate
  modified_base 8: mod_base = OTHER; note = 2'-O-methylguanosine-3'-phosphate
  modified_base 9: mod_base = OTHER; note = 2'-deoxy-2'-fluorouridine-3'-phosphate
  modified_base 10: mod_base = OTHER; note = 2'-deoxy-2'-fluoroadenosine-3'-phosphate
  modified_base 11: mod_base = OTHER; note = 2'-deoxy-2'-fluorouridine-3'-phosphate
  modified_base 12: mod_base = OTHER; note = 2'-O-methyluridine-3'-phosphate
  modified_base 13: mod_base = OTHER; note = 2'-O-methyladenosine-3'-phosphate
  modified_base 14: mod_base = OTHER; note = 2'-O-methyladenosine-3'-phosphate
  modified_base 15: mod_base = OTHER; note = 2'-O-methylguanosine-3'-phosphate
  modified_base 16: mod_base = OTHER; note = 2'-O-methyladenosine-3'-phosphate
  modified_base 17: mod_base = OTHER; note = 2'-O-methyladenosine-3'-phosphate
  modified_base 18: mod_base = OTHER; note = 2'-O-methylguanosine-3'-phosphate
  modified_base 19: mod_base = OTHER; note = 2'-O-methyladenosine-3'-phosphate
  modified_base 20: mod_base = OTHER; note = 2'-O-methylcytidine-3'-phosphate
  modified_base 21: mod_base = OTHER; note = 2'-O-methyladenosine
gctcttcgtattaagaagaca

SEQ ID NO: 3421 - RNA, 21 nt, synthetic construct
  source 1..21: mol_type = other RNA
  modified_base 1: mod_base = OTHER; note = 2'-O-methylcytidine-3'-phosphate
  modified_base 2: mod_base = OTHER; note = 2'-O-methyluridine-3'-phosphate
  modified_base 3: mod_base = OTHER; note = 2'-O-methylcytidine-3'-phosphate
  modified_base 4: mod_base = OTHER; note = 2'-O-methyluridine-3'-phosphate
  modified_base 5: mod_base = OTHER; note = 2'-O-methyluridine-3'-phosphate
  modified_base 6: mod_base = OTHER; note = 2'-O-methylcytidine-3'-phosphate
  modified_base 7: mod_base = OTHER; note = 2'-deoxy-2'-fluoroguanosine-3'-phosphate
  modified_base 8: mod_base = OTHER; note = 2'-O-methyluridine-3'-phosphate
  modified_base 9: mod_base = OTHER; note = 2'-deoxy-2'-fluoroadenosine-3'-phosphate
  modified_base 10: mod_base = OTHER; note = 2'-deoxy-2'-fluorouridine-3'-phosphate
  modified_base 11: mod_base = OTHER; note = 2'-deoxy-2'-fluorouridine-3'-phosphate
  modified_base 12: mod_base = OTHER; note = 2'-O-methyladenosine-3'-phosphate
  modified_base 13: mod_base = OTHER; note = 2'-O-methyladenosine-3'-phosphate
  modified_base 14: mod_base = OTHER; note = 2'-O-methylguanosine-3'-phosphate
  modified_base 15: mod_base = OTHER; note = 2'-O-methyladenosine-3'-phosphate
  modified_base 16: mod_base = OTHER; note = 2'-O-methyladenosine-3'-phosphate
  modified_base 17: mod_base = OTHER; note = 2'-O-methylguanosine-3'-phosphate
  modified_base 18: mod_base = OTHER; note = 2'-O-methyladenosine-3'-phosphate
  modified_base 19: mod_base = OTHER; note = 2'-O-methylcytidine-3'-phosphate
  modified_base 20: mod_base = OTHER; note = 2'-O-methyluridine-3'-phosphate
  modified_base 21: mod_base = OTHER; note = 2'-O-methyladenosine
ctcttcgtattaagaagacta

SEQ ID NO: 3422 - RNA, 21 nt, synthetic construct
  source 1..21: mol_type = other RNA
  modified_base 1: mod_base = OTHER; note = 2'-O-methyluridine-3'-phosphate
  modified_base 2: mod_base = OTHER; note = 2'-O-methyladenosine-3'-phosphate
  modified_base 3: mod_base = OTHER; note = 2'-O-methyluridine-3'-phosphate
  modified_base 4: mod_base = OTHER; note = 2'-O-methyladenosine-3'-phosphate
  modified_base 5: mod_base = OTHER; note = 2'-O-methyluridine-3'-phosphate
  modified_base 6: mod_base = OTHER; note = 2'-O-methylcytidine-3'-phosphate
  modified_base 7: mod_base = OTHER; note = 2'-deoxy-2'-fluorouridine-3'-phosphate
  modified_base 8: mod_base = OTHER; note = 2'-O-methylcytidine-3'-phosphate
  modified_base 9: mod_base = OTHER; note = 2'-deoxy-2'-fluoroadenosine-3'-phosphate
  modified_base 10: mod_base = OTHER; note = 2'-deoxy-2'-fluoroadenosine-3'-phosphate
  modified_base 11: mod_base = OTHER; note = 2'-deoxy-2'-fluorocytidine-3'-phosphate
  modified_base 12: mod_base = OTHER; note = 2'-O-methyluridine-3'-phosphate
  modified_base 13: mod_base = OTHER; note = 2'-O-methyluridine-3'-phosphate
  modified_base 14: mod_base = OTHER; note = 2'-O-methyluridine-3'-phosphate
  modified_base 15: mod_base = OTHER; note = 2'-O-methylguanosine-3'-phosphate
  modified_base 16: mod_base = OTHER; note = 2'-O-methyluridine-3'-phosphate
  modified_base 17: mod_base = OTHER; note = 2'-O-methylguanosine-3'-phosphate
  modified_base 18: mod_base = OTHER; note = 2'-O-methyluridine-3'-phosphate
  modified_base 19: mod_base = OTHER; note = 2'-O-methylcytidine-3'-phosphate
  modified_base 20: mod_base = OTHER; note = 2'-O-methyladenosine-3'-phosphate
  modified_base 21: mod_base = OTHER; note = 2'-O-methyladenosine
tatatctcaactttgtgtcaa

SEQ ID NO: 3423 - RNA, 21 nt, synthetic construct
  source 1..21: mol_type = other RNA
  modified_base 1: mod_base = OTHER; note = 2'-O-methyladenosine-3'-phosphate
  modified_base 2: mod_base = OTHER; note = 2'-O-methyluridine-3'-phosphate
  modified_base 3: mod_base = OTHER; note = 2'-O-methyladenosine-3'-phosphate
  modified_base 4: mod_base = OTHER; note = 2'-O-methyluridine-3'-phosphate
  modified_base 5: mod_base = OTHER; note = 2'-O-methylcytidine-3'-phosphate
  modified_base 6: mod_base = OTHER; note = 2'-O-methyluridine-3'-phosphate
  modified_base 7: mod_base = OTHER; note = 2'-deoxy-2'-fluorocytidine-3'-phosphate
  modified_base 8: mod_base = OTHER; note = 2'-O-methyladenosine-3'-phosphate
  modified_base 9: mod_base = OTHER; note = 2'-deoxy-2'-fluoroadenosine-3'-phosphate
  modified_base 10: mod_base = OTHER; note = 2'-deoxy-2'-fluorocytidine-3'-phosphate
  modified_base 11: mod_base = OTHER; note = 2'-deoxy-2'-fluorouridine-3'-phosphate
  modified_base 12: mod_base = OTHER; note = 2'-O-methyluridine-3'-phosphate
  modified_base 13: mod_base = OTHER; note = 2'-O-methyluridine-3'-phosphate
  modified_base 14: mod_base = OTHER; note = 2'-O-methylguanosine-3'-phosphate
  modified_base 15: mod_base = OTHER; note = 2'-O-methyluridine-3'-phosphate
  modified_base 16: mod_base = OTHER; note = 2'-O-methylguanosine-3'-phosphate
  modified_base 17: mod_base = OTHER; note = 2'-O-methyluridine-3'-phosphate
  modified_base 18: mod_base = OTHER; note = 2'-O-methylcytidine-3'-phosphate
  modified_base 19: mod_base = OTHER; note = 2'-O-methyladenosine-3'-phosphate
  modified_base 20: mod_base = OTHER; note = 2'-O-methyladenosine-3'-phosphate
  modified_base 21: mod_base = OTHER; note = 2'-O-methyladenosine
atatctcaactttgtgtcaaa

SEQ ID NO: 3424 - RNA, 21 nt, synthetic construct
  source 1..21: mol_type = other RNA
  modified_base 1: mod_base = OTHER; note = 2'-O-methyluridine-3'-phosphate
  modified_base 2: mod_base = OTHER; note = 2'-O-methyladenosine-3'-phosphate
  modified_base 3: mod_base = OTHER; note = 2'-O-methyluridine-3'-phosphate
  modified_base 4: mod_base = OTHER; note = 2'-O-methylcytidine-3'-phosphate
  modified_base 5: mod_base = OTHER; note = 2'-O-methyluridine-3'-phosphate
  modified_base 6: mod_base = OTHER; note = 2'-O-methylcytidine-3'-phosphate
  modified_base 7: mod_base = OTHER; note = 2'-deoxy-2'-fluoroadenosine-3'-phosphate
  modified_base 8: mod_base = OTHER; note = 2'-O-methyladenosine-3'-phosphate
  modified_base 9: mod_base = OTHER; note = 2'-deoxy-2'-fluorocytidine-3'-phosphate
  modified_base 10: mod_base = OTHER; note = 2'-deoxy-2'-fluorouridine-3'-phosphate
  modified_base 11: mod_base = OTHER; note = 2'-deoxy-2'-fluorouridine-3'-phosphate
  modified_base 12: mod_base = OTHER; note = 2'-O-methyluridine-3'-phosphate
  modified_base 13: mod_base = OTHER; note = 2'-O-methylguanosine-3'-phosphate
  modified_base 14: mod_base = OTHER; note = 2'-O-methyluridine-3'-phosphate
  modified_base 15: mod_base = OTHER; note = 2'-O-methylguanosine-3'-phosphate
  modified_base 16: mod_base = OTHER; note = 2'-O-methyluridine-3'-phosphate
  modified_base 17: mod_base = OTHER; note = 2'-O-methylcytidine-3'-phosphate
  modified_base 18: mod_base = OTHER; note = 2'-O-methyladenosine-3'-phosphate
  modified_base 19: mod_base = OTHER; note = 2'-O-methyladenosine-3'-phosphate
  modified_base 20: mod_base = OTHER; note = 2'-O-methyladenosine-3'-phosphate
  modified_base 21: mod_base = OTHER; note = 2'-O-methyladenosine
tatctcaactttgtgtcaaaa

SEQ ID NO: 3425 - RNA, 21 nt, synthetic construct
  source 1..21: mol_type = other RNA
  modified_base 1: mod_base = OTHER; note = 2'-O-methylcytidine-3'-phosphate
  modified_base 2: mod_base = OTHER; note = 2'-O-methyluridine-3'-phosphate
  modified_base 3: mod_base = OTHER; note = 2'-O-methylcytidine-3'-phosphate
  modified_base 4: mod_base = OTHER; note = 2'-O-methyladenosine-3'-phosphate
  modified_base 5: mod_base = OTHER; note = 2'-O-methyladenosine-3'-phosphate
  modified_base 6: mod_base = OTHER; note = 2'-O-methylcytidine-3'-phosphate
  modified_base 7: mod_base = OTHER; note = 2'-deoxy-2'-fluorouridine-3'-phosphate
  modified_base 8: mod_base = OTHER; note = 2'-O-methyluridine-3'-phosphate
  modified_base 9: mod_base = OTHER; note = 2'-deoxy-2'-fluorouridine-3'-phosphate
  modified_base 10: mod_base = OTHER; note = 2'-deoxy-2'-fluoroguanosine-3'-phosphate
  modified_base 11: mod_base = OTHER; note = 2'-deoxy-2'-fluorouridine-3'-phosphate
  modified_base 12: mod_base = OTHER; note = 2'-O-methylguanosine-3'-phosphate
  modified_base 13: mod_base = OTHER; note = 2'-O-methyluridine-3'-phosphate
  modified_base 14: mod_base = OTHER; note = 2'-O-methylcytidine-3'-phosphate
  modified_base 15: mod_base = OTHER; note = 2'-O-methyladenosine-3'-phosphate
  modified_base 16: mod_base = OTHER; note = 2'-O-methyladenosine-3'-phosphate
  modified_base 17: mod_base = OTHER; note = 2'-O-methyladenosine-3'-phosphate
  modified_base 18: mod_base = OTHER; note = 2'-O-methylguanosine-3'-phosphate
  modified_base 19: mod_base = OTHER; note = 2'-O-methyladenosine-3'-phosphate
  modified_base 20: mod_base = OTHER; note = 2'-O-methyladenosine-3'-phosphate
  modified_base 21: mod_base = OTHER; note = 2'-O-methyladenosine
ctcaactttgtgtcaaagaaa

SEQ ID NO: 3426 - RNA, 21 nt, synthetic construct
  source 1..21: mol_type = other RNA
  modified_base 1: mod_base = OTHER; note = 2'-O-methyladenosine-3'-phosphate
  modified_base 2: mod_base = OTHER; note = 2'-O-methylcytidine-3'-phosphate
  modified_base 3: mod_base = OTHER; note = 2'-O-methyluridine-3'-phosphate
  modified_base 4: mod_base = OTHER; note = 2'-O-methylguanosine-3'-phosphate
  modified_base 5: mod_base = OTHER; note = 2'-O-methylcytidine-3'-phosphate
  modified_base 6: mod_base = OTHER; note = 2'-O-methyladenosine-3'-phosphate
  modified_base 7: mod_base = OTHER; note = 2'-deoxy-2'-fluoroadenosine-3'-phosphate
  modified_base 8: mod_base = OTHER; note = 2'-O-methyladenosine-3'-phosphate
  modified_base 9: mod_base = OTHER; note = 2'-deoxy-2'-fluoroguanosine-3'-phosphate
  modified_base 10: mod_base = OTHER; note = 2'-deoxy-2'-fluorocytidine-3'-phosphate
  modified_base 11: mod_base = OTHER; note = 2'-deoxy-2'-fluorocytidine-3'-phosphate
  modified_base 12: mod_base = OTHER; note = 2'-O-methyluridine-3'-phosphate
  modified_base 13: mod_base = OTHER; note = 2'-O-methyladenosine-3'-phosphate
  modified_base 14: mod_base = OTHER; note = 2'-O-methyladenosine-3'-phosphate
  modified_base 15: mod_base = OTHER; note = 2'-O-methyluridine-3'-phosphate
  modified_base 16: mod_base = OTHER; note = 2'-O-methylguanosine-3'-phosphate
  modified_base 17: mod_base = OTHER; note = 2'-O-methyladenosine-3'-phosphate
  modified_base 18: mod_base = OTHER; note = 2'-O-methyluridine-3'-phosphate
  modified_base 19: mod_base = OTHER; note = 2'-O-methylguanosine-3'-phosphate
  modified_base 20: mod_base = OTHER; note = 2'-O-methyladenosine-3'-phosphate
  modified_base 21: mod_base = OTHER; note = 2'-O-methyladenosine
actgcaaagcctaatgatgaa

SEQ ID NO: 3427 - RNA, 21 nt, synthetic construct
  source 1..21: mol_type = other RNA
  modified_base 1: mod_base = OTHER; note = 2'-O-methylcytidine-3'-phosphate
  modified_base 2: mod_base = OTHER; note = 2'-O-methyluridine-3'-phosphate
  modified_base 3: mod_base = OTHER; note = 2'-O-methylguanosine-3'-phosphate
  modified_base 4: mod_base = OTHER; note = 2'-O-methylcytidine-3'-phosphate
  modified_base 5: mod_base = OTHER; note = 2'-O-methyladenosine-3'-phosphate
  modified_base 6: mod_base = OTHER; note = 2'-O-methyladenosine-3'-phosphate
  modified_base 7: mod_base = OTHER; note = 2'-deoxy-2'-fluoroadenosine-3'-phosphate
  modified_base 8: mod_base = OTHER; note = 2'-O-methylguanosine-3'-phosphate
  modified_base 9: mod_base = OTHER; note = 2'-deoxy-2'-fluorocytidine-3'-phosphate
  modified_base 10: mod_base = OTHER; note = 2'-deoxy-2'-fluorocytidine-3'-phosphate
  modified_base 11: mod_base = OTHER; note = 2'-deoxy-2'-fluorouridine-3'-phosphate
  modified_base 12: mod_base = OTHER; note = 2'-O-methyladenosine-3'-phosphate
  modified_base 13: mod_base = OTHER; note = 2'-O-methyladenosine-3'-phosphate
  modified_base 14: mod_base = OTHER; note = 2'-O-methyluridine-3'-phosphate
  modified_base 15: mod_base = OTHER; note = 2'-O-methylguanosine-3'-phosphate
  modified_base 16: mod_base = OTHER; note = 2'-O-methyladenosine-3'-phosphate
  modified_base 17: mod_base = OTHER; note = 2'-O-methyluridine-3'-phosphate
  modified_base 18: mod_base = OTHER; note = 2'-O-methylguanosine-3'-phosphate
  modified_base 19: mod_base = OTHER; note = 2'-O-methyladenosine-3'-phosphate
  modified_base 20: mod_base = OTHER; note = 2'-O-methyluridine-3'-phosphate
  modified_base 21: mod_base = OTHER; note = 2'-O-methyladenosine
ctgcaaagcctaatgatgata

SEQ ID NO: 3428 - RNA, 21 nt, synthetic construct
  source 1..21: mol_type = other RNA
  modified_base 1: mod_base = OTHER; note = 2'-O-methyluridine-3'-phosphate
  modified_base 2: mod_base = OTHER; note = 2'-O-methylguanosine-3'-phosphate
  modified_base 3: mod_base = OTHER; note = 2'-O-methylcytidine-3'-phosphate
  modified_base 4: mod_base = OTHER; note = 2'-O-methyladenosine-3'-phosphate
  modified_base 5: mod_base = OTHER; note = 2'-O-methyladenosine-3'-phosphate
  modified_base 6: mod_base = OTHER; note = 2'-O-methyladenosine-3'-phosphate
  modified_base 7: mod_base = OTHER; note = 2'-deoxy-2'-fluoroguanosine-3'-phosphate
  modified_base 8: mod_base = OTHER; note = 2'-O-methylcytidine-3'-phosphate
  modified_base 9: mod_base = OTHER; note = 2'-deoxy-2'-fluorocytidine-3'-phosphate
  modified_base 10: mod_base = OTHER; note = 2'-deoxy-2'-fluorouridine-3'-phosphate
  modified_base 11: mod_base = OTHER; note = 2'-deoxy-2'-fluoroadenosine-3'-phosphate
  modified_base 12: mod_base = OTHER; note = 2'-O-methyladenosine-3'-phosphate
  modified_base 13: mod_base = OTHER; note = 2'-O-methyluridine-3'-phosphate
  modified_base 14: mod_base = OTHER; note = 2'-O-methylguanosine-3'-phosphate
  modified_base 15: mod_base = OTHER; note = 2'-O-methyladenosine-3'-phosphate
  modified_base 16: mod_base = OTHER; note = 2'-O-methyluridine-3'-phosphate
  modified_base 17: mod_base = OTHER; note = 2'-O-methylguanosine-3'-phosphate
  modified_base 18: mod_base = OTHER; note = 2'-O-methyladenosine-3'-phosphate
  modified_base 19: mod_base = OTHER; note = 2'-O-methyluridine-3'-phosphate
  modified_base 20: mod_base = OTHER; note = 2'-O-methyladenosine-3'-phosphate
  modified_base 21: mod_base = OTHER; note = 2'-O-methyladenosine
tgcaaagcctaatgatgataa

SEQ ID NO: 3429 - RNA, 21 nt, synthetic construct
  source 1..21: mol_type = other RNA
  modified_base 1: mod_base = OTHER; note = 2'-O-methylguanosine-3'-phosphate
  modified_base 2: mod_base = OTHER; note = 2'-O-methylcytidine-3'-phosphate
  modified_base 3: mod_base = OTHER; note = 2'-O-methyladenosine-3'-phosphate
  modified_base 4: mod_base = OTHER; note = 2'-O-methyladenosine-3'-phosphate
  modified_base 5: mod_base = OTHER; note = 2'-O-methyladenosine-3'-phosphate
  modified_base 6: mod_base = OTHER; note = 2'-O-methylguanosine-3'-phosphate
  modified_base 7: mod_base = OTHER; note = 2'-deoxy-2'-fluorocytidine-3'-phosphate
  modified_base 8: mod_base = OTHER; note = 2'-O-methylcytidine-3'-phosphate
  modified_base 9: mod_base = OTHER; note = 2'-deoxy-2'-fluorouridine-3'-phosphate
  modified_base 10: mod_base = OTHER; note = 2'-deoxy-2'-fluoroadenosine-3'-phosphate
  modified_base 11: mod_base = OTHER; note = 2'-deoxy-2'-fluoroadenosine-3'-phosphate
  modified_base 12: mod_base = OTHER; note = 2'-O-methyluridine-3'-phosphate
  modified_base 13: mod_base = OTHER; note = 2'-O-methylguanosine-3'-phosphate
  modified_base 14: mod_base = OTHER; note = 2'-O-methyladenosine-3'-phosphate
  modified_base 15: mod_base = OTHER; note = 2'-O-methyluridine-3'-phosphate
  modified_base 16: mod_base = OTHER; note = 2'-O-methylguanosine-3'-phosphate
  modified_base 17: mod_base = OTHER; note = 2'-O-methyladenosine-3'-phosphate
  modified_base 18: mod_base = OTHER; note = 2'-O-methyluridine-3'-phosphate
  modified_base 19: mod_base = OTHER; note = 2'-O-methyladenosine-3'-phosphate
  modified_base 20: mod_base = OTHER; note = 2'-O-methyladenosine-3'-phosphate
  modified_base 21: mod_base = OTHER; note = 2'-O-methyladenosine
gcaaagcctaatgatgataaa

SEQ ID NO: 3430 - RNA, 21 nt, synthetic construct
  source 1..21: mol_type = other RNA
  modified_base 1: mod_base = OTHER; note = 2'-O-methylcytidine-3'-phosphate
  modified_base 2: mod_base = OTHER; note = 2'-O-methyladenosine-3'-phosphate
  modified_base 3: mod_base = OTHER; note = 2'-O-methyladenosine-3'-phosphate
  modified_base 4: mod_base = OTHER; note = 2'-O-methyladenosine-3'-phosphate
  modified_base 5: mod_base = OTHER; note = 2'-O-methylguanosine-3'-phosphate
  modified_base 6: mod_base = OTHER; note = 2'-O-methylcytidine-3'-phosphate
  modified_base 7: mod_base = OTHER; note = 2'-deoxy-2'-fluorocytidine-3'-phosphate
  modified_base 8: mod_base = OTHER; note = 2'-O-methyluridine-3'-phosphate
  modified_base 9: mod_base = OTHER; note = 2'-deoxy-2'-fluoroadenosine-3'-phosphate
  modified_base 10: mod_base = OTHER; note = 2'-deoxy-2'-fluoroadenosine-3'-phosphate
  modified_base 11: mod_base = OTHER; note = 2'-deoxy-2'-fluorouridine-3'-phosphate
  modified_base 12: mod_base = OTHER; note = 2'-O-methylguanosine-3'-phosphate
  modified_base 13: mod_base = OTHER; note = 2'-O-methyladenosine-3'-phosphate
  modified_base 14: mod_base = OTHER; note = 2'-O-methyluridine-3'-phosphate
  modified_base 15: mod_base = OTHER; note = 2'-O-methylguanosine-3'-phosphate
  modified_base 16: mod_base = OTHER; note = 2'-O-methyladenosine-3'-phosphate
  modified_base 17: mod_base = OTHER; note = 2'-O-methyluridine-3'-phosphate
  modified_base 18: mod_base = OTHER; note = 2'-O-methyladenosine-3'-phosphate
  modified_base 19: mod_base = OTHER; note = 2'-O-methyladenosine-3'-phosphate
  modified_base 20: mod_base = OTHER; note = 2'-O-methyluridine-3'-phosphate
  modified_base 21: mod_base = OTHER; note = 2'-O-methyladenosine
caaagcctaatgatgataata

SEQ ID NO: 3431 - RNA, 21 nt, synthetic construct
  source 1..21: mol_type = other RNA
  modified_base 1: mod_base = OTHER; note = 2'-O-methyladenosine-3'-phosphate
  modified_base 2: mod_base = OTHER; note = 2'-O-methyladenosine-3'-phosphate
  modified_base 3: mod_base = OTHER; note = 2'-O-methyladenosine-3'-phosphate
  modified_base 4: mod_base = OTHER; note = 2'-O-methylguanosine-3'-phosphate
  modified_base 5: mod_base = OTHER; note = 2'-O-methylcytidine-3'-phosphate
  modified_base 6: mod_base = OTHER; note = 2'-O-methylcytidine-3'-phosphate
  modified_base 7: mod_base = OTHER; note = 2'-deoxy-2'-fluorouridine-3'-phosphate
  modified_base 8: mod_base = OTHER; note = 2'-O-methyladenosine-3'-phosphate
  modified_base 9: mod_base = OTHER; note = 2'-deoxy-2'-fluoroadenosine-3'-phosphate
  modified_base 10: mod_base = OTHER; note = 2'-deoxy-2'-fluorouridine-3'-phosphate
  modified_base 11: mod_base = OTHER; note = 2'-deoxy-2'-fluoroguanosine-3'-phosphate
  modified_base 12: mod_base = OTHER; note = 2'-O-methyladenosine-3'-phosphate
  modified_base 13: mod_base = OTHER; note = 2'-O-methyluridine-3'-phosphate
  modified_base 14: mod_base = OTHER; note = 2'-O-methylguanosine-3'-phosphate
  modified_base 15: mod_base = OTHER; note = 2'-O-methyladenosine-3'-phosphate
  modified_base 16: mod_base = OTHER; note = 2'-O-methyluridine-3'-phosphate
  modified_base 17: mod_base = OTHER; note = 2'-O-methyladenosine-3'-phosphate
  modified_base 18: mod_base = OTHER; note = 2'-O-methyladenosine-3'-phosphate
  modified_base 19: mod_base = OTHER; note = 2'-O-methyluridine-3'-phosphate
  modified_base 20: mod_base = OTHER; note = 2'-O-methyluridine-3'-phosphate
  modified_base 21: mod_base = OTHER; note = 2'-O-methyladenosine
aaagcctaatgatgataatta

SEQ ID NO: 3432 - RNA, 21 nt, synthetic construct
  source 1..21: mol_type = other RNA
  modified_base 1: mod_base = OTHER; note = 2'-O-methyladenosine-3'-phosphate
  modified_base 2: mod_base = OTHER; note = 2'-O-methyladenosine-3'-phosphate
  modified_base 3: mod_base = OTHER; note = 2'-O-methylguanosine-3'-phosphate
  modified_base 4: mod_base = OTHER; note = 2'-O-methylcytidine-3'-phosphate
  modified_base 5: mod_base = OTHER; note = 2'-O-methylcytidine-3'-phosphate
  modified_base 6: mod_base = OTHER; note = 2'-O-methyluridine-3'-phosphate
  modified_base 7: mod_base = OTHER; note = 2'-deoxy-2'-fluoroadenosine-3'-phosphate
  modified_base 8: mod_base = OTHER; note = 2'-O-methyladenosine-3'-phosphate
  modified_base 9: mod_base = OTHER; note = 2'-deoxy-2'-fluorouridine-3'-phosphate
  modified_base 10: mod_base = OTHER; note = 2'-deoxy-2'-fluoroguanosine-3'-phosphate
  modified_base 11: mod_base = OTHER; note = 2'-deoxy-2'-fluoroadenosine-3'-phosphate
  modified_base 12: mod_base = OTHER; note = 2'-O-methyluridine-3'-phosphate
  modified_base 13: mod_base = OTHER; note = 2'-O-methylguanosine-3'-phosphate
  modified_base 14: mod_base = OTHER; note = 2'-O-methyladenosine-3'-phosphate
  modified_base 15: mod_base = OTHER; note = 2'-O-methyluridine-3'-phosphate
  modified_base 16: mod_base = OTHER; note = 2'-O-methyladenosine-3'-phosphate
  modified_base 17: mod_base = OTHER; note = 2'-O-methyladenosine-3'-phosphate
  modified_base 18: mod_base = OTHER; note = 2'-O-methyluridine-3'-phosphate
  modified_base 19: mod_base = OTHER; note = 2'-O-methyluridine-3'-phosphate
  modified_base 20: mod_base = OTHER; note = 2'-O-methyladenosine-3'-phosphate
  modified_base 21: mod_base = OTHER; note = 2'-O-methyladenosine
aagcctaatgatgataattaa

SEQ ID NO: 3433 - RNA, 21 nt, synthetic construct
  source 1..21: mol_type = other RNA
  modified_base 1: mod_base = OTHER; note = 2'-O-methylguanosine-3'-phosphate
  modified_base 2: mod_base = OTHER; note = 2'-O-methylcytidine-3'-phosphate
  modified_base 3: mod_base = OTHER; note = 2'-O-methylcytidine-3'-phosphate
  modified_base 4: mod_base = OTHER; note = 2'-O-methyluridine-3'-phosphate
  modified_base 5: mod_base = OTHER; note = 2'-O-methyladenosine-3'-phosphate
  modified_base 6: mod_base = OTHER; note = 2'-O-methyladenosine-3'-phosphate
  modified_base 7: mod_base = OTHER; note = 2'-deoxy-2'-fluorouridine-3'-phosphate
  modified_base 8: mod_base = OTHER; note = 2'-O-methylguanosine-3'-phosphate
  modified_base 9: mod_base = OTHER; note = 2'-deoxy-2'-fluoroadenosine-3'-phosphate
  modified_base 10: mod_base = OTHER; note = 2'-deoxy-2'-fluorouridine-3'-phosphate
  modified_base 11: mod_base = OTHER; note = 2'-deoxy-2'-fluoroguanosine-3'-phosphate
  modified_base 12: mod_base = OTHER; note = 2'-O-methyladenosine-3'-phosphate
  modified_base 13: mod_base = OTHER; note = 2'-O-methyluridine-3'-phosphate
  modified_base 14: mod_base = OTHER; note = 2'-O-methyladenosine-3'-phosphate
  modified_base 15: mod_base = OTHER; note = 2'-O-methyladenosine-3'-phosphate
  modified_base 16: mod_base = OTHER; note = 2'-O-methyluridine-3'-phosphate
  modified_base 17: mod_base = OTHER; note = 2'-O-methyluridine-3'-phosphate
  modified_base 18: mod_base = OTHER; note = 2'-O-methyladenosine-3'-phosphate
  modified_base 19: mod_base = OTHER; note = 2'-O-methyluridine-3'-phosphate
  modified_base 20: mod_base = OTHER; note = 2'-O-methylguanosine-3'-phosphate
  modified_base 21: mod_base = OTHER; note = 2'-O-methyladenosine
gcctaatgatgataattatga

SEQ ID NO: 3434 - RNA, 21 nt, synthetic construct
  source 1..21: mol_type = other RNA
  modified_base 1: mod_base = OTHER; note = 2'-O-methylcytidine-3'-phosphate
  modified_base 2: mod_base = OTHER; note = 2'-O-methylcytidine-3'-phosphate
  modified_base 3: mod_base = OTHER; note = 2'-O-methyluridine-3'-phosphate
  modified_base 4: mod_base = OTHER; note = 2'-O-methyladenosine-3'-phosphate
  modified_base 5: mod_base = OTHER; note = 2'-O-methyladenosine-3'-phosphate
  modified_base 6: mod_base = OTHER; note = 2'-O-methyluridine-3'-phosphate
  modified_base 7: mod_base = OTHER; note = 2'-deoxy-2'-fluoroguanosine-3'-phosphate
  modified_base 8: mod_base = OTHER; note = 2'-O-methyladenosine-3'-phosphate
  modified_base 9: mod_base = OTHER; note = 2'-deoxy-2'-fluorouridine-3'-phosphate
  modified_base 10: mod_base = OTHER; note = 2'-deoxy-2'-fluoroguanosine-3'-phosphate
  modified_base 11: mod_base = OTHER; note = 2'-deoxy-2'-fluoroadenosine-3'-phosphate
  modified_base 12: mod_base = OTHER; note = 2'-O-methyluridine-3'-phosphate
  modified_base 13: mod_base = OTHER; note = 2'-O-methyladenosine-3'-phosphate
  modified_base 14: mod_base = OTHER; note = 2'-O-methyladenosine-3'-phosphate
  modified_base 15: mod_base = OTHER; note = 2'-O-methyluridine-3'-phosphate
  modified_base 16: mod_base = OTHER; note = 2'-O-methyluridine-3'-phosphate
  modified_base 17: mod_base = OTHER; note = 2'-O-methyladenosine-3'-phosphate
  modified_base 18: mod_base = OTHER; note = 2'-O-methyluridine-3'-phosphate
  modified_base 19: mod_base = OTHER; note = 2'-O-methylguanosine-3'-phosphate
  modified_base 20: mod_base = OTHER; note = 2'-O-methyluridine-3'-phosphate
  modified_base 21: mod_base = OTHER; note = 2'-O-methyladenosine
cctaatgatgataattatgta

SEQ ID NO: 3435 - RNA, 21 nt, synthetic construct
  source 1..21: mol_type = other RNA
  modified_base 1: mod_base = OTHER; note = 2'-O-methylcytidine-3'-phosphate
  modified_base 2: mod_base = OTHER; note = 2'-O-methyluridine-3'-phosphate
  modified_base 3: mod_base = OTHER; note = 2'-O-methyladenosine-3'-phosphate
  modified_base 4: mod_base = OTHER; note = 2'-O-methyladenosine-3'-phosphate
  modified_base 5: mod_base = OTHER; note = 2'-O-methyluridine-3'-phosphate
  modified_base 6: mod_base = OTHER; note = 2'-O-methylguanosine-3'-phosphate
  modified_base 7: mod_base = OTHER; note = 2'-deoxy-2'-fluoroadenosine-3'-phosphate
  modified_base 8: mod_base = OTHER; note = 2'-O-methyluridine-3'-phosphate
  modified_base 9: mod_base = OTHER; note = 2'-deoxy-2'-fluoroguanosine-3'-phosphate
  modified_base 10: mod_base = OTHER; note = 2'-deoxy-2'-fluoroadenosine-3'-phosphate
  modified_base 11: mod_base = OTHER; note = 2'-deoxy-2'-fluorouridine-3'-phosphate
  modified_base 12: mod_base = OTHER; note = 2'-O-methyladenosine-3'-phosphate
  modified_base 13: mod_base = OTHER; note = 2'-O-methyladenosine-3'-phosphate
  modified_base 14: mod_base = OTHER; note = 2'-O-methyluridine-3'-phosphate
  modified_base 15: mod_base = OTHER; note = 2'-O-methyluridine-3'-phosphate
  modified_base 16: mod_base = OTHER; note = 2'-O-methyladenosine-3'-phosphate
  modified_base 17: mod_base = OTHER; note = 2'-O-methyluridine-3'-phosphate
  modified_base 18: mod_base = OTHER; note = 2'-O-methylguanosine-3'-phosphate
  modified_base 19: mod_base = OTHER; note = 2'-O-methyluridine-3'-phosphate
  modified_base 20: mod_base = OTHER; note = 2'-O-methyluridine-3'-phosphate
  modified_base 21: mod_base = OTHER; note = 2'-O-methyladenosine
ctaatgatgataattatgtta

SEQ ID NO: 3436 - RNA, 21 nt, synthetic construct
  source 1..21: mol_type = other RNA
  modified_base 1: mod_base = OTHER; note = 2'-O-methyluridine-3'-phosphate
  modified_base 2: mod_base = OTHER; note = 2'-O-methyladenosine-3'-phosphate
  modified_base 3: mod_base = OTHER; note = 2'-O-methyladenosine-3'-phosphate
  modified_base 4: mod_base = OTHER; note = 2'-O-methyladenosine-3'-phosphate
  modified_base 5: mod_base = OTHER; note = 2'-O-methyladenosine-3'-phosphate
  modified_base 6: mod_base = OTHER; note = 2'-O-methyladenosine-3'-phosphate
  modified_base 7: mod_base = OTHER; note = 2'-deoxy-2'-fluoroguanosine-3'-phosphate
  modified_base 8: mod_base = OTHER; note = 2'-O-methyladenosine-3'-phosphate
  modified_base 9: mod_base = OTHER; note = 2'-deoxy-2'-fluoroadenosine-3'-phosphate
  modified_base 10: mod_base = OTHER; note = 2'-deoxy-2'-fluoroadenosine-3'-phosphate
  modified_base 11: mod_base = OTHER; note = 2'-deoxy-2'-fluorouridine-3'-phosphate
  modified_base 12: mod_base = OTHER; note = 2'-O-methylcytidine-3'-phosphate
  modified_base 13: mod_base = OTHER; note = 2'-O-methyluridine-3'-phosphate
  modified_base 14: mod_base = OTHER; note = 2'-O-methylcytidine-3'-phosphate
  modified_base 15: mod_base = OTHER; note = 2'-O-methyluridine-3'-phosphate
  modified_base 16: mod_base = OTHER; note = 2'-O-methylcytidine-3'-phosphate
  modified_base 17: mod_base = OTHER; note = 2'-O-methyladenosine-3'-phosphate
  modified_base 18: mod_base = OTHER; note = 2'-O-methyluridine-3'-phosphate
  modified_base 19: mod_base = OTHER; note = 2'-O-methyladenosine-3'-phosphate
  modified_base 20: mod_base = OTHER; note = 2'-O-methylguanosine-3'-phosphate
  modified_base 21: mod_base = OTHER; note = 2'-O-methyladenosine
taaaaagaaatctctcataga

SEQ ID NO: 3437 - RNA, 21 nt, synthetic construct
  source 1..21: mol_type = other RNA
  modified_base 1: mod_base = OTHER; note = 2'-O-methyladenosine-3'-phosphate
  modified_base 2: mod_base = OTHER; note = 2'-O-methyladenosine-3'-phosphate
  modified_base 3: mod_base = OTHER; note = 2'-O-methyladenosine-3'-phosphate
  modified_base 4: mod_base = OTHER; note = 2'-O-methyladenosine-3'-phosphate
  modified_base 5: mod_base = OTHER; note = 2'-O-methyladenosine-3'-phosphate
  modified_base 6: mod_base = OTHER; note = 2'-O-methylguanosine-3'-phosphate
  modified_base 7: mod_base = OTHER; note = 2'-deoxy-2'-fluoroadenosine-3'-phosphate
  modified_base 8: mod_base = OTHER; note = 2'-O-methyladenosine-3'-phosphate
  modified_base 9: mod_base = OTHER; note = 2'-deoxy-2'-fluoroadenosine-3'-phosphate
  modified_base 10: mod_base = OTHER; note = 2'-deoxy-2'-fluorouridine-3'-phosphate
  modified_base 11: mod_base = OTHER; note = 2'-deoxy-2'-fluorocytidine-3'-phosphate
  modified_base 12: mod_base = OTHER; note = 2'-O-methyluridine-3'-phosphate
  modified_base 13: mod_base = OTHER; note = 2'-O-methylcytidine-3'-phosphate
  modified_base 14: mod_base = OTHER; note = 2'-O-methyluridine-3'-phosphate
  modified_base 15: mod_base = OTHER; note = 2'-O-methylcytidine-3'-phosphate
  modified_base 16: mod_base = OTHER; note = 2'-O-methyladenosine-3'-phosphate
  modified_base 17: mod_base = OTHER; note = 2'-O-methyluridine-3'-phosphate
  modified_base 18: mod_base = OTHER; note = 2'-O-methyladenosine-3'-phosphate
  modified_base 19: mod_base = OTHER; note = 2'-O-methylguanosine-3'-phosphate
  modified_base 20: mod_base = OTHER; note = 2'-O-methylcytidine-3'-phosphate
  modified_base 21: mod_base = OTHER; note = 2'-O-methyladenosine
aaaaagaaatctctcatagca

SEQ ID NO: 3438 - RNA, 21 nt, synthetic construct
  source 1..21: mol_type = other RNA
  modified_base 1: mod_base = OTHER; note = 2'-O-methyladenosine-3'-phosphate
  modified_base 2: mod_base = OTHER; note = 2'-O-methyladenosine-3'-phosphate
  modified_base 3: mod_base = OTHER; note = 2'-O-methyladenosine-3'-phosphate
  modified_base 4: mod_base = OTHER; note = 2'-O-methyluridine-3'-phosphate
  modified_base 5: mod_base = OTHER; note = 2'-O-methylcytidine-3'-phosphate
  modified_base 6: mod_base = OTHER; note = 2'-O-methyluridine-3'-phosphate
  modified_base 7: mod_base = OTHER; note = 2'-deoxy-2'-fluorocytidine-3'-phosphate
  modified_base 8: mod_base = OTHER; note = 2'-O-methyluridine-3'-phosphate
  modified_base 9: mod_base = OTHER; note = 2'-deoxy-2'-fluorocytidine-3'-phosphate
  modified_base 10: mod_base = OTHER; note = 2'-deoxy-2'-fluoroadenosine-3'-phosphate
  modified_base 11: mod_base = OTHER; note = 2'-deoxy-2'-fluorouridine-3'-phosphate
  modified_base 12: mod_base = OTHER; note = 2'-O-methyladenosine-3'-phosphate
  modified_base 13: mod_base = OTHER; note = 2'-O-methylguanosine-3'-phosphate
  modified_base 14: mod_base = OTHER; note = 2'-O-methylcytidine-3'-phosphate
  modified_base 15: mod_base = OTHER; note = 2'-O-methyluridine-3'-phosphate
  modified_base 16: mod_base = OTHER; note = 2'-O-methyluridine-3'-phosphate
  modified_base 17: mod_base = OTHER; note = 2'-O-methyluridine-3'-phosphate
  modified_base 18: mod_base = OTHER; note = 2'-O-methylcytidine-3'-phosphate
  modified_base 19: mod_base = OTHER; note = 2'-O-methyluridine-3'-phosphate
  modified_base 20: mod_base = OTHER; note = 2'-O-methyluridine-3'-phosphate
  modified_base 21: mod_base = OTHER; note = 2'-O-methyladenosine
aaatctctcatagctttctta

SEQ ID NO: 3439 - RNA, 21 nt, synthetic construct
  source 1..21: mol_type = other RNA
  modified_base 1: mod_base = OTHER; note = 2'-O-methyladenosine-3'-phosphate
  modified_base 2: mod_base = OTHER; note = 2'-O-methyluridine-3'-phosphate
  modified_base 3: mod_base = OTHER; note = 2'-O-methylcytidine-3'-phosphate
  modified_base 4: mod_base = OTHER; note = 2'-O-methyluridine-3'-phosphate
  modified_base 5: mod_base = OTHER; note = 2'-O-methylcytidine-3'-phosphate
  modified_base 6: mod_base = OTHER; note = 2'-O-methyluridine-3'-phosphate
  modified_base 7: mod_base = OTHER; note = 2'-deoxy-2'-fluorocytidine-3'-phosphate
  modified_base 8: mod_base = OTHER; note = 2'-O-methyladenosine-3'-phosphate
  modified_base 9: mod_base = OTHER; note = 2'-deoxy-2'-fluorouridine-3'-phosphate
  modified_base 10: mod_base = OTHER; note = 2'-deoxy-2'-fluoroadenosine-3'-phosphate
  modified_base 11: mod_base = OTHER; note = 2'-deoxy-2'-fluoroguanosine-3'-phosphate
  modified_base 12: mod_base = OTHER; note = 2'-O-methylcytidine-3'-phosphate
  modified_base 13: mod_base = OTHER; note = 2'-O-methyluridine-3'-phosphate
  modified_base 14: mod_base = OTHER; note = 2'-O-methyluridine-3'-phosphate
  modified_base 15: mod_base = OTHER; note = 2'-O-methyluridine-3'-phosphate
  modified_base 16: mod_base = OTHER; note = 2'-O-methylcytidine-3'-phosphate
  modified_base 17: mod_base = OTHER; note = 2'-O-methyluridine-3'-phosphate
  modified_base 18: mod_base = OTHER; note = 2'-O-methyluridine-3'-phosphate
  modified_base 19: mod_base = OTHER; note = 2'-O-methyluridine-3'-phosphate
  modified_base 20: mod_base = OTHER; note = 2'-O-methyluridine-3'-phosphate
  modified_base 21: mod_base = OTHER; note = 2'-O-methyladenosine
atctctcatagctttctttta

SEQ ID NO: 3440 - RNA, 21 nt, synthetic construct
  source 1..21: mol_type = other RNA
  modified_base 1: mod_base = OTHER; note = 2'-O-methyluridine-3'-phosphate
  modified_base 2: mod_base = OTHER; note = 2'-O-methylcytidine-3'-phosphate
  modified_base 3: mod_base = OTHER; note = 2'-O-methyladenosine-3'-phosphate
  modified_base 4: mod_base = OTHER; note = 2'-O-methyluridine-3'-phosphate
  modified_base 5: mod_base = OTHER; note = 2'-O-methyladenosine-3'-phosphate
  modified_base 6: mod_base = OTHER; note = 2'-O-methylguanosine-3'-phosphate
  modified_base 7: mod_base = OTHER; note = 2'-deoxy-2'-fluorocytidine-3'-phosphate
  modified_base 8: mod_base = OTHER; note = 2'-O-methyluridine-3'-phosphate
  modified_base 9: mod_base = OTHER; note = 2'-deoxy-2'-fluorouridine-3'-phosphate
  modified_base 10: mod_base = OTHER; note = 2'-deoxy-2'-fluorouridine-3'-phosphate
  modified_base 11: mod_base = OTHER; note = 2'-deoxy-2'-fluorocytidine-3'-phosphate
  modified_base 12: mod_base = OTHER; note = 2'-O-methyluridine-3'-phosphate
  modified_base 13: mod_base = OTHER; note = 2'-O-methyluridine-3'-phosphate
  modified_base 14: mod_base = OTHER; note = 2'-O-methyluridine-3'-phosphate
  modified_base 15: mod_base = OTHER; note = 2'-O-methyluridine-3'-phosphate
  modified_base 16: mod_base = OTHER; note = 2'-O-methylcytidine-3'-phosphate
  modified_base 17: mod_base = OTHER; note = 2'-O-methylcytidine-3'-phosphate
  modified_base 18: mod_base = OTHER; note = 2'-O-methyladenosine-3'-phosphate
  modified_base 19: mod_base = OTHER; note = 2'-O-methyluridine-3'-phosphate
  modified_base 20: mod_base = OTHER; note = 2'-O-methyluridine-3'-phosphate
  modified_base 21: mod_base = OTHER; note = 2'-O-methyladenosine
tcatagctttcttttccatta

SEQ ID NO: 3441 - RNA, 21 nt, synthetic construct
  source 1..21: mol_type = other RNA
  modified_base 1: mod_base = OTHER; note = 2'-O-methylcytidine-3'-phosphate
  modified_base 2: mod_base = OTHER; note = 2'-O-methyladenosine-3'-phosphate
  modified_base 3: mod_base = OTHER; note = 2'-O-methyluridine-3'-phosphate
  modified_base 4: mod_base = OTHER; note = 2'-O-methyladenosine-3'-phosphate
  modified_base 5: mod_base = OTHER; note = 2'-O-methylguanosine-3'-phosphate
  modified_base 6: mod_base = OTHER; note = 2'-O-methylcytidine-3'-phosphate
  modified_base 7: mod_base = OTHER; note = 2'-deoxy-2'-fluorouridine-3'-phosphate
  modified_base 8: mod_base = OTHER; note = 2'-O-methyluridine-3'-phosphate
  modified_base 9: mod_base = OTHER; note = 2'-deoxy-2'-fluorouridine-3'-phosphate
  modified_base 10: mod_base = OTHER; note = 2'-deoxy-2'-fluorocytidine-3'-phosphate
  modified_base 11: mod_base = OTHER; note = 2'-deoxy-2'-fluorouridine-3'-phosphate
  modified_base 12: mod_base = OTHER; note = 2'-O-methyluridine-3'-phosphate
  modified_base 13: mod_base = OTHER; note = 2'-O-methyluridine-3'-phosphate
  modified_base 14: mod_base = OTHER; note = 2'-O-methyluridine-3'-phosphate
  modified_base 15: mod_base = OTHER; note = 2'-O-methylcytidine-3'-phosphate
  modified_base 16: mod_base = OTHER; note = 2'-O-methylcytidine-3'-phosphate
  modified_base 17: mod_base = OTHER; note = 2'-O-methyladenosine-3'-phosphate
  modified_base 18: mod_base = OTHER; note = 2'-O-methyluridine-3'-phosphate
  modified_base 19: mod_base = OTHER; note = 2'-O-methyluridine-3'-phosphate
  modified_base 20: mod_base = OTHER; note = 2'-O-methyluridine-3'-phosphate
  modified_base 21: mod_base = OTHER; note = 2'-O-methyladenosine
catagctttcttttccattta

SEQ ID NO: 3442 - RNA, 21 nt, synthetic construct
  source 1..21: mol_type = other RNA
  modified_base 1: mod_base = OTHER; note = 2'-O-methylcytidine-3'-phosphate
  modified_base 2: mod_base = OTHER; note = 2'-O-methyluridine-3'-phosphate
  modified_base 3: mod_base = OTHER; note = 2'-O-methyluridine-3'-phosphate
  modified_base 4: mod_base = OTHER; note = 2'-O-methyluridine-3'-phosphate
  modified_base 5: mod_base = OTHER; note = 2'-O-methyladenosine-3'-phosphate
  modified_base 6: mod_base = OTHER; note = 2'-O-methyluridine-3'-phosphate
  modified_base 7: mod_base = OTHER; note = 2'-deoxy-2'-fluoroguanosine-3'-phosphate
  modified_base 8: mod_base = OTHER; note = 2'-O-methyluridine-3'-phosphate
  modified_base 9: mod_base = OTHER; note = 2'-deoxy-2'-fluoroguanosine-3'-phosphate
  modified_base 10: mod_base = OTHER; note = 2'-deoxy-2'-fluoroadenosine-3'-phosphate
  modified_base 11: mod_base = OTHER; note = 2'-deoxy-2'-fluoroadenosine-3'-phosphate
  modified_base 12: mod_base = OTHER; note = 2'-O-methyluridine-3'-phosphate
  modified_base 13: mod_base = OTHER; note = 2'-O-methylguanosine-3'-phosphate
  modified_base 14: mod_base = OTHER; note = 2'-O-methyluridine-3'-phosphate
  modified_base 15: mod_base = OTHER; note = 2'-O-methyluridine-3'-phosphate
  modified_base 16: mod_base = OTHER; note = 2'-O-methyluridine-3'-phosphate
  modified_base 17: mod_base = OTHER; note = 2'-O-methyluridine-3'-phosphate
  modified_base 18: mod_base = OTHER; note = 2'-O-methyluridine-3'-phosphate
  modified_base 19: mod_base = OTHER; note = 2'-O-methylguanosine-3'-phosphate
  modified_base 20: mod_base = OTHER; note = 2'-O-methylcytidine-3'-phosphate
  modified_base 21: mod_base = OTHER; note = 2'-O-methyladenosine
ctttatgtgaatgtttttgca

SEQ ID NO: 3443 - RNA, 21 nt, synthetic construct
  source 1..21: mol_type = other RNA
  modified_base 1: mod_base = OTHER; note = 2'-O-methyladenosine-3'-phosphate
  modified_base 2: mod_base = OTHER; note = 2'-O-methyluridine-3'-phosphate
  modified_base 3: mod_base = OTHER; note = 2'-O-methylguanosine-3'-phosphate
  modified_base 4: mod_base = OTHER; note = 2'-O-methyluridine-3'-phosphate
  modified_base 5: mod_base = OTHER; note = 2'-O-methylguanosine-3'-phosphate
  modified_base 6: mod_base = OTHER; note = 2'-O-methyladenosine-3'-phosphate
  modified_base 7: mod_base = OTHER; note = 2'-deoxy-2'-fluoroadenosine-3'-phosphate
  modified_base 8: mod_base = OTHER; note = 2'-O-methyluridine-3'-phosphate
  modified_base 9: mod_base = OTHER; note = 2'-deoxy-2'-fluoroguanosine-3'-phosphate
  modified_base 10: mod_base = OTHER; note = 2'-deoxy-2'-fluorouridine-3'-phosphate
  modified_base 11: mod_base = OTHER; note = 2'-deoxy-2'-fluorouridine-3'-phosphate
  modified_base 12: mod_base = OTHER; note = 2'-O-methyluridine-3'-phosphate
  modified_base 13: mod_base = OTHER; note = 2'-O-methyluridine-3'-phosphate
  modified_base 14: mod_base = OTHER; note = 2'-O-methyluridine-3'-phosphate
  modified_base 15: mod_base = OTHER; note = 2'-O-methylguanosine-3'-phosphate
  modified_base 16: mod_base = OTHER; note = 2'-O-methylcytidine-3'-phosphate
  modified_base 17: mod_base = OTHER; note = 2'-O-methylcytidine-3'-phosphate
  modified_base 18: mod_base = OTHER; note = 2'-O-methyladenosine-3'-phosphate
  modified_base 19: mod_base = OTHER; note = 2'-O-methyluridine-3'-phosphate
  modified_base 20: mod_base = OTHER; note = 2'-O-methyluridine-3'-phosphate
  modified_base 21: mod_base = OTHER; note = 2'-O-methyladenosine
atgtgaatgtttttgccatta

SEQ ID NO: 3444 - RNA, 21 nt, synthetic construct
  source 1..21: mol_type = other RNA
  modified_base 1: mod_base = OTHER; note = 2'-O-methylguanosine-3'-phosphate
  modified_base 2: mod_base = OTHER; note = 2'-O-methyluridine-3'-phosphate
  modified_base 3: mod_base = OTHER; note = 2'-O-methylguanosine-3'-phosphate
  modified_base 4: mod_base = OTHER; note = 2'-O-methyladenosine-3'-phosphate
  modified_base 5: mod_base = OTHER; note = 2'-O-methyladenosine-3'-phosphate
  modified_base 6: mod_base = OTHER; note = 2'-O-methyluridine-3'-phosphate
  modified_base 7: mod_base = OTHER; note = 2'-deoxy-2'-fluoroguanosine-3'-phosphate
  modified_base 8: mod_base = OTHER; note = 2'-O-methyluridine-3'-phosphate
  modified_base 9: mod_base = OTHER; note = 2'-deoxy-2'-fluorouridine-3'-phosphate
  modified_base 10: mod_base = OTHER; note = 2'-deoxy-2'-fluorouridine-3'-phosphate
  modified_base 11: mod_base = OTHER; note = 2'-deoxy-2'-fluorouridine-3'-phosphate
  modified_base 12: mod_base = OTHER; note = 2'-O-methyluridine-3'-phosphate
  modified_base 13: mod_base = OTHER; note = 2'-O-methylguanosine-3'-phosphate
  modified_base 14: mod_base = OTHER; note = 2'-O-methylcytidine-3'-phosphate
  modified_base 15: mod_base = OTHER; note = 2'-O-methylcytidine-3'-phosphate
  modified_base 16: mod_base = OTHER; note = 2'-O-methyladenosine-3'-phosphate
  modified_base 17: mod_base = OTHER; note = 2'-O-methyluridine-3'-phosphate
  modified_base 18: mod_base = OTHER; note = 2'-O-methyluridine-3'-phosphate
  modified_base 19: mod_base = OTHER; note = 2'-O-methyluridine-3'-phosphate
  modified_base 20: mod_base = OTHER; note = 2'-O-methyluridine-3'-phosphate
  modified_base 21: mod_base = OTHER; note = 2'-O-methyladenosine
gtgaatgtttttgccatttta

SEQ ID NO: 3445 - RNA, 21 nt, synthetic construct
  source 1..21: mol_type = other RNA
  modified_base 1: mod_base = OTHER; note = 2'-O-methylguanosine-3'-phosphate
  modified_base 2: mod_base = OTHER; note = 2'-O-methyladenosine-3'-phosphate
  modified_base 3: mod_base = OTHER; note = 2'-O-methyladenosine-3'-phosphate
  modified_base 4: mod_base = OTHER; note = 2'-O-methyluridine-3'-phosphate
  modified_base 5: mod_base = OTHER; note = 2'-O-methylguanosine-3'-phosphate
  modified_base 6: mod_base = OTHER; note = 2'-O-methyluridine-3'-phosphate
  modified_base 7: mod_base = OTHER; note = 2'-deoxy-2'-fluorouridine-3'-phosphate
  modified_base 8: mod_base = OTHER; note = 2'-O-methyluridine-3'-phosphate
  modified_base 9: mod_base = OTHER; note = 2'-deoxy-2'-fluorouridine-3'-phosphate
  modified_base 10: mod_base = OTHER; note = 2'-deoxy-2'-fluorouridine-3'-phosphate
  modified_base 11: mod_base = OTHER; note = 2'-deoxy-2'-fluoroguanosine-3'-phosphate
  modified_base 12: mod_base = OTHER; note = 2'-O-methylcytidine-3'-phosphate
  modified_base 13: mod_base = OTHER; note = 2'-O-methylcytidine-3'-phosphate
  modified_base 14: mod_base = OTHER; note = 2'-O-methyladenosine-3'-phosphate
  modified_base 15: mod_base = OTHER; note = 2'-O-methyluridine-3'-phosphate
  modified_base 16: mod_base = OTHER; note = 2'-O-methyluridine-3'-phosphate
  modified_base 17: mod_base = OTHER; note = 2'-O-methyluridine-3'-phosphate
  modified_base 18: mod_base = OTHER; note = 2'-O-methyluridine-3'-phosphate
  modified_base 19: mod_base = OTHER; note = 2'-O-methyluridine-3'-phosphate
  modified_base 20: mod_base = OTHER; note = 2'-O-methyluridine-3'-phosphate
  modified_base 21: mod_base = OTHER; note = 2'-O-methyladenosine
gaatgtttttgccatttttta

SEQ ID NO: 3446 - RNA, 21 nt, synthetic construct
  source 1..21: mol_type = other RNA
  modified_base 1: mod_base = OTHER; note = 2'-O-methyladenosine-3'-phosphate
  modified_base 2: mod_base = OTHER; note = 2'-O-methylguanosine-3'-phosphate
  modified_base 3: mod_base = OTHER; note = 2'-O-methyladenosine-3'-phosphate
  modified_base 4: mod_base = OTHER; note = 2'-O-methyluridine-3'-phosphate
  modified_base 5: mod_base = OTHER; note = 2'-O-methyladenosine-3'-phosphate
  modified_base 6: mod_base = OTHER; note = 2'-O-methyladenosine-3'-phosphate
  modified_base 7: mod_base = OTHER; note = 2'-deoxy-2'-fluoroguanosine-3'-phosphate
  modified_base 8: mod_base = OTHER; note = 2'-O-methyladenosine-3'-phosphate
  modified_base 9: mod_base = OTHER; note = 2'-deoxy-2'-fluorocytidine-3'-phosphate
  modified_base 10: mod_base = OTHER; note = 2'-deoxy-2'-fluoroadenosine-3'-phosphate
  modified_base 11: mod_base = OTHER; note = 2'-deoxy-2'-fluoroguanosine-3'-phosphate
  modified_base 12: mod_base = OTHER; note = 2'-O-methyluridine-3'-phosphate
  modified_base 13: mod_base = OTHER; note = 2'-O-methyladenosine-3'-phosphate
  modified_base 14: mod_base = OTHER; note = 2'-O-methylcytidine-3'-phosphate
  modified_base 15: mod_base = OTHER; note = 2'-O-methyladenosine-3'-phosphate
  modified_base 16: mod_base = OTHER; note = 2'-O-methylguanosine-3'-phosphate
  modified_base 17: mod_base = OTHER; note = 2'-O-methyluridine-3'-phosphate
  modified_base 18: mod_base = OTHER; note = 2'-O-methyladenosine-3'-phosphate
  modified_base 19: mod_base = OTHER; note = 2'-O-methyluridine-3'-phosphate
  modified_base 20: mod_base = OTHER; note = 2'-O-methyluridine-3'-phosphate
  modified_base 21: mod_base = OTHER; note = 2'-O-methyladenosine
agataagacagtacagtatta

SEQ ID NO: 3447 - RNA, 21 nt, synthetic construct
  source 1..21: mol_type = other RNA
  modified_base 1: mod_base = OTHER; note = 2'-O-methyluridine-3'-phosphate
  modified_base 2: mod_base = OTHER; note = 2'-O-methyladenosine-3'-phosphate
  modified_base 3: mod_base = OTHER; note = 2'-O-methyladenosine-3'-phosphate
  modified_base 4: mod_base = OTHER; note = 2'-O-methylguanosine-3'-phosphate
  modified_base 5: mod_base = OTHER; note = 2'-O-methyladenosine-3'-phosphate
  modified_base 6: mod_base = OTHER; note = 2'-O-methylcytidine-3'-phosphate
  modified_base 7: mod_base = OTHER; note = 2'-deoxy-2'-fluoroadenosine-3'-phosphate
  modified_base 8: mod_base = OTHER; note = 2'-O-methylguanosine-3'-phosphate
  modified_base 9: mod_base = OTHER; note = 2'-deoxy-2'-fluorouridine-3'-phosphate
  modified_base 10: mod_base = OTHER; note = 2'-deoxy-2'-fluoroadenosine-3'-phosphate
  modified_base 11: mod_base = OTHER; note = 2'-deoxy-2'-fluorocytidine-3'-phosphate
  modified_base 12: mod_base = OTHER; note = 2'-O-methyladenosine-3'-phosphate
  modified_base 13: mod_base = OTHER; note = 2'-O-methylguanosine-3'-phosphate
  modified_base 14: mod_base = OTHER; note = 2'-O-methyluridine-3'-phosphate
  modified_base 15: mod_base = OTHER; note = 2'-O-methyladenosine-3'-phosphate
  modified_base 16: mod_base = OTHER; note = 2'-O-methyluridine-3'-phosphate
  modified_base 17: mod_base = OTHER; note = 2'-O-methyluridine-3'-phosphate
  modified_base 18: mod_base = OTHER; note = 2'-O-methyluridine-3'-phosphate
  modified_base 19: mod_base = OTHER; note = 2'-O-methyladenosine-3'-phosphate
  modified_base 20: mod_base = OTHER; note = 2'-O-methyladenosine-3'-phosphate
  modified_base 21: mod_base = OTHER; note = 2'-O-methyladenosine
taagacagtacagtatttaaa

SEQ ID NO: 3448 - RNA, 21 nt, synthetic construct
  source 1..21: mol_type = other RNA
  modified_base 1: mod_base = OTHER; note = 2'-O-methyladenosine-3'-phosphate
  modified_base 2: mod_base = OTHER; note = 2'-O-methylguanosine-3'-phosphate
  modified_base 3: mod_base = OTHER; note = 2'-O-methyladenosine-3'-phosphate
  modified_base 4: mod_base = OTHER; note = 2'-O-methylcytidine-3'-phosphate
  modified_base 5: mod_base = OTHER; note = 2'-O-methyladenosine-3'-phosphate
  modified_base 6: mod_base = OTHER; note = 2'-O-methylguanosine-3'-phosphate
  modified_base 7: mod_base = OTHER; note = 2'-deoxy-2'-fluorouridine-3'-phosphate
  modified_base 8: mod_base = OTHER; note = 2'-O-methyladenosine-3'-phosphate
  modified_base 9: mod_base = OTHER; note = 2'-deoxy-2'-fluorocytidine-3'-phosphate
  modified_base 10: mod_base = OTHER; note = 2'-deoxy-2'-fluoroadenosine-3'-phosphate
  modified_base 11: mod_base = OTHER; note = 2'-deoxy-2'-fluoroguanosine-3'-phosphate
  modified_base 12: mod_base = OTHER; note = 2'-O-methyluridine-3'-phosphate
  modified_base 13: mod_base = OTHER; note = 2'-O-methyladenosine-3'-phosphate
  modified_base 14: mod_base = OTHER; note = 2'-O-methyluridine-3'-phosphate
  modified_base 15: mod_base = OTHER; note = 2'-O-methyluridine-3'-phosphate
  modified_base 16: mod_base = OTHER; note = 2'-O-methyluridine-3'-phosphate
  modified_base 17: mod_base = OTHER; note = 2'-O-methyladenosine-3'-phosphate
  modified_base 18: mod_base = OTHER; note = 2'-O-methyladenosine-3'-phosphate
  modified_base 19: mod_base = OTHER; note = 2'-O-methylguanosine-3'-phosphate
  modified_base 20: mod_base = OTHER; note = 2'-O-methyluridine-3'-phosphate
  modified_base 21: mod_base = OTHER; note = 2'-O-methyladenosine
agacagtacagtatttaagta

SEQ ID NO: 3449 - RNA, 21 nt, synthetic construct
  source 1..21: mol_type = other RNA
  modified_base 1: mod_base = OTHER; note = 2'-O-methylcytidine-3'-phosphate
  modified_base 2: mod_base = OTHER; note = 2'-O-methyladenosine-3'-phosphate
  modified_base 3: mod_base = OTHER; note = 2'-O-methylguanosine-3'-phosphate
  modified_base 4: mod_base = OTHER; note = 2'-O-methylcytidine-3'-phosphate
  modified_base 5: mod_base = OTHER; note = 2'-O-methyladenosine-3'-phosphate
  modified_base 6: mod_base = OTHER; note = 2'-O-methyluridine-3'-phosphate
  modified_base 7: mod_base = OTHER; note = 2'-deoxy-2'-fluoroguanosine-3'-phosphate
  modified_base 8: mod_base = OTHER; note = 2'-O-methyladenosine-3'-phosphate
  modified_base 9: mod_base = OTHER; note = 2'-deoxy-2'-fluoroadenosine-3'-phosphate
  modified_base 10: mod_base = OTHER; note = 2'-deoxy-2'-fluoroadenosine-3'-phosphate
  modified_base 11: mod_base = OTHER; note = 2'-deoxy-2'-fluoroadenosine-3'-phosphate
  modified_base 12: mod_base = OTHER; note = 2'-O-methylguanosine-3'-phosphate
  modified_base 13: mod_base = OTHER; note = 2'-O-methyladenosine-3'-phosphate
  modified_base 14: mod_base = OTHER; note = 2'-O-methyluridine-3'-phosphate
  modified_base 15: mod_base = OTHER; note = 2'-O-methyladenosine-3'-phosphate
  modified_base 16: mod_base = OTHER; note = 2'-O-methyladenosine-3'-phosphate
  modified_base 17: mod_base = OTHER; note = 2'-O-methylcytidine-3'-phosphate
  modified_base 18: mod_base = OTHER; note = 2'-O-methyluridine-3'-phosphate
  modified_base 19: mod_base = OTHER; note = 2'-O-methylcytidine-3'-phosphate
  modified_base 20: mod_base = OTHER; note = 2'-O-methyluridine-3'-phosphate
  modified_base 21: mod_base = OTHER; note = 2'-O-methyladenosine
cagcatgaaaagataactcta

SEQ ID NO: 3450 - RNA, 21 nt, synthetic construct
  source 1..21: mol_type = other RNA
  modified_base 1: mod_base = OTHER; note = 2'-O-methyluridine-3'-phosphate
  modified_base 2: mod_base = OTHER; note = 2'-O-methyluridine-3'-phosphate
  modified_base 3: mod_base = OTHER; note = 2'-O-methylcytidine-3'-phosphate
  modified_base 4: mod_base = OTHER; note = 2'-O-methyladenosine-3'-phosphate
  modified_base 5: mod_base = OTHER; note = 2'-O-methyluridine-3'-phosphate
  modified_base 6: mod_base = OTHER; note = 2'-O-methylcytidine-3'-phosphate
  modified_base 7: mod_base = OTHER; note = 2'-deoxy-2'-fluorocytidine-3'-phosphate
  modified_base 8: mod_base = OTHER; note = 2'-O-methyladenosine-3'-phosphate
  modified_base 9: mod_base = OTHER; note = 2'-deoxy-2'-fluoroadenosine-3'-phosphate
  modified_base 10: mod_base = OTHER; note = 2'-deoxy-2'-fluorouridine-3'-phosphate
  modified_base 11: mod_base = OTHER; note = 2'-deoxy-2'-fluorocytidine-3'-phosphate
  modified_base 12: mod_base = OTHER; note = 2'-O-methyluridine-3'-phosphate
  modified_base 13: mod_base = OTHER; note = 2'-O-methylcytidine-3'-phosphate
  modified_base 14: mod_base = OTHER; note = 2'-O-methyluridine-3'-phosphate
  modified_base 15: mod_base = OTHER; note = 2'-O-methyladenosine-3'-phosphate
  modified_base 16: mod_base = OTHER; note = 2'-O-methyluridine-3'-phosphate
  modified_base 17: mod_base = OTHER; note = 2'-O-methylguanosine-3'-phosphate
  modified_base 18: mod_base = OTHER; note = 2'-O-methyluridine-3'-phosphate
  modified_base 19: mod_base = OTHER; note = 2'-O-methyluridine-3'-phosphate
  modified_base 20: mod_base = OTHER; note = 2'-O-methyladenosine-3'-phosphate
  modified_base 21: mod_base = OTHER; note = 2'-O-methyladenosine
ttcatccaatctctatgttaa

SEQ ID NO: 3451 - RNA, 21 nt, synthetic construct
  source 1..21: mol_type = other RNA
  modified_base 1: mod_base = OTHER; note = 2'-O-methyladenosine-3'-phosphate
  modified_base 2: mod_base = OTHER; note = 2'-O-methyladenosine-3'-phosphate
  modified_base 3: mod_base = OTHER; note = 2'-O-methylguanosine-3'-phosphate
  modified_base 4: mod_base = OTHER; note = 2'-O-methylcytidine-3'-phosphate
  modified_base 5: mod_base = OTHER; note = 2'-O-methyladenosine-3'-phosphate
  modified_base 6: mod_base = OTHER; note = 2'-O-methyladenosine-3'-phosphate
  modified_base 7: mod_base = OTHER; note = 2'-deoxy-2'-fluorocytidine-3'-phosphate
  modified_base 8: mod_base = OTHER; note = 2'-O-methyladenosine-3'-phosphate
  modified_base 9: mod_base = OTHER; note = 2'-deoxy-2'-fluorocytidine-3'-phosphate
  modified_base 10: mod_base = OTHER; note = 2'-deoxy-2'-fluorocytidine-3'-phosphate
  modified_base 11: mod_base = OTHER; note = 2'-deoxy-2'-fluorouridine-3'-phosphate
  modified_base 12: mod_base = OTHER; note = 2'-O-methylcytidine-3'-phosphate
  modified_base 13: mod_base = OTHER; note = 2'-O-methyladenosine-3'-phosphate
  modified_base 14: mod_base = OTHER; note = 2'-O-methyladenosine-3'-phosphate
  modified_base 15: mod_base = OTHER; note = 2'-O-methylcytidine-3'-phosphate
  modified_base 16: mod_base = OTHER; note = 2'-O-methyluridine-3'-phosphate
  modified_base 17: mod_base = OTHER; note = 2'-O-methylcytidine-3'-phosphate
  modified_base 18: mod_base = OTHER; note = 2'-O-methyladenosine-3'-phosphate
  modified_base 19: mod_base = OTHER; note = 2'-O-methyluridine-3'-phosphate
  modified_base 20: mod_base = OTHER; note = 2'-O-methylcytidine-3'-phosphate
  modified_base 21: mod_base = OTHER; note = 2'-O-methyladenosine
aagcaacacctcaactcatca

SEQ ID NO: 3452 - RNA, 21 nt, synthetic construct
  source 1..21: mol_type = other RNA
  modified_base 1: mod_base = OTHER; note = 2'-O-methylcytidine-3'-phosphate
  modified_base 2: mod_base = OTHER; note = 2'-O-methyladenosine-3'-phosphate
  modified_base 3: mod_base = OTHER; note = 2'-O-methyladenosine-3'-phosphate
  modified_base 4: mod_base = OTHER; note = 2'-O-methylcytidine-3'-phosphate
  modified_base 5: mod_base = OTHER; note = 2'-O-methyladenosine-3'-phosphate
  modified_base 6: mod_base = OTHER; note = 2'-O-methylcytidine-3'-phosphate
  modified_base 7: mod_base = OTHER; note = 2'-deoxy-2'-fluorocytidine-3'-phosphate
  modified_base 8: mod_base = OTHER; note = 2'-O-methyluridine-3'-phosphate
  modified_base 9: mod_base = OTHER; note = 2'-deoxy-2'-fluorocytidine-3'-phosphate
  modified_base 10: mod_base = OTHER; note = 2'-deoxy-2'-fluoroadenosine-3'-phosphate
  modified_base 11: mod_base = OTHER; note = 2'-deoxy-2'-fluoroadenosine-3'-phosphate
  modified_base 12: mod_base = OTHER; note = 2'-O-methylcytidine-3'-phosphate
  modified_base 13: mod_base = OTHER; note = 2'-O-methyluridine-3'-phosphate
  modified_base 14: mod_base = OTHER; note = 2'-O-methylcytidine-3'-phosphate
  modified_base 15: mod_base = OTHER; note = 2'-O-methyladenosine-3'-phosphate
  modified_base 16: mod_base = OTHER; note = 2'-O-methyluridine-3'-phosphate
  modified_base 17: mod_base = OTHER; note = 2'-O-methylcytidine-3'-phosphate
  modified_base 18: mod_base = OTHER; note = 2'-O-methyluridine-3'-phosphate
  modified_base 19: mod_base = OTHER; note = 2'-O-methyluridine-3'-phosphate
  modified_base 20: mod_base = OTHER; note = 2'-O-methyluridine-3'-phosphate
  modified_base 21: mod_base = OTHER; note = 2'-O-methyladenosine
caacacctcaactcatcttta

SEQ ID NO: 3453 - RNA, 21 nt, synthetic construct
  source 1..21: mol_type = other RNA
  modified_base 1: mod_base = OTHER; note = 2'-O-methylcytidine-3'-phosphate
  modified_base 2: mod_base = OTHER; note = 2'-O-methyladenosine-3'-phosphate
  modified_base 3: mod_base = OTHER; note = 2'-O-methylcytidine-3'-phosphate
  modified_base 4: mod_base = OTHER; note = 2'-O-methylcytidine-3'-phosphate
  modified_base 5: mod_base = OTHER; note = 2'-O-methyluridine-3'-phosphate
  modified_base 6: mod_base = OTHER; note = 2'-O-methylcytidine-3'-phosphate
  modified_base 7: mod_base = OTHER; note = 2'-deoxy-2'-fluoroadenosine-3'-phosphate
  modified_base 8: mod_base = OTHER; note = 2'-O-methyladenosine-3'-phosphate
  modified_base 9: mod_base = OTHER; note = 2'-deoxy-2'-fluorocytidine-3'-phosphate
  modified_base 10: mod_base = OTHER; note = 2'-deoxy-2'-fluorouridine-3'-phosphate
  modified_base 11: mod_base = OTHER; note = 2'-deoxy-2'-fluorocytidine-3'-phosphate
  modified_base 12: mod_base = OTHER; note = 2'-O-methyladenosine-3'-phosphate
  modified_base 13: mod_base = OTHER; note = 2'-O-methyluridine-3'-phosphate
  modified_base 14: mod_base = OTHER; note = 2'-O-methylcytidine-3'-phosphate
  modified_base 15: mod_base = OTHER; note = 2'-O-methyluridine-3'-phosphate
  modified_base 16: mod_base = OTHER; note = 2'-O-methyluridine-3'-phosphate
  modified_base 17: mod_base = OTHER; note = 2'-O-methyluridine-3'-phosphate
  modified_base 18: mod_base = OTHER; note = 2'-O-methyluridine-3'-phosphate
  modified_base 19: mod_base = OTHER; note = 2'-O-methyluridine-3'-phosphate
  modified_base 20: mod_base = OTHER; note = 2'-O-methyladenosine-3'-phosphate
  modified_base 21: mod_base = OTHER; note = 2'-O-methyladenosine
cacctcaactcatctttttaa

SEQ ID NO: 3454 - RNA, 21 nt, synthetic construct
  source 1..21: mol_type = other RNA
  modified_base 1: mod_base = OTHER; note = 2'-O-methylcytidine-3'-phosphate
  modified_base 2: mod_base = OTHER; note = 2'-O-methylcytidine-3'-phosphate
  modified_base 3: mod_base = OTHER; note = 2'-O-methyluridine-3'-phosphate
  modified_base 4: mod_base = OTHER; note = 2'-O-methylcytidine-3'-phosphate
  modified_base 5: mod_base = OTHER; note = 2'-O-methyladenosine-3'-phosphate
  modified_base 6: mod_base = OTHER; note = 2'-O-methyladenosine-3'-phosphate
  modified_base 7: mod_base = OTHER; note = 2'-deoxy-2'-fluorocytidine-3'-phosphate
  modified_base 8: mod_base = OTHER; note = 2'-O-methyluridine-3'-phosphate
  modified_base 9: mod_base = OTHER; note = 2'-deoxy-2'-fluorocytidine-3'-phosphate
  modified_base 10: mod_base = OTHER; note = 2'-deoxy-2'-fluoroadenosine-3'-phosphate
  modified_base 11: mod_base = OTHER; note = 2'-deoxy-2'-fluorouridine-3'-phosphate
  modified_base 12: mod_base = OTHER; note = 2'-O-methylcytidine-3'-phosphate
  modified_base 13: mod_base = OTHER; note = 2'-O-methyluridine-3'-phosphate
  modified_base 14: mod_base = OTHER; note = 2'-O-methyluridine-3'-phosphate
  modified_base 15: mod_base = OTHER; note = 2'-O-methyluridine-3'-phosphate
  modified_base 16: mod_base = OTHER; note = 2'-O-methyluridine-3'-phosphate
  modified_base 17: mod_base = OTHER; note = 2'-O-methyluridine-3'-phosphate
  modified_base 18: mod_base = OTHER; note = 2'-O-methyladenosine-3'-phosphate
  modified_base 19: mod_base = OTHER; note = 2'-O-methyluridine-3'-phosphate
  modified_base 20: mod_base = OTHER; note = 2'-O-methyluridine-3'-phosphate
  modified_base 21: mod_base = OTHER; note = 2'-O-methyladenosine
cctcaactcatctttttatta

SEQ ID NO: 3455 - RNA, 21 nt, synthetic construct
  source 1..21: mol_type = other RNA
  modified_base 1: mod_base = OTHER; note = 2'-O-methylcytidine-3'-phosphate
  modified_base 2: mod_base = OTHER; note = 2'-O-methyluridine-3'-phosphate
  modified_base 3: mod_base = OTHER; note = 2'-O-methylcytidine-3'-phosphate
  modified_base 4: mod_base = OTHER; note = 2'-O-methyladenosine-3'-phosphate
  modified_base 5: mod_base = OTHER; note = 2'-O-methyladenosine-3'-phosphate
  modified_base 6: mod_base = OTHER; note = 2'-O-methylcytidine-3'-phosphate
  modified_base 7: mod_base = OTHER; note = 2'-deoxy-2'-fluorouridine-3'-phosphate
  modified_base 8: mod_base = OTHER; note = 2'-O-methylcytidine-3'-phosphate
  modified_base 9: mod_base = OTHER; note = 2'-deoxy-2'-fluoroadenosine-3'-phosphate
  modified_base 10: mod_base = OTHER; note = 2'-deoxy-2'-fluorouridine-3'-phosphate
  modified_base 11: mod_base = OTHER; note = 2'-deoxy-2'-fluorocytidine-3'-phosphate
  modified_base 12: mod_base = OTHER; note = 2'-O-methyluridine-3'-phosphate
  modified_base 13: mod_base = OTHER; note = 2'-O-methyluridine-3'-phosphate
  modified_base 14: mod_base = OTHER; note = 2'-O-methyluridine-3'-phosphate
  modified_base 15: mod_base = OTHER; note = 2'-O-methyluridine-3'-phosphate
  modified_base 16: mod_base = OTHER; note = 2'-O-methyluridine-3'-phosphate
  modified_base 17: mod_base = OTHER; note = 2'-O-methyladenosine-3'-phosphate
  modified_base 18: mod_base = OTHER; note = 2'-O-methyluridine-3'-phosphate
  modified_base 19: mod_base = OTHER; note = 2'-O-methyluridine-3'-phosphate
  modified_base 20: mod_base = OTHER; note = 2'-O-methyluridine-3'-phosphate
  modified_base 21: mod_base = OTHER; note = 2'-O-methyladenosine
ctcaactcatctttttattta

SEQ ID NO: 3456 - RNA, 21 nt, synthetic construct
  source 1..21: mol_type = other RNA
  modified_base 1: mod_base = OTHER; note = 2'-O-methyluridine-3'-phosphate
  modified_base 2: mod_base = OTHER; note = 2'-O-methylcytidine-3'-phosphate
  modified_base 3: mod_base = OTHER; note = 2'-O-methyluridine-3'-phosphate
  modified_base 4: mod_base = OTHER; note = 2'-O-methyladenosine-3'-phosphate
  modified_base 5: mod_base = OTHER; note = 2'-O-methyluridine-3'-phosphate
  modified_base 6: mod_base = OTHER; note = 2'-O-methyladenosine-3'-phosphate
  modified_base 7: mod_base = OTHER; note = 2'-deoxy-2'-fluoroadenosine-3'-phosphate
  modified_base 8: mod_base = OTHER; note = 2'-O-methyladenosine-3'-phosphate
  modified_base 9: mod_base = OTHER; note = 2'-deoxy-2'-fluoroadenosine-3'-phosphate
  modified_base 10: mod_base = OTHER; note = 2'-deoxy-2'-fluoroadenosine-3'-phosphate
  modified_base 11: mod_base = OTHER; note = 2'-deoxy-2'-fluorouridine-3'-phosphate
  modified_base 12: mod_base = OTHER; note = 2'-O-methylguanosine-3'-phosphate
  modified_base 13: mod_base = OTHER; note = 2'-O-methyluridine-3'-phosphate
  modified_base 14: mod_base = OTHER; note = 2'-O-methyluridine-3'-phosphate
  modified_base 15: mod_base = OTHER; note = 2'-O-methyladenosine-3'-phosphate
  modified_base 16: mod_base = OTHER; note = 2'-O-methyluridine-3'-phosphate
  modified_base 17: mod_base = OTHER; note = 2'-O-methyladenosine-3'-phosphate
  modified_base 18: mod_base = OTHER; note = 2'-O-methylguanosine-3'-phosphate
  modified_base 19: mod_base = OTHER; note = 2'-O-methyluridine-3'-phosphate
  modified_base 20: mod_base = OTHER; note = 2'-O-methylcytidine-3'-phosphate
  modified_base 21: mod_base = OTHER; note = 2'-O-methyladenosine
tctataaaaatgttatagtca

SEQ ID NO: 3457 - RNA, 21 nt, synthetic construct
  source 1..21: mol_type = other RNA
  modified_base 1: mod_base = OTHER; note = 2'-O-methyladenosine-3'-phosphate
  modified_base 2: mod_base = OTHER; note = 2'-O-methyluridine-3'-phosphate
  modified_base 3: mod_base = OTHER; note = 2'-O-methyluridine-3'-phosphate
  modified_base 4: mod_base = OTHER; note = 2'-O-methyluridine-3'-phosphate
  modified_base 5: mod_base = OTHER; note = 2'-O-methyluridine-3'-phosphate
  modified_base 6: mod_base = OTHER; note = 2'-O-methyladenosine-3'-phosphate
  modified_base 7: mod_base = OTHER; note = 2'-deoxy-2'-fluorocytidine-3'-phosphate
  modified_base 8: mod_base = OTHER; note = 2'-O-methyluridine-3'-phosphate
  modified_base 9: mod_base = OTHER; note = 2'-deoxy-2'-fluorouridine-3'-phosphate
  modified_base 10: mod_base = OTHER; note = 2'-deoxy-2'-fluoroguanosine-3'-phosphate
  modified_base 11: mod_base = OTHER; note = 2'-deoxy-2'-fluoroadenosine-3'-phosphate
  modified_base 12: mod_base = OTHER; note = 2'-O-methyladenosine-3'-phosphate
  modified_base 13: mod_base = OTHER; note = 2'-O-methylcytidine-3'-phosphate
  modified_base 14: mod_base = OTHER; note = 2'-O-methylcytidine-3'-phosphate
  modified_base 15: mod_base = OTHER; note = 2'-O-methyladenosine-3'-phosphate
  modified_base 16: mod_base = OTHER; note = 2'-O-methyladenosine-3'-phosphate
  modified_base 17: mod_base = OTHER; note = 2'-O-methylguanosine-3'-phosphate
  modified_base 18: mod_base = OTHER; note = 2'-O-methyladenosine-3'-phosphate
  modified_base 19: mod_base = OTHER; note = 2'-O-methylguanosine-3'-phosphate
  modified_base 20: mod_base = OTHER; note = 2'-O-methylcytidine-3'-phosphate
  modified_base 21: mod_base = OTHER; note = 2'-O-methyladenosine
attttacttgaaccaagagca

SEQ ID NO: 3458 - RNA, 21 nt, synthetic construct
  source 1..21: mol_type = other RNA
  modified_base 1: mod_base = OTHER; note = 2'-O-methyluridine-3'-phosphate
  modified_base 2: mod_base = OTHER; note = 2'-O-methyluridine-3'-phosphate
  modified_base 3: mod_base = OTHER; note = 2'-O-methyluridine-3'-phosphate
  modified_base 4: mod_base = OTHER; note = 2'-O-methyluridine-3'-phosphate
  modified_base 5: mod_base = OTHER; note = 2'-O-methyladenosine-3'-phosphate
  modified_base 6: mod_base = OTHER; note = 2'-O-methylcytidine-3'-phosphate
  modified_base 7: mod_base = OTHER; note = 2'-deoxy-2'-fluorouridine-3'-phosphate
  modified_base 8: mod_base = OTHER; note = 2'-O-methyluridine-3'-phosphate
  modified_base 9: mod_base = OTHER; note = 2'-deoxy-2'-fluoroguanosine-3'-phosphate
  modified_base 10: mod_base = OTHER; note = 2'-deoxy-2'-fluoroadenosine-3'-phosphate
  modified_base 11: mod_base = OTHER; note = 2'-deoxy-2'-fluoroadenosine-3'-phosphate
  modified_base 12: mod_base = OTHER; note = 2'-O-methylcytidine-3'-phosphate
  modified_base 13: mod_base = OTHER; note = 2'-O-methylcytidine-3'-phosphate
  modified_base 14: mod_base = OTHER; note = 2'-O-methyladenosine-3'-phosphate
  modified_base 15: mod_base = OTHER; note = 2'-O-methyladenosine-3'-phosphate
  modified_base 16: mod_base = OTHER; note = 2'-O-methylguanosine-3'-phosphate
  modified_base 17: mod_base = OTHER; note = 2'-O-methyladenosine-3'-phosphate
  modified_base 18: mod_base = OTHER; note = 2'-O-methylguanosine-3'-phosphate
  modified_base 19: mod_base = OTHER; note = 2'-O-methylcytidine-3'-phosphate
  modified_base 20: mod_base = OTHER; note = 2'-O-methyladenosine-3'-phosphate
  modified_base 21: mod_base = OTHER; note = 2'-O-methyladenosine
ttttacttgaaccaagagcaa

SEQ ID NO: 3459 - RNA, 21 nt, synthetic construct
  source 1..21: mol_type = other RNA
  modified_base 1: mod_base = OTHER; note = 2'-O-methyluridine-3'-phosphate
  modified_base 2: mod_base = OTHER; note = 2'-O-methyluridine-3'-phosphate
  modified_base 3: mod_base = OTHER; note = 2'-O-methyluridine-3'-phosphate
  modified_base 4: mod_base = OTHER; note = 2'-O-methyladenosine-3'-phosphate
  modified_base 5: mod_base = OTHER; note = 2'-O-methylcytidine-3'-phosphate
  modified_base 6: mod_base = OTHER; note = 2'-O-methyluridine-3'-phosphate
  modified_base 7: mod_base = OTHER; note = 2'-deoxy-2'-fluorouridine-3'-phosphate
  modified_base 8: mod_base = OTHER; note = 2'-O-methylguanosine-3'-phosphate
  modified_base 9: mod_base = OTHER; note = 2'-deoxy-2'-fluoroadenosine-3'-phosphate
  modified_base 10: mod_base = OTHER; note = 2'-deoxy-2'-fluoroadenosine-3'-phosphate
  modified_base 11: mod_base = OTHER; note = 2'-deoxy-2'-fluorocytidine-3'-phosphate
  modified_base 12: mod_base = OTHER; note = 2'-O-methylcytidine-3'-phosphate
  modified_base 13: mod_base = OTHER; note = 2'-O-methyladenosine-3'-phosphate
  modified_base 14: mod_base = OTHER; note = 2'-O-methyladenosine-3'-phosphate
  modified_base 15: mod_base = OTHER; note = 2'-O-methylguanosine-3'-phosphate
  modified_base 16: mod_base = OTHER; note = 2'-O-methyladenosine-3'-phosphate
  modified_base 17: mod_base = OTHER; note = 2'-O-methylguanosine-3'-phosphate
  modified_base 18: mod_base = OTHER; note = 2'-O-methylcytidine-3'-phosphate
  modified_base 19: mod_base = OTHER; note = 2'-O-methyladenosine-3'-phosphate
  modified_base 20: mod_base = OTHER; note = 2'-O-methylcytidine-3'-phosphate
  modified_base 21: mod_base = OTHER; note = 2'-O-methyladenosine
tttacttgaaccaagagcaca

SEQ ID NO: 3460 - RNA, 21 nt, synthetic construct
  source 1..21: mol_type = other RNA
  modified_base 1: mod_base = OTHER; note = 2'-O-methyluridine-3'-phosphate
  modified_base 2: mod_base = OTHER; note = 2'-O-methyluridine-3'-phosphate
  modified_base 3: mod_base = OTHER; note = 2'-O-methyladenosine-3'-phosphate
  modified_base 4: mod_base = OTHER; note = 2'-O-methylcytidine-3'-phosphate
  modified_base 5: mod_base = OTHER; note = 2'-O-methyluridine-3'-phosphate
  modified_base 6: mod_base = OTHER; note = 2'-O-methyluridine-3'-phosphate
  modified_base 7: mod_base = OTHER; note = 2'-deoxy-2'-fluoroguanosine-3'-phosphate
  modified_base 8: mod_base = OTHER; note = 2'-O-methyladenosine-3'-phosphate
  modified_base 9: mod_base = OTHER; note = 2'-deoxy-2'-fluoroadenosine-3'-phosphate
  modified_base 10: mod_base = OTHER; note = 2'-deoxy-2'-fluorocytidine-3'-phosphate
  modified_base 11: mod_base = OTHER; note = 2'-deoxy-2'-fluorocytidine-3'-phosphate
  modified_base 12: mod_base = OTHER; note = 2'-O-methyladenosine-3'-phosphate
  modified_base 13: mod_base = OTHER; note = 2'-O-methyladenosine-3'-phosphate
  modified_base 14: mod_base = OTHER; note = 2'-O-methylguanosine-3'-phosphate
  modified_base 15: mod_base = OTHER; note = 2'-O-methyladenosine-3'-phosphate
  modified_base 16: mod_base = OTHER; note = 2'-O-methylguanosine-3'-phosphate
  modified_base 17: mod_base = OTHER; note = 2'-O-methylcytidine-3'-phosphate
  modified_base 18: mod_base = OTHER; note = 2'-O-methyladenosine-3'-phosphate
  modified_base 19: mod_base = OTHER; note = 2'-O-methylcytidine-3'-phosphate
  modified_base 20: mod_base = OTHER; note = 2'-O-methyladenosine-3'-phosphate
  modified_base 21: mod_base = OTHER; note = 2'-O-methyladenosine
ttacttgaaccaagagcacaa

SEQ ID NO: 3461 - RNA, 21 nt, synthetic construct
  source 1..21: mol_type = other RNA
  modified_base 1: mod_base = OTHER; note = 2'-O-methyluridine-3'-phosphate
  modified_base 2: mod_base = OTHER; note = 2'-O-methyladenosine-3'-phosphate
  modified_base 3: mod_base = OTHER; note = 2'-O-methylcytidine-3'-phosphate
  modified_base 4: mod_base = OTHER; note = 2'-O-methyluridine-3'-phosphate
  modified_base 5: mod_base = OTHER; note = 2'-O-methyluridine-3'-phosphate
  modified_base 6: mod_base = OTHER; note = 2'-O-methylguanosine-3'-phosphate
  modified_base 7: mod_base = OTHER; note = 2'-deoxy-2'-fluoroadenosine-3'-phosphate
  modified_base 8: mod_base = OTHER; note = 2'-O-methyladenosine-3'-phosphate
  modified_base 9: mod_base = OTHER; note = 2'-deoxy-2'-fluorocytidine-3'-phosphate
  modified_base 10: mod_base = OTHER; note = 2'-deoxy-2'-fluorocytidine-3'-phosphate
  modified_base 11: mod_base = OTHER; note = 2'-deoxy-2'-fluoroadenosine-3'-phosphate
  modified_base 12: mod_base = OTHER; note = 2'-O-methyladenosine-3'-phosphate
  modified_base 13: mod_base = OTHER; note = 2'-O-methylguanosine-3'-phosphate
  modified_base 14: mod_base = OTHER; note = 2'-O-methyladenosine-3'-phosphate
  modified_base 15: mod_base = OTHER; note = 2'-O-methylguanosine-3'-phosphate
  modified_base 16: mod_base = OTHER; note = 2'-O-methylcytidine-3'-phosphate
  modified_base 17: mod_base = OTHER; note = 2'-O-methyladenosine-3'-phosphate
  modified_base 18: mod_base = OTHER; note = 2'-O-methylcytidine-3'-phosphate
  modified_base 19: mod_base = OTHER; note = 2'-O-methyladenosine-3'-phosphate
  modified_base 20: mod_base = OTHER; note = 2'-O-methyluridine-3'-phosphate
  modified_base 21: mod_base = OTHER; note = 2'-O-methyladenosine
tacttgaaccaagagcacata

SEQ ID NO: 3462 - RNA, 21 nt, synthetic construct
  source 1..21: mol_type = other RNA
  modified_base 1: mod_base = OTHER; note = 2'-O-methyladenosine-3'-phosphate
  modified_base 2: mod_base = OTHER; note = 2'-O-methylcytidine-3'-phosphate
  modified_base 3: mod_base = OTHER; note = 2'-O-methyluridine-3'-phosphate
  modified_base 4: mod_base = OTHER; note = 2'-O-methyluridine-3'-phosphate
  modified_base 5: mod_base = OTHER; note = 2'-O-methylguanosine-3'-phosphate
  modified_base 6: mod_base = OTHER; note = 2'-O-methyladenosine-3'-phosphate
  modified_base 7: mod_base = OTHER; note = 2'-deoxy-2'-fluoroadenosine-3'-phosphate
  modified_base 8: mod_base = OTHER; note = 2'-O-methylcytidine-3'-phosphate
  modified_base 9: mod_base = OTHER; note = 2'-deoxy-2'-fluorocytidine-3'-phosphate
  modified_base 10: mod_base = OTHER; note = 2'-deoxy-2'-fluoroadenosine-3'-phosphate
  modified_base 11: mod_base = OTHER; note = 2'-deoxy-2'-fluoroadenosine-3'-phosphate
  modified_base 12: mod_base = OTHER; note = 2'-O-methylguanosine-3'-phosphate
  modified_base 13: mod_base = OTHER; note = 2'-O-methyladenosine-3'-phosphate
  modified_base 14: mod_base = OTHER; note = 2'-O-methylguanosine-3'-phosphate
  modified_base 15: mod_base = OTHER; note = 2'-O-methylcytidine-3'-phosphate
  modified_base 16: mod_base = OTHER; note = 2'-O-methyladenosine-3'-phosphate
  modified_base 17: mod_base = OTHER; note = 2'-O-methylcytidine-3'-phosphate
  modified_base 18: mod_base = OTHER; note = 2'-O-methyladenosine-3'-phosphate
  modified_base 19: mod_base = OTHER; note = 2'-O-methyluridine-3'-phosphate
  modified_base 20: mod_base = OTHER; note = 2'-O-methylguanosine-3'-phosphate
  modified_base 21: mod_base = OTHER; note = 2'-O-methyladenosine
acttgaaccaagagcacatga

SEQ ID NO: 3463 - RNA, 21 nt, synthetic construct
  source 1..21: mol_type = other RNA
  modified_base 1: mod_base = OTHER; note = 2'-O-methylcytidine-3'-phosphate
  modified_base 2: mod_base = OTHER; note = 2'-O-methyluridine-3'-phosphate
  modified_base 3: mod_base = OTHER; note = 2'-O-methyluridine-3'-phosphate
  modified_base 4: mod_base = OTHER; note = 2'-O-methylguanosine-3'-phosphate
  modified_base 5: mod_base = OTHER; note = 2'-O-methyladenosine-3'-phosphate
  modified_base 6: mod_base = OTHER; note = 2'-O-methyladenosine-3'-phosphate
  modified_base 7: mod_base = OTHER; note = 2'-deoxy-2'-fluorocytidine-3'-phosphate
  modified_base 8: mod_base = OTHER; note = 2'-O-methylcytidine-3'-phosphate
  modified_base 9: mod_base = OTHER; note = 2'-deoxy-2'-fluoroadenosine-3'-phosphate
  modified_base 10: mod_base = OTHER; note = 2'-deoxy-2'-fluoroadenosine-3'-phosphate
  modified_base 11: mod_base = OTHER; note = 2'-deoxy-2'-fluoroguanosine-3'-phosphate
  modified_base 12: mod_base = OTHER; note = 2'-O-methyladenosine-3'-phosphate
  modified_base 13: mod_base = OTHER; note = 2'-O-methylguanosine-3'-phosphate
  modified_base 14: mod_base = OTHER; note = 2'-O-methylcytidine-3'-phosphate
  modified_base 15: mod_base = OTHER; note = 2'-O-methyladenosine-3'-phosphate
  modified_base 16: mod_base = OTHER; note = 2'-O-methylcytidine-3'-phosphate
  modified_base 17: mod_base = OTHER; note = 2'-O-methyladenosine-3'-phosphate
  modified_base 18: mod_base = OTHER; note = 2'-O-methyluridine-3'-phosphate
  modified_base 19: mod_base = OTHER; note = 2'-O-methylguanosine-3'-phosphate
  modified_base 20: mod_base = OTHER; note = 2'-O-methyladenosine-3'-phosphate
  modified_base 21: mod_base = OTHER; note = 2'-O-methyladenosine
cttgaaccaagagcacatgaa

SEQ ID NO: 3464 - RNA, 21 nt, synthetic construct
  source 1..21: mol_type = other RNA
  modified_base 1: mod_base = OTHER; note = 2'-O-methyluridine-3'-phosphate
  modified_base 2: mod_base = OTHER; note = 2'-O-methyluridine-3'-phosphate
  modified_base 3: mod_base = OTHER; note = 2'-O-methylguanosine-3'-phosphate
  modified_base 4: mod_base = OTHER; note = 2'-O-methyladenosine-3'-phosphate
  modified_base 5: mod_base = OTHER; note = 2'-O-methyladenosine-3'-phosphate
  modified_base 6: mod_base = OTHER; note = 2'-O-methylcytidine-3'-phosphate
  modified_base 7: mod_base = OTHER; note = 2'-deoxy-2'-fluorocytidine-3'-phosphate
  modified_base 8: mod_base = OTHER; note = 2'-O-methyladenosine-3'-phosphate
  modified_base 9: mod_base = OTHER; note = 2'-deoxy-2'-fluoroadenosine-3'-phosphate
  modified_base 10: mod_base = OTHER; note = 2'-deoxy-2'-fluoroguanosine-3'-phosphate
  modified_base 11: mod_base = OTHER; note = 2'-deoxy-2'-fluoroadenosine-3'-phosphate
  modified_base 12: mod_base = OTHER; note = 2'-O-methylguanosine-3'-phosphate
  modified_base 13: mod_base = OTHER; note = 2'-O-methylcytidine-3'-phosphate
  modified_base 14: mod_base = OTHER; note = 2'-O-methyladenosine-3'-phosphate
  modified_base 15: mod_base = OTHER; note = 2'-O-methylcytidine-3'-phosphate
  modified_base 16: mod_base = OTHER; note = 2'-O-methyladenosine-3'-phosphate
  modified_base 17: mod_base = OTHER; note = 2'-O-methyluridine-3'-phosphate
  modified_base 18: mod_base = OTHER; note = 2'-O-methylguanosine-3'-phosphate
  modified_base 19: mod_base = OTHER; note = 2'-O-methyladenosine-3'-phosphate
  modified_base 20: mod_base = OTHER; note = 2'-O-methyladenosine-3'-phosphate
  modified_base 21: mod_base = OTHER; note = 2'-O-methyladenosine
ttgaaccaagagcacatgaaa

SEQ ID NO: 3465 - RNA, 21 nt, synthetic construct
  source 1..21: mol_type = other RNA
  modified_base 1: mod_base = OTHER; note = 2'-O-methyluridine-3'-phosphate
  modified_base 2: mod_base = OTHER; note = 2'-O-methylguanosine-3'-phosphate
  modified_base 3: mod_base = OTHER; note = 2'-O-methyladenosine-3'-phosphate
  modified_base 4: mod_base = OTHER; note = 2'-O-methyladenosine-3'-phosphate
  modified_base 5: mod_base = OTHER; note = 2'-O-methylcytidine-3'-phosphate
  modified_base 6: mod_base = OTHER; note = 2'-O-methylcytidine-3'-phosphate
  modified_base 7: mod_base = OTHER; note = 2'-deoxy-2'-fluoroadenosine-3'-phosphate
  modified_base 8: mod_base = OTHER; note = 2'-O-methyladenosine-3'-phosphate
  modified_base 9: mod_base = OTHER; note = 2'-deoxy-2'-fluoroguanosine-3'-phosphate
  modified_base 10: mod_base = OTHER; note = 2'-deoxy-2'-fluoroadenosine-3'-phosphate
  modified_base 11: mod_base = OTHER; note = 2'-deoxy-2'-fluoroguanosine-3'-phosphate
  modified_base 12: mod_base = OTHER; note = 2'-O-methylcytidine-3'-phosphate
  modified_base 13: mod_base = OTHER; note = 2'-O-methyladenosine-3'-phosphate
  modified_base 14: mod_base = OTHER; note = 2'-O-methylcytidine-3'-phosphate
  modified_base 15: mod_base = OTHER; note = 2'-O-methyladenosine-3'-phosphate
  modified_base 16: mod_base = OTHER; note = 2'-O-methyluridine-3'-phosphate
  modified_base 17: mod_base = OTHER; note = 2'-O-methylguanosine-3'-phosphate
  modified_base 18: mod_base = OTHER; note = 2'-O-methyladenosine-3'-phosphate
  modified_base 19: mod_base = OTHER; note = 2'-O-methyladenosine-3'-phosphate
  modified_base 20: mod_base = OTHER; note = 2'-O-methyluridine-3'-phosphate
  modified_base 21: mod_base = OTHER; note = 2'-O-methyladenosine
tgaaccaagagcacatgaata

SEQ ID NO: 3466 - RNA, 21 nt, synthetic construct
  source 1..21: mol_type = other RNA
  modified_base 1: mod_base = OTHER; note = 2'-O-methylguanosine-3'-phosphate
  modified_base 2: mod_base = OTHER; note = 2'-O-methyladenosine-3'-phosphate
  modified_base 3: mod_base = OTHER; note = 2'-O-methyladenosine-3'-phosphate
  modified_base 4: mod_base = OTHER; note = 2'-O-methylcytidine-3'-phosphate
  modified_base 5: mod_base = OTHER; note = 2'-O-methylcytidine-3'-phosphate
  modified_base 6: mod_base = OTHER; note = 2'-O-methyladenosine-3'-phosphate
  modified_base 7: mod_base = OTHER; note = 2'-deoxy-2'-fluoroadenosine-3'-phosphate
  modified_base 8: mod_base = OTHER; note = 2'-O-methylguanosine-3'-phosphate
  modified_base 9: mod_base = OTHER; note = 2'-deoxy-2'-fluoroadenosine-3'-phosphate
  modified_base 10: mod_base = OTHER; note = 2'-deoxy-2'-fluoroguanosine-3'-phosphate
  modified_base 11: mod_base = OTHER; note = 2'-deoxy-2'-fluorocytidine-3'-phosphate
  modified_base 12: mod_base = OTHER; note = 2'-O-methyladenosine-3'-phosphate
  modified_base 13: mod_base = OTHER; note = 2'-O-methylcytidine-3'-phosphate
  modified_base 14: mod_base = OTHER; note = 2'-O-methyladenosine-3'-phosphate
  modified_base 15: mod_base = OTHER; note = 2'-O-methyluridine-3'-phosphate
  modified_base 16: mod_base = OTHER; note = 2'-O-methylguanosine-3'-phosphate
  modified_base 17: mod_base = OTHER; note = 2'-O-methyladenosine-3'-phosphate
  modified_base 18: mod_base = OTHER; note = 2'-O-methyladenosine-3'-phosphate
  modified_base 19: mod_base = OTHER; note = 2'-O-methyluridine-3'-phosphate
  modified_base 20: mod_base = OTHER; note = 2'-O-methylguanosine-3'-phosphate
  modified_base 21: mod_base = OTHER; note = 2'-O-methyladenosine
gaaccaagagcacatgaatga

SEQ ID NO: 3467 - RNA, 21 nt, synthetic construct
  source 1..21: mol_type = other RNA
  modified_base 1: mod_base = OTHER; note = 2'-O-methyladenosine-3'-phosphate
  modified_base 2: mod_base = OTHER; note = 2'-O-methyladenosine-3'-phosphate
  modified_base 3: mod_base = OTHER; note = 2'-O-methylcytidine-3'-phosphate
  modified_base 4: mod_base = OTHER; note = 2'-O-methylcytidine-3'-phosphate
  modified_base 5: mod_base = OTHER; note = 2'-O-methyladenosine-3'-phosphate
  modified_base 6: mod_base = OTHER; note = 2'-O-methyladenosine-3'-phosphate
  modified_base 7: mod_base = OTHER; note = 2'-deoxy-2'-fluoroguanosine-3'-phosphate
  modified_base 8: mod_base = OTHER; note = 2'-O-methyladenosine-3'-phosphate
  modified_base 9: mod_base = OTHER; note = 2'-deoxy-2'-fluoroguanosine-3'-phosphate
  modified_base 10: mod_base = OTHER; note = 2'-deoxy-2'-fluorocytidine-3'-phosphate
  modified_base 11: mod_base = OTHER; note = 2'-deoxy-2'-fluoroadenosine-3'-phosphate
  modified_base 12: mod_base = OTHER; note = 2'-O-methylcytidine-3'-phosphate
  modified_base 13: mod_base = OTHER; note = 2'-O-methyladenosine-3'-phosphate
  modified_base 14: mod_base = OTHER; note = 2'-O-methyluridine-3'-phosphate
  modified_base 15: mod_base = OTHER; note = 2'-O-methylguanosine-3'-phosphate
  modified_base 16: mod_base = OTHER; note = 2'-O-methyladenosine-3'-phosphate
  modified_base 17: mod_base = OTHER; note = 2'-O-methyladenosine-3'-phosphate
  modified_base 18: mod_base = OTHER; note = 2'-O-methyluridine-3'-phosphate
  modified_base 19: mod_base = OTHER; note = 2'-O-methylguanosine-3'-phosphate
  modified_base 20: mod_base = OTHER; note = 2'-O-methyladenosine-3'-phosphate
  modified_base 21: mod_base = OTHER; note = 2'-O-methyladenosine
aaccaagagcacatgaatgaa

SEQ ID NO: 3468 - RNA, 21 nt, synthetic construct
  source 1..21: mol_type = other RNA
  modified_base 1: mod_base = OTHER; note = 2'-O-methyladenosine-3'-phosphate
  modified_base 2: mod_base = OTHER; note = 2'-O-methylcytidine-3'-phosphate
  modified_base 3: mod_base = OTHER; note = 2'-O-methylcytidine-3'-phosphate
  modified_base 4: mod_base = OTHER; note = 2'-O-methyladenosine-3'-phosphate
  modified_base 5: mod_base = OTHER; note = 2'-O-methyladenosine-3'-phosphate
  modified_base 6: mod_base = OTHER; note = 2'-O-methylguanosine-3'-phosphate
  modified_base 7: mod_base = OTHER; note = 2'-deoxy-2'-fluoroadenosine-3'-phosphate
  modified_base 8: mod_base = OTHER; note = 2'-O-methylguanosine-3'-phosphate
  modified_base 9: mod_base = OTHER; note = 2'-deoxy-2'-fluorocytidine-3'-phosphate
  modified_base 10: mod_base = OTHER; note = 2'-deoxy-2'-fluoroadenosine-3'-phosphate
  modified_base 11: mod_base = OTHER; note = 2'-deoxy-2'-fluorocytidine-3'-phosphate
  modified_base 12: mod_base = OTHER; note = 2'-O-methyladenosine-3'-phosphate
  modified_base 13: mod_base = OTHER; note = 2'-O-methyluridine-3'-phosphate
  modified_base 14: mod_base = OTHER; note = 2'-O-methylguanosine-3'-phosphate
  modified_base 15: mod_base = OTHER; note = 2'-O-methyladenosine-3'-phosphate
  modified_base 16: mod_base = OTHER; note = 2'-O-methyladenosine-3'-phosphate
  modified_base 17: mod_base = OTHER; note = 2'-O-methyluridine-3'-phosphate
  modified_base 18: mod_base = OTHER; note = 2'-O-methylguanosine-3'-phosphate
  modified_base 19: mod_base = OTHER; note = 2'-O-methyladenosine-3'-phosphate
  modified_base 20: mod_base = OTHER; note = 2'-O-methyladenosine-3'-phosphate
  modified_base 21: mod_base = OTHER; note = 2'-O-methyladenosine
accaagagcacatgaatgaaa

SEQ ID NO: 3469 - RNA, 21 nt, synthetic construct
  source 1..21: mol_type = other RNA
  modified_base 1: mod_base = OTHER; note = 2'-O-methylcytidine-3'-phosphate
  modified_base 2: mod_base = OTHER; note = 2'-O-methylcytidine-3'-phosphate
  modified_base 3: mod_base = OTHER; note = 2'-O-methyladenosine-3'-phosphate
  modified_base 4: mod_base = OTHER; note = 2'-O-methyladenosine-3'-phosphate
  modified_base 5: mod_base = OTHER; note = 2'-O-methylguanosine-3'-phosphate
  modified_base 6: mod_base = OTHER; note = 2'-O-methyladenosine-3'-phosphate
  modified_base 7: mod_base = OTHER; note = 2'-deoxy-2'-fluoroguanosine-3'-phosphate
  modified_base 8: mod_base = OTHER; note = 2'-O-methylcytidine-3'-phosphate
  modified_base 9: mod_base = OTHER; note = 2'-deoxy-2'-fluoroadenosine-3'-phosphate
  modified_base 10: mod_base = OTHER; note = 2'-deoxy-2'-fluorocytidine-3'-phosphate
  modified_base 11: mod_base = OTHER; note = 2'-deoxy-2'-fluoroadenosine-3'-phosphate
  modified_base 12: mod_base = OTHER; note = 2'-O-methyluridine-3'-phosphate
  modified_base 13: mod_base = OTHER; note = 2'-O-methylguanosine-3'-phosphate
  modified_base 14: mod_base = OTHER; note = 2'-O-methyladenosine-3'-phosphate
  modified_base 15: mod_base = OTHER; note = 2'-O-methyladenosine-3'-phosphate
  modified_base 16: mod_base = OTHER; note = 2'-O-methyluridine-3'-phosphate
  modified_base 17: mod_base = OTHER; note = 2'-O-methylguanosine-3'-phosphate
  modified_base 18: mod_base = OTHER; note = 2'-O-methyladenosine-3'-phosphate
  modified_base 19: mod_base = OTHER; note = 2'-O-methyladenosine-3'-phosphate
  modified_base 20: mod_base = OTHER; note = 2'-O-methylcytidine-3'-phosphate
  modified_base 21: mod_base = OTHER; note = 2'-O-methyladenosine
ccaagagcacatgaatgaaca

SEQ ID NO: 3470 - RNA, 21 nt, synthetic construct
  source 1..21: mol_type = other RNA
  modified_base 1: mod_base = OTHER; note = 2'-O-methylcytidine-3'-phosphate
  modified_base 2: mod_base = OTHER; note = 2'-O-methyladenosine-3'-phosphate
  modified_base 3: mod_base = OTHER; note = 2'-O-methyladenosine-3'-phosphate
  modified_base 4: mod_base = OTHER; note = 2'-O-methylguanosine-3'-phosphate
  modified_base 5: mod_base = OTHER; note = 2'-O-methyladenosine-3'-phosphate
  modified_base 6: mod_base = OTHER; note = 2'-O-methylguanosine-3'-phosphate
  modified_base 7: mod_base = OTHER; note = 2'-deoxy-2'-fluorocytidine-3'-phosphate
  modified_base 8: mod_base = OTHER; note = 2'-O-methyladenosine-3'-phosphate
  modified_base 9: mod_base = OTHER; note = 2'-deoxy-2'-fluorocytidine-3'-phosphate
  modified_base 10: mod_base = OTHER; note = 2'-deoxy-2'-fluoroadenosine-3'-phosphate
  modified_base 11: mod_base = OTHER; note = 2'-deoxy-2'-fluorouridine-3'-phosphate
  modified_base 12: mod_base = OTHER; note = 2'-O-methylguanosine-3'-phosphate
  modified_base 13: mod_base = OTHER; note = 2'-O-methyladenosine-3'-phosphate
  modified_base 14: mod_base = OTHER; note = 2'-O-methyladenosine-3'-phosphate
  modified_base 15: mod_base = OTHER; note = 2'-O-methyluridine-3'-phosphate
  modified_base 16: mod_base = OTHER; note = 2'-O-methylguanosine-3'-phosphate
  modified_base 17: mod_base = OTHER; note = 2'-O-methyladenosine-3'-phosphate
  modified_base 18: mod_base = OTHER; note = 2'-O-methyladenosine-3'-phosphate
  modified_base 19: mod_base = OTHER; note = 2'-O-methylcytidine-3'-phosphate
  modified_base 20: mod_base = OTHER; note = 2'-O-methyladenosine-3'-phosphate
  modified_base 21: mod_base = OTHER; note = 2'-O-methyladenosine
caagagcacatgaatgaacaa

SEQ ID NO: 3471 - RNA, 21 nt, synthetic construct
  source 1..21: mol_type = other RNA
  modified_base 1: mod_base = OTHER; note = 2'-O-methyladenosine-3'-phosphate
  modified_base 2: mod_base = OTHER; note = 2'-O-methyladenosine-3'-phosphate
  modified_base 3: mod_base = OTHER; note = 2'-O-methylguanosine-3'-phosphate
  modified_base 4: mod_base = OTHER; note = 2'-O-methyladenosine-3'-phosphate
  modified_base 5: mod_base = OTHER; note = 2'-O-methylguanosine-3'-phosphate
  modified_base 6: mod_base = OTHER; note = 2'-O-methylcytidine-3'-phosphate
  modified_base 7: mod_base = OTHER; note = 2'-deoxy-2'-fluoroadenosine-3'-phosphate
  modified_base 8: mod_base = OTHER; note = 2'-O-methylcytidine-3'-phosphate
  modified_base 9: mod_base = OTHER; note = 2'-deoxy-2'-fluoroadenosine-3'-phosphate
  modified_base 10: mod_base = OTHER; note = 2'-deoxy-2'-fluorouridine-3'-phosphate
  modified_base 11: mod_base = OTHER; note = 2'-deoxy-2'-fluoroguanosine-3'-phosphate
  modified_base 12: mod_base = OTHER; note = 2'-O-methyladenosine-3'-phosphate
  modified_base 13: mod_base = OTHER; note = 2'-O-methyladenosine-3'-phosphate
  modified_base 14: mod_base = OTHER; note = 2'-O-methyluridine-3'-phosphate
  modified_base 15: mod_base = OTHER; note = 2'-O-methylguanosine-3'-phosphate
  modified_base 16: mod_base = OTHER; note = 2'-O-methyladenosine-3'-phosphate
  modified_base 17: mod_base = OTHER; note = 2'-O-methyladenosine-3'-phosphate
  modified_base 18: mod_base = OTHER; note = 2'-O-methylcytidine-3'-phosphate
  modified_base 19: mod_base = OTHER; note = 2'-O-methyladenosine-3'-phosphate
  modified_base 20: mod_base = OTHER; note = 2'-O-methylguanosine-3'-phosphate
  modified_base 21: mod_base = OTHER; note = 2'-O-methyladenosine
aagagcacatgaatgaacaga

SEQ ID NO: 3472 - RNA, 21 nt, synthetic construct
  source 1..21: mol_type = other RNA
  modified_base 1: mod_base = OTHER; note = 2'-O-methylguanosine-3'-phosphate
  modified_base 2: mod_base = OTHER; note = 2'-O-methylguanosine-3'-phosphate
  modified_base 3: mod_base = OTHER; note = 2'-O-methyladenosine-3'-phosphate
  modified_base 4: mod_base = OTHER; note = 2'-O-methyladenosine-3'-phosphate
  modified_base 5: mod_base = OTHER; note = 2'-O-methyladenosine-3'-phosphate
  modified_base 6: mod_base = OTHER; note = 2'-O-methyladenosine-3'-phosphate
  modified_base 7: mod_base = OTHER; note = 2'-deoxy-2'-fluoroguanosine-3'-phosphate
  modified_base 8: mod_base = OTHER; note = 2'-O-methyladenosine-3'-phosphate
  modified_base 9: mod_base = OTHER; note = 2'-deoxy-2'-fluorouridine-3'-phosphate
  modified_base 10: mod_base = OTHER; note = 2'-deoxy-2'-fluoroguanosine-3'-phosphate
  modified_base 11: mod_base = OTHER; note = 2'-deoxy-2'-fluorouridine-3'-phosphate
  modified_base 12: mod_base = OTHER; note = 2'-O-methyladenosine-3'-phosphate
  modified_base 13: mod_base = OTHER; note = 2'-O-methyladenosine-3'-phosphate
  modified_base 14: mod_base = OTHER; note = 2'-O-methyladenosine-3'-phosphate
  modified_base 15: mod_base = OTHER; note = 2'-O-methyladenosine-3'-phosphate
  modified_base 16: mod_base = OTHER; note = 2'-O-methyladenosine-3'-phosphate
  modified_base 17: mod_base = OTHER; note = 2'-O-methylcytidine-3'-phosphate
  modified_base 18: mod_base = OTHER; note = 2'-O-methyladenosine-3'-phosphate
  modified_base 19: mod_base = OTHER; note = 2'-O-methyluridine-3'-phosphate
  modified_base 20: mod_base = OTHER; note = 2'-O-methyluridine-3'-phosphate
  modified_base 21: mod_base = OTHER; note = 2'-O-methyladenosine
ggaaaagatgtaaaaacatta

SEQ ID NO: 3473 - RNA, 21 nt, synthetic construct
  source 1..21: mol_type = other RNA
  modified_base 1: mod_base = OTHER; note = 2'-O-methyluridine-3'-phosphate
  modified_base 2: mod_base = OTHER; note = 2'-O-methyluridine-3'-phosphate
  modified_base 3: mod_base = OTHER; note = 2'-O-methyluridine-3'-phosphate
  modified_base 4: mod_base = OTHER; note = 2'-O-methyluridine-3'-phosphate
  modified_base 5: mod_base = OTHER; note = 2'-O-methyluridine-3'-phosphate
  modified_base 6: mod_base = OTHER; note = 2'-O-methyluridine-3'-phosphate
  modified_base 7: mod_base = OTHER; note = 2'-deoxy-2'-fluorouridine-3'-phosphate
  modified_base 8: mod_base = OTHER; note = 2'-O-methylcytidine-3'-phosphate
  modified_base 9: mod_base = OTHER; note = 2'-deoxy-2'-fluorouridine-3'-phosphate
  modified_base 10: mod_base = OTHER; note = 2'-deoxy-2'-fluoroguanosine-3'-phosphate
  modified_base 11: mod_base = OTHER; note = 2'-deoxy-2'-fluoroadenosine-3'-phosphate
  modified_base 12: mod_base = OTHER; note = 2'-O-methylguanosine-3'-phosphate
  modified_base 13: mod_base = OTHER; note = 2'-O-methyladenosine-3'-phosphate
  modified_base 14: mod_base = OTHER; note = 2'-O-methyluridine-3'-phosphate
  modified_base 15: mod_base = OTHER; note = 2'-O-methylguanosine-3'-phosphate
  modified_base 16: mod_base = OTHER; note = 2'-O-methyladenosine-3'-phosphate
  modified_base 17: mod_base = OTHER; note = 2'-O-methyladenosine-3'-phosphate
  modified_base 18: mod_base = OTHER; note = 2'-O-methyladenosine-3'-phosphate
  modified_base 19: mod_base = OTHER; note = 2'-O-methyladenosine-3'-phosphate
  modified_base 20: mod_base = OTHER; note = 2'-O-methylcytidine-3'-phosphate
  modified_base 21: mod_base = OTHER; note = 2'-O-methyladenosine
tttttttctgagatgaaaaca

SEQ ID NO: 3474 - RNA, 21 nt, synthetic construct
  source 1..21: mol_type = other RNA
  modified_base 1: mod_base = OTHER; note = 2'-O-methyladenosine-3'-phosphate
  modified_base 2: mod_base = OTHER; note = 2'-O-methyluridine-3'-phosphate
  modified_base 3: mod_base = OTHER; note = 2'-O-methylguanosine-3'-phosphate
  modified_base 4: mod_base = OTHER; note = 2'-O-methylcytidine-3'-phosphate
  modified_base 5: mod_base = OTHER; note = 2'-O-methyladenosine-3'-phosphate
  modified_base 6: mod_base = OTHER; note = 2'-O-methyladenosine-3'-phosphate
  modified_base 7: mod_base = OTHER; note = 2'-deoxy-2'-fluoroadenosine-3'-phosphate
  modified_base 8: mod_base = OTHER; note = 2'-O-methyluridine-3'-phosphate
  modified_base 9: mod_base = OTHER; note = 2'-deoxy-2'-fluorouridine-3'-phosphate
  modified_base 10: mod_base = OTHER; note = 2'-deoxy-2'-fluoroadenosine-3'-phosphate
  modified_base 11: mod_base = OTHER; note = 2'-deoxy-2'-fluoroguanosine-3'-phosphate
  modified_base 12: mod_base = OTHER; note = 2'-O-methyladenosine-3'-phosphate
  modified_base 13: mod_base = OTHER; note = 2'-O-methylguanosine-3'-phosphate
  modified_base 14: mod_base = OTHER; note = 2'-O-methylcytidine-3'-phosphate
  modified_base 15: mod_base = OTHER; note = 2'-O-methyladenosine-3'-phosphate
  modified_base 16: mod_base = OTHER; note = 2'-O-methyluridine-3'-phosphate
  modified_base 17: mod_base = OTHER; note = 2'-O-methylguanosine-3'-phosphate
  modified_base 18: mod_base = OTHER; note = 2'-O-methylcytidine-3'-phosphate
  modified_base 19: mod_base = OTHER; note = 2'-O-methyluridine-3'-phosphate
  modified_base 20: mod_base = OTHER; note = 2'-O-methyladenosine-3'-phosphate
  modified_base 21: mod_base = OTHER; note = 2'-O-methyladenosine
atgcaaattagagcatgctaa

SEQ ID NO: 3475 - RNA, 21 nt, synthetic construct
  source 1..21: mol_type = other RNA
  modified_base 1: mod_base = OTHER; note = 2'-O-methyluridine-3'-phosphate
  modified_base 2: mod_base = OTHER; note = 2'-O-methylguanosine-3'-phosphate
  modified_base 3: mod_base = OTHER; note = 2'-O-methylcytidine-3'-phosphate
  modified_base 4: mod_base = OTHER; note = 2'-O-methyladenosine-3'-phosphate
  modified_base 5: mod_base = OTHER; note = 2'-O-methyladenosine-3'-phosphate
  modified_base 6: mod_base = OTHER; note = 2'-O-methyladenosine-3'-phosphate
  modified_base 7: mod_base = OTHER; note = 2'-deoxy-2'-fluorouridine-3'-phosphate
  modified_base 8: mod_base = OTHER; note = 2'-O-methyluridine-3'-phosphate
  modified_base 9: mod_base = OTHER; note = 2'-deoxy-2'-fluoroadenosine-3'-phosphate
  modified_base 10: mod_base = OTHER; note = 2'-deoxy-2'-fluoroguanosine-3'-phosphate
  modified_base 11: mod_base = OTHER; note = 2'-deoxy-2'-fluoroadenosine-3'-phosphate
  modified_base 12: mod_base = OTHER; note = 2'-O-methylguanosine-3'-phosphate
  modified_base 13: mod_base = OTHER; note = 2'-O-methylcytidine-3'-phosphate
  modified_base 14: mod_base = OTHER; note = 2'-O-methyladenosine-3'-phosphate
  modified_base 15: mod_base = OTHER; note = 2'-O-methyluridine-3'-phosphate
  modified_base 16: mod_base = OTHER; note = 2'-O-methylguanosine-3'-phosphate
  modified_base 17: mod_base = OTHER; note = 2'-O-methylcytidine-3'-phosphate
  modified_base 18: mod_base = OTHER; note = 2'-O-methyluridine-3'-phosphate
  modified_base 19: mod_base = OTHER; note = 2'-O-methyladenosine-3'-phosphate
  modified_base 20: mod_base = OTHER; note = 2'-O-methyluridine-3'-phosphate
  modified_base 21: mod_base = OTHER; note = 2'-O-methyladenosine
tgcaaattagagcatgctata

SEQ ID NO: 3476 - RNA, 21 nt, synthetic construct
  source 1..21: mol_type = other RNA
  modified_base 1: mod_base = OTHER; note = 2'-O-methyladenosine-3'-phosphate
  modified_base 2: mod_base = OTHER; note = 2'-O-methyladenosine-3'-phosphate
  modified_base 3: mod_base = OTHER; note = 2'-O-methyladenosine-3'-phosphate
  modified_base 4: mod_base = OTHER; note = 2'-O-methyluridine-3'-phosphate
  modified_base 5: mod_base = OTHER; note = 2'-O-methyluridine-3'-phosphate
  modified_base 6: mod_base = OTHER; note = 2'-O-methyladenosine-3'-phosphate
  modified_base 7: mod_base = OTHER; note = 2'-deoxy-2'-fluoroguanosine-3'-phosphate
  modified_base 8: mod_base = OTHER; note = 2'-O-methyladenosine-3'-phosphate
  modified_base 9: mod_base = OTHER; note = 2'-deoxy-2'-fluoroguanosine-3'-phosphate
  modified_base 10: mod_base = OTHER; note = 2'-deoxy-2'-fluorocytidine-3'-phosphate
  modified_base 11: mod_base = OTHER; note = 2'-deoxy-2'-fluoroadenosine-3'-phosphate
  modified_base 12: mod_base = OTHER; note = 2'-O-methyluridine-3'-phosphate
  modified_base 13: mod_base = OTHER; note = 2'-O-methylguanosine-3'-phosphate
  modified_base 14: mod_base = OTHER; note = 2'-O-methylcytidine-3'-phosphate
  modified_base 15: mod_base = OTHER; note = 2'-O-methyluridine-3'-phosphate
  modified_base 16: mod_base = OTHER; note = 2'-O-methyladenosine-3'-phosphate
  modified_base 17: mod_base = OTHER; note = 2'-O-methyluridine-3'-phosphate
  modified_base 18: mod_base = OTHER; note = 2'-O-methylcytidine-3'-phosphate
  modified_base 19: mod_base = OTHER; note = 2'-O-methyluridine-3'-phosphate
  modified_base 20: mod_base = OTHER; note = 2'-O-methyluridine-3'-phosphate
  modified_base 21: mod_base = OTHER; note = 2'-O-methyladenosine
aaattagagcatgctatctta

SEQ ID NO: 3477 - RNA, 21 nt, synthetic construct
  source 1..21: mol_type = other RNA
  modified_base 1: mod_base = OTHER; note = 2'-O-methyladenosine-3'-phosphate
  modified_base 2: mod_base = OTHER; note = 2'-O-methylguanosine-3'-phosphate
  modified_base 3: mod_base = OTHER; note = 2'-O-methyladenosine-3'-phosphate
  modified_base 4: mod_base = OTHER; note = 2'-O-methylguanosine-3'-phosphate
  modified_base 5: mod_base = OTHER; note = 2'-O-methylcytidine-3'-phosphate
  modified_base 6: mod_base = OTHER; note = 2'-O-methyladenosine-3'-phosphate
  modified_base 7: mod_base = OTHER; note = 2'-deoxy-2'-fluorouridine-3'-phosphate
  modified_base 8: mod_base = OTHER; note = 2'-O-methylguanosine-3'-phosphate
  modified_base 9: mod_base = OTHER; note = 2'-deoxy-2'-fluorocytidine-3'-phosphate
  modified_base 10: mod_base = OTHER; note = 2'-deoxy-2'-fluorouridine-3'-phosphate
  modified_base 11: mod_base = OTHER; note = 2'-deoxy-2'-fluoroadenosine-3'-phosphate
  modified_base 12: mod_base = OTHER; note = 2'-O-methyluridine-3'-phosphate
  modified_base 13: mod_base = OTHER; note = 2'-O-methylcytidine-3'-phosphate
  modified_base 14: mod_base = OTHER; note = 2'-O-methyluridine-3'-phosphate
  modified_base 15: mod_base = OTHER; note = 2'-O-methyluridine-3'-phosphate
  modified_base 16: mod_base = OTHER; note = 2'-O-methyluridine-3'-phosphate
  modified_base 17: mod_base = OTHER; note = 2'-O-methyladenosine-3'-phosphate
  modified_base 18: mod_base = OTHER; note = 2'-O-methylguanosine-3'-phosphate
  modified_base 19: mod_base = OTHER; note = 2'-O-methylguanosine-3'-phosphate
  modified_base 20: mod_base = OTHER; note = 2'-O-methyluridine-3'-phosphate
  modified_base 21: mod_base = OTHER; note = 2'-O-methyladenosine
agagcatgctatctttaggta

SEQ ID NO: 3478 - RNA, 21 nt, synthetic construct
  source 1..21: mol_type = other RNA
  modified_base 1: mod_base = OTHER; note = 2'-O-methylguanosine-3'-phosphate
  modified_base 2: mod_base = OTHER; note = 2'-O-methylcytidine-3'-phosphate
  modified_base 3: mod_base = OTHER; note = 2'-O-methyladenosine-3'-phosphate
  modified_base 4: mod_base = OTHER; note = 2'-O-methyluridine-3'-phosphate
  modified_base 5: mod_base = OTHER; note = 2'-O-methylguanosine-3'-phosphate
  modified_base 6: mod_base = OTHER; note = 2'-O-methylcytidine-3'-phosphate
  modified_base 7: mod_base = OTHER; note = 2'-deoxy-2'-fluorouridine-3'-phosphate
  modified_base 8: mod_base = OTHER; note = 2'-O-methyladenosine-3'-phosphate
  modified_base 9: mod_base = OTHER; note = 2'-deoxy-2'-fluorouridine-3'-phosphate
  modified_base 10: mod_base = OTHER; note = 2'-deoxy-2'-fluorocytidine-3'-phosphate
  modified_base 11: mod_base = OTHER; note = 2'-deoxy-2'-fluorouridine-3'-phosphate
  modified_base 12: mod_base = OTHER; note = 2'-O-methyluridine-3'-phosphate
  modified_base 13: mod_base = OTHER; note = 2'-O-methyluridine-3'-phosphate
  modified_base 14: mod_base = OTHER; note = 2'-O-methyladenosine-3'-phosphate
  modified_base 15: mod_base = OTHER; note = 2'-O-methylguanosine-3'-phosphate
  modified_base 16: mod_base = OTHER; note = 2'-O-methylguanosine-3'-phosphate
  modified_base 17: mod_base = OTHER; note = 2'-O-methyluridine-3'-phosphate
  modified_base 18: mod_base = OTHER; note = 2'-O-methylguanosine-3'-phosphate
  modified_base 19: mod_base = OTHER; note = 2'-O-methyladenosine-3'-phosphate
  modified_base 20: mod_base = OTHER; note = 2'-O-methyluridine-3'-phosphate
  modified_base 21: mod_base = OTHER; note = 2'-O-methyladenosine
gcatgctatctttaggtgata

SEQ ID NO: 3479 - RNA, 21 nt, synthetic construct
  source 1..21: mol_type = other RNA
  modified_base 1: mod_base = OTHER; note = 2'-O-methyluridine-3'-phosphate
  modified_base 2: mod_base = OTHER; note = 2'-O-methylcytidine-3'-phosphate
  modified_base 3: mod_base = OTHER; note = 2'-O-methyluridine-3'-phosphate
  modified_base 4: mod_base = OTHER; note = 2'-O-methyluridine-3'-phosphate
  modified_base 5: mod_base = OTHER; note = 2'-O-methyluridine-3'-phosphate
  modified_base 6: mod_base = OTHER; note = 2'-O-methyladenosine-3'-phosphate
  modified_base 7: mod_base = OTHER; note = 2'-deoxy-2'-fluoroguanosine-3'-phosphate
  modified_base 8: mod_base = OTHER; note = 2'-O-methylguanosine-3'-phosphate
  modified_base 9: mod_base = OTHER; note = 2'-deoxy-2'-fluorouridine-3'-phosphate
  modified_base 10: mod_base = OTHER; note = 2'-deoxy-2'-fluoroguanosine-3'-phosphate
  modified_base 11: mod_base = OTHER; note = 2'-deoxy-2'-fluoroadenosine-3'-phosphate
  modified_base 12: mod_base = OTHER; note = 2'-O-methyluridine-3'-phosphate
  modified_base 13: mod_base = OTHER; note = 2'-O-methylguanosine-3'-phosphate
  modified_base 14: mod_base = OTHER; note = 2'-O-methylcytidine-3'-phosphate
  modified_base 15: mod_base = OTHER; note = 2'-O-methyladenosine-3'-phosphate
  modified_base 16: mod_base = OTHER; note = 2'-O-methyladenosine-3'-phosphate
  modified_base 17: mod_base = OTHER; note = 2'-O-methyluridine-3'-phosphate
  modified_base 18: mod_base = OTHER; note = 2'-O-methylcytidine-3'-phosphate
  modified_base 19: mod_base = OTHER; note = 2'-O-methyluridine-3'-phosphate
  modified_base 20: mod_base = OTHER; note = 2'-O-methyladenosine-3'-phosphate
  modified_base 21: mod_base = OTHER; note = 2'-O-methyladenosine
tctttaggtgatgcaatctaa

SEQ ID NO: 3480 - RNA, 21 nt, synthetic construct
  source 1..21: mol_type = other RNA
  modified_base 1: mod_base = OTHER; note = 2'-O-methyladenosine-3'-phosphate
  modified_base 2: mod_base = OTHER; note = 2'-O-methylguanosine-3'-phosphate
  modified_base 3: mod_base = OTHER; note = 2'-O-methyluridine-3'-phosphate
  modified_base 4: mod_base = OTHER; note = 2'-O-methyluridine-3'-phosphate
  modified_base 5: mod_base = OTHER; note = 2'-O-methyladenosine-3'-phosphate
  modified_base 6: mod_base = OTHER; note = 2'-O-methylguanosine-3'-phosphate
  modified_base 7: mod_base = OTHER; note = 2'-deoxy-2'-fluorocytidine-3'-phosphate
  modified_base 8: mod_base = OTHER; note = 2'-O-methyladenosine-3'-phosphate
  modified_base 9: mod_base = OTHER; note = 2'-deoxy-2'-fluoroguanosine-3'-phosphate
  modified_base 10: mod_base = OTHER; note = 2'-deoxy-2'-fluoroguanosine-3'-phosphate
  modified_base 11: mod_base = OTHER; note = 2'-deoxy-2'-fluoroadenosine-3'-phosphate
  modified_base 12: mod_base = OTHER; note = 2'-O-methylcytidine-3'-phosphate
  modified_base 13: mod_base = OTHER; note = 2'-O-methyluridine-3'-phosphate
  modified_base 14: mod_base = OTHER; note = 2'-O-methyluridine-3'-phosphate
  modified_base 15: mod_base = OTHER; note = 2'-O-methyluridine-3'-phosphate
  modified_base 16: mod_base = OTHER; note = 2'-O-methyluridine-3'-phosphate
  modified_base 17: mod_base = OTHER; note = 2'-O-methyluridine-3'-phosphate
  modified_base 18: mod_base = OTHER; note = 2'-O-methyladenosine-3'-phosphate
  modified_base 19: mod_base = OTHER; note = 2'-O-methyladenosine-3'-phosphate
  modified_base 20: mod_base = OTHER; note = 2'-O-methyladenosine-3'-phosphate
  modified_base 21: mod_base = OTHER; note = 2'-O-methyladenosine
agttagcaggactttttaaaa

SEQ ID NO: 3481 - RNA, 21 nt, synthetic construct
  source 1..21: mol_type = other RNA
  modified_base 1: mod_base = OTHER; note = 2'-O-methylguanosine-3'-phosphate
  modified_base 2: mod_base = OTHER; note = 2'-O-methyluridine-3'-phosphate
  modified_base 3: mod_base = OTHER; note = 2'-O-methyluridine-3'-phosphate
  modified_base 4: mod_base = OTHER; note = 2'-O-methyladenosine-3'-phosphate
  modified_base 5: mod_base = OTHER; note = 2'-O-methylguanosine-3'-phosphate
  modified_base 6: mod_base = OTHER; note = 2'-O-methylcytidine-3'-phosphate
  modified_base 7: mod_base = OTHER; note = 2'-deoxy-2'-fluoroadenosine-3'-phosphate
  modified_base 8: mod_base = OTHER; note = 2'-O-methylguanosine-3'-phosphate
  modified_base 9: mod_base = OTHER; note = 2'-deoxy-2'-fluoroguanosine-3'-phosphate
  modified_base 10: mod_base = OTHER; note = 2'-deoxy-2'-fluoroadenosine-3'-phosphate
  modified_base 11: mod_base = OTHER; note = 2'-deoxy-2'-fluorocytidine-3'-phosphate
  modified_base 12: mod_base = OTHER; note = 2'-O-methyluridine-3'-phosphate
  modified_base 13: mod_base = OTHER; note = 2'-O-methyluridine-3'-phosphate
  modified_base 14: mod_base = OTHER; note = 2'-O-methyluridine-3'-phosphate
  modified_base 15: mod_base = OTHER; note = 2'-O-methyluridine-3'-phosphate
  modified_base 16: mod_base = OTHER; note = 2'-O-methyluridine-3'-phosphate
  modified_base 17: mod_base = OTHER; note = 2'-O-methyladenosine-3'-phosphate
  modified_base 18: mod_base = OTHER; note = 2'-O-methyladenosine-3'-phosphate
  modified_base 19: mod_base = OTHER; note = 2'-O-methyladenosine-3'-phosphate
  modified_base 20: mod_base = OTHER; note = 2'-O-methyladenosine-3'-phosphate
  modified_base 21: mod_base = OTHER; note = 2'-O-methyladenosine
gttagcaggactttttaaaaa

SEQ ID NO: 3482 - RNA, 21 nt, synthetic construct
  source 1..21: mol_type = other RNA
  modified_base 1: mod_base = OTHER; note = 2'-O-methyluridine-3'-phosphate
  modified_base 2: mod_base = OTHER; note = 2'-O-methyluridine-3'-phosphate
  modified_base 3: mod_base = OTHER; note = 2'-O-methyladenosine-3'-phosphate
  modified_base 4: mod_base = OTHER; note = 2'-O-methylguanosine-3'-phosphate
  modified_base 5: mod_base = OTHER; note = 2'-O-methylcytidine-3'-phosphate
  modified_base 6: mod_base = OTHER; note = 2'-O-methyladenosine-3'-phosphate
  modified_base 7: mod_base = OTHER; note = 2'-deoxy-2'-fluoroguanosine-3'-phosphate
  modified_base 8: mod_base = OTHER; note = 2'-O-methylguanosine-3'-phosphate
  modified_base 9: mod_base = OTHER; note = 2'-deoxy-2'-fluoroadenosine-3'-phosphate
  modified_base 10: mod_base = OTHER; note = 2'-deoxy-2'-fluorocytidine-3'-phosphate
  modified_base 11: mod_base = OTHER; note = 2'-deoxy-2'-fluorouridine-3'-phosphate
  modified_base 12: mod_base = OTHER; note = 2'-O-methyluridine-3'-phosphate
  modified_base 13: mod_base = OTHER; note = 2'-O-methyluridine-3'-phosphate
  modified_base 14: mod_base = OTHER; note = 2'-O-methyluridine-3'-phosphate
  modified_base 15: mod_base = OTHER; note = 2'-O-methyluridine-3'-phosphate
  modified_base 16: mod_base = OTHER; note = 2'-O-methyladenosine-3'-phosphate
  modified_base 17: mod_base = OTHER; note = 2'-O-methyladenosine-3'-phosphate
  modified_base 18: mod_base = OTHER; note = 2'-O-methyladenosine-3'-phosphate
  modified_base 19: mod_base = OTHER; note = 2'-O-methyladenosine-3'-phosphate
  modified_base 20: mod_base = OTHER; note = 2'-O-methyladenosine-3'-phosphate
  modified_base 21: mod_base = OTHER; note = 2'-O-methyladenosine
ttagcaggactttttaaaaaa

SEQ ID NO: 3483 - RNA, 21 nt, synthetic construct
  source 1..21: mol_type = other RNA
  modified_base 1: mod_base = OTHER; note = 2'-O-methyluridine-3'-phosphate
  modified_base 2: mod_base = OTHER; note = 2'-O-methyladenosine-3'-phosphate
  modified_base 3: mod_base = OTHER; note = 2'-O-methylguanosine-3'-phosphate
  modified_base 4: mod_base = OTHER; note = 2'-O-methylcytidine-3'-phosphate
  modified_base 5: mod_base = OTHER; note = 2'-O-methyladenosine-3'-phosphate
  modified_base 6: mod_base = OTHER; note = 2'-O-methylguanosine-3'-phosphate
  modified_base 7: mod_base = OTHER; note = 2'-deoxy-2'-fluoroguanosine-3'-phosphate
  modified_base 8: mod_base = OTHER; note = 2'-O-methyladenosine-3'-phosphate
  modified_base 9: mod_base = OTHER; note = 2'-deoxy-2'-fluorocytidine-3'-phosphate
  modified_base 10: mod_base = OTHER; note = 2'-deoxy-2'-fluorouridine-3'-phosphate
  modified_base 11: mod_base = OTHER; note = 2'-deoxy-2'-fluorouridine-3'-phosphate
  modified_base 12: mod_base = OTHER; note = 2'-O-methyluridine-3'-phosphate
  modified_base 13: mod_base = OTHER; note = 2'-O-methyluridine-3'-phosphate
  modified_base 14: mod_base = OTHER; note = 2'-O-methyluridine-3'-phosphate
  modified_base 15: mod_base = OTHER; note = 2'-O-methyladenosine-3'-phosphate
  modified_base 16: mod_base = OTHER; note = 2'-O-methyladenosine-3'-phosphate
  modified_base 17: mod_base = OTHER; note = 2'-O-methyladenosine-3'-phosphate
  modified_base 18: mod_base = OTHER; note = 2'-O-methyladenosine-3'-phosphate
  modified_base 19: mod_base = OTHER; note = 2'-O-methyladenosine-3'-phosphate
  modified_base 20: mod_base = OTHER; note = 2'-O-methyluridine-3'-phosphate
  modified_base 21: mod_base = OTHER; note = 2'-O-methyladenosine
tagcaggactttttaaaaata

SEQ ID NO: 3484 - RNA, 21 nt, synthetic construct
  source 1..21: mol_type = other RNA
  modified_base 1: mod_base = OTHER; note = 2'-O-methylcytidine-3'-phosphate
  modified_base 2: mod_base = OTHER; note = 2'-O-methyluridine-3'-phosphate
  modified_base 3: mod_base = OTHER; note = 2'-O-methylcytidine-3'-phosphate
  modified_base 4: mod_base = OTHER; note = 2'-O-methyluridine-3'-phosphate
  modified_base 5: mod_base = OTHER; note = 2'-O-methyladenosine-3'-phosphate
  modified_base 6: mod_base = OTHER; note = 2'-O-methyladenosine-3'-phosphate
  modified_base 7: mod_base = OTHER; note = 2'-deoxy-2'-fluoroadenosine-3'-phosphate
  modified_base 8: mod_base = OTHER; note = 2'-O-methylcytidine-3'-phosphate
  modified_base 9: mod_base = OTHER; note = 2'-deoxy-2'-fluorouridine-3'-phosphate
  modified_base 10: mod_base = OTHER; note = 2'-deoxy-2'-fluorouridine-3'-phosphate
  modified_base 11: mod_base = OTHER; note = 2'-deoxy-2'-fluorouridine-3'-phosphate
  modified_base 12: mod_base = OTHER; note = 2'-O-methyladenosine-3'-phosphate
  modified_base 13: mod_base = OTHER; note = 2'-O-methyladenosine-3'-phosphate
  modified_base 14: mod_base = OTHER; note = 2'-O-methyluridine-3'-phosphate
  modified_base 15: mod_base = OTHER; note = 2'-O-methyladenosine-3'-phosphate
  modified_base 16: mod_base = OTHER; note = 2'-O-methyluridine-3'-phosphate
  modified_base 17: mod_base = OTHER; note = 2'-O-methyladenosine-3'-phosphate
  modified_base 18: mod_base = OTHER; note = 2'-O-methyluridine-3'-phosphate
  modified_base 19: mod_base = OTHER; note = 2'-O-methylcytidine-3'-phosphate
  modified_base 20: mod_base = OTHER; note = 2'-O-methylguanosine-3'-phosphate
  modified_base 21: mod_base = OTHER; note = 2'-O-methyladenosine
ctctaaactttaatatatcga

SEQ ID NO: 3485 - RNA, 21 nt, synthetic construct
  source 1..21: mol_type = other RNA
  modified_base 1: mod_base = OTHER; note = 2'-O-methyluridine-3'-phosphate
  modified_base 2: mod_base = OTHER; note = 2'-O-methylcytidine-3'-phosphate
  modified_base 3: mod_base = OTHER; note = 2'-O-methyluridine-3'-phosphate
  modified_base 4: mod_base = OTHER; note = 2'-O-methyladenosine-3'-phosphate
  modified_base 5: mod_base = OTHER; note = 2'-O-methyladenosine-3'-phosphate
  modified_base 6: mod_base = OTHER; note = 2'-O-methyladenosine-3'-phosphate
  modified_base 7: mod_base = OTHER; note = 2'-deoxy-2'-fluorocytidine-3'-phosphate
  modified_base 8: mod_base = OTHER; note = 2'-O-methyluridine-3'-phosphate
  modified_base 9: mod_base = OTHER; note = 2'-deoxy-2'-fluorouridine-3'-phosphate
  modified_base 10: mod_base = OTHER; note = 2'-deoxy-2'-fluorouridine-3'-phosphate
  modified_base 11: mod_base = OTHER; note = 2'-deoxy-2'-fluoroadenosine-3'-phosphate
  modified_base 12: mod_base = OTHER; note = 2'-O-methyladenosine-3'-phosphate
  modified_base 13: mod_base = OTHER; note = 2'-O-methyluridine-3'-phosphate
  modified_base 14: mod_base = OTHER; note = 2'-O-methyladenosine-3'-phosphate
  modified_base 15: mod_base = OTHER; note = 2'-O-methyluridine-3'-phosphate
  modified_base 16: mod_base = OTHER; note = 2'-O-methyladenosine-3'-phosphate
  modified_base 17: mod_base = OTHER; note = 2'-O-methyluridine-3'-phosphate
  modified_base 18: mod_base = OTHER; note = 2'-O-methylcytidine-3'-phosphate
  modified_base 19: mod_base = OTHER; note = 2'-O-methylguanosine-3'-phosphate
  modified_base 20: mod_base = OTHER; note = 2'-O-methyladenosine-3'-phosphate
  modified_base 21: mod_base = OTHER; note = 2'-O-methyladenosine
tctaaactttaatatatcgaa

SEQ ID NO: 3486 - RNA, 21 nt, synthetic construct
  source 1..21: mol_type = other RNA
  modified_base 1: mod_base = OTHER; note = 2'-O-methyladenosine-3'-phosphate
  modified_base 2: mod_base = OTHER; note = 2'-O-methyladenosine-3'-phosphate
  modified_base 3: mod_base = OTHER; note = 2'-O-methyladenosine-3'-phosphate
  modified_base 4: mod_base = OTHER; note = 2'-O-methylcytidine-3'-phosphate
  modified_base 5: mod_base = OTHER; note = 2'-O-methyluridine-3'-phosphate
  modified_base 6: mod_base = OTHER; note = 2'-O-methyluridine-3'-phosphate
  modified_base 7: mod_base = OTHER; note = 2'-deoxy-2'-fluorouridine-3'-phosphate
  modified_base 8: mod_base = OTHER; note = 2'-O-methyladenosine-3'-phosphate
  modified_base 9: mod_base = OTHER; note = 2'-deoxy-2'-fluoroadenosine-3'-phosphate
  modified_base 10: mod_base = OTHER; note = 2'-deoxy-2'-fluorouridine-3'-phosphate
  modified_base 11: mod_base = OTHER; note = 2'-deoxy-2'-fluoroadenosine-3'-phosphate
  modified_base 12: mod_base = OTHER; note = 2'-O-methyluridine-3'-phosphate
  modified_base 13: mod_base = OTHER; note = 2'-O-methyladenosine-3'-phosphate
  modified_base 14: mod_base = OTHER; note = 2'-O-methyluridine-3'-phosphate
  modified_base 15: mod_base = OTHER; note = 2'-O-methylcytidine-3'-phosphate
  modified_base 16: mod_base = OTHER; note = 2'-O-methylguanosine-3'-phosphate
  modified_base 17: mod_base = OTHER; note = 2'-O-methyladenosine-3'-phosphate
  modified_base 18: mod_base = OTHER; note = 2'-O-methyladenosine-3'-phosphate
  modified_base 19: mod_base = OTHER; note = 2'-O-methylcytidine-3'-phosphate
  modified_base 20: mod_base = OTHER; note = 2'-O-methylguanosine-3'-phosphate
  modified_base 21: mod_base = OTHER; note = 2'-O-methyladenosine
aaactttaatatatcgaacga

SEQ ID NO: 3487 - RNA, 21 nt, synthetic construct
  source 1..21: mol_type = other RNA
  modified_base 1: mod_base = OTHER; note = 2'-O-methyladenosine-3'-phosphate
  modified_base 2: mod_base = OTHER; note = 2'-O-methylcytidine-3'-phosphate
  modified_base 3: mod_base = OTHER; note = 2'-O-methyluridine-3'-phosphate
  modified_base 4: mod_base = OTHER; note = 2'-O-methyluridine-3'-phosphate
  modified_base 5: mod_base = OTHER; note = 2'-O-methyluridine-3'-phosphate
  modified_base 6: mod_base = OTHER; note = 2'-O-methyladenosine-3'-phosphate
  modified_base 7: mod_base = OTHER; note = 2'-deoxy-2'-fluoroadenosine-3'-phosphate
  modified_base 8: mod_base = OTHER; note = 2'-O-methyluridine-3'-phosphate
  modified_base 9: mod_base = OTHER; note = 2'-deoxy-2'-fluoroadenosine-3'-phosphate
  modified_base 10: mod_base = OTHER; note = 2'-deoxy-2'-fluorouridine-3'-phosphate
  modified_base 11: mod_base = OTHER; note = 2'-deoxy-2'-fluoroadenosine-3'-phosphate
  modified_base 12: mod_base = OTHER; note = 2'-O-methyluridine-3'-phosphate
  modified_base 13: mod_base = OTHER; note = 2'-O-methylcytidine-3'-phosphate
  modified_base 14: mod_base = OTHER; note = 2'-O-methylguanosine-3'-phosphate
  modified_base 15: mod_base = OTHER; note = 2'-O-methyladenosine-3'-phosphate
  modified_base 16: mod_base = OTHER; note = 2'-O-methyladenosine-3'-phosphate
  modified_base 17: mod_base = OTHER; note = 2'-O-methylcytidine-3'-phosphate
  modified_base 18: mod_base = OTHER; note = 2'-O-methylguanosine-3'-phosphate
  modified_base 19: mod_base = OTHER; note = 2'-O-methyluridine-3'-phosphate
  modified_base 20: mod_base = OTHER; note = 2'-O-methylguanosine-3'-phosphate
  modified_base 21: mod_base = OTHER; note = 2'-O-methyladenosine
actttaatatatcgaacgtga

SEQ ID NO: 3488 - RNA, 21 nt, synthetic construct
  source 1..21: mol_type = other RNA
  modified_base 1: mod_base = OTHER; note = 2'-O-methylcytidine-3'-phosphate
  modified_base 2: mod_base = OTHER; note = 2'-O-methyluridine-3'-phosphate
  modified_base 3: mod_base = OTHER; note = 2'-O-methyluridine-3'-phosphate
  modified_base 4: mod_base = OTHER; note = 2'-O-methyluridine-3'-phosphate
  modified_base 5: mod_base = OTHER; note = 2'-O-methyladenosine-3'-phosphate
  modified_base 6: mod_base = OTHER; note = 2'-O-methyladenosine-3'-phosphate
  modified_base 7: mod_base = OTHER; note = 2'-deoxy-2'-fluorouridine-3'-phosphate
  modified_base 8: mod_base = OTHER; note = 2'-O-methyladenosine-3'-phosphate
  modified_base 9: mod_base = OTHER; note = 2'-deoxy-2'-fluorouridine-3'-phosphate
  modified_base 10: mod_base = OTHER; note = 2'-deoxy-2'-fluoroadenosine-3'-phosphate
  modified_base 11: mod_base = OTHER; note = 2'-deoxy-2'-fluorouridine-3'-phosphate
  modified_base 12: mod_base = OTHER; note = 2'-O-methylcytidine-3'-phosphate
  modified_base 13: mod_base = OTHER; note = 2'-O-methylguanosine-3'-phosphate
  modified_base 14: mod_base = OTHER; note = 2'-O-methyladenosine-3'-phosphate
  modified_base 15: mod_base = OTHER; note = 2'-O-methyladenosine-3'-phosphate
  modified_base 16: mod_base = OTHER; note = 2'-O-methylcytidine-3'-phosphate
  modified_base 17: mod_base = OTHER; note = 2'-O-methylguanosine-3'-phosphate
  modified_base 18: mod_base = OTHER; note = 2'-O-methyluridine-3'-phosphate
  modified_base 19: mod_base = OTHER; note = 2'-O-methylguanosine-3'-phosphate
  modified_base 20: mod_base = OTHER; note = 2'-O-methyladenosine-3'-phosphate
  modified_base 21: mod_base = OTHER; note = 2'-O-methyladenosine
ctttaatatatcgaacgtgaa

SEQ ID NO: 3489 - RNA, 21 nt, synthetic construct
  source 1..21: mol_type = other RNA
  modified_base 1: mod_base = OTHER; note = 2'-O-methyluridine-3'-phosphate
  modified_base 2: mod_base = OTHER; note = 2'-O-methyluridine-3'-phosphate
  modified_base 3: mod_base = OTHER; note = 2'-O-methyluridine-3'-phosphate
  modified_base 4: mod_base = OTHER; note = 2'-O-methyladenosine-3'-phosphate
  modified_base 5: mod_base = OTHER; note = 2'-O-methyladenosine-3'-phosphate
  modified_base 6: mod_base = OTHER; note = 2'-O-methyluridine-3'-phosphate
  modified_base 7: mod_base = OTHER; note = 2'-deoxy-2'-fluoroadenosine-3'-phosphate
  modified_base 8: mod_base = OTHER; note = 2'-O-methyluridine-3'-phosphate
  modified_base 9: mod_base = OTHER; note = 2'-deoxy-2'-fluoroadenosine-3'-phosphate
  modified_base 10: mod_base = OTHER; note = 2'-deoxy-2'-fluorouridine-3'-phosphate
  modified_base 11: mod_base = OTHER; note = 2'-deoxy-2'-fluorocytidine-3'-phosphate
  modified_base 12: mod_base = OTHER; note = 2'-O-methylguanosine-3'-phosphate
  modified_base 13: mod_base = OTHER; note = 2'-O-methyladenosine-3'-phosphate
  modified_base 14: mod_base = OTHER; note = 2'-O-methyladenosine-3'-phosphate
  modified_base 15: mod_base = OTHER; note = 2'-O-methylcytidine-3'-phosphate
  modified_base 16: mod_base = OTHER; note = 2'-O-methylguanosine-3'-phosphate
  modified_base 17: mod_base = OTHER; note = 2'-O-methyluridine-3'-phosphate
  modified_base 18: mod_base = OTHER; note = 2'-O-methylguanosine-3'-phosphate
  modified_base 19: mod_base = OTHER; note = 2'-O-methyladenosine-3'-phosphate
  modified_base 20: mod_base = OTHER; note = 2'-O-methylguanosine-3'-phosphate
  modified_base 21: mod_base = OTHER; note = 2'-O-methyladenosine
tttaatatatcgaacgtgaga

SEQ ID NO: 3490 - RNA, 21 nt, synthetic construct
  source 1..21: mol_type = other RNA
  modified_base 1: mod_base = OTHER; note = 2'-O-methyluridine-3'-phosphate
  modified_base 2: mod_base = OTHER; note = 2'-O-methyluridine-3'-phosphate
  modified_base 3: mod_base = OTHER; note = 2'-O-methyladenosine-3'-phosphate
  modified_base 4: mod_base = OTHER; note = 2'-O-methyladenosine-3'-phosphate
  modified_base 5: mod_base = OTHER; note = 2'-O-methyluridine-3'-phosphate
  modified_base 6: mod_base = OTHER; note = 2'-O-methyladenosine-3'-phosphate
  modified_base 7: mod_base = OTHER; note = 2'-deoxy-2'-fluorouridine-3'-phosphate
  modified_base 8: mod_base = OTHER; note = 2'-O-methyladenosine-3'-phosphate
  modified_base 9: mod_base = OTHER; note = 2'-deoxy-2'-fluorouridine-3'-phosphate
  modified_base 10: mod_base = OTHER; note = 2'-deoxy-2'-fluorocytidine-3'-phosphate
  modified_base 11: mod_base = OTHER; note = 2'-deoxy-2'-fluoroguanosine-3'-phosphate
  modified_base 12: mod_base = OTHER; note = 2'-O-methyladenosine-3'-phosphate
  modified_base 13: mod_base = OTHER; note = 2'-O-methyladenosine-3'-phosphate
  modified_base 14: mod_base = OTHER; note = 2'-O-methylcytidine-3'-phosphate
  modified_base 15: mod_base = OTHER; note = 2'-O-methylguanosine-3'-phosphate
  modified_base 16: mod_base = OTHER; note = 2'-O-methyluridine-3'-phosphate
  modified_base 17: mod_base = OTHER; note = 2'-O-methylguanosine-3'-phosphate
  modified_base 18: mod_base = OTHER; note = 2'-O-methyladenosine-3'-phosphate
  modified_base 19: mod_base = OTHER; note = 2'-O-methylguanosine-3'-phosphate
  modified_base 20: mod_base = OTHER; note = 2'-O-methyladenosine-3'-phosphate
  modified_base 21: mod_base = OTHER; note = 2'-O-methyladenosine
ttaatatatcgaacgtgagaa

SEQ ID NO: 3491 - RNA, 21 nt, synthetic construct
  source 1..21: mol_type = other RNA
  modified_base 1: mod_base = OTHER; note = 2'-O-methyluridine-3'-phosphate
  modified_base 2: mod_base = OTHER; note = 2'-O-methyladenosine-3'-phosphate
  modified_base 3: mod_base = OTHER; note = 2'-O-methyladenosine-3'-phosphate
  modified_base 4: mod_base = OTHER; note = 2'-O-methyluridine-3'-phosphate
  modified_base 5: mod_base = OTHER; note = 2'-O-methyladenosine-3'-phosphate
  modified_base 6: mod_base = OTHER; note = 2'-O-methyluridine-3'-phosphate
  modified_base 7: mod_base = OTHER; note = 2'-deoxy-2'-fluoroadenosine-3'-phosphate
  modified_base 8: mod_base = OTHER; note = 2'-O-methyluridine-3'-phosphate
  modified_base 9: mod_base = OTHER; note = 2'-deoxy-2'-fluorocytidine-3'-phosphate
  modified_base 10: mod_base = OTHER; note = 2'-deoxy-2'-fluoroguanosine-3'-phosphate
  modified_base 11: mod_base = OTHER; note = 2'-deoxy-2'-fluoroadenosine-3'-phosphate
  modified_base 12: mod_base = OTHER; note = 2'-O-methyladenosine-3'-phosphate
  modified_base 13: mod_base = OTHER; note = 2'-O-methylcytidine-3'-phosphate
  modified_base 14: mod_base = OTHER; note = 2'-O-methylguanosine-3'-phosphate
  modified_base 15: mod_base = OTHER; note = 2'-O-methyluridine-3'-phosphate
  modified_base 16: mod_base = OTHER; note = 2'-O-methylguanosine-3'-phosphate
  modified_base 17: mod_base = OTHER; note = 2'-O-methyladenosine-3'-phosphate
  modified_base 18: mod_base = OTHER; note = 2'-O-methylguanosine-3'-phosphate
  modified_base 19: mod_base = OTHER; note = 2'-O-methyladenosine-3'-phosphate
  modified_base 20: mod_base = OTHER; note = 2'-O-methylguanosine-3'-phosphate
  modified_base 21: mod_base = OTHER; note = 2'-O-methyladenosine
taatatatcgaacgtgagaga

SEQ ID NO: 3492 - RNA, 21 nt, synthetic construct
  source 1..21: mol_type = other RNA
  modified_base 1: mod_base = OTHER; note = 2'-O-methyladenosine-3'-phosphate
  modified_base 2: mod_base = OTHER; note = 2'-O-methyladenosine-3'-phosphate
  modified_base 3: mod_base = OTHER; note = 2'-O-methyluridine-3'-phosphate
  modified_base 4: mod_base = OTHER; note = 2'-O-methyladenosine-3'-phosphate
  modified_base 5: mod_base = OTHER; note = 2'-O-methyluridine-3'-phosphate
  modified_base 6: mod_base = OTHER; note = 2'-O-methyladenosine-3'-phosphate
  modified_base 7: mod_base = OTHER; note = 2'-deoxy-2'-fluorouridine-3'-phosphate
  modified_base 8: mod_base = OTHER; note = 2'-O-methylcytidine-3'-phosphate
  modified_base 9: mod_base = OTHER; note = 2'-deoxy-2'-fluoroguanosine-3'-phosphate
  modified_base 10: mod_base = OTHER; note = 2'-deoxy-2'-fluoroadenosine-3'-phosphate
  modified_base 11: mod_base = OTHER; note = 2'-deoxy-2'-fluoroadenosine-3'-phosphate
  modified_base 12: mod_base = OTHER; note = 2'-O-methylcytidine-3'-phosphate
  modified_base 13: mod_base = OTHER; note = 2'-O-methylguanosine-3'-phosphate
  modified_base 14: mod_base = OTHER; note = 2'-O-methyluridine-3'-phosphate
  modified_base 15: mod_base = OTHER; note = 2'-O-methylguanosine-3'-phosphate
  modified_base 16: mod_base = OTHER; note = 2'-O-methyladenosine-3'-phosphate
  modified_base 17: mod_base = OTHER; note = 2'-O-methylguanosine-3'-phosphate
  modified_base 18: mod_base = OTHER; note = 2'-O-methyladenosine-3'-phosphate
  modified_base 19: mod_base = OTHER; note = 2'-O-methylguanosine-3'-phosphate
  modified_base 20: mod_base = OTHER; note = 2'-O-methyluridine-3'-phosphate
  modified_base 21: mod_base = OTHER; note = 2'-O-methyladenosine
aatatatcgaacgtgagagta

SEQ ID NO: 3493 - RNA, 21 nt, synthetic construct
  source 1..21: mol_type = other RNA
  modified_base 1: mod_base = OTHER; note = 2'-O-methyladenosine-3'-phosphate
  modified_base 2: mod_base = OTHER; note = 2'-O-methyluridine-3'-phosphate
  modified_base 3: mod_base = OTHER; note = 2'-O-methyladenosine-3'-phosphate
  modified_base 4: mod_base = OTHER; note = 2'-O-methyluridine-3'-phosphate
  modified_base 5: mod_base = OTHER; note = 2'-O-methyladenosine-3'-phosphate
  modified_base 6: mod_base = OTHER; note = 2'-O-methyluridine-3'-phosphate
  modified_base 7: mod_base = OTHER; note = 2'-deoxy-2'-fluorocytidine-3'-phosphate
  modified_base 8: mod_base = OTHER; note = 2'-O-methylguanosine-3'-phosphate
  modified_base 9: mod_base = OTHER; note = 2'-deoxy-2'-fluoroadenosine-3'-phosphate
  modified_base 10: mod_base = OTHER; note = 2'-deoxy-2'-fluoroadenosine-3'-phosphate
  modified_base 11: mod_base = OTHER; note = 2'-deoxy-2'-fluorocytidine-3'-phosphate
  modified_base 12: mod_base = OTHER; note = 2'-O-methylguanosine-3'-phosphate
  modified_base 13: mod_base = OTHER; note = 2'-O-methyluridine-3'-phosphate
  modified_base 14: mod_base = OTHER; note = 2'-O-methylguanosine-3'-phosphate
  modified_base 15: mod_base = OTHER; note = 2'-O-methyladenosine-3'-phosphate
  modified_base 16: mod_base = OTHER; note = 2'-O-methylguanosine-3'-phosphate
  modified_base 17: mod_base = OTHER; note = 2'-O-methyladenosine-3'-phosphate
  modified_base 18: mod_base = OTHER; note = 2'-O-methylguanosine-3'-phosphate
  modified_base 19: mod_base = OTHER; note = 2'-O-methyluridine-3'-phosphate
  modified_base 20: mod_base = OTHER; note = 2'-O-methylguanosine-3'-phosphate
  modified_base 21: mod_base = OTHER; note = 2'-O-methyladenosine
atatatcgaacgtgagagtga

SEQ ID NO: 3494 - RNA, 21 nt, synthetic construct
  source 1..21: mol_type = other RNA
  modified_base 1: mod_base = OTHER; note = 2'-O-methyluridine-3'-phosphate
  modified_base 2: mod_base = OTHER; note = 2'-O-methyladenosine-3'-phosphate
  modified_base 3: mod_base = OTHER; note = 2'-O-methyluridine-3'-phosphate
  modified_base 4: mod_base = OTHER; note = 2'-O-methyladenosine-3'-phosphate
  modified_base 5: mod_base = OTHER; note = 2'-O-methyluridine-3'-phosphate
  modified_base 6: mod_base = OTHER; note = 2'-O-methylcytidine-3'-phosphate
  modified_base 7: mod_base = OTHER; note = 2'-deoxy-2'-fluoroguanosine-3'-phosphate
  modified_base 8: mod_base = OTHER; note = 2'-O-methyladenosine-3'-phosphate
  modified_base 9: mod_base = OTHER; note = 2'-deoxy-2'-fluoroadenosine-3'-phosphate
  modified_base 10: mod_base = OTHER; note = 2'-deoxy-2'-fluorocytidine-3'-phosphate
  modified_base 11: mod_base = OTHER; note = 2'-deoxy-2'-fluoroguanosine-3'-phosphate
  modified_base 12: mod_base = OTHER; note = 2'-O-methyluridine-3'-phosphate
  modified_base 13: mod_base = OTHER; note = 2'-O-methylguanosine-3'-phosphate
  modified_base 14: mod_base = OTHER; note = 2'-O-methyladenosine-3'-phosphate
  modified_base 15: mod_base = OTHER; note = 2'-O-methylguanosine-3'-phosphate
  modified_base 16: mod_base = OTHER; note = 2'-O-methyladenosine-3'-phosphate
  modified_base 17: mod_base = OTHER; note = 2'-O-methylguanosine-3'-phosphate
  modified_base 18: mod_base = OTHER; note = 2'-O-methyluridine-3'-phosphate
  modified_base 19: mod_base = OTHER; note = 2'-O-methylguanosine-3'-phosphate
  modified_base 20: mod_base = OTHER; note = 2'-O-methylguanosine-3'-phosphate
  modified_base 21: mod_base = OTHER; note = 2'-O-methyladenosine
tatatcgaacgtgagagtgga

SEQ ID NO: 3495 - RNA, 21 nt, synthetic construct
  source 1..21: mol_type = other RNA
  modified_base 1: mod_base = OTHER; note = 2'-O-methylguanosine-3'-phosphate
  modified_base 2: mod_base = OTHER; note = 2'-O-methyluridine-3'-phosphate
  modified_base 3: mod_base = OTHER; note = 2'-O-methyluridine-3'-phosphate
  modified_base 4: mod_base = OTHER; note = 2'-O-methylcytidine-3'-phosphate
  modified_base 5: mod_base = OTHER; note = 2'-O-methyluridine-3'-phosphate
  modified_base 6: mod_base = OTHER; note = 2'-O-methyluridine-3'-phosphate
  modified_base 7: mod_base = OTHER; note = 2'-deoxy-2'-fluorocytidine-3'-phosphate
  modified_base 8: mod_base = OTHER; note = 2'-O-methyladenosine-3'-phosphate
  modified_base 9: mod_base = OTHER; note = 2'-deoxy-2'-fluorouridine-3'-phosphate
  modified_base 10: mod_base = OTHER; note = 2'-deoxy-2'-fluoroadenosine-3'-phosphate
  modified_base 11: mod_base = OTHER; note = 2'-deoxy-2'-fluoroadenosine-3'-phosphate
  modified_base 12: mod_base = OTHER; note = 2'-O-methyluridine-3'-phosphate
  modified_base 13: mod_base = OTHER; note = 2'-O-methylcytidine-3'-phosphate
  modified_base 14: mod_base = OTHER; note = 2'-O-methylcytidine-3'-phosphate
  modified_base 15: mod_base = OTHER; note = 2'-O-methyladenosine-3'-phosphate
  modified_base 16: mod_base = OTHER; note = 2'-O-methylcytidine-3'-phosphate
  modified_base 17: mod_base = OTHER; note = 2'-O-methyluridine-3'-phosphate
  modified_base 18: mod_base = OTHER; note = 2'-O-methyladenosine-3'-phosphate
  modified_base 19: mod_base = OTHER; note = 2'-O-methylcytidine-3'-phosphate
  modified_base 20: mod_base = OTHER; note = 2'-O-methyluridine-3'-phosphate
  modified_base 21: mod_base = OTHER; note = 2'-O-methyladenosine
gttcttcataatccactacta

SEQ ID NO: 3496 - RNA, 21 nt, synthetic construct
  source 1..21: mol_type = other RNA
  modified_base 1: mod_base = OTHER; note = 2'-O-methyluridine-3'-phosphate
  modified_base 2: mod_base = OTHER; note = 2'-O-methylguanosine-3'-phosphate
  modified_base 3: mod_base = OTHER; note = 2'-O-methyladenosine-3'-phosphate
  modified_base 4: mod_base = OTHER; note = 2'-O-methyladenosine-3'-phosphate
  modified_base 5: mod_base = OTHER; note = 2'-O-methylcytidine-3'-phosphate
  modified_base 6: mod_base = OTHER; note = 2'-O-methylcytidine-3'-phosphate
  modified_base 7: mod_base = OTHER; note = 2'-deoxy-2'-fluoroadenosine-3'-phosphate
  modified_base 8: mod_base = OTHER; note = 2'-O-methylcytidine-3'-phosphate
  modified_base 9: mod_base = OTHER; note = 2'-deoxy-2'-fluorouridine-3'-phosphate
  modified_base 10: mod_base = OTHER; note = 2'-deoxy-2'-fluoroadenosine-3'-phosphate
  modified_base 11: mod_base = OTHER; note = 2'-deoxy-2'-fluoroadenosine-3'-phosphate
  modified_base 12: mod_base = OTHER; note = 2'-O-methyladenosine-3'-phosphate
  modified_base 13: mod_base = OTHER; note = 2'-O-methylcytidine-3'-phosphate
  modified_base 14: mod_base = OTHER; note = 2'-O-methyluridine-3'-phosphate
  modified_base 15: mod_base = OTHER; note = 2'-O-methyluridine-3'-phosphate
  modified_base 16: mod_base = OTHER; note = 2'-O-methylguanosine-3'-phosphate
  modified_base 17: mod_base = OTHER; note = 2'-O-methyluridine-3'-phosphate
  modified_base 18: mod_base = OTHER; note = 2'-O-methyluridine-3'-phosphate
  modified_base 19: mod_base = OTHER; note = 2'-O-methylcytidine-3'-phosphate
  modified_base 20: mod_base = OTHER; note = 2'-O-methylcytidine-3'-phosphate
  modified_base 21: mod_base = OTHER; note = 2'-O-methyladenosine
tgaaccactaaacttgttcca

SEQ ID NO: 3497 - RNA, 21 nt, synthetic construct
  source 1..21: mol_type = other RNA
  modified_base 1: mod_base = OTHER; note = 2'-O-methylguanosine-3'-phosphate
  modified_base 2: mod_base = OTHER; note = 2'-O-methyladenosine-3'-phosphate
  modified_base 3: mod_base = OTHER; note = 2'-O-methyladenosine-3'-phosphate
  modified_base 4: mod_base = OTHER; note = 2'-O-methylcytidine-3'-phosphate
  modified_base 5: mod_base = OTHER; note = 2'-O-methylcytidine-3'-phosphate
  modified_base 6: mod_base = OTHER; note = 2'-O-methyladenosine-3'-phosphate
  modified_base 7: mod_base = OTHER; note = 2'-deoxy-2'-fluorocytidine-3'-phosphate
  modified_base 8: mod_base = OTHER; note = 2'-O-methyluridine-3'-phosphate
  modified_base 9: mod_base = OTHER; note = 2'-deoxy-2'-fluoroadenosine-3'-phosphate
  modified_base 10: mod_base = OTHER; note = 2'-deoxy-2'-fluoroadenosine-3'-phosphate
  modified_base 11: mod_base = OTHER; note = 2'-deoxy-2'-fluoroadenosine-3'-phosphate
  modified_base 12: mod_base = OTHER; note = 2'-O-methylcytidine-3'-phosphate
  modified_base 13: mod_base = OTHER; note = 2'-O-methyluridine-3'-phosphate
  modified_base 14: mod_base = OTHER; note = 2'-O-methyluridine-3'-phosphate
  modified_base 15: mod_base = OTHER; note = 2'-O-methylguanosine-3'-phosphate
  modified_base 16: mod_base = OTHER; note = 2'-O-methyluridine-3'-phosphate
  modified_base 17: mod_base = OTHER; note = 2'-O-methyluridine-3'-phosphate
  modified_base 18: mod_base = OTHER; note = 2'-O-methylcytidine-3'-phosphate
  modified_base 19: mod_base = OTHER; note = 2'-O-methylcytidine-3'-phosphate
  modified_base 20: mod_base = OTHER; note = 2'-O-methyluridine-3'-phosphate
  modified_base 21: mod_base = OTHER; note = 2'-O-methyladenosine
gaaccactaaacttgttccta

SEQ ID NO: 3498 - RNA, 21 nt, synthetic construct
  source 1..21: mol_type = other RNA
  modified_base 1: mod_base = OTHER; note = 2'-O-methyladenosine-3'-phosphate
  modified_base 2: mod_base = OTHER; note = 2'-O-methyladenosine-3'-phosphate
  modified_base 3: mod_base = OTHER; note = 2'-O-methylcytidine-3'-phosphate
  modified_base 4: mod_base = OTHER; note = 2'-O-methylcytidine-3'-phosphate
  modified_base 5: mod_base = OTHER; note = 2'-O-methyladenosine-3'-phosphate
  modified_base 6: mod_base = OTHER; note = 2'-O-methylcytidine-3'-phosphate
  modified_base 7: mod_base = OTHER; note = 2'-deoxy-2'-fluorouridine-3'-phosphate
  modified_base 8: mod_base = OTHER; note = 2'-O-methyladenosine-3'-phosphate
  modified_base 9: mod_base = OTHER; note = 2'-deoxy-2'-fluoroadenosine-3'-phosphate
  modified_base 10: mod_base = OTHER; note = 2'-deoxy-2'-fluoroadenosine-3'-phosphate
  modified_base 11: mod_base = OTHER; note = 2'-deoxy-2'-fluorocytidine-3'-phosphate
  modified_base 12: mod_base = OTHER; note = 2'-O-methyluridine-3'-phosphate
  modified_base 13: mod_base = OTHER; note = 2'-O-methyluridine-3'-phosphate
  modified_base 14: mod_base = OTHER; note = 2'-O-methylguanosine-3'-phosphate
  modified_base 15: mod_base = OTHER; note = 2'-O-methyluridine-3'-phosphate
  modified_base 16: mod_base = OTHER; note = 2'-O-methyluridine-3'-phosphate
  modified_base 17: mod_base = OTHER; note = 2'-O-methylcytidine-3'-phosphate
  modified_base 18: mod_base = OTHER; note = 2'-O-methylcytidine-3'-phosphate
  modified_base 19: mod_base = OTHER; note = 2'-O-methyluridine-3'-phosphate
  modified_base 20: mod_base = OTHER; note = 2'-O-methyluridine-3'-phosphate
  modified_base 21: mod_base = OTHER; note = 2'-O-methyladenosine
aaccactaaacttgttcctta

SEQ ID NO: 3499 - RNA, 21 nt, synthetic construct
  source 1..21: mol_type = other RNA
  modified_base 1: mod_base = OTHER; note = 2'-O-methyladenosine-3'-phosphate
  modified_base 2: mod_base = OTHER; note = 2'-O-methylcytidine-3'-phosphate
  modified_base 3: mod_base = OTHER; note = 2'-O-methylcytidine-3'-phosphate
  modified_base 4: mod_base = OTHER; note = 2'-O-methyladenosine-3'-phosphate
  modified_base 5: mod_base = OTHER; note = 2'-O-methylcytidine-3'-phosphate
  modified_base 6: mod_base = OTHER; note = 2'-O-methyluridine-3'-phosphate
  modified_base 7: mod_base = OTHER; note = 2'-deoxy-2'-fluoroadenosine-3'-phosphate
  modified_base 8: mod_base = OTHER; note = 2'-O-methyladenosine-3'-phosphate
  modified_base 9: mod_base = OTHER; note = 2'-deoxy-2'-fluoroadenosine-3'-phosphate
  modified_base 10: mod_base = OTHER; note = 2'-deoxy-2'-fluorocytidine-3'-phosphate
  modified_base 11: mod_base = OTHER; note = 2'-deoxy-2'-fluorouridine-3'-phosphate
  modified_base 12: mod_base = OTHER; note = 2'-O-methyluridine-3'-phosphate
  modified_base 13: mod_base = OTHER; note = 2'-O-methylguanosine-3'-phosphate
  modified_base 14: mod_base = OTHER; note = 2'-O-methyluridine-3'-phosphate
  modified_base 15: mod_base = OTHER; note = 2'-O-methyluridine-3'-phosphate
  modified_base 16: mod_base = OTHER; note = 2'-O-methylcytidine-3'-phosphate
  modified_base 17: mod_base = OTHER; note = 2'-O-methylcytidine-3'-phosphate
  modified_base 18: mod_base = OTHER; note = 2'-O-methyluridine-3'-phosphate
  modified_base 19: mod_base = OTHER; note = 2'-O-methyluridine-3'-phosphate
  modified_base 20: mod_base = OTHER; note = 2'-O-methyluridine-3'-phosphate
  modified_base 21: mod_base = OTHER; note = 2'-O-methyladenosine
accactaaacttgttccttta

SEQ ID NO: 3500 - RNA, 21 nt, synthetic construct
  source 1..21: mol_type = other RNA
  modified_base 1: mod_base = OTHER; note = 2'-O-methylcytidine-3'-phosphate
  modified_base 2: mod_base = OTHER; note = 2'-O-methylcytidine-3'-phosphate
  modified_base 3: mod_base = OTHER; note = 2'-O-methyladenosine-3'-phosphate
  modified_base 4: mod_base = OTHER; note = 2'-O-methylcytidine-3'-phosphate
  modified_base 5: mod_base = OTHER; note = 2'-O-methyluridine-3'-phosphate
  modified_base 6: mod_base = OTHER; note = 2'-O-methyladenosine-3'-phosphate
  modified_base 7: mod_base = OTHER; note = 2'-deoxy-2'-fluoroadenosine-3'-phosphate
  modified_base 8: mod_base = OTHER; note = 2'-O-methyladenosine-3'-phosphate
  modified_base 9: mod_base = OTHER; note = 2'-deoxy-2'-fluorocytidine-3'-phosphate
  modified_base 10: mod_base = OTHER; note = 2'-deoxy-2'-fluorouridine-3'-phosphate
  modified_base 11: mod_base = OTHER; note = 2'-deoxy-2'-fluorouridine-3'-phosphate
  modified_base 12: mod_base = OTHER; note = 2'-O-methylguanosine-3'-phosphate
  modified_base 13: mod_base = OTHER; note = 2'-O-methyluridine-3'-phosphate
  modified_base 14: mod_base = OTHER; note = 2'-O-methyluridine-3'-phosphate
  modified_base 15: mod_base = OTHER; note = 2'-O-methylcytidine-3'-phosphate
  modified_base 16: mod_base = OTHER; note = 2'-O-methylcytidine-3'-phosphate
  modified_base 17: mod_base = OTHER; note = 2'-O-methyluridine-3'-phosphate
  modified_base 18: mod_base = OTHER; note = 2'-O-methyluridine-3'-phosphate
  modified_base 19: mod_base = OTHER; note = 2'-O-methyluridine-3'-phosphate
  modified_base 20: mod_base = OTHER; note = 2'-O-methylcytidine-3'-phosphate
  modified_base 21: mod_base = OTHER; note = 2'-O-methyladenosine
ccactaaacttgttcctttca

SEQ ID NO: 3501 - RNA, 21 nt, synthetic construct
  source 1..21: mol_type = other RNA
  modified_base 1: mod_base = OTHER; note = 2'-O-methylcytidine-3'-phosphate
  modified_base 2: mod_base = OTHER; note = 2'-O-methyladenosine-3'-phosphate
  modified_base 3: mod_base = OTHER; note = 2'-O-methylcytidine-3'-phosphate
  modified_base 4: mod_base = OTHER; note = 2'-O-methyluridine-3'-phosphate
  modified_base 5: mod_base = OTHER; note = 2'-O-methyladenosine-3'-phosphate
  modified_base 6: mod_base = OTHER; note = 2'-O-methyladenosine-3'-phosphate
  modified_base 7: mod_base = OTHER; note = 2'-deoxy-2'-fluoroadenosine-3'-phosphate
  modified_base 8: mod_base = OTHER; note = 2'-O-methylcytidine-3'-phosphate
  modified_base 9: mod_base = OTHER; note = 2'-deoxy-2'-fluorouridine-3'-phosphate
  modified_base 10: mod_base = OTHER; note = 2'-deoxy-2'-fluorouridine-3'-phosphate
  modified_base 11: mod_base = OTHER; note = 2'-deoxy-2'-fluoroguanosine-3'-phosphate
  modified_base 12: mod_base = OTHER; note = 2'-O-methyluridine-3'-phosphate
  modified_base 13: mod_base = OTHER; note = 2'-O-methyluridine-3'-phosphate
  modified_base 14: mod_base = OTHER; note = 2'-O-methylcytidine-3'-phosphate
  modified_base 15: mod_base = OTHER; note = 2'-O-methylcytidine-3'-phosphate
  modified_base 16: mod_base = OTHER; note = 2'-O-methyluridine-3'-phosphate
  modified_base 17: mod_base = OTHER; note = 2'-O-methyluridine-3'-phosphate
  modified_base 18: mod_base = OTHER; note = 2'-O-methyluridine-3'-phosphate
  modified_base 19: mod_base = OTHER; note = 2'-O-methylcytidine-3'-phosphate
  modified_base 20: mod_base = OTHER; note = 2'-O-methyladenosine-3'-phosphate
  modified_base 21: mod_base = OTHER; note = 2'-O-methyladenosine
cactaaacttgttcctttcaa

SEQ ID NO: 3502 - RNA, 21 nt, synthetic construct
  source 1..21: mol_type = other RNA
  modified_base 1: mod_base = OTHER; note = 2'-O-methyladenosine-3'-phosphate
  modified_base 2: mod_base = OTHER; note = 2'-O-methylcytidine-3'-phosphate
  modified_base 3: mod_base = OTHER; note = 2'-O-methyluridine-3'-phosphate
  modified_base 4: mod_base = OTHER; note = 2'-O-methyladenosine-3'-phosphate
  modified_base 5: mod_base = OTHER; note = 2'-O-methyladenosine-3'-phosphate
  modified_base 6: mod_base = OTHER; note = 2'-O-methyladenosine-3'-phosphate
  modified_base 7: mod_base = OTHER; note = 2'-deoxy-2'-fluorocytidine-3'-phosphate
  modified_base 8: mod_base = OTHER; note = 2'-O-methyluridine-3'-phosphate
  modified_base 9: mod_base = OTHER; note = 2'-deoxy-2'-fluorouridine-3'-phosphate
  modified_base 10: mod_base = OTHER; note = 2'-deoxy-2'-fluoroguanosine-3'-phosphate
  modified_base 11: mod_base = OTHER; note = 2'-deoxy-2'-fluorouridine-3'-phosphate
  modified_base 12: mod_base = OTHER; note = 2'-O-methyluridine-3'-phosphate
  modified_base 13: mod_base = OTHER; note = 2'-O-methylcytidine-3'-phosphate
  modified_base 14: mod_base = OTHER; note = 2'-O-methylcytidine-3'-phosphate
  modified_base 15: mod_base = OTHER; note = 2'-O-methyluridine-3'-phosphate
  modified_base 16: mod_base = OTHER; note = 2'-O-methyluridine-3'-phosphate
  modified_base 17: mod_base = OTHER; note = 2'-O-methyluridine-3'-phosphate
  modified_base 18: mod_base = OTHER; note = 2'-O-methylcytidine-3'-phosphate
  modified_base 19: mod_base = OTHER; note = 2'-O-methyladenosine-3'-phosphate
  modified_base 20: mod_base = OTHER; note = 2'-O-methyluridine-3'-phosphate
  modified_base 21: mod_base = OTHER; note = 2'-O-methyladenosine
actaaacttgttcctttcata

SEQ ID NO: 3503 - RNA, 21 nt, synthetic construct
  source 1..21: mol_type = other RNA
  modified_base 1: mod_base = OTHER; note = 2'-O-methylcytidine-3'-phosphate
  modified_base 2: mod_base = OTHER; note = 2'-O-methyluridine-3'-phosphate
  modified_base 3: mod_base = OTHER; note = 2'-O-methyladenosine-3'-phosphate
  modified_base 4: mod_base = OTHER; note = 2'-O-methyladenosine-3'-phosphate
  modified_base 5: mod_base = OTHER; note = 2'-O-methyladenosine-3'-phosphate
  modified_base 6: mod_base = OTHER; note = 2'-O-methylcytidine-3'-phosphate
  modified_base 7: mod_base = OTHER; note = 2'-deoxy-2'-fluorouridine-3'-phosphate
  modified_base 8: mod_base = OTHER; note = 2'-O-methyluridine-3'-phosphate
  modified_base 9: mod_base = OTHER; note = 2'-deoxy-2'-fluoroguanosine-3'-phosphate
  modified_base 10: mod_base = OTHER; note = 2'-deoxy-2'-fluorouridine-3'-phosphate
  modified_base 11: mod_base = OTHER; note = 2'-deoxy-2'-fluorouridine-3'-phosphate
  modified_base 12: mod_base = OTHER; note = 2'-O-methylcytidine-3'-phosphate
  modified_base 13: mod_base = OTHER; note = 2'-O-methylcytidine-3'-phosphate
  modified_base 14: mod_base = OTHER; note = 2'-O-methyluridine-3'-phosphate
  modified_base 15: mod_base = OTHER; note = 2'-O-methyluridine-3'-phosphate
  modified_base 16: mod_base = OTHER; note = 2'-O-methyluridine-3'-phosphate
  modified_base 17: mod_base = OTHER; note = 2'-O-methylcytidine-3'-phosphate
  modified_base 18: mod_base = OTHER; note = 2'-O-methyladenosine-3'-phosphate
  modified_base 19: mod_base = OTHER; note = 2'-O-methyluridine-3'-phosphate
  modified_base 20: mod_base = OTHER; note = 2'-O-methyluridine-3'-phosphate
  modified_base 21: mod_base = OTHER; note = 2'-O-methyladenosine
ctaaacttgttcctttcatta

SEQ ID NO: 3504 - RNA, 21 nt, synthetic construct
  source 1..21: mol_type = other RNA
  modified_base 1: mod_base = OTHER; note = 2'-O-methyluridine-3'-phosphate
  modified_base 2: mod_base = OTHER; note = 2'-O-methyladenosine-3'-phosphate
  modified_base 3: mod_base = OTHER; note = 2'-O-methyladenosine-3'-phosphate
  modified_base 4: mod_base = OTHER; note = 2'-O-methyladenosine-3'-phosphate
  modified_base 5: mod_base = OTHER; note = 2'-O-methylcytidine-3'-phosphate
  modified_base 6: mod_base = OTHER; note = 2'-O-methyluridine-3'-phosphate
  modified_base 7: mod_base = OTHER; note = 2'-deoxy-2'-fluorouridine-3'-phosphate
  modified_base 8: mod_base = OTHER; note = 2'-O-methylguanosine-3'-phosphate
  modified_base 9: mod_base = OTHER; note = 2'-deoxy-2'-fluorouridine-3'-phosphate
  modified_base 10: mod_base = OTHER; note = 2'-deoxy-2'-fluorouridine-3'-phosphate
  modified_base 11: mod_base = OTHER; note = 2'-deoxy-2'-fluorocytidine-3'-phosphate
  modified_base 12: mod_base = OTHER; note = 2'-O-methylcytidine-3'-phosphate
  modified_base 13: mod_base = OTHER; note = 2'-O-methyluridine-3'-phosphate
  modified_base 14: mod_base = OTHER; note = 2'-O-methyluridine-3'-phosphate
  modified_base 15: mod_base = OTHER; note = 2'-O-methyluridine-3'-phosphate
  modified_base 16: mod_base = OTHER; note = 2'-O-methylcytidine-3'-phosphate
  modified_base 17: mod_base = OTHER; note = 2'-O-methyladenosine-3'-phosphate
  modified_base 18: mod_base = OTHER; note = 2'-O-methyluridine-3'-phosphate
  modified_base 19: mod_base = OTHER; note = 2'-O-methyluridine-3'-phosphate
  modified_base 20: mod_base = OTHER; note = 2'-O-methyluridine-3'-phosphate
  modified_base 21: mod_base = OTHER; note = 2'-O-methyladenosine
taaacttgttcctttcattta

SEQ ID NO: 3505 - RNA, 21 nt, synthetic construct
  source 1..21: mol_type = other RNA
  modified_base 1: mod_base = OTHER; note = 2'-O-methyladenosine-3'-phosphate
  modified_base 2: mod_base = OTHER; note = 2'-O-methyladenosine-3'-phosphate
  modified_base 3: mod_base = OTHER; note = 2'-O-methyladenosine-3'-phosphate
  modified_base 4: mod_base = OTHER; note = 2'-O-methylcytidine-3'-phosphate
  modified_base 5: mod_base = OTHER; note = 2'-O-methyluridine-3'-phosphate
  modified_base 6: mod_base = OTHER; note = 2'-O-methyluridine-3'-phosphate
  modified_base 7: mod_base = OTHER; note = 2'-deoxy-2'-fluoroguanosine-3'-phosphate
  modified_base 8: mod_base = OTHER; note = 2'-O-methyluridine-3'-phosphate
  modified_base 9: mod_base = OTHER; note = 2'-deoxy-2'-fluorouridine-3'-phosphate
  modified_base 10: mod_base = OTHER; note = 2'-deoxy-2'-fluorocytidine-3'-phosphate
  modified_base 11: mod_base = OTHER; note = 2'-deoxy-2'-fluorocytidine-3'-phosphate
  modified_base 12: mod_base = OTHER; note = 2'-O-methyluridine-3'-phosphate
  modified_base 13: mod_base = OTHER; note = 2'-O-methyluridine-3'-phosphate
  modified_base 14: mod_base = OTHER; note = 2'-O-methyluridine-3'-phosphate
  modified_base 15: mod_base = OTHER; note = 2'-O-methylcytidine-3'-phosphate
  modified_base 16: mod_base = OTHER; note = 2'-O-methyladenosine-3'-phosphate
  modified_base 17: mod_base = OTHER; note = 2'-O-methyluridine-3'-phosphate
  modified_base 18: mod_base = OTHER; note = 2'-O-methyluridine-3'-phosphate
  modified_base 19: mod_base = OTHER; note = 2'-O-methyluridine-3'-phosphate
  modified_base 20: mod_base = OTHER; note = 2'-O-methyladenosine-3'-phosphate
  modified_base 21: mod_base = OTHER; note = 2'-O-methyladenosine
aaacttgttcctttcatttaa

SEQ ID NO: 3506 - RNA, 21 nt, synthetic construct
  source 1..21: mol_type = other RNA
  modified_base 1: mod_base = OTHER; note = 2'-O-methyladenosine-3'-phosphate
  modified_base 2: mod_base = OTHER; note = 2'-O-methyladenosine-3'-phosphate
  modified_base 3: mod_base = OTHER; note = 2'-O-methylcytidine-3'-phosphate
  modified_base 4: mod_base = OTHER; note = 2'-O-methyluridine-3'-phosphate
  modified_base 5: mod_base = OTHER; note = 2'-O-methyluridine-3'-phosphate
  modified_base 6: mod_base = OTHER; note = 2'-O-methylguanosine-3'-phosphate
  modified_base 7: mod_base = OTHER; note = 2'-deoxy-2'-fluorouridine-3'-phosphate
  modified_base 8: mod_base = OTHER; note = 2'-O-methyluridine-3'-phosphate
  modified_base 9: mod_base = OTHER; note = 2'-deoxy-2'-fluorocytidine-3'-phosphate
  modified_base 10: mod_base = OTHER; note = 2'-deoxy-2'-fluorocytidine-3'-phosphate
  modified_base 11: mod_base = OTHER; note = 2'-deoxy-2'-fluorouridine-3'-phosphate
  modified_base 12: mod_base = OTHER; note = 2'-O-methyluridine-3'-phosphate
  modified_base 13: mod_base = OTHER; note = 2'-O-methyluridine-3'-phosphate
  modified_base 14: mod_base = OTHER; note = 2'-O-methylcytidine-3'-phosphate
  modified_base 15: mod_base = OTHER; note = 2'-O-methyladenosine-3'-phosphate
  modified_base 16: mod_base = OTHER; note = 2'-O-methyluridine-3'-phosphate
  modified_base 17: mod_base = OTHER; note = 2'-O-methyluridine-3'-phosphate
  modified_base 18: mod_base = OTHER; note = 2'-O-methyluridine-3'-phosphate
  modified_base 19: mod_base = OTHER; note = 2'-O-methyladenosine-3'-phosphate
  modified_base 20: mod_base = OTHER; note = 2'-O-methylcytidine-3'-phosphate
  modified_base 21: mod_base = OTHER; note = 2'-O-methyladenosine
aacttgttcctttcatttaca

SEQ ID NO: 3507 - RNA, 21 nt, synthetic construct
  source 1..21: mol_type = other RNA
  modified_base 1: mod_base = OTHER; note = 2'-O-methyladenosine-3'-phosphate
  modified_base 2: mod_base = OTHER; note = 2'-O-methylcytidine-3'-phosphate
  modified_base 3: mod_base = OTHER; note = 2'-O-methyluridine-3'-phosphate
  modified_base 4: mod_base = OTHER; note = 2'-O-methyluridine-3'-phosphate
  modified_base 5: mod_base = OTHER; note = 2'-O-methylguanosine-3'-phosphate
  modified_base 6: mod_base = OTHER; note = 2'-O-methyluridine-3'-phosphate
  modified_base 7: mod_base = OTHER; note = 2'-deoxy-2'-fluorouridine-3'-phosphate
  modified_base 8: mod_base = OTHER; note = 2'-O-methylcytidine-3'-phosphate
  modified_base 9: mod_base = OTHER; note = 2'-deoxy-2'-fluorocytidine-3'-phosphate
  modified_base 10: mod_base = OTHER; note = 2'-deoxy-2'-fluorouridine-3'-phosphate
  modified_base 11: mod_base = OTHER; note = 2'-deoxy-2'-fluorouridine-3'-phosphate
  modified_base 12: mod_base = OTHER; note = 2'-O-methyluridine-3'-phosphate
  modified_base 13: mod_base = OTHER; note = 2'-O-methylcytidine-3'-phosphate
  modified_base 14: mod_base = OTHER; note = 2'-O-methyladenosine-3'-phosphate
  modified_base 15: mod_base = OTHER; note = 2'-O-methyluridine-3'-phosphate
  modified_base 16: mod_base = OTHER; note = 2'-O-methyluridine-3'-phosphate
  modified_base 17: mod_base = OTHER; note = 2'-O-methyluridine-3'-phosphate
  modified_base 18: mod_base = OTHER; note = 2'-O-methyladenosine-3'-phosphate
  modified_base 19: mod_base = OTHER; note = 2'-O-methylcytidine-3'-phosphate
  modified_base 20: mod_base = OTHER; note = 2'-O-methyladenosine-3'-phosphate
  modified_base 21: mod_base = OTHER; note = 2'-O-methyladenosine
acttgttcctttcatttacaa

SEQ ID NO: 3508 - RNA, 21 nt, synthetic construct
  source 1..21: mol_type = other RNA
  modified_base 1: mod_base = OTHER; note = 2'-O-methylcytidine-3'-phosphate
  modified_base 2: mod_base = OTHER; note = 2'-O-methyluridine-3'-phosphate
  modified_base 3: mod_base = OTHER; note = 2'-O-methyluridine-3'-phosphate
  modified_base 4: mod_base = OTHER; note = 2'-O-methylguanosine-3'-phosphate
  modified_base 5: mod_base = OTHER; note = 2'-O-methyluridine-3'-phosphate
  modified_base 6: mod_base = OTHER; note = 2'-O-methyluridine-3'-phosphate
  modified_base 7: mod_base = OTHER; note = 2'-deoxy-2'-fluorocytidine-3'-phosphate
  modified_base 8: mod_base = OTHER; note = 2'-O-methylcytidine-3'-phosphate
  modified_base 9: mod_base = OTHER; note = 2'-deoxy-2'-fluorouridine-3'-phosphate
  modified_base 10: mod_base = OTHER; note = 2'-deoxy-2'-fluorouridine-3'-phosphate
  modified_base 11: mod_base = OTHER; note = 2'-deoxy-2'-fluorouridine-3'-phosphate
  modified_base 12: mod_base = OTHER; note = 2'-O-methylcytidine-3'-phosphate
  modified_base 13: mod_base = OTHER; note = 2'-O-methyladenosine-3'-phosphate
  modified_base 14: mod_base = OTHER; note = 2'-O-methyluridine-3'-phosphate
  modified_base 15: mod_base = OTHER; note = 2'-O-methyluridine-3'-phosphate
  modified_base 16: mod_base = OTHER; note = 2'-O-methyluridine-3'-phosphate
  modified_base 17: mod_base = OTHER; note = 2'-O-methyladenosine-3'-phosphate
  modified_base 18: mod_base = OTHER; note = 2'-O-methylcytidine-3'-phosphate
  modified_base 19: mod_base = OTHER; note = 2'-O-methyladenosine-3'-phosphate
  modified_base 20: mod_base = OTHER; note = 2'-O-methyladenosine-3'-phosphate
  modified_base 21: mod_base = OTHER; note = 2'-O-methyladenosine
cttgttcctttcatttacaaa

SEQ ID NO: 3509 - RNA, 21 nt, synthetic construct
  source 1..21: mol_type = other RNA
  modified_base 1: mod_base = OTHER; note = 2'-O-methyluridine-3'-phosphate
  modified_base 2: mod_base = OTHER; note = 2'-O-methyluridine-3'-phosphate
  modified_base 3: mod_base = OTHER; note = 2'-O-methylguanosine-3'-phosphate
  modified_base 4: mod_base = OTHER; note = 2'-O-methyluridine-3'-phosphate
  modified_base 5: mod_base = OTHER; note = 2'-O-methyluridine-3'-phosphate
  modified_base 6: mod_base = OTHER; note = 2'-O-methylcytidine-3'-phosphate
  modified_base 7: mod_base = OTHER; note = 2'-deoxy-2'-fluorocytidine-3'-phosphate
  modified_base 8: mod_base = OTHER; note = 2'-O-methyluridine-3'-phosphate
  modified_base 9: mod_base = OTHER; note = 2'-deoxy-2'-fluorouridine-3'-phosphate
  modified_base 10: mod_base = OTHER; note = 2'-deoxy-2'-fluorouridine-3'-phosphate
  modified_base 11: mod_base = OTHER; note = 2'-deoxy-2'-fluorocytidine-3'-phosphate
  modified_base 12: mod_base = OTHER; note = 2'-O-methyladenosine-3'-phosphate
  modified_base 13: mod_base = OTHER; note = 2'-O-methyluridine-3'-phosphate
  modified_base 14: mod_base = OTHER; note = 2'-O-methyluridine-3'-phosphate
  modified_base 15: mod_base = OTHER; note = 2'-O-methyluridine-3'-phosphate
  modified_base 16: mod_base = OTHER; note = 2'-O-methyladenosine-3'-phosphate
  modified_base 17: mod_base = OTHER; note = 2'-O-methylcytidine-3'-phosphate
  modified_base 18: mod_base = OTHER; note = 2'-O-methyladenosine-3'-phosphate
  modified_base 19: mod_base = OTHER; note = 2'-O-methyladenosine-3'-phosphate
  modified_base 20: mod_base = OTHER; note = 2'-O-methyladenosine-3'-phosphate
  modified_base 21: mod_base = OTHER; note = 2'-O-methyladenosine
ttgttcctttcatttacaaaa

SEQ ID NO: 3510 - RNA, 21 nt, synthetic construct
  source 1..21: mol_type = other RNA
  modified_base 1: mod_base = OTHER; note = 2'-O-methyluridine-3'-phosphate
  modified_base 2: mod_base = OTHER; note = 2'-O-methylguanosine-3'-phosphate
  modified_base 3: mod_base = OTHER; note = 2'-O-methyluridine-3'-phosphate
  modified_base 4: mod_base = OTHER; note = 2'-O-methyluridine-3'-phosphate
  modified_base 5: mod_base = OTHER; note = 2'-O-methylcytidine-3'-phosphate
  modified_base 6: mod_base = OTHER; note = 2'-O-methylcytidine-3'-phosphate
  modified_base 7: mod_base = OTHER; note = 2'-deoxy-2'-fluorouridine-3'-phosphate
  modified_base 8: mod_base = OTHER; note = 2'-O-methyluridine-3'-phosphate
  modified_base 9: mod_base = OTHER; note = 2'-deoxy-2'-fluorouridine-3'-phosphate
  modified_base 10: mod_base = OTHER; note = 2'-deoxy-2'-fluorocytidine-3'-phosphate
  modified_base 11: mod_base = OTHER; note = 2'-deoxy-2'-fluoroadenosine-3'-phosphate
  modified_base 12: mod_base = OTHER; note = 2'-O-methyluridine-3'-phosphate
  modified_base 13: mod_base = OTHER; note = 2'-O-methyluridine-3'-phosphate
  modified_base 14: mod_base = OTHER; note = 2'-O-methyluridine-3'-phosphate
  modified_base 15: mod_base = OTHER; note = 2'-O-methyladenosine-3'-phosphate
  modified_base 16: mod_base = OTHER; note = 2'-O-methylcytidine-3'-phosphate
  modified_base 17: mod_base = OTHER; note = 2'-O-methyladenosine-3'-phosphate
  modified_base 18: mod_base = OTHER; note = 2'-O-methyladenosine-3'-phosphate
  modified_base 19: mod_base = OTHER; note = 2'-O-methyladenosine-3'-phosphate
  modified_base 20: mod_base = OTHER; note = 2'-O-methyladenosine-3'-phosphate
  modified_base 21: mod_base = OTHER; note = 2'-O-methyladenosine
tgttcctttcatttacaaaaa

SEQ ID NO: 3511 - RNA, 21 nt, synthetic construct
  source 1..21: mol_type = other RNA
  modified_base 1: mod_base = OTHER; note = 2'-O-methylguanosine-3'-phosphate
  modified_base 2: mod_base = OTHER; note = 2'-O-methyluridine-3'-phosphate
  modified_base 3: mod_base = OTHER; note = 2'-O-methyluridine-3'-phosphate
  modified_base 4: mod_base = OTHER; note = 2'-O-methylcytidine-3'-phosphate
  modified_base 5: mod_base = OTHER; note = 2'-O-methylcytidine-3'-phosphate
  modified_base 6: mod_base = OTHER; note = 2'-O-methyluridine-3'-phosphate
  modified_base 7: mod_base = OTHER; note = 2'-deoxy-2'-fluorouridine-3'-phosphate
  modified_base 8: mod_base = OTHER; note = 2'-O-methyluridine-3'-phosphate
  modified_base 9: mod_base = OTHER; note = 2'-deoxy-2'-fluorocytidine-3'-phosphate
  modified_base 10: mod_base = OTHER; note = 2'-deoxy-2'-fluoroadenosine-3'-phosphate
  modified_base 11: mod_base = OTHER; note = 2'-deoxy-2'-fluorouridine-3'-phosphate
  modified_base 12: mod_base = OTHER; note = 2'-O-methyluridine-3'-phosphate
  modified_base 13: mod_base = OTHER; note = 2'-O-methyluridine-3'-phosphate
  modified_base 14: mod_base = OTHER; note = 2'-O-methyladenosine-3'-phosphate
  modified_base 15: mod_base = OTHER; note = 2'-O-methylcytidine-3'-phosphate
  modified_base 16: mod_base = OTHER; note = 2'-O-methyladenosine-3'-phosphate
  modified_base 17: mod_base = OTHER; note = 2'-O-methyladenosine-3'-phosphate
  modified_base 18: mod_base = OTHER; note = 2'-O-methyladenosine-3'-phosphate
  modified_base 19: mod_base = OTHER; note = 2'-O-methyladenosine-3'-phosphate
  modified_base 20: mod_base = OTHER; note = 2'-O-methylguanosine-3'-phosphate
  modified_base 21: mod_base = OTHER; note = 2'-O-methyladenosine
gttcctttcatttacaaaaga

SEQ ID NO: 3512 - RNA, 21 nt, synthetic construct
  source 1..21: mol_type = other RNA
  modified_base 1: mod_base = OTHER; note = 2'-O-methyluridine-3'-phosphate
  modified_base 2: mod_base = OTHER; note = 2'-O-methyluridine-3'-phosphate
  modified_base 3: mod_base = OTHER; note = 2'-O-methylcytidine-3'-phosphate
  modified_base 4: mod_base = OTHER; note = 2'-O-methylcytidine-3'-phosphate
  modified_base 5: mod_base = OTHER; note = 2'-O-methyluridine-3'-phosphate
  modified_base 6: mod_base = OTHER; note = 2'-O-methyluridine-3'-phosphate
  modified_base 7: mod_base = OTHER; note = 2'-deoxy-2'-fluorouridine-3'-phosphate
  modified_base 8: mod_base = OTHER; note = 2'-O-methylcytidine-3'-phosphate
  modified_base 9: mod_base = OTHER; note = 2'-deoxy-2'-fluoroadenosine-3'-phosphate
  modified_base 10: mod_base = OTHER; note = 2'-deoxy-2'-fluorouridine-3'-phosphate
  modified_base 11: mod_base = OTHER; note = 2'-deoxy-2'-fluorouridine-3'-phosphate
  modified_base 12: mod_base = OTHER; note = 2'-O-methyluridine-3'-phosphate
  modified_base 13: mod_base = OTHER; note = 2'-O-methyladenosine-3'-phosphate
  modified_base 14: mod_base = OTHER; note = 2'-O-methylcytidine-3'-phosphate
  modified_base 15: mod_base = OTHER; note = 2'-O-methyladenosine-3'-phosphate
  modified_base 16: mod_base = OTHER; note = 2'-O-methyladenosine-3'-phosphate
  modified_base 17: mod_base = OTHER; note = 2'-O-methyladenosine-3'-phosphate
  modified_base 18: mod_base = OTHER; note = 2'-O-methyladenosine-3'-phosphate
  modified_base 19: mod_base = OTHER; note = 2'-O-methylguanosine-3'-phosphate
  modified_base 20: mod_base = OTHER; note = 2'-O-methyladenosine-3'-phosphate
  modified_base 21: mod_base = OTHER; note = 2'-O-methyladenosine
ttcctttcatttacaaaagaa

SEQ ID NO: 3513 - RNA, 21 nt, synthetic construct
  source 1..21: mol_type = other RNA
  modified_base 1: mod_base = OTHER; note = 2'-O-methyluridine-3'-phosphate
  modified_base 2: mod_base = OTHER; note = 2'-O-methylcytidine-3'-phosphate
  modified_base 3: mod_base = OTHER; note = 2'-O-methylcytidine-3'-phosphate
  modified_base 4: mod_base = OTHER; note = 2'-O-methyluridine-3'-phosphate
  modified_base 5: mod_base = OTHER; note = 2'-O-methyluridine-3'-phosphate
  modified_base 6: mod_base = OTHER; note = 2'-O-methyluridine-3'-phosphate
  modified_base 7: mod_base = OTHER; note = 2'-deoxy-2'-fluorocytidine-3'-phosphate
  modified_base 8: mod_base = OTHER; note = 2'-O-methyladenosine-3'-phosphate
  modified_base 9: mod_base = OTHER; note = 2'-deoxy-2'-fluorouridine-3'-phosphate
  modified_base 10: mod_base = OTHER; note = 2'-deoxy-2'-fluorouridine-3'-phosphate
  modified_base 11: mod_base = OTHER; note = 2'-deoxy-2'-fluorouridine-3'-phosphate
  modified_base 12: mod_base = OTHER; note = 2'-O-methyladenosine-3'-phosphate
  modified_base 13: mod_base = OTHER; note = 2'-O-methylcytidine-3'-phosphate
  modified_base 14: mod_base = OTHER; note = 2'-O-methyladenosine-3'-phosphate
  modified_base 15: mod_base = OTHER; note = 2'-O-methyladenosine-3'-phosphate
  modified_base 16: mod_base = OTHER; note = 2'-O-methyladenosine-3'-phosphate
  modified_base 17: mod_base = OTHER; note = 2'-O-methyladenosine-3'-phosphate
  modified_base 18: mod_base = OTHER; note = 2'-O-methylguanosine-3'-phosphate
  modified_base 19: mod_base = OTHER; note = 2'-O-methyladenosine-3'-phosphate
  modified_base 20: mod_base = OTHER; note = 2'-O-methylguanosine-3'-phosphate
  modified_base 21: mod_base = OTHER; note = 2'-O-methyladenosine
tcctttcatttacaaaagaga

SEQ ID NO: 3514 - RNA, 21 nt, synthetic construct
  source 1..21: mol_type = other RNA
  modified_base 1: mod_base = OTHER; note = 2'-O-methylcytidine-3'-phosphate
  modified_base 2: mod_base = OTHER; note = 2'-O-methylcytidine-3'-phosphate
  modified_base 3: mod_base = OTHER; note = 2'-O-methyluridine-3'-phosphate
  modified_base 4: mod_base = OTHER; note = 2'-O-methyluridine-3'-phosphate
  modified_base 5: mod_base = OTHER; note = 2'-O-methyluridine-3'-phosphate
  modified_base 6: mod_base = OTHER; note = 2'-O-methylcytidine-3'-phosphate
  modified_base 7: mod_base = OTHER; note = 2'-deoxy-2'-fluoroadenosine-3'-phosphate
  modified_base 8: mod_base = OTHER; note = 2'-O-methyluridine-3'-phosphate
  modified_base 9: mod_base = OTHER; note = 2'-deoxy-2'-fluorouridine-3'-phosphate
  modified_base 10: mod_base = OTHER; note = 2'-deoxy-2'-fluorouridine-3'-phosphate
  modified_base 11: mod_base = OTHER; note = 2'-deoxy-2'-fluoroadenosine-3'-phosphate
  modified_base 12: mod_base = OTHER; note = 2'-O-methylcytidine-3'-phosphate
  modified_base 13: mod_base = OTHER; note = 2'-O-methyladenosine-3'-phosphate
  modified_base 14: mod_base = OTHER; note = 2'-O-methyladenosine-3'-phosphate
  modified_base 15: mod_base = OTHER; note = 2'-O-methyladenosine-3'-phosphate
  modified_base 16: mod_base = OTHER; note = 2'-O-methyladenosine-3'-phosphate
  modified_base 17: mod_base = OTHER; note = 2'-O-methylguanosine-3'-phosphate
  modified_base 18: mod_base = OTHER; note = 2'-O-methyladenosine-3'-phosphate
  modified_base 19: mod_base = OTHER; note = 2'-O-methylguanosine-3'-phosphate
  modified_base 20: mod_base = OTHER; note = 2'-O-methyladenosine-3'-phosphate
  modified_base 21: mod_base = OTHER; note = 2'-O-methyladenosine
cctttcatttacaaaagagaa

SEQ ID NO: 3515 - RNA, 21 nt, synthetic construct
  source 1..21: mol_type = other RNA
  modified_base 1: mod_base = OTHER; note = 2'-O-methylcytidine-3'-phosphate
  modified_base 2: mod_base = OTHER; note = 2'-O-methyluridine-3'-phosphate
  modified_base 3: mod_base = OTHER; note = 2'-O-methyluridine-3'-phosphate
  modified_base 4: mod_base = OTHER; note = 2'-O-methyluridine-3'-phosphate
  modified_base 5: mod_base = OTHER; note = 2'-O-methylcytidine-3'-phosphate
  modified_base 6: mod_base = OTHER; note = 2'-O-methyladenosine-3'-phosphate
  modified_base 7: mod_base = OTHER; note = 2'-deoxy-2'-fluorouridine-3'-phosphate
  modified_base 8: mod_base = OTHER; note = 2'-O-methyluridine-3'-phosphate
  modified_base 9: mod_base = OTHER; note = 2'-deoxy-2'-fluorouridine-3'-phosphate
  modified_base 10: mod_base = OTHER; note = 2'-deoxy-2'-fluoroadenosine-3'-phosphate
  modified_base 11: mod_base = OTHER; note = 2'-deoxy-2'-fluorocytidine-3'-phosphate
  modified_base 12: mod_base = OTHER; note = 2'-O-methyladenosine-3'-phosphate
  modified_base 13: mod_base = OTHER; note = 2'-O-methyladenosine-3'-phosphate
  modified_base 14: mod_base = OTHER; note = 2'-O-methyladenosine-3'-phosphate
  modified_base 15: mod_base = OTHER; note = 2'-O-methyladenosine-3'-phosphate
  modified_base 16: mod_base = OTHER; note = 2'-O-methylguanosine-3'-phosphate
  modified_base 17: mod_base = OTHER; note = 2'-O-methyladenosine-3'-phosphate
  modified_base 18: mod_base = OTHER; note = 2'-O-methylguanosine-3'-phosphate
  modified_base 19: mod_base = OTHER; note = 2'-O-methyladenosine-3'-phosphate
  modified_base 20: mod_base = OTHER; note = 2'-O-methyluridine-3'-phosphate
  modified_base 21: mod_base = OTHER; note = 2'-O-methyladenosine
ctttcatttacaaaagagata

SEQ ID NO: 3516 - RNA, 21 nt, synthetic construct
  source 1..21: mol_type = other RNA
  modified_base 1: mod_base = OTHER; note = 2'-O-methyluridine-3'-phosphate
  modified_base 2: mod_base = OTHER; note = 2'-O-methyluridine-3'-phosphate
  modified_base 3: mod_base = OTHER; note = 2'-O-methyluridine-3'-phosphate
  modified_base 4: mod_base = OTHER; note = 2'-O-methylcytidine-3'-phosphate
  modified_base 5: mod_base = OTHER; note = 2'-O-methyladenosine-3'-phosphate
  modified_base 6: mod_base = OTHER; note = 2'-O-methyluridine-3'-phosphate
  modified_base 7: mod_base = OTHER; note = 2'-deoxy-2'-fluorouridine-3'-phosphate
  modified_base 8: mod_base = OTHER; note = 2'-O-methyluridine-3'-phosphate
  modified_base 9: mod_base = OTHER; note = 2'-deoxy-2'-fluoroadenosine-3'-phosphate
  modified_base 10: mod_base = OTHER; note = 2'-deoxy-2'-fluorocytidine-3'-phosphate
  modified_base 11: mod_base = OTHER; note = 2'-deoxy-2'-fluoroadenosine-3'-phosphate
  modified_base 12: mod_base = OTHER; note = 2'-O-methyladenosine-3'-phosphate
  modified_base 13: mod_base = OTHER; note = 2'-O-methyladenosine-3'-phosphate
  modified_base 14: mod_base = OTHER; note = 2'-O-methyladenosine-3'-phosphate
  modified_base 15: mod_base = OTHER; note = 2'-O-methylguanosine-3'-phosphate
  modified_base 16: mod_base = OTHER; note = 2'-O-methyladenosine-3'-phosphate
  modified_base 17: mod_base = OTHER; note = 2'-O-methylguanosine-3'-phosphate
  modified_base 18: mod_base = OTHER; note = 2'-O-methyladenosine-3'-phosphate
  modified_base 19: mod_base = OTHER; note = 2'-O-methyluridine-3'-phosphate
  modified_base 20: mod_base = OTHER; note = 2'-O-methyladenosine-3'-phosphate
  modified_base 21: mod_base = OTHER; note = 2'-O-methyladenosine
tttcatttacaaaagagataa

SEQ ID NO: 3517 - RNA, 21 nt, synthetic construct
  source 1..21: mol_type = other RNA
  modified_base 1: mod_base = OTHER; note = 2'-O-methyluridine-3'-phosphate
  modified_base 2: mod_base = OTHER; note = 2'-O-methyluridine-3'-phosphate
  modified_base 3: mod_base = OTHER; note = 2'-O-methylcytidine-3'-phosphate
  modified_base 4: mod_base = OTHER; note = 2'-O-methyladenosine-3'-phosphate
  modified_base 5: mod_base = OTHER; note = 2'-O-methyluridine-3'-phosphate
  modified_base 6: mod_base = OTHER; note = 2'-O-methyluridine-3'-phosphate
  modified_base 7: mod_base = OTHER; note = 2'-deoxy-2'-fluorouridine-3'-phosphate
  modified_base 8: mod_base = OTHER; note = 2'-O-methyladenosine-3'-phosphate
  modified_base 9: mod_base = OTHER; note = 2'-deoxy-2'-fluorocytidine-3'-phosphate
  modified_base 10: mod_base = OTHER; note = 2'-deoxy-2'-fluoroadenosine-3'-phosphate
  modified_base 11: mod_base = OTHER; note = 2'-deoxy-2'-fluoroadenosine-3'-phosphate
  modified_base 12: mod_base = OTHER; note = 2'-O-methyladenosine-3'-phosphate
  modified_base 13: mod_base = OTHER; note = 2'-O-methyladenosine-3'-phosphate
  modified_base 14: mod_base = OTHER; note = 2'-O-methylguanosine-3'-phosphate
  modified_base 15: mod_base = OTHER; note = 2'-O-methyladenosine-3'-phosphate
  modified_base 16: mod_base = OTHER; note = 2'-O-methylguanosine-3'-phosphate
  modified_base 17: mod_base = OTHER; note = 2'-O-methyladenosine-3'-phosphate
  modified_base 18: mod_base = OTHER; note = 2'-O-methyluridine-3'-phosphate
  modified_base 19: mod_base = OTHER; note = 2'-O-methyladenosine-3'-phosphate
  modified_base 20: mod_base = OTHER; note = 2'-O-methylcytidine-3'-phosphate
  modified_base 21: mod_base = OTHER; note = 2'-O-methyladenosine
ttcatttacaaaagagataca

SEQ ID NO: 3518 - RNA, 21 nt, synthetic construct
  source 1..21: mol_type = other RNA
  modified_base 1: mod_base = OTHER; note = 2'-O-methyluridine-3'-phosphate
  modified_base 2: mod_base = OTHER; note = 2'-O-methylcytidine-3'-phosphate
  modified_base 3: mod_base = OTHER; note = 2'-O-methyladenosine-3'-phosphate
  modified_base 4: mod_base = OTHER; note = 2'-O-methyluridine-3'-phosphate
  modified_base 5: mod_base = OTHER; note = 2'-O-methyluridine-3'-phosphate
  modified_base 6: mod_base = OTHER; note = 2'-O-methyluridine-3'-phosphate
  modified_base 7: mod_base = OTHER; note = 2'-deoxy-2'-fluoroadenosine-3'-phosphate
  modified_base 8: mod_base = OTHER; note = 2'-O-methylcytidine-3'-phosphate
  modified_base 9: mod_base = OTHER; note = 2'-deoxy-2'-fluoroadenosine-3'-phosphate
  modified_base 10: mod_base = OTHER; note = 2'-deoxy-2'-fluoroadenosine-3'-phosphate
  modified_base 11: mod_base = OTHER; note = 2'-deoxy-2'-fluoroadenosine-3'-phosphate
  modified_base 12: mod_base = OTHER; note = 2'-O-methyladenosine-3'-phosphate
  modified_base 13: mod_base = OTHER; note = 2'-O-methylguanosine-3'-phosphate
  modified_base 14: mod_base = OTHER; note = 2'-O-methyladenosine-3'-phosphate
  modified_base 15: mod_base = OTHER; note = 2'-O-methylguanosine-3'-phosphate
  modified_base 16: mod_base = OTHER; note = 2'-O-methyladenosine-3'-phosphate
  modified_base 17: mod_base = OTHER; note = 2'-O-methyluridine-3'-phosphate
  modified_base 18: mod_base = OTHER; note = 2'-O-methyladenosine-3'-phosphate
  modified_base 19: mod_base = OTHER; note = 2'-O-methylcytidine-3'-phosphate
  modified_base 20: mod_base = OTHER; note = 2'-O-methylcytidine-3'-phosphate
  modified_base 21: mod_base = OTHER; note = 2'-O-methyladenosine
tcatttacaaaagagatacca

SEQ ID NO: 3519 - RNA, 21 nt, synthetic construct
  source 1..21: mol_type = other RNA
  modified_base 1: mod_base = OTHER; note = 2'-O-methylcytidine-3'-phosphate
  modified_base 2: mod_base = OTHER; note = 2'-O-methyladenosine-3'-phosphate
  modified_base 3: mod_base = OTHER; note = 2'-O-methyluridine-3'-phosphate
  modified_base 4: mod_base = OTHER; note = 2'-O-methyluridine-3'-phosphate
  modified_base 5: mod_base = OTHER; note = 2'-O-methyluridine-3'-phosphate
  modified_base 6: mod_base = OTHER; note = 2'-O-methyladenosine-3'-phosphate
  modified_base 7: mod_base = OTHER; note = 2'-deoxy-2'-fluorocytidine-3'-phosphate
  modified_base 8: mod_base = OTHER; note = 2'-O-methyladenosine-3'-phosphate
  modified_base 9: mod_base = OTHER; note = 2'-deoxy-2'-fluoroadenosine-3'-phosphate
  modified_base 10: mod_base = OTHER; note = 2'-deoxy-2'-fluoroadenosine-3'-phosphate
  modified_base 11: mod_base = OTHER; note = 2'-deoxy-2'-fluoroadenosine-3'-phosphate
  modified_base 12: mod_base = OTHER; note = 2'-O-methylguanosine-3'-phosphate
  modified_base 13: mod_base = OTHER; note = 2'-O-methyladenosine-3'-phosphate
  modified_base 14: mod_base = OTHER; note = 2'-O-methylguanosine-3'-phosphate
  modified_base 15: mod_base = OTHER; note = 2'-O-methyladenosine-3'-phosphate
  modified_base 16: mod_base = OTHER; note = 2'-O-methyluridine-3'-phosphate
  modified_base 17: mod_base = OTHER; note = 2'-O-methyladenosine-3'-phosphate
  modified_base 18: mod_base = OTHER; note = 2'-O-methylcytidine-3'-phosphate
  modified_base 19: mod_base = OTHER; note = 2'-O-methylcytidine-3'-phosphate
  modified_base 20: mod_base = OTHER; note = 2'-O-methyluridine-3'-phosphate
  modified_base 21: mod_base = OTHER; note = 2'-O-methyladenosine
catttacaaaagagataccta

SEQ ID NO: 3520 - RNA, 21 nt, synthetic construct
  source 1..21: mol_type = other RNA
  modified_base 1: mod_base = OTHER; note = 2'-O-methyladenosine-3'-phosphate
  modified_base 2: mod_base = OTHER; note = 2'-O-methyluridine-3'-phosphate
  modified_base 3: mod_base = OTHER; note = 2'-O-methyluridine-3'-phosphate
  modified_base 4: mod_base = OTHER; note = 2'-O-methyluridine-3'-phosphate
  modified_base 5: mod_base = OTHER; note = 2'-O-methyladenosine-3'-phosphate
  modified_base 6: mod_base = OTHER; note = 2'-O-methylcytidine-3'-phosphate
  modified_base 7: mod_base = OTHER; note = 2'-deoxy-2'-fluoroadenosine-3'-phosphate
  modified_base 8: mod_base = OTHER; note = 2'-O-methyladenosine-3'-phosphate
  modified_base 9: mod_base = OTHER; note = 2'-deoxy-2'-fluoroadenosine-3'-phosphate
  modified_base 10: mod_base = OTHER; note = 2'-deoxy-2'-fluoroadenosine-3'-phosphate
  modified_base 11: mod_base = OTHER; note = 2'-deoxy-2'-fluoroguanosine-3'-phosphate
  modified_base 12: mod_base = OTHER; note = 2'-O-methyladenosine-3'-phosphate
  modified_base 13: mod_base = OTHER; note = 2'-O-methylguanosine-3'-phosphate
  modified_base 14: mod_base = OTHER; note = 2'-O-methyladenosine-3'-phosphate
  modified_base 15: mod_base = OTHER; note = 2'-O-methyluridine-3'-phosphate
  modified_base 16: mod_base = OTHER; note = 2'-O-methyladenosine-3'-phosphate
  modified_base 17: mod_base = OTHER; note = 2'-O-methylcytidine-3'-phosphate
  modified_base 18: mod_base = OTHER; note = 2'-O-methylcytidine-3'-phosphate
  modified_base 19: mod_base = OTHER; note = 2'-O-methyluridine-3'-phosphate
  modified_base 20: mod_base = OTHER; note = 2'-O-methylguanosine-3'-phosphate
  modified_base 21: mod_base = OTHER; note = 2'-O-methyladenosine
atttacaaaagagatacctga

SEQ ID NO: 3521 - RNA, 21 nt, synthetic construct
  source 1..21: mol_type = other RNA
  modified_base 1: mod_base = OTHER; note = 2'-O-methyluridine-3'-phosphate
  modified_base 2: mod_base = OTHER; note = 2'-O-methyluridine-3'-phosphate
  modified_base 3: mod_base = OTHER; note = 2'-O-methyluridine-3'-phosphate
  modified_base 4: mod_base = OTHER; note = 2'-O-methyladenosine-3'-phosphate
  modified_base 5: mod_base = OTHER; note = 2'-O-methylcytidine-3'-phosphate
  modified_base 6: mod_base = OTHER; note = 2'-O-methyladenosine-3'-phosphate
  modified_base 7: mod_base = OTHER; note = 2'-deoxy-2'-fluoroadenosine-3'-phosphate
  modified_base 8: mod_base = OTHER; note = 2'-O-methyladenosine-3'-phosphate
  modified_base 9: mod_base = OTHER; note = 2'-deoxy-2'-fluoroadenosine-3'-phosphate
  modified_base 10: mod_base = OTHER; note = 2'-deoxy-2'-fluoroguanosine-3'-phosphate
  modified_base 11: mod_base = OTHER; note = 2'-deoxy-2'-fluoroadenosine-3'-phosphate
  modified_base 12: mod_base = OTHER; note = 2'-O-methylguanosine-3'-phosphate
  modified_base 13: mod_base = OTHER; note = 2'-O-methyladenosine-3'-phosphate
  modified_base 14: mod_base = OTHER; note = 2'-O-methyluridine-3'-phosphate
  modified_base 15: mod_base = OTHER; note = 2'-O-methyladenosine-3'-phosphate
  modified_base 16: mod_base = OTHER; note = 2'-O-methylcytidine-3'-phosphate
  modified_base 17: mod_base = OTHER; note = 2'-O-methylcytidine-3'-phosphate
  modified_base 18: mod_base = OTHER; note = 2'-O-methyluridine-3'-phosphate
  modified_base 19: mod_base = OTHER; note = 2'-O-methylguanosine-3'-phosphate
  modified_base 20: mod_base = OTHER; note = 2'-O-methyladenosine-3'-phosphate
  modified_base 21: mod_base = OTHER; note = 2'-O-methyladenosine
tttacaaaagagatacctgaa

SEQ ID NO: 3522 - RNA, 21 nt, synthetic construct
  source 1..21: mol_type = other RNA
  modified_base 1: mod_base = OTHER; note = 2'-O-methyluridine-3'-phosphate
  modified_base 2: mod_base = OTHER; note = 2'-O-methyluridine-3'-phosphate
  modified_base 3: mod_base = OTHER; note = 2'-O-methyladenosine-3'-phosphate
  modified_base 4: mod_base = OTHER; note = 2'-O-methylcytidine-3'-phosphate
  modified_base 5: mod_base = OTHER; note = 2'-O-methyladenosine-3'-phosphate
  modified_base 6: mod_base = OTHER; note = 2'-O-methyladenosine-3'-phosphate
  modified_base 7: mod_base = OTHER; note = 2'-deoxy-2'-fluoroadenosine-3'-phosphate
  modified_base 8: mod_base = OTHER; note = 2'-O-methyladenosine-3'-phosphate
  modified_base 9: mod_base = OTHER; note = 2'-deoxy-2'-fluoroguanosine-3'-phosphate
  modified_base 10: mod_base = OTHER; note = 2'-deoxy-2'-fluoroadenosine-3'-phosphate
  modified_base 11: mod_base = OTHER; note = 2'-deoxy-2'-fluoroguanosine-3'-phosphate
  modified_base 12: mod_base = OTHER; note = 2'-O-methyladenosine-3'-phosphate
  modified_base 13: mod_base = OTHER; note = 2'-O-methyluridine-3'-phosphate
  modified_base 14: mod_base = OTHER; note = 2'-O-methyladenosine-3'-phosphate
  modified_base 15: mod_base = OTHER; note = 2'-O-methylcytidine-3'-phosphate
  modified_base 16: mod_base = OTHER; note = 2'-O-methylcytidine-3'-phosphate
  modified_base 17: mod_base = OTHER; note = 2'-O-methyluridine-3'-phosphate
  modified_base 18: mod_base = OTHER; note = 2'-O-methylguanosine-3'-phosphate
  modified_base 19: mod_base = OTHER; note = 2'-O-methyladenosine-3'-phosphate
  modified_base 20: mod_base = OTHER; note = 2'-O-methylcytidine-3'-phosphate
  modified_base 21: mod_base = OTHER; note = 2'-O-methyladenosine
ttacaaaagagatacctgaca

SEQ ID NO: 3523 - RNA, 21 nt, synthetic construct
  source 1..21: mol_type = other RNA
  modified_base 1: mod_base = OTHER; note = 2'-O-methyluridine-3'-phosphate
  modified_base 2: mod_base = OTHER; note = 2'-O-methyladenosine-3'-phosphate
  modified_base 3: mod_base = OTHER; note = 2'-O-methylcytidine-3'-phosphate
  modified_base 4: mod_base = OTHER; note = 2'-O-methyladenosine-3'-phosphate
  modified_base 5: mod_base = OTHER; note = 2'-O-methyladenosine-3'-phosphate
  modified_base 6: mod_base = OTHER; note = 2'-O-methyladenosine-3'-phosphate
  modified_base 7: mod_base = OTHER; note = 2'-deoxy-2'-fluoroadenosine-3'-phosphate
  modified_base 8: mod_base = OTHER; note = 2'-O-methylguanosine-3'-phosphate
  modified_base 9: mod_base = OTHER; note = 2'-deoxy-2'-fluoroadenosine-3'-phosphate
  modified_base 10: mod_base = OTHER; note = 2'-deoxy-2'-fluoroguanosine-3'-phosphate
  modified_base 11: mod_base = OTHER; note = 2'-deoxy-2'-fluoroadenosine-3'-phosphate
  modified_base 12: mod_base = OTHER; note = 2'-O-methyluridine-3'-phosphate
  modified_base 13: mod_base = OTHER; note = 2'-O-methyladenosine-3'-phosphate
  modified_base 14: mod_base = OTHER; note = 2'-O-methylcytidine-3'-phosphate
  modified_base 15: mod_base = OTHER; note = 2'-O-methylcytidine-3'-phosphate
  modified_base 16: mod_base = OTHER; note = 2'-O-methyluridine-3'-phosphate
  modified_base 17: mod_base = OTHER; note = 2'-O-methylguanosine-3'-phosphate
  modified_base 18: mod_base = OTHER; note = 2'-O-methyladenosine-3'-phosphate
  modified_base 19: mod_base = OTHER; note = 2'-O-methylcytidine-3'-phosphate
  modified_base 20: mod_base = OTHER; note = 2'-O-methyladenosine-3'-phosphate
  modified_base 21: mod_base = OTHER; note = 2'-O-methyladenosine
tacaaaagagatacctgacaa

SEQ ID NO: 3524 - RNA, 21 nt, synthetic construct
  source 1..21: mol_type = other RNA
  modified_base 1: mod_base = OTHER; note = 2'-O-methyladenosine-3'-phosphate
  modified_base 2: mod_base = OTHER; note = 2'-O-methylcytidine-3'-phosphate
  modified_base 3: mod_base = OTHER; note = 2'-O-methyladenosine-3'-phosphate
  modified_base 4: mod_base = OTHER; note = 2'-O-methyladenosine-3'-phosphate
  modified_base 5: mod_base = OTHER; note = 2'-O-methyladenosine-3'-phosphate
  modified_base 6: mod_base = OTHER; note = 2'-O-methyladenosine-3'-phosphate
  modified_base 7: mod_base = OTHER; note = 2'-deoxy-2'-fluoroguanosine-3'-phosphate
  modified_base 8: mod_base = OTHER; note = 2'-O-methyladenosine-3'-phosphate
  modified_base 9: mod_base = OTHER; note = 2'-deoxy-2'-fluoroguanosine-3'-phosphate
  modified_base 10: mod_base = OTHER; note = 2'-deoxy-2'-fluoroadenosine-3'-phosphate
  modified_base 11: mod_base = OTHER; note = 2'-deoxy-2'-fluorouridine-3'-phosphate
  modified_base 12: mod_base = OTHER; note = 2'-O-methyladenosine-3'-phosphate
  modified_base 13: mod_base = OTHER; note = 2'-O-methylcytidine-3'-phosphate
  modified_base 14: mod_base = OTHER; note = 2'-O-methylcytidine-3'-phosphate
  modified_base 15: mod_base = OTHER; note = 2'-O-methyluridine-3'-phosphate
  modified_base 16: mod_base = OTHER; note = 2'-O-methylguanosine-3'-phosphate
  modified_base 17: mod_base = OTHER; note = 2'-O-methyladenosine-3'-phosphate
  modified_base 18: mod_base = OTHER; note = 2'-O-methylcytidine-3'-phosphate
  modified_base 19: mod_base = OTHER; note = 2'-O-methyladenosine-3'-phosphate
  modified_base 20: mod_base = OTHER; note = 2'-O-methyluridine-3'-phosphate
  modified_base 21: mod_base = OTHER; note = 2'-O-methyladenosine
acaaaagagatacctgacata

SEQ ID NO: 3525 - RNA, 21 nt, synthetic construct
  source 1..21: mol_type = other RNA
  modified_base 1: mod_base = OTHER; note = 2'-O-methylcytidine-3'-phosphate
  modified_base 2: mod_base = OTHER; note = 2'-O-methyladenosine-3'-phosphate
  modified_base 3: mod_base = OTHER; note = 2'-O-methyladenosine-3'-phosphate
  modified_base 4: mod_base = OTHER; note = 2'-O-methyladenosine-3'-phosphate
  modified_base 5: mod_base = OTHER; note = 2'-O-methyladenosine-3'-phosphate
  modified_base 6: mod_base = OTHER; note = 2'-O-methylguanosine-3'-phosphate
  modified_base 7: mod_base = OTHER; note = 2'-deoxy-2'-fluoroadenosine-3'-phosphate
  modified_base 8: mod_base = OTHER; note = 2'-O-methylguanosine-3'-phosphate
  modified_base 9: mod_base = OTHER; note = 2'-deoxy-2'-fluoroadenosine-3'-phosphate
  modified_base 10: mod_base = OTHER; note = 2'-deoxy-2'-fluorouridine-3'-phosphate
  modified_base 11: mod_base = OTHER; note = 2'-deoxy-2'-fluoroadenosine-3'-phosphate
  modified_base 12: mod_base = OTHER; note = 2'-O-methylcytidine-3'-phosphate
  modified_base 13: mod_base = OTHER; note = 2'-O-methylcytidine-3'-phosphate
  modified_base 14: mod_base = OTHER; note = 2'-O-methyluridine-3'-phosphate
  modified_base 15: mod_base = OTHER; note = 2'-O-methylguanosine-3'-phosphate
  modified_base 16: mod_base = OTHER; note = 2'-O-methyladenosine-3'-phosphate
  modified_base 17: mod_base = OTHER; note = 2'-O-methylcytidine-3'-phosphate
  modified_base 18: mod_base = OTHER; note = 2'-O-methyladenosine-3'-phosphate
  modified_base 19: mod_base = OTHER; note = 2'-O-methyluridine-3'-phosphate
  modified_base 20: mod_base = OTHER; note = 2'-O-methylcytidine-3'-phosphate
  modified_base 21: mod_base = OTHER; note = 2'-O-methyladenosine
caaaagagatacctgacatca

SEQ ID NO: 3526 - RNA, 21 nt, synthetic construct
  source 1..21: mol_type = other RNA
  modified_base 1: mod_base = OTHER; note = 2'-O-methyladenosine-3'-phosphate
  modified_base 2: mod_base = OTHER; note = 2'-O-methyladenosine-3'-phosphate
  modified_base 3: mod_base = OTHER; note = 2'-O-methyladenosine-3'-phosphate
  modified_base 4: mod_base = OTHER; note = 2'-O-methyladenosine-3'-phosphate
  modified_base 5: mod_base = OTHER; note = 2'-O-methylguanosine-3'-phosphate
  modified_base 6: mod_base = OTHER; note = 2'-O-methyladenosine-3'-phosphate
  modified_base 7: mod_base = OTHER; note = 2'-deoxy-2'-fluoroguanosine-3'-phosphate
  modified_base 8: mod_base = OTHER; note = 2'-O-methyladenosine-3'-phosphate
  modified_base 9: mod_base = OTHER; note = 2'-deoxy-2'-fluorouridine-3'-phosphate
  modified_base 10: mod_base = OTHER; note = 2'-deoxy-2'-fluoroadenosine-3'-phosphate
  modified_base 11: mod_base = OTHER; note = 2'-deoxy-2'-fluorocytidine-3'-phosphate
  modified_base 12: mod_base = OTHER; note = 2'-O-methylcytidine-3'-phosphate
  modified_base 13: mod_base = OTHER; note = 2'-O-methyluridine-3'-phosphate
  modified_base 14: mod_base = OTHER; note = 2'-O-methylguanosine-3'-phosphate
  modified_base 15: mod_base = OTHER; note = 2'-O-methyladenosine-3'-phosphate
  modified_base 16: mod_base = OTHER; note = 2'-O-methylcytidine-3'-phosphate
  modified_base 17: mod_base = OTHER; note = 2'-O-methyladenosine-3'-phosphate
  modified_base 18: mod_base = OTHER; note = 2'-O-methyluridine-3'-phosphate
  modified_base 19: mod_base = OTHER; note = 2'-O-methylcytidine-3'-phosphate
  modified_base 20: mod_base = OTHER; note = 2'-O-methylcytidine-3'-phosphate
  modified_base 21: mod_base = OTHER; note = 2'-O-methyladenosine
aaaagagatacctgacatcca

SEQ ID NO: 3527 - RNA, 21 nt, synthetic construct
  source 1..21: mol_type = other RNA
  modified_base 1: mod_base = OTHER; note = 2'-O-methyluridine-3'-phosphate
  modified_base 2: mod_base = OTHER; note = 2'-O-methylcytidine-3'-phosphate
  modified_base 3: mod_base = OTHER; note = 2'-O-methylcytidine-3'-phosphate
  modified_base 4: mod_base = OTHER; note = 2'-O-methyluridine-3'-phosphate
  modified_base 5: mod_base = OTHER; note = 2'-O-methylguanosine-3'-phosphate
  modified_base 6: mod_base = OTHER; note = 2'-O-methyladenosine-3'-phosphate
  modified_base 7: mod_base = OTHER; note = 2'-deoxy-2'-fluoroguanosine-3'-phosphate
  modified_base 8: mod_base = OTHER; note = 2'-O-methyladenosine-3'-phosphate
  modified_base 9: mod_base = OTHER; note = 2'-deoxy-2'-fluorocytidine-3'-phosphate
  modified_base 10: mod_base = OTHER; note = 2'-deoxy-2'-fluoroadenosine-3'-phosphate
  modified_base 11: mod_base = OTHER; note = 2'-deoxy-2'-fluorocytidine-3'-phosphate
  modified_base 12: mod_base = OTHER; note = 2'-O-methyluridine-3'-phosphate
  modified_base 13: mod_base = OTHER; note = 2'-O-methylguanosine-3'-phosphate
  modified_base 14: mod_base = OTHER; note = 2'-O-methyladenosine-3'-phosphate
  modified_base 15: mod_base = OTHER; note = 2'-O-methylguanosine-3'-phosphate
  modified_base 16: mod_base = OTHER; note = 2'-O-methyladenosine-3'-phosphate
  modified_base 17: mod_base = OTHER; note = 2'-O-methyladenosine-3'-phosphate
  modified_base 18: mod_base = OTHER; note = 2'-O-methyladenosine-3'-phosphate
  modified_base 19: mod_base = OTHER; note = 2'-O-methyluridine-3'-phosphate
  modified_base 20: mod_base = OTHER; note = 2'-O-methylguanosine-3'-phosphate
  modified_base 21: mod_base = OTHER; note = 2'-O-methyladenosine
tcctgagacactgagaaatga

SEQ ID NO: 3528 - RNA, 21 nt, synthetic construct
  source 1..21: mol_type = other RNA
  modified_base 1: mod_base = OTHER; note = 2'-O-methylcytidine-3'-phosphate
  modified_base 2: mod_base = OTHER; note = 2'-O-methyluridine-3'-phosphate
  modified_base 3: mod_base = OTHER; note = 2'-O-methylguanosine-3'-phosphate
  modified_base 4: mod_base = OTHER; note = 2'-O-methyladenosine-3'-phosphate
  modified_base 5: mod_base = OTHER; note = 2'-O-methylguanosine-3'-phosphate
  modified_base 6: mod_base = OTHER; note = 2'-O-methyladenosine-3'-phosphate
  modified_base 7: mod_base = OTHER; note = 2'-deoxy-2'-fluorocytidine-3'-phosphate
  modified_base 8: mod_base = OTHER; note = 2'-O-methyladenosine-3'-phosphate
  modified_base 9: mod_base = OTHER; note = 2'-deoxy-2'-fluorocytidine-3'-phosphate
  modified_base 10: mod_base = OTHER; note = 2'-deoxy-2'-fluorouridine-3'-phosphate
  modified_base 11: mod_base = OTHER; note = 2'-deoxy-2'-fluoroguanosine-3'-phosphate
  modified_base 12: mod_base = OTHER; note = 2'-O-methyladenosine-3'-phosphate
  modified_base 13: mod_base = OTHER; note = 2'-O-methylguanosine-3'-phosphate
  modified_base 14: mod_base = OTHER; note = 2'-O-methyladenosine-3'-phosphate
  modified_base 15: mod_base = OTHER; note = 2'-O-methyladenosine-3'-phosphate
  modified_base 16: mod_base = OTHER; note = 2'-O-methyladenosine-3'-phosphate
  modified_base 17: mod_base = OTHER; note = 2'-O-methyluridine-3'-phosphate
  modified_base 18: mod_base = OTHER; note = 2'-O-methylguanosine-3'-phosphate
  modified_base 19: mod_base = OTHER; note = 2'-O-methyluridine-3'-phosphate
  modified_base 20: mod_base = OTHER; note = 2'-O-methylcytidine-3'-phosphate
  modified_base 21: mod_base = OTHER; note = 2'-O-methyladenosine
ctgagacactgagaaatgtca

SEQ ID NO: 3529 - RNA, 21 nt, synthetic construct
  source 1..21: mol_type = other RNA
  modified_base 1: mod_base = OTHER; note = 2'-O-methylguanosine-3'-phosphate
  modified_base 2: mod_base = OTHER; note = 2'-O-methyladenosine-3'-phosphate
  modified_base 3: mod_base = OTHER; note = 2'-O-methylguanosine-3'-phosphate
  modified_base 4: mod_base = OTHER; note = 2'-O-methyladenosine-3'-phosphate
  modified_base 5: mod_base = OTHER; note = 2'-O-methylcytidine-3'-phosphate
  modified_base 6: mod_base = OTHER; note = 2'-O-methyladenosine-3'-phosphate
  modified_base 7: mod_base = OTHER; note = 2'-deoxy-2'-fluorocytidine-3'-phosphate
  modified_base 8: mod_base = OTHER; note = 2'-O-methyluridine-3'-phosphate
  modified_base 9: mod_base = OTHER; note = 2'-deoxy-2'-fluoroguanosine-3'-phosphate
  modified_base 10: mod_base = OTHER; note = 2'-deoxy-2'-fluoroadenosine-3'-phosphate
  modified_base 11: mod_base = OTHER; note = 2'-deoxy-2'-fluoroguanosine-3'-phosphate
  modified_base 12: mod_base = OTHER; note = 2'-O-methyladenosine-3'-phosphate
  modified_base 13: mod_base = OTHER; note = 2'-O-methyladenosine-3'-phosphate
  modified_base 14: mod_base = OTHER; note = 2'-O-methyladenosine-3'-phosphate
  modified_base 15: mod_base = OTHER; note = 2'-O-methyluridine-3'-phosphate
  modified_base 16: mod_base = OTHER; note = 2'-O-methylguanosine-3'-phosphate
  modified_base 17: mod_base = OTHER; note = 2'-O-methyluridine-3'-phosphate
  modified_base 18: mod_base = OTHER; note = 2'-O-methylcytidine-3'-phosphate
  modified_base 19: mod_base = OTHER; note = 2'-O-methylcytidine-3'-phosphate
  modified_base 20: mod_base = OTHER; note = 2'-O-methyluridine-3'-phosphate
  modified_base 21: mod_base = OTHER; note = 2'-O-methyladenosine
gagacactgagaaatgtccta

SEQ ID NO: 3530 - RNA, 21 nt, synthetic construct
  source 1..21: mol_type = other RNA
  modified_base 1: mod_base = OTHER; note = 2'-O-methyladenosine-3'-phosphate
  modified_base 2: mod_base = OTHER; note = 2'-O-methylguanosine-3'-phosphate
  modified_base 3: mod_base = OTHER; note = 2'-O-methyladenosine-3'-phosphate
  modified_base 4: mod_base = OTHER; note = 2'-O-methyladenosine-3'-phosphate
  modified_base 5: mod_base = OTHER; note = 2'-O-methyladenosine-3'-phosphate
  modified_base 6: mod_base = OTHER; note = 2'-O-methyluridine-3'-phosphate
  modified_base 7: mod_base = OTHER; note = 2'-deoxy-2'-fluoroguanosine-3'-phosphate
  modified_base 8: mod_base = OTHER; note = 2'-O-methyluridine-3'-phosphate
  modified_base 9: mod_base = OTHER; note = 2'-deoxy-2'-fluorocytidine-3'-phosphate
  modified_base 10: mod_base = OTHER; note = 2'-deoxy-2'-fluorocytidine-3'-phosphate
  modified_base 11: mod_base = OTHER; note = 2'-deoxy-2'-fluorouridine-3'-phosphate
  modified_base 12: mod_base = OTHER; note = 2'-O-methylguanosine-3'-phosphate
  modified_base 13: mod_base = OTHER; note = 2'-O-methyladenosine-3'-phosphate
  modified_base 14: mod_base = OTHER; note = 2'-O-methyladenosine-3'-phosphate
  modified_base 15: mod_base = OTHER; note = 2'-O-methylguanosine-3'-phosphate
  modified_base 16: mod_base = OTHER; note = 2'-O-methyluridine-3'-phosphate
  modified_base 17: mod_base = OTHER; note = 2'-O-methylcytidine-3'-phosphate
  modified_base 18: mod_base = OTHER; note = 2'-O-methyladenosine-3'-phosphate
  modified_base 19: mod_base = OTHER; note = 2'-O-methylcytidine-3'-phosphate
  modified_base 20: mod_base = OTHER; note = 2'-O-methyladenosine-3'-phosphate
  modified_base 21: mod_base = OTHER; note = 2'-O-methyladenosine
agaaatgtcctgaagtcacaa

SEQ ID NO: 3531 - RNA, 21 nt, synthetic construct
  source 1..21: mol_type = other RNA
  modified_base 1: mod_base = OTHER; note = 2'-O-methylcytidine-3'-phosphate
  modified_base 2: mod_base = OTHER; note = 2'-O-methylcytidine-3'-phosphate
  modified_base 3: mod_base = OTHER; note = 2'-O-methyluridine-3'-phosphate
  modified_base 4: mod_base = OTHER; note = 2'-O-methylguanosine-3'-phosphate
  modified_base 5: mod_base = OTHER; note = 2'-O-methyladenosine-3'-phosphate
  modified_base 6: mod_base = OTHER; note = 2'-O-methyladenosine-3'-phosphate
  modified_base 7: mod_base = OTHER; note = 2'-deoxy-2'-fluoroguanosine-3'-phosphate
  modified_base 8: mod_base = OTHER; note = 2'-O-methyluridine-3'-phosphate
  modified_base 9: mod_base = OTHER; note = 2'-deoxy-2'-fluorocytidine-3'-phosphate
  modified_base 10: mod_base = OTHER; note = 2'-deoxy-2'-fluoroadenosine-3'-phosphate
  modified_base 11: mod_base = OTHER; note = 2'-deoxy-2'-fluorocytidine-3'-phosphate
  modified_base 12: mod_base = OTHER; note = 2'-O-methyladenosine-3'-phosphate
  modified_base 13: mod_base = OTHER; note = 2'-O-methylcytidine-3'-phosphate
  modified_base 14: mod_base = OTHER; note = 2'-O-methyladenosine-3'-phosphate
  modified_base 15: mod_base = OTHER; note = 2'-O-methylguanosine-3'-phosphate
  modified_base 16: mod_base = OTHER; note = 2'-O-methylcytidine-3'-phosphate
  modified_base 17: mod_base = OTHER; note = 2'-O-methyluridine-3'-phosphate
  modified_base 18: mod_base = OTHER; note = 2'-O-methyladenosine-3'-phosphate
  modified_base 19: mod_base = OTHER; note = 2'-O-methyladenosine-3'-phosphate
  modified_base 20: mod_base = OTHER; note = 2'-O-methyluridine-3'-phosphate
  modified_base 21: mod_base = OTHER; note = 2'-O-methyladenosine
cctgaagtcacacagctaata

SEQ ID NO: 3532 - RNA, 21 nt, synthetic construct
  source 1..21: mol_type = other RNA
  modified_base 1: mod_base = OTHER; note = 2'-O-methyluridine-3'-phosphate
  modified_base 2: mod_base = OTHER; note = 2'-O-methyladenosine-3'-phosphate
  modified_base 3: mod_base = OTHER; note = 2'-O-methylguanosine-3'-phosphate
  modified_base 4: mod_base = OTHER; note = 2'-O-methylguanosine-3'-phosphate
  modified_base 5: mod_base = OTHER; note = 2'-O-methyluridine-3'-phosphate
  modified_base 6: mod_base = OTHER; note = 2'-O-methylcytidine-3'-phosphate
  modified_base 7: mod_base = OTHER; note = 2'-deoxy-2'-fluorocytidine-3'-phosphate
  modified_base 8: mod_base = OTHER; note = 2'-O-methyladenosine-3'-phosphate
  modified_base 9: mod_base = OTHER; note = 2'-deoxy-2'-fluoroadenosine-3'-phosphate
  modified_base 10: mod_base = OTHER; note = 2'-deoxy-2'-fluoroadenosine-3'-phosphate
  modified_base 11: mod_base = OTHER; note = 2'-deoxy-2'-fluorouridine-3'-phosphate
  modified_base 12: mod_base = OTHER; note = 2'-O-methylcytidine-3'-phosphate
  modified_base 13: mod_base = OTHER; note = 2'-O-methyluridine-3'-phosphate
  modified_base 14: mod_base = OTHER; note = 2'-O-methyluridine-3'-phosphate
  modified_base 15: mod_base = OTHER; note = 2'-O-methylguanosine-3'-phosphate
  modified_base 16: mod_base = OTHER; note = 2'-O-methyluridine-3'-phosphate
  modified_base 17: mod_base = OTHER; note = 2'-O-methylguanosine-3'-phosphate
  modified_base 18: mod_base = OTHER; note = 2'-O-methyladenosine-3'-phosphate
  modified_base 19: mod_base = OTHER; note = 2'-O-methyluridine-3'-phosphate
  modified_base 20: mod_base = OTHER; note = 2'-O-methyladenosine-3'-phosphate
  modified_base 21: mod_base = OTHER; note = 2'-O-methyladenosine
taggtccaaatcttgtgataa

SEQ ID NO: 3533 - RNA, 21 nt, synthetic construct
  source 1..21: mol_type = other RNA
  modified_base 1: mod_base = OTHER; note = 2'-O-methyladenosine-3'-phosphate
  modified_base 2: mod_base = OTHER; note = 2'-O-methylguanosine-3'-phosphate
  modified_base 3: mod_base = OTHER; note = 2'-O-methylguanosine-3'-phosphate
  modified_base 4: mod_base = OTHER; note = 2'-O-methyluridine-3'-phosphate
  modified_base 5: mod_base = OTHER; note = 2'-O-methylcytidine-3'-phosphate
  modified_base 6: mod_base = OTHER; note = 2'-O-methylcytidine-3'-phosphate
  modified_base 7: mod_base = OTHER; note = 2'-deoxy-2'-fluoroadenosine-3'-phosphate
  modified_base 8: mod_base = OTHER; note = 2'-O-methyladenosine-3'-phosphate
  modified_base 9: mod_base = OTHER; note = 2'-deoxy-2'-fluoroadenosine-3'-phosphate
  modified_base 10: mod_base = OTHER; note = 2'-deoxy-2'-fluorouridine-3'-phosphate
  modified_base 11: mod_base = OTHER; note = 2'-deoxy-2'-fluorocytidine-3'-phosphate
  modified_base 12: mod_base = OTHER; note = 2'-O-methyluridine-3'-phosphate
  modified_base 13: mod_base = OTHER; note = 2'-O-methyluridine-3'-phosphate
  modified_base 14: mod_base = OTHER; note = 2'-O-methylguanosine-3'-phosphate
  modified_base 15: mod_base = OTHER; note = 2'-O-methyluridine-3'-phosphate
  modified_base 16: mod_base = OTHER; note = 2'-O-methylguanosine-3'-phosphate
  modified_base 17: mod_base = OTHER; note = 2'-O-methyladenosine-3'-phosphate
  modified_base 18: mod_base = OTHER; note = 2'-O-methyluridine-3'-phosphate
  modified_base 19: mod_base = OTHER; note = 2'-O-methyladenosine-3'-phosphate
  modified_base 20: mod_base = OTHER; note = 2'-O-methyladenosine-3'-phosphate
  modified_base 21: mod_base = OTHER; note = 2'-O-methyladenosine
aggtccaaatcttgtgataaa

SEQ ID NO: 3534 - RNA, 21 nt, synthetic construct
  source 1..21: mol_type = other RNA
  modified_base 1: mod_base = OTHER; note = 2'-O-methylguanosine-3'-phosphate
  modified_base 2: mod_base = OTHER; note = 2'-O-methyluridine-3'-phosphate
  modified_base 3: mod_base = OTHER; note = 2'-O-methylcytidine-3'-phosphate
  modified_base 4: mod_base = OTHER; note = 2'-O-methylcytidine-3'-phosphate
  modified_base 5: mod_base = OTHER; note = 2'-O-methyladenosine-3'-phosphate
  modified_base 6: mod_base = OTHER; note = 2'-O-methyladenosine-3'-phosphate
  modified_base 7: mod_base = OTHER; note = 2'-deoxy-2'-fluoroadenosine-3'-phosphate
  modified_base 8: mod_base = OTHER; note = 2'-O-methyluridine-3'-phosphate
  modified_base 9: mod_base = OTHER; note = 2'-deoxy-2'-fluorocytidine-3'-phosphate
  modified_base 10: mod_base = OTHER; note = 2'-deoxy-2'-fluorouridine-3'-phosphate
  modified_base 11: mod_base = OTHER; note = 2'-deoxy-2'-fluorouridine-3'-phosphate
  modified_base 12: mod_base = OTHER; note = 2'-O-methylguanosine-3'-phosphate
  modified_base 13: mod_base = OTHER; note = 2'-O-methyluridine-3'-phosphate
  modified_base 14: mod_base = OTHER; note = 2'-O-methylguanosine-3'-phosphate
  modified_base 15: mod_base = OTHER; note = 2'-O-methyladenosine-3'-phosphate
  modified_base 16: mod_base = OTHER; note = 2'-O-methyluridine-3'-phosphate
  modified_base 17: mod_base = OTHER; note = 2'-O-methyladenosine-3'-phosphate
  modified_base 18: mod_base = OTHER; note = 2'-O-methyladenosine-3'-phosphate
  modified_base 19: mod_base = OTHER; note = 2'-O-methyluridine-3'-phosphate
  modified_base 20: mod_base = OTHER; note = 2'-O-methylguanosine-3'-phosphate
  modified_base 21: mod_base = OTHER; note = 2'-O-methyladenosine
gtccaaatcttgtgataatga

SEQ ID NO: 3535 - RNA, 21 nt, synthetic construct
  source 1..21: mol_type = other RNA
  modified_base 1: mod_base = OTHER; note = 2'-O-methylcytidine-3'-phosphate
  modified_base 2: mod_base = OTHER; note = 2'-O-methylcytidine-3'-phosphate
  modified_base 3: mod_base = OTHER; note = 2'-O-methyladenosine-3'-phosphate
  modified_base 4: mod_base = OTHER; note = 2'-O-methyladenosine-3'-phosphate
  modified_base 5: mod_base = OTHER; note = 2'-O-methyladenosine-3'-phosphate
  modified_base 6: mod_base = OTHER; note = 2'-O-methyluridine-3'-phosphate
  modified_base 7: mod_base = OTHER; note = 2'-deoxy-2'-fluorocytidine-3'-phosphate
  modified_base 8: mod_base = OTHER; note = 2'-O-methyluridine-3'-phosphate
  modified_base 9: mod_base = OTHER; note = 2'-deoxy-2'-fluorouridine-3'-phosphate
  modified_base 10: mod_base = OTHER; note = 2'-deoxy-2'-fluoroguanosine-3'-phosphate
  modified_base 11: mod_base = OTHER; note = 2'-deoxy-2'-fluorouridine-3'-phosphate
  modified_base 12: mod_base = OTHER; note = 2'-O-methylguanosine-3'-phosphate
  modified_base 13: mod_base = OTHER; note = 2'-O-methyladenosine-3'-phosphate
  modified_base 14: mod_base = OTHER; note = 2'-O-methyluridine-3'-phosphate
  modified_base 15: mod_base = OTHER; note = 2'-O-methyladenosine-3'-phosphate
  modified_base 16: mod_base = OTHER; note = 2'-O-methyladenosine-3'-phosphate
  modified_base 17: mod_base = OTHER; note = 2'-O-methyluridine-3'-phosphate
  modified_base 18: mod_base = OTHER; note = 2'-O-methylguanosine-3'-phosphate
  modified_base 19: mod_base = OTHER; note = 2'-O-methyladenosine-3'-phosphate
  modified_base 20: mod_base = OTHER; note = 2'-O-methyladenosine-3'-phosphate
  modified_base 21: mod_base = OTHER; note = 2'-O-methyladenosine
ccaaatcttgtgataatgaaa

SEQ ID NO: 3536 - RNA, 21 nt, synthetic construct
  source 1..21: mol_type = other RNA
  modified_base 1: mod_base = OTHER; note = 2'-O-methyladenosine-3'-phosphate
  modified_base 2: mod_base = OTHER; note = 2'-O-methyladenosine-3'-phosphate
  modified_base 3: mod_base = OTHER; note = 2'-O-methyladenosine-3'-phosphate
  modified_base 4: mod_base = OTHER; note = 2'-O-methyluridine-3'-phosphate
  modified_base 5: mod_base = OTHER; note = 2'-O-methylcytidine-3'-phosphate
  modified_base 6: mod_base = OTHER; note = 2'-O-methyluridine-3'-phosphate
  modified_base 7: mod_base = OTHER; note = 2'-deoxy-2'-fluorouridine-3'-phosphate
  modified_base 8: mod_base = OTHER; note = 2'-O-methylguanosine-3'-phosphate
  modified_base 9: mod_base = OTHER; note = 2'-deoxy-2'-fluorouridine-3'-phosphate
  modified_base 10: mod_base = OTHER; note = 2'-deoxy-2'-fluoroguanosine-3'-phosphate
  modified_base 11: mod_base = OTHER; note = 2'-deoxy-2'-fluoroadenosine-3'-phosphate
  modified_base 12: mod_base = OTHER; note = 2'-O-methyluridine-3'-phosphate
  modified_base 13: mod_base = OTHER; note = 2'-O-methyladenosine-3'-phosphate
  modified_base 14: mod_base = OTHER; note = 2'-O-methyladenosine-3'-phosphate
  modified_base 15: mod_base = OTHER; note = 2'-O-methyluridine-3'-phosphate
  modified_base 16: mod_base = OTHER; note = 2'-O-methylguanosine-3'-phosphate
  modified_base 17: mod_base = OTHER; note = 2'-O-methyladenosine-3'-phosphate
  modified_base 18: mod_base = OTHER; note = 2'-O-methyladenosine-3'-phosphate
  modified_base 19: mod_base = OTHER; note = 2'-O-methylcytidine-3'-phosphate
  modified_base 20: mod_base = OTHER; note = 2'-O-methyladenosine-3'-phosphate
  modified_base 21: mod_base = OTHER; note = 2'-O-methyladenosine
aaatcttgtgataatgaacaa

SEQ ID NO: 3537 - RNA, 21 nt, synthetic construct
  source 1..21: mol_type = other RNA
  modified_base 1: mod_base = OTHER; note = 2'-O-methyluridine-3'-phosphate
  modified_base 2: mod_base = OTHER; note = 2'-O-methylguanosine-3'-phosphate
  modified_base 3: mod_base = OTHER; note = 2'-O-methyluridine-3'-phosphate
  modified_base 4: mod_base = OTHER; note = 2'-O-methylguanosine-3'-phosphate
  modified_base 5: mod_base = OTHER; note = 2'-O-methyladenosine-3'-phosphate
  modified_base 6: mod_base = OTHER; note = 2'-O-methyluridine-3'-phosphate
  modified_base 7: mod_base = OTHER; note = 2'-deoxy-2'-fluoroadenosine-3'-phosphate
  modified_base 8: mod_base = OTHER; note = 2'-O-methyladenosine-3'-phosphate
  modified_base 9: mod_base = OTHER; note = 2'-deoxy-2'-fluorouridine-3'-phosphate
  modified_base 10: mod_base = OTHER; note = 2'-deoxy-2'-fluoroguanosine-3'-phosphate
  modified_base 11: mod_base = OTHER; note = 2'-deoxy-2'-fluoroadenosine-3'-phosphate
  modified_base 12: mod_base = OTHER; note = 2'-O-methyladenosine-3'-phosphate
  modified_base 13: mod_base = OTHER; note = 2'-O-methylcytidine-3'-phosphate
  modified_base 14: mod_base = OTHER; note = 2'-O-methyladenosine-3'-phosphate
  modified_base 15: mod_base = OTHER; note = 2'-O-methylcytidine-3'-phosphate
  modified_base 16: mod_base = OTHER; note = 2'-O-methylcytidine-3'-phosphate
  modified_base 17: mod_base = OTHER; note = 2'-O-methylguanosine-3'-phosphate
  modified_base 18: mod_base = OTHER; note = 2'-O-methyluridine-3'-phosphate
  modified_base 19: mod_base = OTHER; note = 2'-O-methyladenosine-3'-phosphate
  modified_base 20: mod_base = OTHER; note = 2'-O-methyladenosine-3'-phosphate
  modified_base 21: mod_base = OTHER; note = 2'-O-methyladenosine
tgtgataatgaacaccgtaaa

SEQ ID NO: 3538 - RNA, 21 nt, synthetic construct
  source 1..21: mol_type = other RNA
  modified_base 1: mod_base = OTHER; note = 2'-O-methylguanosine-3'-phosphate
  modified_base 2: mod_base = OTHER; note = 2'-O-methylguanosine-3'-phosphate
  modified_base 3: mod_base = OTHER; note = 2'-O-methyluridine-3'-phosphate
  modified_base 4: mod_base = OTHER; note = 2'-O-methyluridine-3'-phosphate
  modified_base 5: mod_base = OTHER; note = 2'-O-methyladenosine-3'-phosphate
  modified_base 6: mod_base = OTHER; note = 2'-O-methylguanosine-3'-phosphate
  modified_base 7: mod_base = OTHER; note = 2'-deoxy-2'-fluorocytidine-3'-phosphate
  modified_base 8: mod_base = OTHER; note = 2'-O-methyluridine-3'-phosphate
  modified_base 9: mod_base = OTHER; note = 2'-deoxy-2'-fluoroadenosine-3'-phosphate
  modified_base 10: mod_base = OTHER; note = 2'-deoxy-2'-fluoroguanosine-3'-phosphate
  modified_base 11: mod_base = OTHER; note = 2'-deoxy-2'-fluorocytidine-3'-phosphate
  modified_base 12: mod_base = OTHER; note = 2'-O-methyluridine-3'-phosphate
  modified_base 13: mod_base = OTHER; note = 2'-O-methyluridine-3'-phosphate
  modified_base 14: mod_base = OTHER; note = 2'-O-methylcytidine-3'-phosphate
  modified_base 15: mod_base = OTHER; note = 2'-O-methylcytidine-3'-phosphate
  modified_base 16: mod_base = OTHER; note = 2'-O-methyluridine-3'-phosphate
  modified_base 17: mod_base = OTHER; note = 2'-O-methyladenosine-3'-phosphate
  modified_base 18: mod_base = OTHER; note = 2'-O-methylcytidine-3'-phosphate
  modified_base 19: mod_base = OTHER; note = 2'-O-methyluridine-3'-phosphate
  modified_base 20: mod_base = OTHER; note = 2'-O-methyluridine-3'-phosphate
  modified_base 21: mod_base = OTHER; note = 2'-O-methyladenosine
ggttagctagcttcctactta

SEQ ID NO: 3539 - RNA, 21 nt, synthetic construct
  source 1..21: mol_type = other RNA
  modified_base 1: mod_base = OTHER; note = 2'-O-methylguanosine-3'-phosphate
  modified_base 2: mod_base = OTHER; note = 2'-O-methyluridine-3'-phosphate
  modified_base 3: mod_base = OTHER; note = 2'-O-methyluridine-3'-phosphate
  modified_base 4: mod_base = OTHER; note = 2'-O-methyladenosine-3'-phosphate
  modified_base 5: mod_base = OTHER; note = 2'-O-methylguanosine-3'-phosphate
  modified_base 6: mod_base = OTHER; note = 2'-O-methylcytidine-3'-phosphate
  modified_base 7: mod_base = OTHER; note = 2'-deoxy-2'-fluorouridine-3'-phosphate
  modified_base 8: mod_base = OTHER; note = 2'-O-methyladenosine-3'-phosphate
  modified_base 9: mod_base = OTHER; note = 2'-deoxy-2'-fluoroguanosine-3'-phosphate
  modified_base 10: mod_base = OTHER; note = 2'-deoxy-2'-fluorocytidine-3'-phosphate
  modified_base 11: mod_base = OTHER; note = 2'-deoxy-2'-fluorouridine-3'-phosphate
  modified_base 12: mod_base = OTHER; note = 2'-O-methyluridine-3'-phosphate
  modified_base 13: mod_base = OTHER; note = 2'-O-methylcytidine-3'-phosphate
  modified_base 14: mod_base = OTHER; note = 2'-O-methylcytidine-3'-phosphate
  modified_base 15: mod_base = OTHER; note = 2'-O-methyluridine-3'-phosphate
  modified_base 16: mod_base = OTHER; note = 2'-O-methyladenosine-3'-phosphate
  modified_base 17: mod_base = OTHER; note = 2'-O-methylcytidine-3'-phosphate
  modified_base 18: mod_base = OTHER; note = 2'-O-methyluridine-3'-phosphate
  modified_base 19: mod_base = OTHER; note = 2'-O-methyluridine-3'-phosphate
  modified_base 20: mod_base = OTHER; note = 2'-O-methyluridine-3'-phosphate
  modified_base 21: mod_base = OTHER; note = 2'-O-methyladenosine
gttagctagcttcctacttta

SEQ ID NO: 3540 - RNA, 21 nt, synthetic construct
  source 1..21: mol_type = other RNA
  modified_base 1: mod_base = OTHER; note = 2'-O-methyladenosine-3'-phosphate
  modified_base 2: mod_base = OTHER; note = 2'-O-methylguanosine-3'-phosphate
  modified_base 3: mod_base = OTHER; note = 2'-O-methylcytidine-3'-phosphate
  modified_base 4: mod_base = OTHER; note = 2'-O-methyluridine-3'-phosphate
  modified_base 5: mod_base = OTHER; note = 2'-O-methyluridine-3'-phosphate
  modified_base 6: mod_base = OTHER; note = 2'-O-methylcytidine-3'-phosphate
  modified_base 7: mod_base = OTHER; note = 2'-deoxy-2'-fluorocytidine-3'-phosphate
  modified_base 8: mod_base = OTHER; note = 2'-O-methyluridine-3'-phosphate
  modified_base 9: mod_base = OTHER; note = 2'-deoxy-2'-fluoroadenosine-3'-phosphate
  modified_base 10: mod_base = OTHER; note = 2'-deoxy-2'-fluorocytidine-3'-phosphate
  modified_base 11: mod_base = OTHER; note = 2'-deoxy-2'-fluorouridine-3'-phosphate
  modified_base 12: mod_base = OTHER; note = 2'-O-methyluridine-3'-phosphate
  modified_base 13: mod_base = OTHER; note = 2'-O-methyluridine-3'-phosphate
  modified_base 14: mod_base = OTHER; note = 2'-O-methylcytidine-3'-phosphate
  modified_base 15: mod_base = OTHER; note = 2'-O-methylcytidine-3'-phosphate
  modified_base 16: mod_base = OTHER; note = 2'-O-methylcytidine-3'-phosphate
  modified_base 17: mod_base = OTHER; note = 2'-O-methyluridine-3'-phosphate
  modified_base 18: mod_base = OTHER; note = 2'-O-methyluridine-3'-phosphate
  modified_base 19: mod_base = OTHER; note = 2'-O-methylguanosine-3'-phosphate
  modified_base 20: mod_base = OTHER; note = 2'-O-methyladenosine-3'-phosphate
  modified_base 21: mod_base = OTHER; note = 2'-O-methyladenosine
agcttcctactttcccttgaa

SEQ ID NO: 3541 - RNA, 21 nt, synthetic construct
  source 1..21: mol_type = other RNA
  modified_base 1: mod_base = OTHER; note = 2'-O-methylcytidine-3'-phosphate
  modified_base 2: mod_base = OTHER; note = 2'-O-methylcytidine-3'-phosphate
  modified_base 3: mod_base = OTHER; note = 2'-O-methyluridine-3'-phosphate
  modified_base 4: mod_base = OTHER; note = 2'-O-methyladenosine-3'-phosphate
  modified_base 5: mod_base = OTHER; note = 2'-O-methylcytidine-3'-phosphate
  modified_base 6: mod_base = OTHER; note = 2'-O-methyluridine-3'-phosphate
  modified_base 7: mod_base = OTHER; note = 2'-deoxy-2'-fluorouridine-3'-phosphate
  modified_base 8: mod_base = OTHER; note = 2'-O-methyluridine-3'-phosphate
  modified_base 9: mod_base = OTHER; note = 2'-deoxy-2'-fluorocytidine-3'-phosphate
  modified_base 10: mod_base = OTHER; note = 2'-deoxy-2'-fluorocytidine-3'-phosphate
  modified_base 11: mod_base = OTHER; note = 2'-deoxy-2'-fluorocytidine-3'-phosphate
  modified_base 12: mod_base = OTHER; note = 2'-O-methyluridine-3'-phosphate
  modified_base 13: mod_base = OTHER; note = 2'-O-methyluridine-3'-phosphate
  modified_base 14: mod_base = OTHER; note = 2'-O-methylguanosine-3'-phosphate
  modified_base 15: mod_base = OTHER; note = 2'-O-methyladenosine-3'-phosphate
  modified_base 16: mod_base = OTHER; note = 2'-O-methyladenosine-3'-phosphate
  modified_base 17: mod_base = OTHER; note = 2'-O-methyluridine-3'-phosphate
  modified_base 18: mod_base = OTHER; note = 2'-O-methyladenosine-3'-phosphate
  modified_base 19: mod_base = OTHER; note = 2'-O-methylguanosine-3'-phosphate
  modified_base 20: mod_base = OTHER; note = 2'-O-methyluridine-3'-phosphate
  modified_base 21: mod_base = OTHER; note = 2'-O-methyladenosine
cctactttcccttgaatagta

SEQ ID NO: 3542 - RNA, 21 nt, synthetic construct
  source 1..21: mol_type = other RNA
  modified_base 1: mod_base = OTHER; note = 2'-O-methylcytidine-3'-phosphate
  modified_base 2: mod_base = OTHER; note = 2'-O-methyluridine-3'-phosphate
  modified_base 3: mod_base = OTHER; note = 2'-O-methyladenosine-3'-phosphate
  modified_base 4: mod_base = OTHER; note = 2'-O-methylcytidine-3'-phosphate
  modified_base 5: mod_base = OTHER; note = 2'-O-methyluridine-3'-phosphate
  modified_base 6: mod_base = OTHER; note = 2'-O-methyluridine-3'-phosphate
  modified_base 7: mod_base = OTHER; note = 2'-deoxy-2'-fluorouridine-3'-phosphate
  modified_base 8: mod_base = OTHER; note = 2'-O-methylcytidine-3'-phosphate
  modified_base 9: mod_base = OTHER; note = 2'-deoxy-2'-fluorocytidine-3'-phosphate
  modified_base 10: mod_base = OTHER; note = 2'-deoxy-2'-fluorocytidine-3'-phosphate
  modified_base 11: mod_base = OTHER; note = 2'-deoxy-2'-fluorouridine-3'-phosphate
  modified_base 12: mod_base = OTHER; note = 2'-O-methyluridine-3'-phosphate
  modified_base 13: mod_base = OTHER; note = 2'-O-methylguanosine-3'-phosphate
  modified_base 14: mod_base = OTHER; note = 2'-O-methyladenosine-3'-phosphate
  modified_base 15: mod_base = OTHER; note = 2'-O-methyladenosine-3'-phosphate
  modified_base 16: mod_base = OTHER; note = 2'-O-methyluridine-3'-phosphate
  modified_base 17: mod_base = OTHER; note = 2'-O-methyladenosine-3'-phosphate
  modified_base 18: mod_base = OTHER; note = 2'-O-methylguanosine-3'-phosphate
  modified_base 19: mod_base = OTHER; note = 2'-O-methyluridine-3'-phosphate
  modified_base 20: mod_base = OTHER; note = 2'-O-methylguanosine-3'-phosphate
  modified_base 21: mod_base = OTHER; note = 2'-O-methyladenosine
ctactttcccttgaatagtga

SEQ ID NO: 3543 - RNA, 21 nt, synthetic construct
  source 1..21: mol_type = other RNA
  modified_base 1: mod_base = OTHER; note = 2'-O-methyluridine-3'-phosphate
  modified_base 2: mod_base = OTHER; note = 2'-O-methylcytidine-3'-phosphate
  modified_base 3: mod_base = OTHER; note = 2'-O-methylcytidine-3'-phosphate
  modified_base 4: mod_base = OTHER; note = 2'-O-methylcytidine-3'-phosphate
  modified_base 5: mod_base = OTHER; note = 2'-O-methyluridine-3'-phosphate
  modified_base 6: mod_base = OTHER; note = 2'-O-methyluridine-3'-phosphate
  modified_base 7: mod_base = OTHER; note = 2'-deoxy-2'-fluoroguanosine-3'-phosphate
  modified_base 8: mod_base = OTHER; note = 2'-O-methyladenosine-3'-phosphate
  modified_base 9: mod_base = OTHER; note = 2'-deoxy-2'-fluoroadenosine-3'-phosphate
  modified_base 10: mod_base = OTHER; note = 2'-deoxy-2'-fluorouridine-3'-phosphate
  modified_base 11: mod_base = OTHER; note = 2'-deoxy-2'-fluoroadenosine-3'-phosphate
  modified_base 12: mod_base = OTHER; note = 2'-O-methylguanosine-3'-phosphate
  modified_base 13: mod_base = OTHER; note = 2'-O-methyluridine-3'-phosphate
  modified_base 14: mod_base = OTHER; note = 2'-O-methylguanosine-3'-phosphate
  modified_base 15: mod_base = OTHER; note = 2'-O-methylcytidine-3'-phosphate
  modified_base 16: mod_base = OTHER; note = 2'-O-methyluridine-3'-phosphate
  modified_base 17: mod_base = OTHER; note = 2'-O-methyluridine-3'-phosphate
  modified_base 18: mod_base = OTHER; note = 2'-O-methyluridine-3'-phosphate
  modified_base 19: mod_base = OTHER; note = 2'-O-methyluridine-3'-phosphate
  modified_base 20: mod_base = OTHER; note = 2'-O-methylcytidine-3'-phosphate
  modified_base 21: mod_base = OTHER; note = 2'-O-methyladenosine
tcccttgaatagtgcttttca

SEQ ID NO: 3544 - RNA, 21 nt, synthetic construct
  source 1..21: mol_type = other RNA
  modified_base 1: mod_base = OTHER; note = 2'-O-methylcytidine-3'-phosphate
  modified_base 2: mod_base = OTHER; note = 2'-O-methylcytidine-3'-phosphate
  modified_base 3: mod_base = OTHER; note = 2'-O-methylcytidine-3'-phosphate
  modified_base 4: mod_base = OTHER; note = 2'-O-methyluridine-3'-phosphate
  modified_base 5: mod_base = OTHER; note = 2'-O-methyluridine-3'-phosphate
  modified_base 6: mod_base = OTHER; note = 2'-O-methylguanosine-3'-phosphate
  modified_base 7: mod_base = OTHER; note = 2'-deoxy-2'-fluoroadenosine-3'-phosphate
  modified_base 8: mod_base = OTHER; note = 2'-O-methyladenosine-3'-phosphate
  modified_base 9: mod_base = OTHER; note = 2'-deoxy-2'-fluorouridine-3'-phosphate
  modified_base 10: mod_base = OTHER; note = 2'-deoxy-2'-fluoroadenosine-3'-phosphate
  modified_base 11: mod_base = OTHER; note = 2'-deoxy-2'-fluoroguanosine-3'-phosphate
  modified_base 12: mod_base = OTHER; note = 2'-O-methyluridine-3'-phosphate
  modified_base 13: mod_base = OTHER; note = 2'-O-methylguanosine-3'-phosphate
  modified_base 14: mod_base = OTHER; note = 2'-O-methylcytidine-3'-phosphate
  modified_base 15: mod_base = OTHER; note = 2'-O-methyluridine-3'-phosphate
  modified_base 16: mod_base = OTHER; note = 2'-O-methyluridine-3'-phosphate
  modified_base 17: mod_base = OTHER; note = 2'-O-methyluridine-3'-phosphate
  modified_base 18: mod_base = OTHER; note = 2'-O-methyluridine-3'-phosphate
  modified_base 19: mod_base = OTHER; note = 2'-O-methylcytidine-3'-phosphate
  modified_base 20: mod_base = OTHER; note = 2'-O-methyluridine-3'-phosphate
  modified_base 21: mod_base = OTHER; note = 2'-O-methyladenosine
cccttgaatagtgcttttcta

SEQ ID NO: 3545 - RNA, 21 nt, synthetic construct
  source 1..21: mol_type = other RNA
  modified_base 1: mod_base = OTHER; note = 2'-O-methylcytidine-3'-phosphate
  modified_base 2: mod_base = OTHER; note = 2'-O-methylcytidine-3'-phosphate
  modified_base 3: mod_base = OTHER; note = 2'-O-methyluridine-3'-phosphate
  modified_base 4: mod_base = OTHER; note = 2'-O-methyluridine-3'-phosphate
  modified_base 5: mod_base = OTHER; note = 2'-O-methylguanosine-3'-phosphate
  modified_base 6: mod_base = OTHER; note = 2'-O-methyladenosine-3'-phosphate
  modified_base 7: mod_base = OTHER; note = 2'-deoxy-2'-fluoroadenosine-3'-phosphate
  modified_base 8: mod_base = OTHER; note = 2'-O-methyluridine-3'-phosphate
  modified_base 9: mod_base = OTHER; note = 2'-deoxy-2'-fluoroadenosine-3'-phosphate
  modified_base 10: mod_base = OTHER; note = 2'-deoxy-2'-fluoroguanosine-3'-phosphate
  modified_base 11: mod_base = OTHER; note = 2'-deoxy-2'-fluorouridine-3'-phosphate
  modified_base 12: mod_base = OTHER; note = 2'-O-methylguanosine-3'-phosphate
  modified_base 13: mod_base = OTHER; note = 2'-O-methylcytidine-3'-phosphate
  modified_base 14: mod_base = OTHER; note = 2'-O-methyluridine-3'-phosphate
  modified_base 15: mod_base = OTHER; note = 2'-O-methyluridine-3'-phosphate
  modified_base 16: mod_base = OTHER; note = 2'-O-methyluridine-3'-phosphate
  modified_base 17: mod_base = OTHER; note = 2'-O-methyluridine-3'-phosphate
  modified_base 18: mod_base = OTHER; note = 2'-O-methylcytidine-3'-phosphate
  modified_base 19: mod_base = OTHER; note = 2'-O-methyluridine-3'-phosphate
  modified_base 20: mod_base = OTHER; note = 2'-O-methylcytidine-3'-phosphate
  modified_base 21: mod_base = OTHER; note = 2'-O-methyladenosine
ccttgaatagtgcttttctca

SEQ ID NO: 3546 - RNA, 21 nt, synthetic construct
  source 1..21: mol_type = other RNA
  modified_base 1: mod_base = OTHER; note = 2'-O-methylcytidine-3'-phosphate
  modified_base 2: mod_base = OTHER; note = 2'-O-methyluridine-3'-phosphate
  modified_base 3: mod_base = OTHER; note = 2'-O-methyluridine-3'-phosphate
  modified_base 4: mod_base = OTHER; note = 2'-O-methylguanosine-3'-phosphate
  modified_base 5: mod_base = OTHER; note = 2'-O-methyladenosine-3'-phosphate
  modified_base 6: mod_base = OTHER; note = 2'-O-methyladenosine-3'-phosphate
  modified_base 7: mod_base = OTHER; note = 2'-deoxy-2'-fluorouridine-3'-phosphate
  modified_base 8: mod_base = OTHER; note = 2'-O-methyladenosine-3'-phosphate
  modified_base 9: mod_base = OTHER; note = 2'-deoxy-2'-fluoroguanosine-3'-phosphate
  modified_base 10: mod_base = OTHER; note = 2'-deoxy-2'-fluorouridine-3'-phosphate
  modified_base 11: mod_base = OTHER; note = 2'-deoxy-2'-fluoroguanosine-3'-phosphate
  modified_base 12: mod_base = OTHER; note = 2'-O-methylcytidine-3'-phosphate
  modified_base 13: mod_base = OTHER; note = 2'-O-methyluridine-3'-phosphate
  modified_base 14: mod_base = OTHER; note = 2'-O-methyluridine-3'-phosphate
  modified_base 15: mod_base = OTHER; note = 2'-O-methyluridine-3'-phosphate
  modified_base 16: mod_base = OTHER; note = 2'-O-methyluridine-3'-phosphate
  modified_base 17: mod_base = OTHER; note = 2'-O-methylcytidine-3'-phosphate
  modified_base 18: mod_base = OTHER; note = 2'-O-methyluridine-3'-phosphate
  modified_base 19: mod_base = OTHER; note = 2'-O-methylcytidine-3'-phosphate
  modified_base 20: mod_base = OTHER; note = 2'-O-methylcytidine-3'-phosphate
  modified_base 21: mod_base = OTHER; note = 2'-O-methyladenosine
cttgaatagtgcttttctcca

SEQ ID NO: 3547 - RNA, 21 nt, synthetic construct
  source 1..21: mol_type = other RNA
  modified_base 1: mod_base = OTHER; note = 2'-O-methyluridine-3'-phosphate
  modified_base 2: mod_base = OTHER; note = 2'-O-methylguanosine-3'-phosphate
  modified_base 3: mod_base = OTHER; note = 2'-O-methyladenosine-3'-phosphate
  modified_base 4: mod_base = OTHER; note = 2'-O-methyladenosine-3'-phosphate
  modified_base 5: mod_base = OTHER; note = 2'-O-methyluridine-3'-phosphate
  modified_base 6: mod_base = OTHER; note = 2'-O-methyladenosine-3'-phosphate
  modified_base 7: mod_base = OTHER; note = 2'-deoxy-2'-fluoroguanosine-3'-phosphate
  modified_base 8: mod_base = OTHER; note = 2'-O-methyluridine-3'-phosphate
  modified_base 9: mod_base = OTHER; note = 2'-deoxy-2'-fluoroguanosine-3'-phosphate
  modified_base 10: mod_base = OTHER; note = 2'-deoxy-2'-fluorocytidine-3'-phosphate
  modified_base 11: mod_base = OTHER; note = 2'-deoxy-2'-fluorouridine-3'-phosphate
  modified_base 12: mod_base = OTHER; note = 2'-O-methyluridine-3'-phosphate
  modified_base 13: mod_base = OTHER; note = 2'-O-methyluridine-3'-phosphate
  modified_base 14: mod_base = OTHER; note = 2'-O-methyluridine-3'-phosphate
  modified_base 15: mod_base = OTHER; note = 2'-O-methylcytidine-3'-phosphate
  modified_base 16: mod_base = OTHER; note = 2'-O-methyluridine-3'-phosphate
  modified_base 17: mod_base = OTHER; note = 2'-O-methylcytidine-3'-phosphate
  modified_base 18: mod_base = OTHER; note = 2'-O-methylcytidine-3'-phosphate
  modified_base 19: mod_base = OTHER; note = 2'-O-methylcytidine-3'-phosphate
  modified_base 20: mod_base = OTHER; note = 2'-O-methyluridine-3'-phosphate
  modified_base 21: mod_base = OTHER; note = 2'-O-methyladenosine
tgaatagtgcttttctcccta

SEQ ID NO: 3548 - RNA, 21 nt, synthetic construct
  source 1..21: mol_type = other RNA
  modified_base 1: mod_base = OTHER; note = 2'-O-methylguanosine-3'-phosphate
  modified_base 2: mod_base = OTHER; note = 2'-O-methylcytidine-3'-phosphate
  modified_base 3: mod_base = OTHER; note = 2'-O-methyluridine-3'-phosphate
  modified_base 4: mod_base = OTHER; note = 2'-O-methyluridine-3'-phosphate
  modified_base 5: mod_base = OTHER; note = 2'-O-methyluridine-3'-phosphate
  modified_base 6: mod_base = OTHER; note = 2'-O-methyluridine-3'-phosphate
  modified_base 7: mod_base = OTHER; note = 2'-deoxy-2'-fluorocytidine-3'-phosphate
  modified_base 8: mod_base = OTHER; note = 2'-O-methyluridine-3'-phosphate
  modified_base 9: mod_base = OTHER; note = 2'-deoxy-2'-fluorocytidine-3'-phosphate
  modified_base 10: mod_base = OTHER; note = 2'-deoxy-2'-fluorocytidine-3'-phosphate
  modified_base 11: mod_base = OTHER; note = 2'-deoxy-2'-fluorocytidine-3'-phosphate
  modified_base 12: mod_base = OTHER; note = 2'-O-methyluridine-3'-phosphate
  modified_base 13: mod_base = OTHER; note = 2'-O-methyladenosine-3'-phosphate
  modified_base 14: mod_base = OTHER; note = 2'-O-methyluridine-3'-phosphate
  modified_base 15: mod_base = OTHER; note = 2'-O-methylguanosine-3'-phosphate
  modified_base 16: mod_base = OTHER; note = 2'-O-methyluridine-3'-phosphate
  modified_base 17: mod_base = OTHER; note = 2'-O-methyladenosine-3'-phosphate
  modified_base 18: mod_base = OTHER; note = 2'-O-methyladenosine-3'-phosphate
  modified_base 19: mod_base = OTHER; note = 2'-O-methyluridine-3'-phosphate
  modified_base 20: mod_base = OTHER; note = 2'-O-methyladenosine-3'-phosphate
  modified_base 21: mod_base = OTHER; note = 2'-O-methyladenosine
gcttttctccctatgtaataa

SEQ ID NO: 3549 - RNA, 21 nt, synthetic construct
  source 1..21: mol_type = other RNA
  modified_base 1: mod_base = OTHER; note = 2'-O-methyluridine-3'-phosphate
  modified_base 2: mod_base = OTHER; note = 2'-O-methylguanosine-3'-phosphate
  modified_base 3: mod_base = OTHER; note = 2'-O-methyluridine-3'-phosphate
  modified_base 4: mod_base = OTHER; note = 2'-O-methylguanosine-3'-phosphate
  modified_base 5: mod_base = OTHER; note = 2'-O-methylguanosine-3'-phosphate
  modified_base 6: mod_base = OTHER; note = 2'-O-methyluridine-3'-phosphate
  modified_base 7: mod_base = OTHER; note = 2'-deoxy-2'-fluorouridine-3'-phosphate
  modified_base 8: mod_base = OTHER; note = 2'-O-methyluridine-3'-phosphate
  modified_base 9: mod_base = OTHER; note = 2'-deoxy-2'-fluoroadenosine-3'-phosphate
  modified_base 10: mod_base = OTHER; note = 2'-deoxy-2'-fluoroguanosine-3'-phosphate
  modified_base 11: mod_base = OTHER; note = 2'-deoxy-2'-fluoroadenosine-3'-phosphate
  modified_base 12: mod_base = OTHER; note = 2'-O-methyladenosine-3'-phosphate
  modified_base 13: mod_base = OTHER; note = 2'-O-methylguanosine-3'-phosphate
  modified_base 14: mod_base = OTHER; note = 2'-O-methylguanosine-3'-phosphate
  modified_base 15: mod_base = OTHER; note = 2'-O-methylcytidine-3'-phosphate
  modified_base 16: mod_base = OTHER; note = 2'-O-methyladenosine-3'-phosphate
  modified_base 17: mod_base = OTHER; note = 2'-O-methyluridine-3'-phosphate
  modified_base 18: mod_base = OTHER; note = 2'-O-methyladenosine-3'-phosphate
  modified_base 19: mod_base = OTHER; note = 2'-O-methyluridine-3'-phosphate
  modified_base 20: mod_base = OTHER; note = 2'-O-methyluridine-3'-phosphate
  modified_base 21: mod_base = OTHER; note = 2'-O-methyladenosine
tgtggtttagaaggcatatta

SEQ ID NO: 3550 - RNA, 21 nt, synthetic construct
  source 1..21: mol_type = other RNA
  modified_base 1: mod_base = OTHER; note = 2'-O-methyluridine-3'-phosphate
  modified_base 2: mod_base = OTHER; note = 2'-O-methyluridine-3'-phosphate
  modified_base 3: mod_base = OTHER; note = 2'-O-methyluridine-3'-phosphate
  modified_base 4: mod_base = OTHER; note = 2'-O-methyladenosine-3'-phosphate
  modified_base 5: mod_base = OTHER; note = 2'-O-methylguanosine-3'-phosphate
  modified_base 6: mod_base = OTHER; note = 2'-O-methyladenosine-3'-phosphate
  modified_base 7: mod_base = OTHER; note = 2'-deoxy-2'-fluoroadenosine-3'-phosphate
  modified_base 8: mod_base = OTHER; note = 2'-O-methylguanosine-3'-phosphate
  modified_base 9: mod_base = OTHER; note = 2'-deoxy-2'-fluoroguanosine-3'-phosphate
  modified_base 10: mod_base = OTHER; note = 2'-deoxy-2'-fluorocytidine-3'-phosphate
  modified_base 11: mod_base = OTHER; note = 2'-deoxy-2'-fluoroadenosine-3'-phosphate
  modified_base 12: mod_base = OTHER; note = 2'-O-methyluridine-3'-phosphate
  modified_base 13: mod_base = OTHER; note = 2'-O-methyladenosine-3'-phosphate
  modified_base 14: mod_base = OTHER; note = 2'-O-methyluridine-3'-phosphate
  modified_base 15: mod_base = OTHER; note = 2'-O-methyluridine-3'-phosphate
  modified_base 16: mod_base = OTHER; note = 2'-O-methylguanosine-3'-phosphate
  modified_base 17: mod_base = OTHER; note = 2'-O-methyladenosine-3'-phosphate
  modified_base 18: mod_base = OTHER; note = 2'-O-methylguanosine-3'-phosphate
  modified_base 19: mod_base = OTHER; note = 2'-O-methyluridine-3'-phosphate
  modified_base 20: mod_base = OTHER; note = 2'-O-methyluridine-3'-phosphate
  modified_base 21: mod_base = OTHER; note = 2'-O-methyladenosine
tttagaaggcatattgagtta

SEQ ID NO: 3551 - RNA, 21 nt, synthetic construct
  source 1..21: mol_type = other RNA
  modified_base 1: mod_base = OTHER; note = 2'-O-methyluridine-3'-phosphate
  modified_base 2: mod_base = OTHER; note = 2'-O-methyladenosine-3'-phosphate
  modified_base 3: mod_base = OTHER; note = 2'-O-methylguanosine-3'-phosphate
  modified_base 4: mod_base = OTHER; note = 2'-O-methyladenosine-3'-phosphate
  modified_base 5: mod_base = OTHER; note = 2'-O-methyladenosine-3'-phosphate
  modified_base 6: mod_base = OTHER; note = 2'-O-methylguanosine-3'-phosphate
  modified_base 7: mod_base = OTHER; note = 2'-deoxy-2'-fluoroguanosine-3'-phosphate
  modified_base 8: mod_base = OTHER; note = 2'-O-methylcytidine-3'-phosphate
  modified_base 9: mod_base = OTHER; note = 2'-deoxy-2'-fluoroadenosine-3'-phosphate
  modified_base 10: mod_base = OTHER; note = 2'-deoxy-2'-fluorouridine-3'-phosphate
  modified_base 11: mod_base = OTHER; note = 2'-deoxy-2'-fluoroadenosine-3'-phosphate
  modified_base 12: mod_base = OTHER; note = 2'-O-methyluridine-3'-phosphate
  modified_base 13: mod_base = OTHER; note = 2'-O-methyluridine-3'-phosphate
  modified_base 14: mod_base = OTHER; note = 2'-O-methylguanosine-3'-phosphate
  modified_base 15: mod_base = OTHER; note = 2'-O-methyladenosine-3'-phosphate
  modified_base 16: mod_base = OTHER; note = 2'-O-methylguanosine-3'-phosphate
  modified_base 17: mod_base = OTHER; note = 2'-O-methyluridine-3'-phosphate
  modified_base 18: mod_base = OTHER; note = 2'-O-methyluridine-3'-phosphate
  modified_base 19: mod_base = OTHER; note = 2'-O-methyladenosine-3'-phosphate
  modified_base 20: mod_base = OTHER; note = 2'-O-methyluridine-3'-phosphate
  modified_base 21: mod_base = OTHER; note = 2'-O-methyladenosine
tagaaggcatattgagttata

SEQ ID NO: 3552 - RNA, 21 nt, synthetic construct
  source 1..21: mol_type = other RNA
  modified_base 1: mod_base = OTHER; note = 2'-O-methyladenosine-3'-phosphate
  modified_base 2: mod_base = OTHER; note = 2'-O-methylguanosine-3'-phosphate
  modified_base 3: mod_base = OTHER; note = 2'-O-methyladenosine-3'-phosphate
  modified_base 4: mod_base = OTHER; note = 2'-O-methyladenosine-3'-phosphate
  modified_base 5: mod_base = OTHER; note = 2'-O-methylguanosine-3'-phosphate
  modified_base 6: mod_base = OTHER; note = 2'-O-methylguanosine-3'-phosphate
  modified_base 7: mod_base = OTHER; note = 2'-deoxy-2'-fluorocytidine-3'-phosphate
  modified_base 8: mod_base = OTHER; note = 2'-O-methyladenosine-3'-phosphate
  modified_base 9: mod_base = OTHER; note = 2'-deoxy-2'-fluorouridine-3'-phosphate
  modified_base 10: mod_base = OTHER; note = 2'-deoxy-2'-fluoroadenosine-3'-phosphate
  modified_base 11: mod_base = OTHER; note = 2'-deoxy-2'-fluorouridine-3'-phosphate
  modified_base 12: mod_base = OTHER; note = 2'-O-methyluridine-3'-phosphate
  modified_base 13: mod_base = OTHER; note = 2'-O-methylguanosine-3'-phosphate
  modified_base 14: mod_base = OTHER; note = 2'-O-methyladenosine-3'-phosphate
  modified_base 15: mod_base = OTHER; note = 2'-O-methylguanosine-3'-phosphate
  modified_base 16: mod_base = OTHER; note = 2'-O-methyluridine-3'-phosphate
  modified_base 17: mod_base = OTHER; note = 2'-O-methyluridine-3'-phosphate
  modified_base 18: mod_base = OTHER; note = 2'-O-methyladenosine-3'-phosphate
  modified_base 19: mod_base = OTHER; note = 2'-O-methyluridine-3'-phosphate
  modified_base 20: mod_base = OTHER; note = 2'-O-methyluridine-3'-phosphate
  modified_base 21: mod_base = OTHER; note = 2'-O-methyladenosine
agaaggcatattgagttatta

SEQ ID NO: 3553 - RNA, 21 nt, synthetic construct
  source 1..21: mol_type = other RNA
  modified_base 1: mod_base = OTHER; note = 2'-O-methylcytidine-3'-phosphate
  modified_base 2: mod_base = OTHER; note = 2'-O-methyladenosine-3'-phosphate
  modified_base 3: mod_base = OTHER; note = 2'-O-methyluridine-3'-phosphate
  modified_base 4: mod_base = OTHER; note = 2'-O-methyladenosine-3'-phosphate
  modified_base 5: mod_base = OTHER; note = 2'-O-methyluridine-3'-phosphate
  modified_base 6: mod_base = OTHER; note = 2'-O-methyluridine-3'-phosphate
  modified_base 7: mod_base = OTHER; note = 2'-deoxy-2'-fluoroguanosine-3'-phosphate
  modified_base 8: mod_base = OTHER; note = 2'-O-methyladenosine-3'-phosphate
  modified_base 9: mod_base = OTHER; note = 2'-deoxy-2'-fluoroguanosine-3'-phosphate
  modified_base 10: mod_base = OTHER; note = 2'-deoxy-2'-fluorouridine-3'-phosphate
  modified_base 11: mod_base = OTHER; note = 2'-deoxy-2'-fluorouridine-3'-phosphate
  modified_base 12: mod_base = OTHER; note = 2'-O-methyladenosine-3'-phosphate
  modified_base 13: mod_base = OTHER; note = 2'-O-methyluridine-3'-phosphate
  modified_base 14: mod_base = OTHER; note = 2'-O-methyluridine-3'-phosphate
  modified_base 15: mod_base = OTHER; note = 2'-O-methyluridine-3'-phosphate
  modified_base 16: mod_base = OTHER; note = 2'-O-methyluridine-3'-phosphate
  modified_base 17: mod_base = OTHER; note = 2'-O-methylguanosine-3'-phosphate
  modified_base 18: mod_base = OTHER; note = 2'-O-methylcytidine-3'-phosphate
  modified_base 19: mod_base = OTHER; note = 2'-O-methyladenosine-3'-phosphate
  modified_base 20: mod_base = OTHER; note = 2'-O-methylguanosine-3'-phosphate
  modified_base 21: mod_base = OTHER; note = 2'-O-methyladenosine
catattgagttattttgcaga

SEQ ID NO: 3554 - RNA, 21 nt, synthetic construct
  source 1..21: mol_type = other RNA
  modified_base 1: mod_base = OTHER; note = 2'-O-methyluridine-3'-phosphate
  modified_base 2: mod_base = OTHER; note = 2'-O-methyladenosine-3'-phosphate
  modified_base 3: mod_base = OTHER; note = 2'-O-methyluridine-3'-phosphate
  modified_base 4: mod_base = OTHER; note = 2'-O-methyluridine-3'-phosphate
  modified_base 5: mod_base = OTHER; note = 2'-O-methyluridine-3'-phosphate
  modified_base 6: mod_base = OTHER; note = 2'-O-methyluridine-3'-phosphate
  modified_base 7: mod_base = OTHER; note = 2'-deoxy-2'-fluoroguanosine-3'-phosphate
  modified_base 8: mod_base = OTHER; note = 2'-O-methylcytidine-3'-phosphate
  modified_base 9: mod_base = OTHER; note = 2'-deoxy-2'-fluoroadenosine-3'-phosphate
  modified_base 10: mod_base = OTHER; note = 2'-deoxy-2'-fluoroguanosine-3'-phosphate
  modified_base 11: mod_base = OTHER; note = 2'-deoxy-2'-fluoroadenosine-3'-phosphate
  modified_base 12: mod_base = OTHER; note = 2'-O-methyladenosine-3'-phosphate
  modified_base 13: mod_base = OTHER; note = 2'-O-methyluridine-3'-phosphate
  modified_base 14: mod_base = OTHER; note = 2'-O-methylcytidine-3'-phosphate
  modified_base 15: mod_base = OTHER; note = 2'-O-methyladenosine-3'-phosphate
  modified_base 16: mod_base = OTHER; note = 2'-O-methyluridine-3'-phosphate
  modified_base 17: mod_base = OTHER; note = 2'-O-methyladenosine-3'-phosphate
  modified_base 18: mod_base = OTHER; note = 2'-O-methyladenosine-3'-phosphate
  modified_base 19: mod_base = OTHER; note = 2'-O-methyluridine-3'-phosphate
  modified_base 20: mod_base = OTHER; note = 2'-O-methylguanosine-3'-phosphate
  modified_base 21: mod_base = OTHER; note = 2'-O-methyladenosine
tattttgcagaatcataatga

SEQ ID NO: 3555 - RNA, 21 nt, synthetic construct
  source 1..21: mol_type = other RNA
  modified_base 1: mod_base = OTHER; note = 2'-O-methyladenosine-3'-phosphate
  modified_base 2: mod_base = OTHER; note = 2'-O-methyluridine-3'-phosphate
  modified_base 3: mod_base = OTHER; note = 2'-O-methyluridine-3'-phosphate
  modified_base 4: mod_base = OTHER; note = 2'-O-methyluridine-3'-phosphate
  modified_base 5: mod_base = OTHER; note = 2'-O-methyluridine-3'-phosphate
  modified_base 6: mod_base = OTHER; note = 2'-O-methylguanosine-3'-phosphate
  modified_base 7: mod_base = OTHER; note = 2'-deoxy-2'-fluorocytidine-3'-phosphate
  modified_base 8: mod_base = OTHER; note = 2'-O-methyladenosine-3'-phosphate
  modified_base 9: mod_base = OTHER; note = 2'-deoxy-2'-fluoroguanosine-3'-phosphate
  modified_base 10: mod_base = OTHER; note = 2'-deoxy-2'-fluoroadenosine-3'-phosphate
  modified_base 11: mod_base = OTHER; note = 2'-deoxy-2'-fluoroadenosine-3'-phosphate
  modified_base 12: mod_base = OTHER; note = 2'-O-methyluridine-3'-phosphate
  modified_base 13: mod_base = OTHER; note = 2'-O-methylcytidine-3'-phosphate
  modified_base 14: mod_base = OTHER; note = 2'-O-methyladenosine-3'-phosphate
  modified_base 15: mod_base = OTHER; note = 2'-O-methyluridine-3'-phosphate
  modified_base 16: mod_base = OTHER; note = 2'-O-methyladenosine-3'-phosphate
  modified_base 17: mod_base = OTHER; note = 2'-O-methyladenosine-3'-phosphate
  modified_base 18: mod_base = OTHER; note = 2'-O-methyluridine-3'-phosphate
  modified_base 19: mod_base = OTHER; note = 2'-O-methylguanosine-3'-phosphate
  modified_base 20: mod_base = OTHER; note = 2'-O-methylguanosine-3'-phosphate
  modified_base 21: mod_base = OTHER; note = 2'-O-methyladenosine
attttgcagaatcataatgga

SEQ ID NO: 3556 - RNA, 21 nt, synthetic construct
  source 1..21: mol_type = other RNA
  modified_base 1: mod_base = OTHER; note = 2'-O-methyluridine-3'-phosphate
  modified_base 2: mod_base = OTHER; note = 2'-O-methyluridine-3'-phosphate
  modified_base 3: mod_base = OTHER; note = 2'-O-methyluridine-3'-phosphate
  modified_base 4: mod_base = OTHER; note = 2'-O-methyluridine-3'-phosphate
  modified_base 5: mod_base = OTHER; note = 2'-O-methylguanosine-3'-phosphate
  modified_base 6: mod_base = OTHER; note = 2'-O-methylcytidine-3'-phosphate
  modified_base 7: mod_base = OTHER; note = 2'-deoxy-2'-fluoroadenosine-3'-phosphate
  modified_base 8: mod_base = OTHER; note = 2'-O-methylguanosine-3'-phosphate
  modified_base 9: mod_base = OTHER; note = 2'-deoxy-2'-fluoroadenosine-3'-phosphate
  modified_base 10: mod_base = OTHER; note = 2'-deoxy-2'-fluoroadenosine-3'-phosphate
  modified_base 11: mod_base = OTHER; note = 2'-deoxy-2'-fluorouridine-3'-phosphate
  modified_base 12: mod_base = OTHER; note = 2'-O-methylcytidine-3'-phosphate
  modified_base 13: mod_base = OTHER; note = 2'-O-methyladenosine-3'-phosphate
  modified_base 14: mod_base = OTHER; note = 2'-O-methyluridine-3'-phosphate
  modified_base 15: mod_base = OTHER; note = 2'-O-methyladenosine-3'-phosphate
  modified_base 16: mod_base = OTHER; note = 2'-O-methyladenosine-3'-phosphate
  modified_base 17: mod_base = OTHER; note = 2'-O-methyluridine-3'-phosphate
  modified_base 18: mod_base = OTHER; note = 2'-O-methylguanosine-3'-phosphate
  modified_base 19: mod_base = OTHER; note = 2'-O-methylguanosine-3'-phosphate
  modified_base 20: mod_base = OTHER; note = 2'-O-methyladenosine-3'-phosphate
  modified_base 21: mod_base = OTHER; note = 2'-O-methyladenosine
ttttgcagaatcataatggaa

SEQ ID NO: 3557 - RNA, 21 nt, synthetic construct
  source 1..21: mol_type = other RNA
  modified_base 1: mod_base = OTHER; note = 2'-O-methyluridine-3'-phosphate
  modified_base 2: mod_base = OTHER; note = 2'-O-methyluridine-3'-phosphate
  modified_base 3: mod_base = OTHER; note = 2'-O-methyluridine-3'-phosphate
  modified_base 4: mod_base = OTHER; note = 2'-O-methylguanosine-3'-phosphate
  modified_base 5: mod_base = OTHER; note = 2'-O-methylcytidine-3'-phosphate
  modified_base 6: mod_base = OTHER; note = 2'-O-methyladenosine-3'-phosphate
  modified_base 7: mod_base = OTHER; note = 2'-deoxy-2'-fluoroguanosine-3'-phosphate
  modified_base 8: mod_base = OTHER; note = 2'-O-methyladenosine-3'-phosphate
  modified_base 9: mod_base = OTHER; note = 2'-deoxy-2'-fluoroadenosine-3'-phosphate
  modified_base 10: mod_base = OTHER; note = 2'-deoxy-2'-fluorouridine-3'-phosphate
  modified_base 11: mod_base = OTHER; note = 2'-deoxy-2'-fluorocytidine-3'-phosphate
  modified_base 12: mod_base = OTHER; note = 2'-O-methyladenosine-3'-phosphate
  modified_base 13: mod_base = OTHER; note = 2'-O-methyluridine-3'-phosphate
  modified_base 14: mod_base = OTHER; note = 2'-O-methyladenosine-3'-phosphate
  modified_base 15: mod_base = OTHER; note = 2'-O-methyladenosine-3'-phosphate
  modified_base 16: mod_base = OTHER; note = 2'-O-methyluridine-3'-phosphate
  modified_base 17: mod_base = OTHER; note = 2'-O-methylguanosine-3'-phosphate
  modified_base 18: mod_base = OTHER; note = 2'-O-methylguanosine-3'-phosphate
  modified_base 19: mod_base = OTHER; note = 2'-O-methyladenosine-3'-phosphate
  modified_base 20: mod_base = OTHER; note = 2'-O-methylcytidine-3'-phosphate
  modified_base 21: mod_base = OTHER; note = 2'-O-methyladenosine
tttgcagaatcataatggaca

SEQ ID NO: 3558 - RNA, 21 nt, synthetic construct
  source 1..21: mol_type = other RNA
  modified_base 1: mod_base = OTHER; note = 2'-O-methyluridine-3'-phosphate
  modified_base 2: mod_base = OTHER; note = 2'-O-methyluridine-3'-phosphate
  modified_base 3: mod_base = OTHER; note = 2'-O-methylguanosine-3'-phosphate
  modified_base 4: mod_base = OTHER; note = 2'-O-methylcytidine-3'-phosphate
  modified_base 5: mod_base = OTHER; note = 2'-O-methyladenosine-3'-phosphate
  modified_base 6: mod_base = OTHER; note = 2'-O-methylguanosine-3'-phosphate
  modified_base 7: mod_base = OTHER; note = 2'-deoxy-2'-fluoroadenosine-3'-phosphate
  modified_base 8: mod_base = OTHER; note = 2'-O-methyladenosine-3'-phosphate
  modified_base 9: mod_base = OTHER; note = 2'-deoxy-2'-fluorouridine-3'-phosphate
  modified_base 10: mod_base = OTHER; note = 2'-deoxy-2'-fluorocytidine-3'-phosphate
  modified_base 11: mod_base = OTHER; note = 2'-deoxy-2'-fluoroadenosine-3'-phosphate
  modified_base 12: mod_base = OTHER; note = 2'-O-methyluridine-3'-phosphate
  modified_base 13: mod_base = OTHER; note = 2'-O-methyladenosine-3'-phosphate
  modified_base 14: mod_base = OTHER; note = 2'-O-methyladenosine-3'-phosphate
  modified_base 15: mod_base = OTHER; note = 2'-O-methyluridine-3'-phosphate
  modified_base 16: mod_base = OTHER; note = 2'-O-methylguanosine-3'-phosphate
  modified_base 17: mod_base = OTHER; note = 2'-O-methylguanosine-3'-phosphate
  modified_base 18: mod_base = OTHER; note = 2'-O-methyladenosine-3'-phosphate
  modified_base 19: mod_base = OTHER; note = 2'-O-methylcytidine-3'-phosphate
  modified_base 20: mod_base = OTHER; note = 2'-O-methylcytidine-3'-phosphate
  modified_base 21: mod_base = OTHER; note = 2'-O-methyladenosine
ttgcagaatcataatggacca

SEQ ID NO: 3559 - RNA, 21 nt, synthetic construct
  source 1..21: mol_type = other RNA
  modified_base 1: mod_base = OTHER; note = 2'-O-methyluridine-3'-phosphate
  modified_base 2: mod_base = OTHER; note = 2'-O-methylguanosine-3'-phosphate
  modified_base 3: mod_base = OTHER; note = 2'-O-methylcytidine-3'-phosphate
  modified_base 4: mod_base = OTHER; note = 2'-O-methyladenosine-3'-phosphate
  modified_base 5: mod_base = OTHER; note = 2'-O-methylguanosine-3'-phosphate
  modified_base 6: mod_base = OTHER; note = 2'-O-methyladenosine-3'-phosphate
  modified_base 7: mod_base = OTHER; note = 2'-deoxy-2'-fluoroadenosine-3'-phosphate
  modified_base 8: mod_base = OTHER; note = 2'-O-methyluridine-3'-phosphate
  modified_base 9: mod_base = OTHER; note = 2'-deoxy-2'-fluorocytidine-3'-phosphate
  modified_base 10: mod_base = OTHER; note = 2'-deoxy-2'-fluoroadenosine-3'-phosphate
  modified_base 11: mod_base = OTHER; note = 2'-deoxy-2'-fluorouridine-3'-phosphate
  modified_base 12: mod_base = OTHER; note = 2'-O-methyladenosine-3'-phosphate
  modified_base 13: mod_base = OTHER; note = 2'-O-methyladenosine-3'-phosphate
  modified_base 14: mod_base = OTHER; note = 2'-O-methyluridine-3'-phosphate
  modified_base 15: mod_base = OTHER; note = 2'-O-methylguanosine-3'-phosphate
  modified_base 16: mod_base = OTHER; note = 2'-O-methylguanosine-3'-phosphate
  modified_base 17: mod_base = OTHER; note = 2'-O-methyladenosine-3'-phosphate
  modified_base 18: mod_base = OTHER; note = 2'-O-methylcytidine-3'-phosphate
  modified_base 19: mod_base = OTHER; note = 2'-O-methylcytidine-3'-phosphate
  modified_base 20: mod_base = OTHER; note = 2'-O-methylcytidine-3'-phosphate
  modified_base 21: mod_base = OTHER; note = 2'-O-methyladenosine
tgcagaatcataatggaccca

SEQ ID NO: 3560 - RNA, 21 nt, synthetic construct
  source 1..21: mol_type = other RNA
  modified_base 1: mod_base = OTHER; note = 2'-O-methylguanosine-3'-phosphate
  modified_base 2: mod_base = OTHER; note = 2'-O-methylcytidine-3'-phosphate
  modified_base 3: mod_base = OTHER; note = 2'-O-methyladenosine-3'-phosphate
  modified_base 4: mod_base = OTHER; note = 2'-O-methylguanosine-3'-phosphate
  modified_base 5: mod_base = OTHER; note = 2'-O-methyladenosine-3'-phosphate
  modified_base 6: mod_base = OTHER; note = 2'-O-methyladenosine-3'-phosphate
  modified_base 7: mod_base = OTHER; note = 2'-deoxy-2'-fluorouridine-3'-phosphate
  modified_base 8: mod_base = OTHER; note = 2'-O-methylcytidine-3'-phosphate
  modified_base 9: mod_base = OTHER; note = 2'-deoxy-2'-fluoroadenosine-3'-phosphate
  modified_base 10: mod_base = OTHER; note = 2'-deoxy-2'-fluorouridine-3'-phosphate
  modified_base 11: mod_base = OTHER; note = 2'-deoxy-2'-fluoroadenosine-3'-phosphate
  modified_base 12: mod_base = OTHER; note = 2'-O-methyladenosine-3'-phosphate
  modified_base 13: mod_base = OTHER; note = 2'-O-methyluridine-3'-phosphate
  modified_base 14: mod_base = OTHER; note = 2'-O-methylguanosine-3'-phosphate
  modified_base 15: mod_base = OTHER; note = 2'-O-methylguanosine-3'-phosphate
  modified_base 16: mod_base = OTHER; note = 2'-O-methyladenosine-3'-phosphate
  modified_base 17: mod_base = OTHER; note = 2'-O-methylcytidine-3'-phosphate
  modified_base 18: mod_base = OTHER; note = 2'-O-methylcytidine-3'-phosphate
  modified_base 19: mod_base = OTHER; note = 2'-O-methylcytidine-3'-phosphate
  modified_base 20: mod_base = OTHER; note = 2'-O-methylguanosine-3'-phosphate
  modified_base 21: mod_base = OTHER; note = 2'-O-methyladenosine
gcagaatcataatggacccga

SEQ ID NO: 3561 - RNA, 21 nt, synthetic construct
  source 1..21: mol_type = other RNA
  modified_base 1: mod_base = OTHER; note = 2'-O-methylcytidine-3'-phosphate
  modified_base 2: mod_base = OTHER; note = 2'-O-methyladenosine-3'-phosphate
  modified_base 3: mod_base = OTHER; note = 2'-O-methylguanosine-3'-phosphate
  modified_base 4: mod_base = OTHER; note = 2'-O-methyladenosine-3'-phosphate
  modified_base 5: mod_base = OTHER; note = 2'-O-methyladenosine-3'-phosphate
  modified_base 6: mod_base = OTHER; note = 2'-O-methyluridine-3'-phosphate
  modified_base 7: mod_base = OTHER; note = 2'-deoxy-2'-fluorocytidine-3'-phosphate
  modified_base 8: mod_base = OTHER; note = 2'-O-methyladenosine-3'-phosphate
  modified_base 9: mod_base = OTHER; note = 2'-deoxy-2'-fluorouridine-3'-phosphate
  modified_base 10: mod_base = OTHER; note = 2'-deoxy-2'-fluoroadenosine-3'-phosphate
  modified_base 11: mod_base = OTHER; note = 2'-deoxy-2'-fluoroadenosine-3'-phosphate
  modified_base 12: mod_base = OTHER; note = 2'-O-methyluridine-3'-phosphate
  modified_base 13: mod_base = OTHER; note = 2'-O-methylguanosine-3'-phosphate
  modified_base 14: mod_base = OTHER; note = 2'-O-methylguanosine-3'-phosphate
  modified_base 15: mod_base = OTHER; note = 2'-O-methyladenosine-3'-phosphate
  modified_base 16: mod_base = OTHER; note = 2'-O-methylcytidine-3'-phosphate
  modified_base 17: mod_base = OTHER; note = 2'-O-methylcytidine-3'-phosphate
  modified_base 18: mod_base = OTHER; note = 2'-O-methylcytidine-3'-phosphate
  modified_base 19: mod_base = OTHER; note = 2'-O-methylguanosine-3'-phosphate
  modified_base 20: mod_base = OTHER; note = 2'-O-methylcytidine-3'-phosphate
  modified_base 21: mod_base = OTHER; note = 2'-O-methyladenosine
cagaatcataatggacccgca

SEQ ID NO: 3562 - RNA, 21 nt, synthetic construct
  source 1..21: mol_type = other RNA
  modified_base 1: mod_base = OTHER; note = 2'-O-methyladenosine-3'-phosphate
  modified_base 2: mod_base = OTHER; note = 2'-O-methylguanosine-3'-phosphate
  modified_base 3: mod_base = OTHER; note = 2'-O-methyladenosine-3'-phosphate
  modified_base 4: mod_base = OTHER; note = 2'-O-methyladenosine-3'-phosphate
  modified_base 5: mod_base = OTHER; note = 2'-O-methyluridine-3'-phosphate
  modified_base 6: mod_base = OTHER; note = 2'-O-methylcytidine-3'-phosphate
  modified_base 7: mod_base = OTHER; note = 2'-deoxy-2'-fluoroadenosine-3'-phosphate
  modified_base 8: mod_base = OTHER; note = 2'-O-methyluridine-3'-phosphate
  modified_base 9: mod_base = OTHER; note = 2'-deoxy-2'-fluoroadenosine-3'-phosphate
  modified_base 10: mod_base = OTHER; note = 2'-deoxy-2'-fluoroadenosine-3'-phosphate
  modified_base 11: mod_base = OTHER; note = 2'-deoxy-2'-fluorouridine-3'-phosphate
  modified_base 12: mod_base = OTHER; note = 2'-O-methylguanosine-3'-phosphate
  modified_base 13: mod_base = OTHER; note = 2'-O-methylguanosine-3'-phosphate
  modified_base 14: mod_base = OTHER; note = 2'-O-methyladenosine-3'-phosphate
  modified_base 15: mod_base = OTHER; note = 2'-O-methylcytidine-3'-phosphate
  modified_base 16: mod_base = OTHER; note = 2'-O-methylcytidine-3'-phosphate
  modified_base 17: mod_base = OTHER; note = 2'-O-methylcytidine-3'-phosphate
  modified_base 18: mod_base = OTHER; note = 2'-O-methylguanosine-3'-phosphate
  modified_base 19: mod_base = OTHER; note = 2'-O-methylcytidine-3'-phosphate
  modified_base 20: mod_base = OTHER; note = 2'-O-methyladenosine-3'-phosphate
  modified_base 21: mod_base = OTHER; note = 2'-O-methyladenosine
agaatcataatggacccgcaa

SEQ ID NO: 3563 - RNA, 21 nt, synthetic construct
  source 1..21: mol_type = other RNA
  modified_base 1: mod_base = OTHER; note = 2'-O-methylguanosine-3'-phosphate
  modified_base 2: mod_base = OTHER; note = 2'-O-methyladenosine-3'-phosphate
  modified_base 3: mod_base = OTHER; note = 2'-O-methyladenosine-3'-phosphate
  modified_base 4: mod_base = OTHER; note = 2'-O-methyluridine-3'-phosphate
  modified_base 5: mod_base = OTHER; note = 2'-O-methylcytidine-3'-phosphate
  modified_base 6: mod_base = OTHER; note = 2'-O-methyladenosine-3'-phosphate
  modified_base 7: mod_base = OTHER; note = 2'-deoxy-2'-fluorouridine-3'-phosphate
  modified_base 8: mod_base = OTHER; note = 2'-O-methyladenosine-3'-phosphate
  modified_base 9: mod_base = OTHER; note = 2'-deoxy-2'-fluoroadenosine-3'-phosphate
  modified_base 10: mod_base = OTHER; note = 2'-deoxy-2'-fluorouridine-3'-phosphate
  modified_base 11: mod_base = OTHER; note = 2'-deoxy-2'-fluoroguanosine-3'-phosphate
  modified_base 12: mod_base = OTHER; note = 2'-O-methylguanosine-3'-phosphate
  modified_base 13: mod_base = OTHER; note = 2'-O-methyladenosine-3'-phosphate
  modified_base 14: mod_base = OTHER; note = 2'-O-methylcytidine-3'-phosphate
  modified_base 15: mod_base = OTHER; note = 2'-O-methylcytidine-3'-phosphate
  modified_base 16: mod_base = OTHER; note = 2'-O-methylcytidine-3'-phosphate
  modified_base 17: mod_base = OTHER; note = 2'-O-methylguanosine-3'-phosphate
  modified_base 18: mod_base = OTHER; note = 2'-O-methylcytidine-3'-phosphate
  modified_base 19: mod_base = OTHER; note = 2'-O-methyladenosine-3'-phosphate
  modified_base 20: mod_base = OTHER; note = 2'-O-methylcytidine-3'-phosphate
  modified_base 21: mod_base = OTHER; note = 2'-O-methyladenosine
gaatcataatggacccgcaca

SEQ ID NO: 3564 - RNA, 21 nt, synthetic construct
  source 1..21: mol_type = other RNA
  modified_base 1: mod_base = OTHER; note = 2'-O-methyladenosine-3'-phosphate
  modified_base 2: mod_base = OTHER; note = 2'-O-methyladenosine-3'-phosphate
  modified_base 3: mod_base = OTHER; note = 2'-O-methyluridine-3'-phosphate
  modified_base 4: mod_base = OTHER; note = 2'-O-methylcytidine-3'-phosphate
  modified_base 5: mod_base = OTHER; note = 2'-O-methyladenosine-3'-phosphate
  modified_base 6: mod_base = OTHER; note = 2'-O-methyluridine-3'-phosphate
  modified_base 7: mod_base = OTHER; note = 2'-deoxy-2'-fluoroadenosine-3'-phosphate
  modified_base 8: mod_base = OTHER; note = 2'-O-methyladenosine-3'-phosphate
  modified_base 9: mod_base = OTHER; note = 2'-deoxy-2'-fluorouridine-3'-phosphate
  modified_base 10: mod_base = OTHER; note = 2'-deoxy-2'-fluoroguanosine-3'-phosphate
  modified_base 11: mod_base = OTHER; note = 2'-deoxy-2'-fluoroguanosine-3'-phosphate
  modified_base 12: mod_base = OTHER; note = 2'-O-methyladenosine-3'-phosphate
  modified_base 13: mod_base = OTHER; note = 2'-O-methylcytidine-3'-phosphate
  modified_base 14: mod_base = OTHER; note = 2'-O-methylcytidine-3'-phosphate
  modified_base 15: mod_base = OTHER; note = 2'-O-methylcytidine-3'-phosphate
  modified_base 16: mod_base = OTHER; note = 2'-O-methylguanosine-3'-phosphate
  modified_base 17: mod_base = OTHER; note = 2'-O-methylcytidine-3'-phosphate
  modified_base 18: mod_base = OTHER; note = 2'-O-methyladenosine-3'-phosphate
  modified_base 19: mod_base = OTHER; note = 2'-O-methylcytidine-3'-phosphate
  modified_base 20: mod_base = OTHER; note = 2'-O-methyladenosine-3'-phosphate
  modified_base 21: mod_base = OTHER; note = 2'-O-methyladenosine
aatcataatggacccgcacaa

SEQ ID NO: 3565 - RNA, 21 nt, synthetic construct
  source 1..21: mol_type = other RNA
  modified_base 1: mod_base = OTHER; note = 2'-O-methyladenosine-3'-phosphate
  modified_base 2: mod_base = OTHER; note = 2'-O-methyluridine-3'-phosphate
  modified_base 3: mod_base = OTHER; note = 2'-O-methylcytidine-3'-phosphate
  modified_base 4: mod_base = OTHER; note = 2'-O-methyladenosine-3'-phosphate
  modified_base 5: mod_base = OTHER; note = 2'-O-methyluridine-3'-phosphate
  modified_base 6: mod_base = OTHER; note = 2'-O-methyladenosine-3'-phosphate
  modified_base 7: mod_base = OTHER; note = 2'-deoxy-2'-fluoroadenosine-3'-phosphate
  modified_base 8: mod_base = OTHER; note = 2'-O-methyluridine-3'-phosphate
  modified_base 9: mod_base = OTHER; note = 2'-deoxy-2'-fluoroguanosine-3'-phosphate
  modified_base 10: mod_base = OTHER; note = 2'-deoxy-2'-fluoroguanosine-3'-phosphate
  modified_base 11: mod_base = OTHER; note = 2'-deoxy-2'-fluoroadenosine-3'-phosphate
  modified_base 12: mod_base = OTHER; note = 2'-O-methylcytidine-3'-phosphate
  modified_base 13: mod_base = OTHER; note = 2'-O-methylcytidine-3'-phosphate
  modified_base 14: mod_base = OTHER; note = 2'-O-methylcytidine-3'-phosphate
  modified_base 15: mod_base = OTHER; note = 2'-O-methylguanosine-3'-phosphate
  modified_base 16: mod_base = OTHER; note = 2'-O-methylcytidine-3'-phosphate
  modified_base 17: mod_base = OTHER; note = 2'-O-methyladenosine-3'-phosphate
  modified_base 18: mod_base = OTHER; note = 2'-O-methylcytidine-3'-phosphate
  modified_base 19: mod_base = OTHER; note = 2'-O-methyladenosine-3'-phosphate
  modified_base 20: mod_base = OTHER; note = 2'-O-methyladenosine-3'-phosphate
  modified_base 21: mod_base = OTHER; note = 2'-O-methyladenosine
atcataatggacccgcacaaa

SEQ ID NO: 3566 - RNA, 21 nt, synthetic construct
  source 1..21: mol_type = other RNA
  modified_base 1: mod_base = OTHER; note = 2'-O-methyluridine-3'-phosphate
  modified_base 2: mod_base = OTHER; note = 2'-O-methylcytidine-3'-phosphate
  modified_base 3: mod_base = OTHER; note = 2'-O-methyladenosine-3'-phosphate
  modified_base 4: mod_base = OTHER; note = 2'-O-methyluridine-3'-phosphate
  modified_base 5: mod_base = OTHER; note = 2'-O-methyladenosine-3'-phosphate
  modified_base 6: mod_base = OTHER; note = 2'-O-methyladenosine-3'-phosphate
  modified_base 7: mod_base = OTHER; note = 2'-deoxy-2'-fluorouridine-3'-phosphate
  modified_base 8: mod_base = OTHER; note = 2'-O-methylguanosine-3'-phosphate
  modified_base 9: mod_base = OTHER; note = 2'-deoxy-2'-fluoroguanosine-3'-phosphate
  modified_base 10: mod_base = OTHER; note = 2'-deoxy-2'-fluoroadenosine-3'-phosphate
  modified_base 11: mod_base = OTHER; note = 2'-deoxy-2'-fluorocytidine-3'-phosphate
  modified_base 12: mod_base = OTHER; note = 2'-O-methylcytidine-3'-phosphate
  modified_base 13: mod_base = OTHER; note = 2'-O-methylcytidine-3'-phosphate
  modified_base 14: mod_base = OTHER; note = 2'-O-methylguanosine-3'-phosphate
  modified_base 15: mod_base = OTHER; note = 2'-O-methylcytidine-3'-phosphate
  modified_base 16: mod_base = OTHER; note = 2'-O-methyladenosine-3'-phosphate
  modified_base 17: mod_base = OTHER; note = 2'-O-methylcytidine-3'-phosphate
  modified_base 18: mod_base = OTHER; note = 2'-O-methyladenosine-3'-phosphate
  modified_base 19: mod_base = OTHER; note = 2'-O-methyladenosine-3'-phosphate
  modified_base 20: mod_base = OTHER; note = 2'-O-methyladenosine-3'-phosphate
  modified_base 21: mod_base = OTHER; note = 2'-O-methyladenosine
tcataatggacccgcacaaaa

SEQ ID NO: 3567 - RNA, 21 nt, synthetic construct
  source 1..21: mol_type = other RNA
  modified_base 1: mod_base = OTHER; note = 2'-O-methylcytidine-3'-phosphate
  modified_base 2: mod_base = OTHER; note = 2'-O-methyladenosine-3'-phosphate
  modified_base 3: mod_base = OTHER; note = 2'-O-methyluridine-3'-phosphate
  modified_base 4: mod_base = OTHER; note = 2'-O-methyladenosine-3'-phosphate
  modified_base 5: mod_base = OTHER; note = 2'-O-methyladenosine-3'-phosphate
  modified_base 6: mod_base = OTHER; note = 2'-O-methyluridine-3'-phosphate
  modified_base 7: mod_base = OTHER; note = 2'-deoxy-2'-fluoroguanosine-3'-phosphate
  modified_base 8: mod_base = OTHER; note = 2'-O-methylguanosine-3'-phosphate
  modified_base 9: mod_base = OTHER; note = 2'-deoxy-2'-fluoroadenosine-3'-phosphate
  modified_base 10: mod_base = OTHER; note = 2'-deoxy-2'-fluorocytidine-3'-phosphate
  modified_base 11: mod_base = OTHER; note = 2'-deoxy-2'-fluorocytidine-3'-phosphate
  modified_base 12: mod_base = OTHER; note = 2'-O-methylcytidine-3'-phosphate
  modified_base 13: mod_base = OTHER; note = 2'-O-methylguanosine-3'-phosphate
  modified_base 14: mod_base = OTHER; note = 2'-O-methylcytidine-3'-phosphate
  modified_base 15: mod_base = OTHER; note = 2'-O-methyladenosine-3'-phosphate
  modified_base 16: mod_base = OTHER; note = 2'-O-methylcytidine-3'-phosphate
  modified_base 17: mod_base = OTHER; note = 2'-O-methyladenosine-3'-phosphate
  modified_base 18: mod_base = OTHER; note = 2'-O-methyladenosine-3'-phosphate
  modified_base 19: mod_base = OTHER; note = 2'-O-methyladenosine-3'-phosphate
  modified_base 20: mod_base = OTHER; note = 2'-O-methyladenosine-3'-phosphate
  modified_base 21: mod_base = OTHER; note = 2'-O-methyladenosine
cataatggacccgcacaaaaa

SEQ ID NO: 3568 - RNA, 21 nt, synthetic construct
  source 1..21: mol_type = other RNA
  modified_base 1: mod_base = OTHER; note = 2'-O-methyladenosine-3'-phosphate
  modified_base 2: mod_base = OTHER; note = 2'-O-methyluridine-3'-phosphate
  modified_base 3: mod_base = OTHER; note = 2'-O-methyladenosine-3'-phosphate
  modified_base 4: mod_base = OTHER; note = 2'-O-methyladenosine-3'-phosphate
  modified_base 5: mod_base = OTHER; note = 2'-O-methyluridine-3'-phosphate
  modified_base 6: mod_base = OTHER; note = 2'-O-methylguanosine-3'-phosphate
  modified_base 7: mod_base = OTHER; note = 2'-deoxy-2'-fluoroguanosine-3'-phosphate
  modified_base 8: mod_base = OTHER; note = 2'-O-methyladenosine-3'-phosphate
  modified_base 9: mod_base = OTHER; note = 2'-deoxy-2'-fluorocytidine-3'-phosphate
  modified_base 10: mod_base = OTHER; note = 2'-deoxy-2'-fluorocytidine-3'-phosphate
  modified_base 11: mod_base = OTHER; note = 2'-deoxy-2'-fluorocytidine-3'-phosphate
  modified_base 12: mod_base = OTHER; note = 2'-O-methylguanosine-3'-phosphate
  modified_base 13: mod_base = OTHER; note = 2'-O-methylcytidine-3'-phosphate
  modified_base 14: mod_base = OTHER; note = 2'-O-methyladenosine-3'-phosphate
  modified_base 15: mod_base = OTHER; note = 2'-O-methylcytidine-3'-phosphate
  modified_base 16: mod_base = OTHER; note = 2'-O-methyladenosine-3'-phosphate
  modified_base 17: mod_base = OTHER; note = 2'-O-methyladenosine-3'-phosphate
  modified_base 18: mod_base = OTHER; note = 2'-O-methyladenosine-3'-phosphate
  modified_base 19: mod_base = OTHER; note = 2'-O-methyladenosine-3'-phosphate
  modified_base 20: mod_base = OTHER; note = 2'-O-methyluridine-3'-phosphate
  modified_base 21: mod_base = OTHER; note = 2'-O-methyladenosine
ataatggacccgcacaaaata

SEQ ID NO: 3569 - RNA, 21 nt, synthetic construct
  source 1..21: mol_type = other RNA
  modified_base 1: mod_base = OTHER; note = 2'-O-methyluridine-3'-phosphate
  modified_base 2: mod_base = OTHER; note = 2'-O-methyladenosine-3'-phosphate
  modified_base 3: mod_base = OTHER; note = 2'-O-methyladenosine-3'-phosphate
  modified_base 4: mod_base = OTHER; note = 2'-O-methyluridine-3'-phosphate
  modified_base 5: mod_base = OTHER; note = 2'-O-methylguanosine-3'-phosphate
  modified_base 6: mod_base = OTHER; note = 2'-O-methylguanosine-3'-phosphate
  modified_base 7: mod_base = OTHER; note = 2'-deoxy-2'-fluoroadenosine-3'-phosphate
  modified_base 8: mod_base = OTHER; note = 2'-O-methylcytidine-3'-phosphate
  modified_base 9: mod_base = OTHER; note = 2'-deoxy-2'-fluorocytidine-3'-phosphate
  modified_base 10: mod_base = OTHER; note = 2'-deoxy-2'-fluorocytidine-3'-phosphate
  modified_base 11: mod_base = OTHER; note = 2'-deoxy-2'-fluoroguanosine-3'-phosphate
  modified_base 12: mod_base = OTHER; note = 2'-O-methylcytidine-3'-phosphate
  modified_base 13: mod_base = OTHER; note = 2'-O-methyladenosine-3'-phosphate
  modified_base 14: mod_base = OTHER; note = 2'-O-methylcytidine-3'-phosphate
  modified_base 15: mod_base = OTHER; note = 2'-O-methyladenosine-3'-phosphate
  modified_base 16: mod_base = OTHER; note = 2'-O-methyladenosine-3'-phosphate
  modified_base 17: mod_base = OTHER; note = 2'-O-methyladenosine-3'-phosphate
  modified_base 18: mod_base = OTHER; note = 2'-O-methyladenosine-3'-phosphate
  modified_base 19: mod_base = OTHER; note = 2'-O-methyluridine-3'-phosphate
  modified_base 20: mod_base = OTHER; note = 2'-O-methylcytidine-3'-phosphate
  modified_base 21: mod_base = OTHER; note = 2'-O-methyladenosine
taatggacccgcacaaaatca

SEQ ID NO: 3570 - RNA, 21 nt, synthetic construct
  source 1..21: mol_type = other RNA
  modified_base 1: mod_base = OTHER; note = 2'-O-methyladenosine-3'-phosphate
  modified_base 2: mod_base = OTHER; note = 2'-O-methyladenosine-3'-phosphate
  modified_base 3: mod_base = OTHER; note = 2'-O-methyluridine-3'-phosphate
  modified_base 4: mod_base = OTHER; note = 2'-O-methylguanosine-3'-phosphate
  modified_base 5: mod_base = OTHER; note = 2'-O-methylguanosine-3'-phosphate
  modified_base 6: mod_base = OTHER; note = 2'-O-methyladenosine-3'-phosphate
  modified_base 7: mod_base = OTHER; note = 2'-deoxy-2'-fluorocytidine-3'-phosphate
  modified_base 8: mod_base = OTHER; note = 2'-O-methylcytidine-3'-phosphate
  modified_base 9: mod_base = OTHER; note = 2'-deoxy-2'-fluorocytidine-3'-phosphate
  modified_base 10: mod_base = OTHER; note = 2'-deoxy-2'-fluoroguanosine-3'-phosphate
  modified_base 11: mod_base = OTHER; note = 2'-deoxy-2'-fluorocytidine-3'-phosphate
  modified_base 12: mod_base = OTHER; note = 2'-O-methyladenosine-3'-phosphate
  modified_base 13: mod_base = OTHER; note = 2'-O-methylcytidine-3'-phosphate
  modified_base 14: mod_base = OTHER; note = 2'-O-methyladenosine-3'-phosphate
  modified_base 15: mod_base = OTHER; note = 2'-O-methyladenosine-3'-phosphate
  modified_base 16: mod_base = OTHER; note = 2'-O-methyladenosine-3'-phosphate
  modified_base 17: mod_base = OTHER; note = 2'-O-methyladenosine-3'-phosphate
  modified_base 18: mod_base = OTHER; note = 2'-O-methyluridine-3'-phosphate
  modified_base 19: mod_base = OTHER; note = 2'-O-methylcytidine-3'-phosphate
  modified_base 20: mod_base = OTHER; note = 2'-O-methyluridine-3'-phosphate
  modified_base 21: mod_base = OTHER; note = 2'-O-methyladenosine
aatggacccgcacaaaatcta

SEQ ID NO: 3571 - RNA, 21 nt, synthetic construct
  source 1..21: mol_type = other RNA
  modified_base 1: mod_base = OTHER; note = 2'-O-methyladenosine-3'-phosphate
  modified_base 2: mod_base = OTHER; note = 2'-O-methyluridine-3'-phosphate
  modified_base 3: mod_base = OTHER; note = 2'-O-methylguanosine-3'-phosphate
  modified_base 4: mod_base = OTHER; note = 2'-O-methylguanosine-3'-phosphate
  modified_base 5: mod_base = OTHER; note = 2'-O-methyladenosine-3'-phosphate
  modified_base 6: mod_base = OTHER; note = 2'-O-methylcytidine-3'-phosphate
  modified_base 7: mod_base = OTHER; note = 2'-deoxy-2'-fluorocytidine-3'-phosphate
  modified_base 8: mod_base = OTHER; note = 2'-O-methylcytidine-3'-phosphate
  modified_base 9: mod_base = OTHER; note = 2'-deoxy-2'-fluoroguanosine-3'-phosphate
  modified_base 10: mod_base = OTHER; note = 2'-deoxy-2'-fluorocytidine-3'-phosphate
  modified_base 11: mod_base = OTHER; note = 2'-deoxy-2'-fluoroadenosine-3'-phosphate
  modified_base 12: mod_base = OTHER; note = 2'-O-methylcytidine-3'-phosphate
  modified_base 13: mod_base = OTHER; note = 2'-O-methyladenosine-3'-phosphate
  modified_base 14: mod_base = OTHER; note = 2'-O-methyladenosine-3'-phosphate
  modified_base 15: mod_base = OTHER; note = 2'-O-methyladenosine-3'-phosphate
  modified_base 16: mod_base = OTHER; note = 2'-O-methyladenosine-3'-phosphate
  modified_base 17: mod_base = OTHER; note = 2'-O-methyluridine-3'-phosphate
  modified_base 18: mod_base = OTHER; note = 2'-O-methylcytidine-3'-phosphate
  modified_base 19: mod_base = OTHER; note = 2'-O-methyluridine-3'-phosphate
  modified_base 20: mod_base = OTHER; note = 2'-O-methylcytidine-3'-phosphate
  modified_base 21: mod_base = OTHER; note = 2'-O-methyladenosine
atggacccgcacaaaatctca

SEQ ID NO: 3572 - RNA, 21 nt, synthetic construct
  source 1..21: mol_type = other RNA
  modified_base 1: mod_base = OTHER; note = 2'-O-methyluridine-3'-phosphate
  modified_base 2: mod_base = OTHER; note = 2'-O-methylguanosine-3'-phosphate
  modified_base 3: mod_base = OTHER; note = 2'-O-methylguanosine-3'-phosphate
  modified_base 4: mod_base = OTHER; note = 2'-O-methyladenosine-3'-phosphate
  modified_base 5: mod_base = OTHER; note = 2'-O-methylcytidine-3'-phosphate
  modified_base 6: mod_base = OTHER; note = 2'-O-methylcytidine-3'-phosphate
  modified_base 7: mod_base = OTHER; note = 2'-deoxy-2'-fluorocytidine-3'-phosphate
  modified_base 8: mod_base = OTHER; note = 2'-O-methylguanosine-3'-phosphate
  modified_base 9: mod_base = OTHER; note = 2'-deoxy-2'-fluorocytidine-3'-phosphate
  modified_base 10: mod_base = OTHER; note = 2'-deoxy-2'-fluoroadenosine-3'-phosphate
  modified_base 11: mod_base = OTHER; note = 2'-deoxy-2'-fluorocytidine-3'-phosphate
  modified_base 12: mod_base = OTHER; note = 2'-O-methyladenosine-3'-phosphate
  modified_base 13: mod_base = OTHER; note = 2'-O-methyladenosine-3'-phosphate
  modified_base 14: mod_base = OTHER; note = 2'-O-methyladenosine-3'-phosphate
  modified_base 15: mod_base = OTHER; note = 2'-O-methyladenosine-3'-phosphate
  modified_base 16: mod_base = OTHER; note = 2'-O-methyluridine-3'-phosphate
  modified_base 17: mod_base = OTHER; note = 2'-O-methylcytidine-3'-phosphate
  modified_base 18: mod_base = OTHER; note = 2'-O-methyluridine-3'-phosphate
  modified_base 19: mod_base = OTHER; note = 2'-O-methylcytidine-3'-phosphate
  modified_base 20: mod_base = OTHER; note = 2'-O-methyladenosine-3'-phosphate
  modified_base 21: mod_base = OTHER; note = 2'-O-methyladenosine
tggacccgcacaaaatctcaa

SEQ ID NO: 3573 - RNA, 21 nt, synthetic construct
  source 1..21: mol_type = other RNA
  modified_base 1: mod_base = OTHER; note = 2'-O-methylguanosine-3'-phosphate
  modified_base 2: mod_base = OTHER; note = 2'-O-methylguanosine-3'-phosphate
  modified_base 3: mod_base = OTHER; note = 2'-O-methyladenosine-3'-phosphate
  modified_base 4: mod_base = OTHER; note = 2'-O-methylcytidine-3'-phosphate
  modified_base 5: mod_base = OTHER; note = 2'-O-methylcytidine-3'-phosphate
  modified_base 6: mod_base = OTHER; note = 2'-O-methylcytidine-3'-phosphate
  modified_base 7: mod_base = OTHER; note = 2'-deoxy-2'-fluoroguanosine-3'-phosphate
  modified_base 8: mod_base = OTHER; note = 2'-O-methylcytidine-3'-phosphate
  modified_base 9: mod_base = OTHER; note = 2'-deoxy-2'-fluoroadenosine-3'-phosphate
  modified_base 10: mod_base = OTHER; note = 2'-deoxy-2'-fluorocytidine-3'-phosphate
  modified_base 11: mod_base = OTHER; note = 2'-deoxy-2'-fluoroadenosine-3'-phosphate
  modified_base 12: mod_base = OTHER; note = 2'-O-methyladenosine-3'-phosphate
  modified_base 13: mod_base = OTHER; note = 2'-O-methyladenosine-3'-phosphate
  modified_base 14: mod_base = OTHER; note = 2'-O-methyladenosine-3'-phosphate
  modified_base 15: mod_base = OTHER; note = 2'-O-methyluridine-3'-phosphate
  modified_base 16: mod_base = OTHER; note = 2'-O-methylcytidine-3'-phosphate
  modified_base 17: mod_base = OTHER; note = 2'-O-methyluridine-3'-phosphate
  modified_base 18: mod_base = OTHER; note = 2'-O-methylcytidine-3'-phosphate
  modified_base 19: mod_base = OTHER; note = 2'-O-methyladenosine-3'-phosphate
  modified_base 20: mod_base = OTHER; note = 2'-O-methylguanosine-3'-phosphate
  modified_base 21: mod_base = OTHER; note = 2'-O-methyladenosine
ggacccgcacaaaatctcaga

SEQ ID NO: 3574 - RNA, 21 nt, synthetic construct
  source 1..21: mol_type = other RNA
  modified_base 1: mod_base = OTHER; note = 2'-O-methylguanosine-3'-phosphate
  modified_base 2: mod_base = OTHER; note = 2'-O-methyladenosine-3'-phosphate
  modified_base 3: mod_base = OTHER; note = 2'-O-methylcytidine-3'-phosphate
  modified_base 4: mod_base = OTHER; note = 2'-O-methylcytidine-3'-phosphate
  modified_base 5: mod_base = OTHER; note = 2'-O-methylcytidine-3'-phosphate
  modified_base 6: mod_base = OTHER; note = 2'-O-methylguanosine-3'-phosphate
  modified_base 7: mod_base = OTHER; note = 2'-deoxy-2'-fluorocytidine-3'-phosphate
  modified_base 8: mod_base = OTHER; note = 2'-O-methyladenosine-3'-phosphate
  modified_base 9: mod_base = OTHER; note = 2'-deoxy-2'-fluorocytidine-3'-phosphate
  modified_base 10: mod_base = OTHER; note = 2'-deoxy-2'-fluoroadenosine-3'-phosphate
  modified_base 11: mod_base = OTHER; note = 2'-deoxy-2'-fluoroadenosine-3'-phosphate
  modified_base 12: mod_base = OTHER; note = 2'-O-methyladenosine-3'-phosphate
  modified_base 13: mod_base = OTHER; note = 2'-O-methyladenosine-3'-phosphate
  modified_base 14: mod_base = OTHER; note = 2'-O-methyluridine-3'-phosphate
  modified_base 15: mod_base = OTHER; note = 2'-O-methylcytidine-3'-phosphate
  modified_base 16: mod_base = OTHER; note = 2'-O-methyluridine-3'-phosphate
  modified_base 17: mod_base = OTHER; note = 2'-O-methylcytidine-3'-phosphate
  modified_base 18: mod_base = OTHER; note = 2'-O-methyladenosine-3'-phosphate
  modified_base 19: mod_base = OTHER; note = 2'-O-methylguanosine-3'-phosphate
  modified_base 20: mod_base = OTHER; note = 2'-O-methyladenosine-3'-phosphate
  modified_base 21: mod_base = OTHER; note = 2'-O-methyladenosine
gacccgcacaaaatctcagaa

SEQ ID NO: 3575 - RNA, 21 nt, synthetic construct
  source 1..21: mol_type = other RNA
  modified_base 1: mod_base = OTHER; note = 2'-O-methyladenosine-3'-phosphate
  modified_base 2: mod_base = OTHER; note = 2'-O-methylcytidine-3'-phosphate
  modified_base 3: mod_base = OTHER; note = 2'-O-methylcytidine-3'-phosphate
  modified_base 4: mod_base = OTHER; note = 2'-O-methylcytidine-3'-phosphate
  modified_base 5: mod_base = OTHER; note = 2'-O-methylguanosine-3'-phosphate
  modified_base 6: mod_base = OTHER; note = 2'-O-methylcytidine-3'-phosphate
  modified_base 7: mod_base = OTHER; note = 2'-deoxy-2'-fluoroadenosine-3'-phosphate
  modified_base 8: mod_base = OTHER; note = 2'-O-methylcytidine-3'-phosphate
  modified_base 9: mod_base = OTHER; note = 2'-deoxy-2'-fluoroadenosine-3'-phosphate
  modified_base 10: mod_base = OTHER; note = 2'-deoxy-2'-fluoroadenosine-3'-phosphate
  modified_base 11: mod_base = OTHER; note = 2'-deoxy-2'-fluoroadenosine-3'-phosphate
  modified_base 12: mod_base = OTHER; note = 2'-O-methyladenosine-3'-phosphate
  modified_base 13: mod_base = OTHER; note = 2'-O-methyluridine-3'-phosphate
  modified_base 14: mod_base = OTHER; note = 2'-O-methylcytidine-3'-phosphate
  modified_base 15: mod_base = OTHER; note = 2'-O-methyluridine-3'-phosphate
  modified_base 16: mod_base = OTHER; note = 2'-O-methylcytidine-3'-phosphate
  modified_base 17: mod_base = OTHER; note = 2'-O-methyladenosine-3'-phosphate
  modified_base 18: mod_base = OTHER; note = 2'-O-methylguanosine-3'-phosphate
  modified_base 19: mod_base = OTHER; note = 2'-O-methyladenosine-3'-phosphate
  modified_base 20: mod_base = OTHER; note = 2'-O-methyladenosine-3'-phosphate
  modified_base 21: mod_base = OTHER; note = 2'-O-methyladenosine
acccgcacaaaatctcagaaa

SEQ ID NO: 3576 - RNA, 21 nt, synthetic construct
  source 1..21: mol_type = other RNA
  modified_base 1: mod_base = OTHER; note = 2'-O-methylcytidine-3'-phosphate
  modified_base 2: mod_base = OTHER; note = 2'-O-methylcytidine-3'-phosphate
  modified_base 3: mod_base = OTHER; note = 2'-O-methylcytidine-3'-phosphate
  modified_base 4: mod_base = OTHER; note = 2'-O-methylguanosine-3'-phosphate
  modified_base 5: mod_base = OTHER; note = 2'-O-methylcytidine-3'-phosphate
  modified_base 6: mod_base = OTHER; note = 2'-O-methyladenosine-3'-phosphate
  modified_base 7: mod_base = OTHER; note = 2'-deoxy-2'-fluorocytidine-3'-phosphate
  modified_base 8: mod_base = OTHER; note = 2'-O-methyladenosine-3'-phosphate
  modified_base 9: mod_base = OTHER; note = 2'-deoxy-2'-fluoroadenosine-3'-phosphate
  modified_base 10: mod_base = OTHER; note = 2'-deoxy-2'-fluoroadenosine-3'-phosphate
  modified_base 11: mod_base = OTHER; note = 2'-deoxy-2'-fluoroadenosine-3'-phosphate
  modified_base 12: mod_base = OTHER; note = 2'-O-methyluridine-3'-phosphate
  modified_base 13: mod_base = OTHER; note = 2'-O-methylcytidine-3'-phosphate
  modified_base 14: mod_base = OTHER; note = 2'-O-methyluridine-3'-phosphate
  modified_base 15: mod_base = OTHER; note = 2'-O-methylcytidine-3'-phosphate
  modified_base 16: mod_base = OTHER; note = 2'-O-methyladenosine-3'-phosphate
  modified_base 17: mod_base = OTHER; note = 2'-O-methylguanosine-3'-phosphate
  modified_base 18: mod_base = OTHER; note = 2'-O-methyladenosine-3'-phosphate
  modified_base 19: mod_base = OTHER; note = 2'-O-methyladenosine-3'-phosphate
  modified_base 20: mod_base = OTHER; note = 2'-O-methylcytidine-3'-phosphate
  modified_base 21: mod_base = OTHER; note = 2'-O-methyladenosine
cccgcacaaaatctcagaaca

SEQ ID NO: 3577 - RNA, 21 nt, synthetic construct
  source 1..21: mol_type = other RNA
  modified_base 1: mod_base = OTHER; note = 2'-O-methylcytidine-3'-phosphate
  modified_base 2: mod_base = OTHER; note = 2'-O-methylcytidine-3'-phosphate
  modified_base 3: mod_base = OTHER; note = 2'-O-methylguanosine-3'-phosphate
  modified_base 4: mod_base = OTHER; note = 2'-O-methylcytidine-3'-phosphate
  modified_base 5: mod_base = OTHER; note = 2'-O-methyladenosine-3'-phosphate
  modified_base 6: mod_base = OTHER; note = 2'-O-methylcytidine-3'-phosphate
  modified_base 7: mod_base = OTHER; note = 2'-deoxy-2'-fluoroadenosine-3'-phosphate
  modified_base 8: mod_base = OTHER; note = 2'-O-methyladenosine-3'-phosphate
  modified_base 9: mod_base = OTHER; note = 2'-deoxy-2'-fluoroadenosine-3'-phosphate
  modified_base 10: mod_base = OTHER; note = 2'-deoxy-2'-fluoroadenosine-3'-phosphate
  modified_base 11: mod_base = OTHER; note = 2'-deoxy-2'-fluorouridine-3'-phosphate
  modified_base 12: mod_base = OTHER; note = 2'-O-methylcytidine-3'-phosphate
  modified_base 13: mod_base = OTHER; note = 2'-O-methyluridine-3'-phosphate
  modified_base 14: mod_base = OTHER; note = 2'-O-methylcytidine-3'-phosphate
  modified_base 15: mod_base = OTHER; note = 2'-O-methyladenosine-3'-phosphate
  modified_base 16: mod_base = OTHER; note = 2'-O-methylguanosine-3'-phosphate
  modified_base 17: mod_base = OTHER; note = 2'-O-methyladenosine-3'-phosphate
  modified_base 18: mod_base = OTHER; note = 2'-O-methyladenosine-3'-phosphate
  modified_base 19: mod_base = OTHER; note = 2'-O-methylcytidine-3'-phosphate
  modified_base 20: mod_base = OTHER; note = 2'-O-methylcytidine-3'-phosphate
  modified_base 21: mod_base = OTHER; note = 2'-O-methyladenosine
ccgcacaaaatctcagaacca

SEQ ID NO: 3578 - RNA, 21 nt, synthetic construct
  source 1..21: mol_type = other RNA
  modified_base 1: mod_base = OTHER; note = 2'-O-methylcytidine-3'-phosphate
  modified_base 2: mod_base = OTHER; note = 2'-O-methylguanosine-3'-phosphate
  modified_base 3: mod_base = OTHER; note = 2'-O-methylcytidine-3'-phosphate
  modified_base 4: mod_base = OTHER; note = 2'-O-methyladenosine-3'-phosphate
  modified_base 5: mod_base = OTHER; note = 2'-O-methylcytidine-3'-phosphate
  modified_base 6: mod_base = OTHER; note = 2'-O-methyladenosine-3'-phosphate
  modified_base 7: mod_base = OTHER; note = 2'-deoxy-2'-fluoroadenosine-3'-phosphate
  modified_base 8: mod_base = OTHER; note = 2'-O-methyladenosine-3'-phosphate
  modified_base 9: mod_base = OTHER; note = 2'-deoxy-2'-fluoroadenosine-3'-phosphate
  modified_base 10: mod_base = OTHER; note = 2'-deoxy-2'-fluorouridine-3'-phosphate
  modified_base 11: mod_base = OTHER; note = 2'-deoxy-2'-fluorocytidine-3'-phosphate
  modified_base 12: mod_base = OTHER; note = 2'-O-methyluridine-3'-phosphate
  modified_base 13: mod_base = OTHER; note = 2'-O-methylcytidine-3'-phosphate
  modified_base 14: mod_base = OTHER; note = 2'-O-methyladenosine-3'-phosphate
  modified_base 15: mod_base = OTHER; note = 2'-O-methylguanosine-3'-phosphate
  modified_base 16: mod_base = OTHER; note = 2'-O-methyladenosine-3'-phosphate
  modified_base 17: mod_base = OTHER; note = 2'-O-methyladenosine-3'-phosphate
  modified_base 18: mod_base = OTHER; note = 2'-O-methylcytidine-3'-phosphate
  modified_base 19: mod_base = OTHER; note = 2'-O-methylcytidine-3'-phosphate
  modified_base 20: mod_base = OTHER; note = 2'-O-methyladenosine-3'-phosphate
  modified_base 21: mod_base = OTHER; note = 2'-O-methyladenosine
cgcacaaaatctcagaaccaa

SEQ ID NO: 3579 - RNA, 21 nt, synthetic construct
  source 1..21: mol_type = other RNA
  modified_base 1: mod_base = OTHER; note = 2'-O-methylguanosine-3'-phosphate
  modified_base 2: mod_base = OTHER; note = 2'-O-methylcytidine-3'-phosphate
  modified_base 3: mod_base = OTHER; note = 2'-O-methyladenosine-3'-phosphate
  modified_base 4: mod_base = OTHER; note = 2'-O-methylcytidine-3'-phosphate
  modified_base 5: mod_base = OTHER; note = 2'-O-methyladenosine-3'-phosphate
  modified_base 6: mod_base = OTHER; note = 2'-O-methyladenosine-3'-phosphate
  modified_base 7: mod_base = OTHER; note = 2'-deoxy-2'-fluoroadenosine-3'-phosphate
  modified_base 8: mod_base = OTHER; note = 2'-O-methyladenosine-3'-phosphate
  modified_base 9: mod_base = OTHER; note = 2'-deoxy-2'-fluorouridine-3'-phosphate
  modified_base 10: mod_base = OTHER; note = 2'-deoxy-2'-fluorocytidine-3'-phosphate
  modified_base 11: mod_base = OTHER; note = 2'-deoxy-2'-fluorouridine-3'-phosphate
  modified_base 12: mod_base = OTHER; note = 2'-O-methylcytidine-3'-phosphate
  modified_base 13: mod_base = OTHER; note = 2'-O-methyladenosine-3'-phosphate
  modified_base 14: mod_base = OTHER; note = 2'-O-methylguanosine-3'-phosphate
  modified_base 15: mod_base = OTHER; note = 2'-O-methyladenosine-3'-phosphate
  modified_base 16: mod_base = OTHER; note = 2'-O-methyladenosine-3'-phosphate
  modified_base 17: mod_base = OTHER; note = 2'-O-methylcytidine-3'-phosphate
  modified_base 18: mod_base = OTHER; note = 2'-O-methylcytidine-3'-phosphate
  modified_base 19: mod_base = OTHER; note = 2'-O-methyladenosine-3'-phosphate
  modified_base 20: mod_base = OTHER; note = 2'-O-methyluridine-3'-phosphate
  modified_base 21: mod_base = OTHER; note = 2'-O-methyladenosine
gcacaaaatctcagaaccata

SEQ ID NO: 3580 - RNA, 21 nt, synthetic construct
  source 1..21: mol_type = other RNA
  modified_base 1: mod_base = OTHER; note = 2'-O-methylcytidine-3'-phosphate
  modified_base 2: mod_base = OTHER; note = 2'-O-methyladenosine-3'-phosphate
  modified_base 3: mod_base = OTHER; note = 2'-O-methylcytidine-3'-phosphate
  modified_base 4: mod_base = OTHER; note = 2'-O-methyladenosine-3'-phosphate
  modified_base 5: mod_base = OTHER; note = 2'-O-methyladenosine-3'-phosphate
  modified_base 6: mod_base = OTHER; note = 2'-O-methyladenosine-3'-phosphate
  modified_base 7: mod_base = OTHER; note = 2'-deoxy-2'-fluoroadenosine-3'-phosphate
  modified_base 8: mod_base = OTHER; note = 2'-O-methyluridine-3'-phosphate
  modified_base 9: mod_base = OTHER; note = 2'-deoxy-2'-fluorocytidine-3'-phosphate
  modified_base 10: mod_base = OTHER; note = 2'-deoxy-2'-fluorouridine-3'-phosphate
  modified_base 11: mod_base = OTHER; note = 2'-deoxy-2'-fluorocytidine-3'-phosphate
  modified_base 12: mod_base = OTHER; note = 2'-O-methyladenosine-3'-phosphate
  modified_base 13: mod_base = OTHER; note = 2'-O-methylguanosine-3'-phosphate
  modified_base 14: mod_base = OTHER; note = 2'-O-methyladenosine-3'-phosphate
  modified_base 15: mod_base = OTHER; note = 2'-O-methyladenosine-3'-phosphate
  modified_base 16: mod_base = OTHER; note = 2'-O-methylcytidine-3'-phosphate
  modified_base 17: mod_base = OTHER; note = 2'-O-methylcytidine-3'-phosphate
  modified_base 18: mod_base = OTHER; note = 2'-O-methyladenosine-3'-phosphate
  modified_base 19: mod_base = OTHER; note = 2'-O-methyluridine-3'-phosphate
  modified_base 20: mod_base = OTHER; note = 2'-O-methyladenosine-3'-phosphate
  modified_base 21: mod_base = OTHER; note = 2'-O-methyladenosine
cacaaaatctcagaaccataa

SEQ ID NO: 3581 - RNA, 21 nt, synthetic construct
  source 1..21: mol_type = other RNA
  modified_base 1: mod_base = OTHER; note = 2'-O-methyladenosine-3'-phosphate
  modified_base 2: mod_base = OTHER; note = 2'-O-methylcytidine-3'-phosphate
  modified_base 3: mod_base = OTHER; note = 2'-O-methyladenosine-3'-phosphate
  modified_base 4: mod_base = OTHER; note = 2'-O-methyladenosine-3'-phosphate
  modified_base 5: mod_base = OTHER; note = 2'-O-methyladenosine-3'-phosphate
  modified_base 6: mod_base = OTHER; note = 2'-O-methyladenosine-3'-phosphate
  modified_base 7: mod_base = OTHER; note = 2'-deoxy-2'-fluorouridine-3'-phosphate
  modified_base 8: mod_base = OTHER; note = 2'-O-methylcytidine-3'-phosphate
  modified_base 9: mod_base = OTHER; note = 2'-deoxy-2'-fluorouridine-3'-phosphate
  modified_base 10: mod_base = OTHER; note = 2'-deoxy-2'-fluorocytidine-3'-phosphate
  modified_base 11: mod_base = OTHER; note = 2'-deoxy-2'-fluoroadenosine-3'-phosphate
  modified_base 12: mod_base = OTHER; note = 2'-O-methylguanosine-3'-phosphate
  modified_base 13: mod_base = OTHER; note = 2'-O-methyladenosine-3'-phosphate
  modified_base 14: mod_base = OTHER; note = 2'-O-methyladenosine-3'-phosphate
  modified_base 15: mod_base = OTHER; note = 2'-O-methylcytidine-3'-phosphate
  modified_base 16: mod_base = OTHER; note = 2'-O-methylcytidine-3'-phosphate
  modified_base 17: mod_base = OTHER; note = 2'-O-methyladenosine-3'-phosphate
  modified_base 18: mod_base = OTHER; note = 2'-O-methyluridine-3'-phosphate
  modified_base 19: mod_base = OTHER; note = 2'-O-methyladenosine-3'-phosphate
  modified_base 20: mod_base = OTHER; note = 2'-O-methyluridine-3'-phosphate
  modified_base 21: mod_base = OTHER; note = 2'-O-methyladenosine
acaaaatctcagaaccatata

SEQ ID NO: 3582 - RNA, 21 nt, synthetic construct
  source 1..21: mol_type = other RNA
  modified_base 1: mod_base = OTHER; note = 2'-O-methylcytidine-3'-phosphate
  modified_base 2: mod_base = OTHER; note = 2'-O-methyladenosine-3'-phosphate
  modified_base 3: mod_base = OTHER; note = 2'-O-methyladenosine-3'-phosphate
  modified_base 4: mod_base = OTHER; note = 2'-O-methyladenosine-3'-phosphate
  modified_base 5: mod_base = OTHER; note = 2'-O-methyladenosine-3'-phosphate
  modified_base 6: mod_base = OTHER; note = 2'-O-methyluridine-3'-phosphate
  modified_base 7: mod_base = OTHER; note = 2'-deoxy-2'-fluorocytidine-3'-phosphate
  modified_base 8: mod_base = OTHER; note = 2'-O-methyluridine-3'-phosphate
  modified_base 9: mod_base = OTHER; note = 2'-deoxy-2'-fluorocytidine-3'-phosphate
  modified_base 10: mod_base = OTHER; note = 2'-deoxy-2'-fluoroadenosine-3'-phosphate
  modified_base 11: mod_base = OTHER; note = 2'-deoxy-2'-fluoroguanosine-3'-phosphate
  modified_base 12: mod_base = OTHER; note = 2'-O-methyladenosine-3'-phosphate
  modified_base 13: mod_base = OTHER; note = 2'-O-methyladenosine-3'-phosphate
  modified_base 14: mod_base = OTHER; note = 2'-O-methylcytidine-3'-phosphate
  modified_base 15: mod_base = OTHER; note = 2'-O-methylcytidine-3'-phosphate
  modified_base 16: mod_base = OTHER; note = 2'-O-methyladenosine-3'-phosphate
  modified_base 17: mod_base = OTHER; note = 2'-O-methyluridine-3'-phosphate
  modified_base 18: mod_base = OTHER; note = 2'-O-methyladenosine-3'-phosphate
  modified_base 19: mod_base = OTHER; note = 2'-O-methyluridine-3'-phosphate
  modified_base 20: mod_base = OTHER; note = 2'-O-methylcytidine-3'-phosphate
  modified_base 21: mod_base = OTHER; note = 2'-O-methyladenosine
caaaatctcagaaccatatca

SEQ ID NO: 3583 - RNA, 21 nt, synthetic construct
  source 1..21: mol_type = other RNA
  modified_base 1: mod_base = OTHER; note = 2'-O-methyladenosine-3'-phosphate
  modified_base 2: mod_base = OTHER; note = 2'-O-methyladenosine-3'-phosphate
  modified_base 3: mod_base = OTHER; note = 2'-O-methyladenosine-3'-phosphate
  modified_base 4: mod_base = OTHER; note = 2'-O-methyladenosine-3'-phosphate
  modified_base 5: mod_base = OTHER; note = 2'-O-methyluridine-3'-phosphate
  modified_base 6: mod_base = OTHER; note = 2'-O-methylcytidine-3'-phosphate
  modified_base 7: mod_base = OTHER; note = 2'-deoxy-2'-fluorouridine-3'-phosphate
  modified_base 8: mod_base = OTHER; note = 2'-O-methylcytidine-3'-phosphate
  modified_base 9: mod_base = OTHER; note = 2'-deoxy-2'-fluoroadenosine-3'-phosphate
  modified_base 10: mod_base = OTHER; note = 2'-deoxy-2'-fluoroguanosine-3'-phosphate
  modified_base 11: mod_base = OTHER; note = 2'-deoxy-2'-fluoroadenosine-3'-phosphate
  modified_base 12: mod_base = OTHER; note = 2'-O-methyladenosine-3'-phosphate
  modified_base 13: mod_base = OTHER; note = 2'-O-methylcytidine-3'-phosphate
  modified_base 14: mod_base = OTHER; note = 2'-O-methylcytidine-3'-phosphate
  modified_base 15: mod_base = OTHER; note = 2'-O-methyladenosine-3'-phosphate
  modified_base 16: mod_base = OTHER; note = 2'-O-methyluridine-3'-phosphate
  modified_base 17: mod_base = OTHER; note = 2'-O-methyladenosine-3'-phosphate
  modified_base 18: mod_base = OTHER; note = 2'-O-methyluridine-3'-phosphate
  modified_base 19: mod_base = OTHER; note = 2'-O-methylcytidine-3'-phosphate
  modified_base 20: mod_base = OTHER; note = 2'-O-methyluridine-3'-phosphate
  modified_base 21: mod_base = OTHER; note = 2'-O-methyladenosine
aaaatctcagaaccatatcta

SEQ ID NO: 3584 - RNA, 21 nt, synthetic construct
  source 1..21: mol_type = other RNA
  modified_base 1: mod_base = OTHER; note = 2'-O-methyladenosine-3'-phosphate
  modified_base 2: mod_base = OTHER; note = 2'-O-methyladenosine-3'-phosphate
  modified_base 3: mod_base = OTHER; note = 2'-O-methyladenosine-3'-phosphate
  modified_base 4: mod_base = OTHER; note = 2'-O-methyluridine-3'-phosphate
  modified_base 5: mod_base = OTHER; note = 2'-O-methylcytidine-3'-phosphate
  modified_base 6: mod_base = OTHER; note = 2'-O-methyluridine-3'-phosphate
  modified_base 7: mod_base = OTHER; note = 2'-deoxy-2'-fluorocytidine-3'-phosphate
  modified_base 8: mod_base = OTHER; note = 2'-O-methyladenosine-3'-phosphate
  modified_base 9: mod_base = OTHER; note = 2'-deoxy-2'-fluoroguanosine-3'-phosphate
  modified_base 10: mod_base = OTHER; note = 2'-deoxy-2'-fluoroadenosine-3'-phosphate
  modified_base 11: mod_base = OTHER; note = 2'-deoxy-2'-fluoroadenosine-3'-phosphate
  modified_base 12: mod_base = OTHER; note = 2'-O-methylcytidine-3'-phosphate
  modified_base 13: mod_base = OTHER; note = 2'-O-methylcytidine-3'-phosphate
  modified_base 14: mod_base = OTHER; note = 2'-O-methyladenosine-3'-phosphate
  modified_base 15: mod_base = OTHER; note = 2'-O-methyluridine-3'-phosphate
  modified_base 16: mod_base = OTHER; note = 2'-O-methyladenosine-3'-phosphate
  modified_base 17: mod_base = OTHER; note = 2'-O-methyluridine-3'-phosphate
  modified_base 18: mod_base = OTHER; note = 2'-O-methylcytidine-3'-phosphate
  modified_base 19: mod_base = OTHER; note = 2'-O-methyluridine-3'-phosphate
  modified_base 20: mod_base = OTHER; note = 2'-O-methylguanosine-3'-phosphate
  modified_base 21: mod_base = OTHER; note = 2'-O-methyladenosine
aaatctcagaaccatatctga

SEQ ID NO: 3585 - RNA, 21 nt, synthetic construct
  source 1..21: mol_type = other RNA
  modified_base 1: mod_base = OTHER; note = 2'-O-methyladenosine-3'-phosphate
  modified_base 2: mod_base = OTHER; note = 2'-O-methyladenosine-3'-phosphate
  modified_base 3: mod_base = OTHER; note = 2'-O-methyluridine-3'-phosphate
  modified_base 4: mod_base = OTHER; note = 2'-O-methylcytidine-3'-phosphate
  modified_base 5: mod_base = OTHER; note = 2'-O-methyluridine-3'-phosphate
  modified_base 6: mod_base = OTHER; note = 2'-O-methylcytidine-3'-phosphate
  modified_base 7: mod_base = OTHER; note = 2'-deoxy-2'-fluoroadenosine-3'-phosphate
  modified_base 8: mod_base = OTHER; note = 2'-O-methylguanosine-3'-phosphate
  modified_base 9: mod_base = OTHER; note = 2'-deoxy-2'-fluoroadenosine-3'-phosphate
  modified_base 10: mod_base = OTHER; note = 2'-deoxy-2'-fluoroadenosine-3'-phosphate
  modified_base 11: mod_base = OTHER; note = 2'-deoxy-2'-fluorocytidine-3'-phosphate
  modified_base 12: mod_base = OTHER; note = 2'-O-methylcytidine-3'-phosphate
  modified_base 13: mod_base = OTHER; note = 2'-O-methyladenosine-3'-phosphate
  modified_base 14: mod_base = OTHER; note = 2'-O-methyluridine-3'-phosphate
  modified_base 15: mod_base = OTHER; note = 2'-O-methyladenosine-3'-phosphate
  modified_base 16: mod_base = OTHER; note = 2'-O-methyluridine-3'-phosphate
  modified_base 17: mod_base = OTHER; note = 2'-O-methylcytidine-3'-phosphate
  modified_base 18: mod_base = OTHER; note = 2'-O-methyluridine-3'-phosphate
  modified_base 19: mod_base = OTHER; note = 2'-O-methylguanosine-3'-phosphate
  modified_base 20: mod_base = OTHER; note = 2'-O-methyluridine-3'-phosphate
  modified_base 21: mod_base = OTHER; note = 2'-O-methyladenosine
aatctcagaaccatatctgta

SEQ ID NO: 3586 - RNA, 21 nt, synthetic construct
  source 1..21: mol_type = other RNA
  modified_base 1: mod_base = OTHER; note = 2'-O-methyladenosine-3'-phosphate
  modified_base 2: mod_base = OTHER; note = 2'-O-methyluridine-3'-phosphate
  modified_base 3: mod_base = OTHER; note = 2'-O-methylcytidine-3'-phosphate
  modified_base 4: mod_base = OTHER; note = 2'-O-methyluridine-3'-phosphate
  modified_base 5: mod_base = OTHER; note = 2'-O-methylcytidine-3'-phosphate
  modified_base 6: mod_base = OTHER; note = 2'-O-methyladenosine-3'-phosphate
  modified_base 7: mod_base = OTHER; note = 2'-deoxy-2'-fluoroguanosine-3'-phosphate
  modified_base 8: mod_base = OTHER; note = 2'-O-methyladenosine-3'-phosphate
  modified_base 9: mod_base = OTHER; note = 2'-deoxy-2'-fluoroadenosine-3'-phosphate
  modified_base 10: mod_base = OTHER; note = 2'-deoxy-2'-fluorocytidine-3'-phosphate
  modified_base 11: mod_base = OTHER; note = 2'-deoxy-2'-fluorocytidine-3'-phosphate
  modified_base 12: mod_base = OTHER; note = 2'-O-methyladenosine-3'-phosphate
  modified_base 13: mod_base = OTHER; note = 2'-O-methyluridine-3'-phosphate
  modified_base 14: mod_base = OTHER; note = 2'-O-methyladenosine-3'-phosphate
  modified_base 15: mod_base = OTHER; note = 2'-O-methyluridine-3'-phosphate
  modified_base 16: mod_base = OTHER; note = 2'-O-methylcytidine-3'-phosphate
  modified_base 17: mod_base = OTHER; note = 2'-O-methyluridine-3'-phosphate
  modified_base 18: mod_base = OTHER; note = 2'-O-methylguanosine-3'-phosphate
  modified_base 19: mod_base = OTHER; note = 2'-O-methyluridine-3'-phosphate
  modified_base 20: mod_base = OTHER; note = 2'-O-methyluridine-3'-phosphate
  modified_base 21: mod_base = OTHER; note = 2'-O-methyladenosine
atctcagaaccatatctgtta

SEQ ID NO: 3587 - RNA, 21 nt, synthetic construct
  source 1..21: mol_type = other RNA
  modified_base 1: mod_base = OTHER; note = 2'-O-methyluridine-3'-phosphate
  modified_base 2: mod_base = OTHER; note = 2'-O-methylcytidine-3'-phosphate
  modified_base 3: mod_base = OTHER; note = 2'-O-methyluridine-3'-phosphate
  modified_base 4: mod_base = OTHER; note = 2'-O-methylcytidine-3'-phosphate
  modified_base 5: mod_base = OTHER; note = 2'-O-methyladenosine-3'-phosphate
  modified_base 6: mod_base = OTHER; note = 2'-O-methylguanosine-3'-phosphate
  modified_base 7: mod_base = OTHER; note = 2'-deoxy-2'-fluoroadenosine-3'-phosphate
  modified_base 8: mod_base = OTHER; note = 2'-O-methyladenosine-3'-phosphate
  modified_base 9: mod_base = OTHER; note = 2'-deoxy-2'-fluorocytidine-3'-phosphate
  modified_base 10: mod_base = OTHER; note = 2'-deoxy-2'-fluorocytidine-3'-phosphate
  modified_base 11: mod_base = OTHER; note = 2'-deoxy-2'-fluoroadenosine-3'-phosphate
  modified_base 12: mod_base = OTHER; note = 2'-O-methyluridine-3'-phosphate
  modified_base 13: mod_base = OTHER; note = 2'-O-methyladenosine-3'-phosphate
  modified_base 14: mod_base = OTHER; note = 2'-O-methyluridine-3'-phosphate
  modified_base 15: mod_base = OTHER; note = 2'-O-methylcytidine-3'-phosphate
  modified_base 16: mod_base = OTHER; note = 2'-O-methyluridine-3'-phosphate
  modified_base 17: mod_base = OTHER; note = 2'-O-methylguanosine-3'-phosphate
  modified_base 18: mod_base = OTHER; note = 2'-O-methyluridine-3'-phosphate
  modified_base 19: mod_base = OTHER; note = 2'-O-methyluridine-3'-phosphate
  modified_base 20: mod_base = OTHER; note = 2'-O-methylguanosine-3'-phosphate
  modified_base 21: mod_base = OTHER; note = 2'-O-methyladenosine
tctcagaaccatatctgttga

SEQ ID NO: 3588 - RNA, 21 nt, synthetic construct
  source 1..21: mol_type = other RNA
  modified_base 1: mod_base = OTHER; note = 2'-O-methylcytidine-3'-phosphate
  modified_base 2: mod_base = OTHER; note = 2'-O-methyluridine-3'-phosphate
  modified_base 3: mod_base = OTHER; note = 2'-O-methylcytidine-3'-phosphate
  modified_base 4: mod_base = OTHER; note = 2'-O-methyladenosine-3'-phosphate
  modified_base 5: mod_base = OTHER; note = 2'-O-methylguanosine-3'-phosphate
  modified_base 6: mod_base = OTHER; note = 2'-O-methyladenosine-3'-phosphate
  modified_base 7: mod_base = OTHER; note = 2'-deoxy-2'-fluoroadenosine-3'-phosphate
  modified_base 8: mod_base = OTHER; note = 2'-O-methylcytidine-3'-phosphate
  modified_base 9: mod_base = OTHER; note = 2'-deoxy-2'-fluorocytidine-3'-phosphate
  modified_base 10: mod_base = OTHER; note = 2'-deoxy-2'-fluoroadenosine-3'-phosphate
  modified_base 11: mod_base = OTHER; note = 2'-deoxy-2'-fluorouridine-3'-phosphate
  modified_base 12: mod_base = OTHER; note = 2'-O-methyladenosine-3'-phosphate
  modified_base 13: mod_base = OTHER; note = 2'-O-methyluridine-3'-phosphate
  modified_base 14: mod_base = OTHER; note = 2'-O-methylcytidine-3'-phosphate
  modified_base 15: mod_base = OTHER; note = 2'-O-methyluridine-3'-phosphate
  modified_base 16: mod_base = OTHER; note = 2'-O-methylguanosine-3'-phosphate
  modified_base 17: mod_base = OTHER; note = 2'-O-methyluridine-3'-phosphate
  modified_base 18: mod_base = OTHER; note = 2'-O-methyluridine-3'-phosphate
  modified_base 19: mod_base = OTHER; note = 2'-O-methylguanosine-3'-phosphate
  modified_base 20: mod_base = OTHER; note = 2'-O-methyladenosine-3'-phosphate
  modified_base 21: mod_base = OTHER; note = 2'-O-methyladenosine
ctcagaaccatatctgttgaa

SEQ ID NO: 3589 - RNA, 21 nt, synthetic construct
  source 1..21: mol_type = other RNA
  modified_base 1: mod_base = OTHER; note = 2'-O-methyluridine-3'-phosphate
  modified_base 2: mod_base = OTHER; note = 2'-O-methylcytidine-3'-phosphate
  modified_base 3: mod_base = OTHER; note = 2'-O-methyladenosine-3'-phosphate
  modified_base 4: mod_base = OTHER; note = 2'-O-methylguanosine-3'-phosphate
  modified_base 5: mod_base = OTHER; note = 2'-O-methyladenosine-3'-phosphate
  modified_base 6: mod_base = OTHER; note = 2'-O-methyladenosine-3'-phosphate
  modified_base 7: mod_base = OTHER; note = 2'-deoxy-2'-fluorocytidine-3'-phosphate
  modified_base 8: mod_base = OTHER; note = 2'-O-methylcytidine-3'-phosphate
  modified_base 9: mod_base = OTHER; note = 2'-deoxy-2'-fluoroadenosine-3'-phosphate
  modified_base 10: mod_base = OTHER; note = 2'-deoxy-2'-fluorouridine-3'-phosphate
  modified_base 11: mod_base = OTHER; note = 2'-deoxy-2'-fluoroadenosine-3'-phosphate
  modified_base 12: mod_base = OTHER; note = 2'-O-methyluridine-3'-phosphate
  modified_base 13: mod_base = OTHER; note = 2'-O-methylcytidine-3'-phosphate
  modified_base 14: mod_base = OTHER; note = 2'-O-methyluridine-3'-phosphate
  modified_base 15: mod_base = OTHER; note = 2'-O-methylguanosine-3'-phosphate
  modified_base 16: mod_base = OTHER; note = 2'-O-methyluridine-3'-phosphate
  modified_base 17: mod_base = OTHER; note = 2'-O-methyluridine-3'-phosphate
  modified_base 18: mod_base = OTHER; note = 2'-O-methylguanosine-3'-phosphate
  modified_base 19: mod_base = OTHER; note = 2'-O-methyladenosine-3'-phosphate
  modified_base 20: mod_base = OTHER; note = 2'-O-methylcytidine-3'-phosphate
  modified_base 21: mod_base = OTHER; note = 2'-O-methyladenosine
tcagaaccatatctgttgaca

SEQ ID NO: 3590 - RNA, 21 nt, synthetic construct
  source 1..21: mol_type = other RNA
  modified_base 1: mod_base = OTHER; note = 2'-O-methylcytidine-3'-phosphate
  modified_base 2: mod_base = OTHER; note = 2'-O-methyladenosine-3'-phosphate
  modified_base 3: mod_base = OTHER; note = 2'-O-methylguanosine-3'-phosphate
  modified_base 4: mod_base = OTHER; note = 2'-O-methyladenosine-3'-phosphate
  modified_base 5: mod_base = OTHER; note = 2'-O-methyladenosine-3'-phosphate
  modified_base 6: mod_base = OTHER; note = 2'-O-methylcytidine-3'-phosphate
  modified_base 7: mod_base = OTHER; note = 2'-deoxy-2'-fluorocytidine-3'-phosphate
  modified_base 8: mod_base = OTHER; note = 2'-O-methyladenosine-3'-phosphate
  modified_base 9: mod_base = OTHER; note = 2'-deoxy-2'-fluorouridine-3'-phosphate
  modified_base 10: mod_base = OTHER; note = 2'-deoxy-2'-fluoroadenosine-3'-phosphate
  modified_base 11: mod_base = OTHER; note = 2'-deoxy-2'-fluorouridine-3'-phosphate
  modified_base 12: mod_base = OTHER; note = 2'-O-methylcytidine-3'-phosphate
  modified_base 13: mod_base = OTHER; note = 2'-O-methyluridine-3'-phosphate
  modified_base 14: mod_base = OTHER; note = 2'-O-methylguanosine-3'-phosphate
  modified_base 15: mod_base = OTHER; note = 2'-O-methyluridine-3'-phosphate
  modified_base 16: mod_base = OTHER; note = 2'-O-methyluridine-3'-phosphate
  modified_base 17: mod_base = OTHER; note = 2'-O-methylguanosine-3'-phosphate
  modified_base 18: mod_base = OTHER; note = 2'-O-methyladenosine-3'-phosphate
  modified_base 19: mod_base = OTHER; note = 2'-O-methylcytidine-3'-phosphate
  modified_base 20: mod_base = OTHER; note = 2'-O-methyladenosine-3'-phosphate
  modified_base 21: mod_base = OTHER; note = 2'-O-methyladenosine
cagaaccatatctgttgacaa

SEQ ID NO: 3591 - RNA, 21 nt, synthetic construct
  source 1..21: mol_type = other RNA
  modified_base 1: mod_base = OTHER; note = 2'-O-methyladenosine-3'-phosphate
  modified_base 2: mod_base = OTHER; note = 2'-O-methylguanosine-3'-phosphate
  modified_base 3: mod_base = OTHER; note = 2'-O-methyladenosine-3'-phosphate
  modified_base 4: mod_base = OTHER; note = 2'-O-methyladenosine-3'-phosphate
  modified_base 5: mod_base = OTHER; note = 2'-O-methylcytidine-3'-phosphate
  modified_base 6: mod_base = OTHER; note = 2'-O-methylcytidine-3'-phosphate
  modified_base 7: mod_base = OTHER; note = 2'-deoxy-2'-fluoroadenosine-3'-phosphate
  modified_base 8: mod_base = OTHER; note = 2'-O-methyluridine-3'-phosphate
  modified_base 9: mod_base = OTHER; note = 2'-deoxy-2'-fluoroadenosine-3'-phosphate
  modified_base 10: mod_base = OTHER; note = 2'-deoxy-2'-fluorouridine-3'-phosphate
  modified_base 11: mod_base = OTHER; note = 2'-deoxy-2'-fluorocytidine-3'-phosphate
  modified_base 12: mod_base = OTHER; note = 2'-O-methyluridine-3'-phosphate
  modified_base 13: mod_base = OTHER; note = 2'-O-methylguanosine-3'-phosphate
  modified_base 14: mod_base = OTHER; note = 2'-O-methyluridine-3'-phosphate
  modified_base 15: mod_base = OTHER; note = 2'-O-methyluridine-3'-phosphate
  modified_base 16: mod_base = OTHER; note = 2'-O-methylguanosine-3'-phosphate
  modified_base 17: mod_base = OTHER; note = 2'-O-methyladenosine-3'-phosphate
  modified_base 18: mod_base = OTHER; note = 2'-O-methylcytidine-3'-phosphate
  modified_base 19: mod_base = OTHER; note = 2'-O-methyladenosine-3'-phosphate
  modified_base 20: mod_base = OTHER; note = 2'-O-methyluridine-3'-phosphate
  modified_base 21: mod_base = OTHER; note = 2'-O-methyladenosine
agaaccatatctgttgacata

SEQ ID NO: 3592 - RNA, 21 nt, synthetic construct
  source 1..21: mol_type = other RNA
  modified_base 1: mod_base = OTHER; note = 2'-O-methylguanosine-3'-phosphate
  modified_base 2: mod_base = OTHER; note = 2'-O-methyladenosine-3'-phosphate
  modified_base 3: mod_base = OTHER; note = 2'-O-methyladenosine-3'-phosphate
  modified_base 4: mod_base = OTHER; note = 2'-O-methylcytidine-3'-phosphate
  modified_base 5: mod_base = OTHER; note = 2'-O-methylcytidine-3'-phosphate
  modified_base 6: mod_base = OTHER; note = 2'-O-methyladenosine-3'-phosphate
  modified_base 7: mod_base = OTHER; note = 2'-deoxy-2'-fluorouridine-3'-phosphate
  modified_base 8: mod_base = OTHER; note = 2'-O-methyladenosine-3'-phosphate
  modified_base 9: mod_base = OTHER; note = 2'-deoxy-2'-fluorouridine-3'-phosphate
  modified_base 10: mod_base = OTHER; note = 2'-deoxy-2'-fluorocytidine-3'-phosphate
  modified_base 11: mod_base = OTHER; note = 2'-deoxy-2'-fluorouridine-3'-phosphate
  modified_base 12: mod_base = OTHER; note = 2'-O-methylguanosine-3'-phosphate
  modified_base 13: mod_base = OTHER; note = 2'-O-methyluridine-3'-phosphate
  modified_base 14: mod_base = OTHER; note = 2'-O-methyluridine-3'-phosphate
  modified_base 15: mod_base = OTHER; note = 2'-O-methylguanosine-3'-phosphate
  modified_base 16: mod_base = OTHER; note = 2'-O-methyladenosine-3'-phosphate
  modified_base 17: mod_base = OTHER; note = 2'-O-methylcytidine-3'-phosphate
  modified_base 18: mod_base = OTHER; note = 2'-O-methyladenosine-3'-phosphate
  modified_base 19: mod_base = OTHER; note = 2'-O-methyluridine-3'-phosphate
  modified_base 20: mod_base = OTHER; note = 2'-O-methyluridine-3'-phosphate
  modified_base 21: mod_base = OTHER; note = 2'-O-methyladenosine
gaaccatatctgttgacatta

SEQ ID NO: 3593 - RNA, 21 nt, synthetic construct
  source 1..21: mol_type = other RNA
  modified_base 1: mod_base = OTHER; note = 2'-O-methyladenosine-3'-phosphate
  modified_base 2: mod_base = OTHER; note = 2'-O-methyladenosine-3'-phosphate
  modified_base 3: mod_base = OTHER; note = 2'-O-methylcytidine-3'-phosphate
  modified_base 4: mod_base = OTHER; note = 2'-O-methylcytidine-3'-phosphate
  modified_base 5: mod_base = OTHER; note = 2'-O-methyladenosine-3'-phosphate
  modified_base 6: mod_base = OTHER; note = 2'-O-methyluridine-3'-phosphate
  modified_base 7: mod_base = OTHER; note = 2'-deoxy-2'-fluoroadenosine-3'-phosphate
  modified_base 8: mod_base = OTHER; note = 2'-O-methyluridine-3'-phosphate
  modified_base 9: mod_base = OTHER; note = 2'-deoxy-2'-fluorocytidine-3'-phosphate
  modified_base 10: mod_base = OTHER; note = 2'-deoxy-2'-fluorouridine-3'-phosphate
  modified_base 11: mod_base = OTHER; note = 2'-deoxy-2'-fluoroguanosine-3'-phosphate
  modified_base 12: mod_base = OTHER; note = 2'-O-methyluridine-3'-phosphate
  modified_base 13: mod_base = OTHER; note = 2'-O-methyluridine-3'-phosphate
  modified_base 14: mod_base = OTHER; note = 2'-O-methylguanosine-3'-phosphate
  modified_base 15: mod_base = OTHER; note = 2'-O-methyladenosine-3'-phosphate
  modified_base 16: mod_base = OTHER; note = 2'-O-methylcytidine-3'-phosphate
  modified_base 17: mod_base = OTHER; note = 2'-O-methyladenosine-3'-phosphate
  modified_base 18: mod_base = OTHER; note = 2'-O-methyluridine-3'-phosphate
  modified_base 19: mod_base = OTHER; note = 2'-O-methyluridine-3'-phosphate
  modified_base 20: mod_base = OTHER; note = 2'-O-methyluridine-3'-phosphate
  modified_base 21: mod_base = OTHER; note = 2'-O-methyladenosine
aaccatatctgttgacattta

SEQ ID NO: 3594 - RNA, 21 nt, synthetic construct
  source 1..21: mol_type = other RNA
  modified_base 1: mod_base = OTHER; note = 2'-O-methyladenosine-3'-phosphate
  modified_base 2: mod_base = OTHER; note = 2'-O-methylcytidine-3'-phosphate
  modified_base 3: mod_base = OTHER; note = 2'-O-methylcytidine-3'-phosphate
  modified_base 4: mod_base = OTHER; note = 2'-O-methyladenosine-3'-phosphate
  modified_base 5: mod_base = OTHER; note = 2'-O-methyluridine-3'-phosphate
  modified_base 6: mod_base = OTHER; note = 2'-O-methyladenosine-3'-phosphate
  modified_base 7: mod_base = OTHER; note = 2'-deoxy-2'-fluorouridine-3'-phosphate
  modified_base 8: mod_base = OTHER; note = 2'-O-methylcytidine-3'-phosphate
  modified_base 9: mod_base = OTHER; note = 2'-deoxy-2'-fluorouridine-3'-phosphate
  modified_base 10: mod_base = OTHER; note = 2'-deoxy-2'-fluoroguanosine-3'-phosphate
  modified_base 11: mod_base = OTHER; note = 2'-deoxy-2'-fluorouridine-3'-phosphate
  modified_base 12: mod_base = OTHER; note = 2'-O-methyluridine-3'-phosphate
  modified_base 13: mod_base = OTHER; note = 2'-O-methylguanosine-3'-phosphate
  modified_base 14: mod_base = OTHER; note = 2'-O-methyladenosine-3'-phosphate
  modified_base 15: mod_base = OTHER; note = 2'-O-methylcytidine-3'-phosphate
  modified_base 16: mod_base = OTHER; note = 2'-O-methyladenosine-3'-phosphate
  modified_base 17: mod_base = OTHER; note = 2'-O-methyluridine-3'-phosphate
  modified_base 18: mod_base = OTHER; note = 2'-O-methyluridine-3'-phosphate
  modified_base 19: mod_base = OTHER; note = 2'-O-methyluridine-3'-phosphate
  modified_base 20: mod_base = OTHER; note = 2'-O-methyluridine-3'-phosphate
  modified_base 21: mod_base = OTHER; note = 2'-O-methyladenosine
accatatctgttgacatttta

SEQ ID NO: 3595 - RNA, 21 nt, synthetic construct
  source 1..21: mol_type = other RNA
  modified_base 1: mod_base = OTHER; note = 2'-O-methylcytidine-3'-phosphate
  modified_base 2: mod_base = OTHER; note = 2'-O-methylcytidine-3'-phosphate
  modified_base 3: mod_base = OTHER; note = 2'-O-methyladenosine-3'-phosphate
  modified_base 4: mod_base = OTHER; note = 2'-O-methyluridine-3'-phosphate
  modified_base 5: mod_base = OTHER; note = 2'-O-methyladenosine-3'-phosphate
  modified_base 6: mod_base = OTHER; note = 2'-O-methyluridine-3'-phosphate
  modified_base 7: mod_base = OTHER; note = 2'-deoxy-2'-fluorocytidine-3'-phosphate
  modified_base 8: mod_base = OTHER; note = 2'-O-methyluridine-3'-phosphate
  modified_base 9: mod_base = OTHER; note = 2'-deoxy-2'-fluoroguanosine-3'-phosphate
  modified_base 10: mod_base = OTHER; note = 2'-deoxy-2'-fluorouridine-3'-phosphate
  modified_base 11: mod_base = OTHER; note = 2'-deoxy-2'-fluorouridine-3'-phosphate
  modified_base 12: mod_base = OTHER; note = 2'-O-methylguanosine-3'-phosphate
  modified_base 13: mod_base = OTHER; note = 2'-O-methyladenosine-3'-phosphate
  modified_base 14: mod_base = OTHER; note = 2'-O-methylcytidine-3'-phosphate
  modified_base 15: mod_base = OTHER; note = 2'-O-methyladenosine-3'-phosphate
  modified_base 16: mod_base = OTHER; note = 2'-O-methyluridine-3'-phosphate
  modified_base 17: mod_base = OTHER; note = 2'-O-methyluridine-3'-phosphate
  modified_base 18: mod_base = OTHER; note = 2'-O-methyluridine-3'-phosphate
  modified_base 19: mod_base = OTHER; note = 2'-O-methyluridine-3'-phosphate
  modified_base 20: mod_base = OTHER; note = 2'-O-methyluridine-3'-phosphate
  modified_base 21: mod_base = OTHER; note = 2'-O-methyladenosine
ccatatctgttgacattttta

SEQ ID NO: 3596 - RNA, 21 nt, synthetic construct
  source 1..21: mol_type = other RNA
  modified_base 1: mod_base = OTHER; note = 2'-O-methylcytidine-3'-phosphate
  modified_base 2: mod_base = OTHER; note = 2'-O-methyladenosine-3'-phosphate
  modified_base 3: mod_base = OTHER; note = 2'-O-methyluridine-3'-phosphate
  modified_base 4: mod_base = OTHER; note = 2'-O-methyladenosine-3'-phosphate
  modified_base 5: mod_base = OTHER; note = 2'-O-methyluridine-3'-phosphate
  modified_base 6: mod_base = OTHER; note = 2'-O-methylcytidine-3'-phosphate
  modified_base 7: mod_base = OTHER; note = 2'-deoxy-2'-fluorouridine-3'-phosphate
  modified_base 8: mod_base = OTHER; note = 2'-O-methylguanosine-3'-phosphate
  modified_base 9: mod_base = OTHER; note = 2'-deoxy-2'-fluorouridine-3'-phosphate
  modified_base 10: mod_base = OTHER; note = 2'-deoxy-2'-fluorouridine-3'-phosphate
  modified_base 11: mod_base = OTHER; note = 2'-deoxy-2'-fluoroguanosine-3'-phosphate
  modified_base 12: mod_base = OTHER; note = 2'-O-methyladenosine-3'-phosphate
  modified_base 13: mod_base = OTHER; note = 2'-O-methylcytidine-3'-phosphate
  modified_base 14: mod_base = OTHER; note = 2'-O-methyladenosine-3'-phosphate
  modified_base 15: mod_base = OTHER; note = 2'-O-methyluridine-3'-phosphate
  modified_base 16: mod_base = OTHER; note = 2'-O-methyluridine-3'-phosphate
  modified_base 17: mod_base = OTHER; note = 2'-O-methyluridine-3'-phosphate
  modified_base 18: mod_base = OTHER; note = 2'-O-methyluridine-3'-phosphate
  modified_base 19: mod_base = OTHER; note = 2'-O-methyluridine-3'-phosphate
  modified_base 20: mod_base = OTHER; note = 2'-O-methyluridine-3'-phosphate
  modified_base 21: mod_base = OTHER; note = 2'-O-methyladenosine
catatctgttgacatttttta

SEQ ID NO: 3597 - RNA, 21 nt, synthetic construct
  source 1..21: mol_type = other RNA
  modified_base 1: mod_base = OTHER; note = 2'-O-methyladenosine-3'-phosphate
  modified_base 2: mod_base = OTHER; note = 2'-O-methyluridine-3'-phosphate
  modified_base 3: mod_base = OTHER; note = 2'-O-methyladenosine-3'-phosphate
  modified_base 4: mod_base = OTHER; note = 2'-O-methyluridine-3'-phosphate
  modified_base 5: mod_base = OTHER; note = 2'-O-methylcytidine-3'-phosphate
  modified_base 6: mod_base = OTHER; note = 2'-O-methyluridine-3'-phosphate
  modified_base 7: mod_base = OTHER; note = 2'-deoxy-2'-fluoroguanosine-3'-phosphate
  modified_base 8: mod_base = OTHER; note = 2'-O-methyluridine-3'-phosphate
  modified_base 9: mod_base = OTHER; note = 2'-deoxy-2'-fluorouridine-3'-phosphate
  modified_base 10: mod_base = OTHER; note = 2'-deoxy-2'-fluoroguanosine-3'-phosphate
  modified_base 11: mod_base = OTHER; note = 2'-deoxy-2'-fluoroadenosine-3'-phosphate
  modified_base 12: mod_base = OTHER; note = 2'-O-methylcytidine-3'-phosphate
  modified_base 13: mod_base = OTHER; note = 2'-O-methyladenosine-3'-phosphate
  modified_base 14: mod_base = OTHER; note = 2'-O-methyluridine-3'-phosphate
  modified_base 15: mod_base = OTHER; note = 2'-O-methyluridine-3'-phosphate
  modified_base 16: mod_base = OTHER; note = 2'-O-methyluridine-3'-phosphate
  modified_base 17: mod_base = OTHER; note = 2'-O-methyluridine-3'-phosphate
  modified_base 18: mod_base = OTHER; note = 2'-O-methyluridine-3'-phosphate
  modified_base 19: mod_base = OTHER; note = 2'-O-methyluridine-3'-phosphate
  modified_base 20: mod_base = OTHER; note = 2'-O-methylcytidine-3'-phosphate
  modified_base 21: mod_base = OTHER; note = 2'-O-methyladenosine
atatctgttgacattttttca

SEQ ID NO: 3598 - RNA, 21 nt, synthetic construct
  source 1..21: mol_type = other RNA
  modified_base 1: mod_base = OTHER; note = 2'-O-methyluridine-3'-phosphate
  modified_base 2: mod_base = OTHER; note = 2'-O-methyladenosine-3'-phosphate
  modified_base 3: mod_base = OTHER; note = 2'-O-methyluridine-3'-phosphate
  modified_base 4: mod_base = OTHER; note = 2'-O-methylcytidine-3'-phosphate
  modified_base 5: mod_base = OTHER; note = 2'-O-methyluridine-3'-phosphate
  modified_base 6: mod_base = OTHER; note = 2'-O-methylguanosine-3'-phosphate
  modified_base 7: mod_base = OTHER; note = 2'-deoxy-2'-fluorouridine-3'-phosphate
  modified_base 8: mod_base = OTHER; note = 2'-O-methyluridine-3'-phosphate
  modified_base 9: mod_base = OTHER; note = 2'-deoxy-2'-fluoroguanosine-3'-phosphate
  modified_base 10: mod_base = OTHER; note = 2'-deoxy-2'-fluoroadenosine-3'-phosphate
  modified_base 11: mod_base = OTHER; note = 2'-deoxy-2'-fluorocytidine-3'-phosphate
  modified_base 12: mod_base = OTHER; note = 2'-O-methyladenosine-3'-phosphate
  modified_base 13: mod_base = OTHER; note = 2'-O-methyluridine-3'-phosphate
  modified_base 14: mod_base = OTHER; note = 2'-O-methyluridine-3'-phosphate
  modified_base 15: mod_base = OTHER; note = 2'-O-methyluridine-3'-phosphate
  modified_base 16: mod_base = OTHER; note = 2'-O-methyluridine-3'-phosphate
  modified_base 17: mod_base = OTHER; note = 2'-O-methyluridine-3'-phosphate
  modified_base 18: mod_base = OTHER; note = 2'-O-methyluridine-3'-phosphate
  modified_base 19: mod_base = OTHER; note = 2'-O-methylcytidine-3'-phosphate
  modified_base 20: mod_base = OTHER; note = 2'-O-methyluridine-3'-phosphate
  modified_base 21: mod_base = OTHER; note = 2'-O-methyladenosine
tatctgttgacattttttcta

SEQ ID NO: 3599 - RNA, 21 nt, synthetic construct
  source 1..21: mol_type = other RNA
  modified_base 1: mod_base = OTHER; note = 2'-O-methyladenosine-3'-phosphate
  modified_base 2: mod_base = OTHER; note = 2'-O-methyluridine-3'-phosphate
  modified_base 3: mod_base = OTHER; note = 2'-O-methylcytidine-3'-phosphate
  modified_base 4: mod_base = OTHER; note = 2'-O-methyluridine-3'-phosphate
  modified_base 5: mod_base = OTHER; note = 2'-O-methylguanosine-3'-phosphate
  modified_base 6: mod_base = OTHER; note = 2'-O-methyluridine-3'-phosphate
  modified_base 7: mod_base = OTHER; note = 2'-deoxy-2'-fluorouridine-3'-phosphate
  modified_base 8: mod_base = OTHER; note = 2'-O-methylguanosine-3'-phosphate
  modified_base 9: mod_base = OTHER; note = 2'-deoxy-2'-fluoroadenosine-3'-phosphate
  modified_base 10: mod_base = OTHER; note = 2'-deoxy-2'-fluorocytidine-3'-phosphate
  modified_base 11: mod_base = OTHER; note = 2'-deoxy-2'-fluoroadenosine-3'-phosphate
  modified_base 12: mod_base = OTHER; note = 2'-O-methyluridine-3'-phosphate
  modified_base 13: mod_base = OTHER; note = 2'-O-methyluridine-3'-phosphate
  modified_base 14: mod_base = OTHER; note = 2'-O-methyluridine-3'-phosphate
  modified_base 15: mod_base = OTHER; note = 2'-O-methyluridine-3'-phosphate
  modified_base 16: mod_base = OTHER; note = 2'-O-methyluridine-3'-phosphate
  modified_base 17: mod_base = OTHER; note = 2'-O-methyluridine-3'-phosphate
  modified_base 18: mod_base = OTHER; note = 2'-O-methylcytidine-3'-phosphate
  modified_base 19: mod_base = OTHER; note = 2'-O-methyluridine-3'-phosphate
  modified_base 20: mod_base = OTHER; note = 2'-O-methylcytidine-3'-phosphate
  modified_base 21: mod_base = OTHER; note = 2'-O-methyladenosine
atctgttgacattttttctca

SEQ ID NO: 3600 - RNA, 21 nt, synthetic construct
  source 1..21: mol_type = other RNA
  modified_base 1: mod_base = OTHER; note = 2'-O-methyluridine-3'-phosphate
  modified_base 2: mod_base = OTHER; note = 2'-O-methylcytidine-3'-phosphate
  modified_base 3: mod_base = OTHER; note = 2'-O-methyluridine-3'-phosphate
  modified_base 4: mod_base = OTHER; note = 2'-O-methylguanosine-3'-phosphate
  modified_base 5: mod_base = OTHER; note = 2'-O-methyluridine-3'-phosphate
  modified_base 6: mod_base = OTHER; note = 2'-O-methyluridine-3'-phosphate
  modified_base 7: mod_base = OTHER; note = 2'-deoxy-2'-fluoroguanosine-3'-phosphate
  modified_base 8: mod_base = OTHER; note = 2'-O-methyladenosine-3'-phosphate
  modified_base 9: mod_base = OTHER; note = 2'-deoxy-2'-fluorocytidine-3'-phosphate
  modified_base 10: mod_base = OTHER; note = 2'-deoxy-2'-fluoroadenosine-3'-phosphate
  modified_base 11: mod_base = OTHER; note = 2'-deoxy-2'-fluorouridine-3'-phosphate
  modified_base 12: mod_base = OTHER; note = 2'-O-methyluridine-3'-phosphate
  modified_base 13: mod_base = OTHER; note = 2'-O-methyluridine-3'-phosphate
  modified_base 14: mod_base = OTHER; note = 2'-O-methyluridine-3'-phosphate
  modified_base 15: mod_base = OTHER; note = 2'-O-methyluridine-3'-phosphate
  modified_base 16: mod_base = OTHER; note = 2'-O-methyluridine-3'-phosphate
  modified_base 17: mod_base = OTHER; note = 2'-O-methylcytidine-3'-phosphate
  modified_base 18: mod_base = OTHER; note = 2'-O-methyluridine-3'-phosphate
  modified_base 19: mod_base = OTHER; note = 2'-O-methylcytidine-3'-phosphate
  modified_base 20: mod_base = OTHER; note = 2'-O-methyladenosine-3'-phosphate
  modified_base 21: mod_base = OTHER; note = 2'-O-methyladenosine
tctgttgacattttttctcaa

SEQ ID NO: 3601 - RNA, 21 nt, synthetic construct
  source 1..21: mol_type = other RNA
  modified_base 1: mod_base = OTHER; note = 2'-O-methylcytidine-3'-phosphate
  modified_base 2: mod_base = OTHER; note = 2'-O-methyluridine-3'-phosphate
  modified_base 3: mod_base = OTHER; note = 2'-O-methylguanosine-3'-phosphate
  modified_base 4: mod_base = OTHER; note = 2'-O-methyluridine-3'-phosphate
  modified_base 5: mod_base = OTHER; note = 2'-O-methyluridine-3'-phosphate
  modified_base 6: mod_base = OTHER; note = 2'-O-methylguanosine-3'-phosphate
  modified_base 7: mod_base = OTHER; note = 2'-deoxy-2'-fluoroadenosine-3'-phosphate
  modified_base 8: mod_base = OTHER; note = 2'-O-methylcytidine-3'-phosphate
  modified_base 9: mod_base = OTHER; note = 2'-deoxy-2'-fluoroadenosine-3'-phosphate
  modified_base 10: mod_base = OTHER; note = 2'-deoxy-2'-fluorouridine-3'-phosphate
  modified_base 11: mod_base = OTHER; note = 2'-deoxy-2'-fluorouridine-3'-phosphate
  modified_base 12: mod_base = OTHER; note = 2'-O-methyluridine-3'-phosphate
  modified_base 13: mod_base = OTHER; note = 2'-O-methyluridine-3'-phosphate
  modified_base 14: mod_base = OTHER; note = 2'-O-methyluridine-3'-phosphate
  modified_base 15: mod_base = OTHER; note = 2'-O-methyluridine-3'-phosphate
  modified_base 16: mod_base = OTHER; note = 2'-O-methylcytidine-3'-phosphate
  modified_base 17: mod_base = OTHER; note = 2'-O-methyluridine-3'-phosphate
  modified_base 18: mod_base = OTHER; note = 2'-O-methylcytidine-3'-phosphate
  modified_base 19: mod_base = OTHER; note = 2'-O-methyladenosine-3'-phosphate
  modified_base 20: mod_base = OTHER; note = 2'-O-methyluridine-3'-phosphate
  modified_base 21: mod_base = OTHER; note = 2'-O-methyladenosine
ctgttgacattttttctcata

SEQ ID NO: 3602 - RNA, 21 nt, synthetic construct
  source 1..21: mol_type = other RNA
  modified_base 1: mod_base = OTHER; note = 2'-O-methyluridine-3'-phosphate
  modified_base 2: mod_base = OTHER; note = 2'-O-methylguanosine-3'-phosphate
  modified_base 3: mod_base = OTHER; note = 2'-O-methyluridine-3'-phosphate
  modified_base 4: mod_base = OTHER; note = 2'-O-methyluridine-3'-phosphate
  modified_base 5: mod_base = OTHER; note = 2'-O-methylguanosine-3'-phosphate
  modified_base 6: mod_base = OTHER; note = 2'-O-methyladenosine-3'-phosphate
  modified_base 7: mod_base = OTHER; note = 2'-deoxy-2'-fluorocytidine-3'-phosphate
  modified_base 8: mod_base = OTHER; note = 2'-O-methyladenosine-3'-phosphate
  modified_base 9: mod_base = OTHER; note = 2'-deoxy-2'-fluorouridine-3'-phosphate
  modified_base 10: mod_base = OTHER; note = 2'-deoxy-2'-fluorouridine-3'-phosphate
  modified_base 11: mod_base = OTHER; note = 2'-deoxy-2'-fluorouridine-3'-phosphate
  modified_base 12: mod_base = OTHER; note = 2'-O-methyluridine-3'-phosphate
  modified_base 13: mod_base = OTHER; note = 2'-O-methyluridine-3'-phosphate
  modified_base 14: mod_base = OTHER; note = 2'-O-methyluridine-3'-phosphate
  modified_base 15: mod_base = OTHER; note = 2'-O-methylcytidine-3'-phosphate
  modified_base 16: mod_base = OTHER; note = 2'-O-methyluridine-3'-phosphate
  modified_base 17: mod_base = OTHER; note = 2'-O-methylcytidine-3'-phosphate
  modified_base 18: mod_base = OTHER; note = 2'-O-methyladenosine-3'-phosphate
  modified_base 19: mod_base = OTHER; note = 2'-O-methyluridine-3'-phosphate
  modified_base 20: mod_base = OTHER; note = 2'-O-methyladenosine-3'-phosphate
  modified_base 21: mod_base = OTHER; note = 2'-O-methyladenosine
tgttgacattttttctcataa

SEQ ID NO: 3603 - RNA, 21 nt, synthetic construct
  source 1..21: mol_type = other RNA
  modified_base 1: mod_base = OTHER; note = 2'-O-methylguanosine-3'-phosphate
  modified_base 2: mod_base = OTHER; note = 2'-O-methyluridine-3'-phosphate
  modified_base 3: mod_base = OTHER; note = 2'-O-methyluridine-3'-phosphate
  modified_base 4: mod_base = OTHER; note = 2'-O-methylguanosine-3'-phosphate
  modified_base 5: mod_base = OTHER; note = 2'-O-methyladenosine-3'-phosphate
  modified_base 6: mod_base = OTHER; note = 2'-O-methylcytidine-3'-phosphate
  modified_base 7: mod_base = OTHER; note = 2'-deoxy-2'-fluoroadenosine-3'-phosphate
  modified_base 8: mod_base = OTHER; note = 2'-O-methyluridine-3'-phosphate
  modified_base 9: mod_base = OTHER; note = 2'-deoxy-2'-fluorouridine-3'-phosphate
  modified_base 10: mod_base = OTHER; note = 2'-deoxy-2'-fluorouridine-3'-phosphate
  modified_base 11: mod_base = OTHER; note = 2'-deoxy-2'-fluorouridine-3'-phosphate
  modified_base 12: mod_base = OTHER; note = 2'-O-methyluridine-3'-phosphate
  modified_base 13: mod_base = OTHER; note = 2'-O-methyluridine-3'-phosphate
  modified_base 14: mod_base = OTHER; note = 2'-O-methylcytidine-3'-phosphate
  modified_base 15: mod_base = OTHER; note = 2'-O-methyluridine-3'-phosphate
  modified_base 16: mod_base = OTHER; note = 2'-O-methylcytidine-3'-phosphate
  modified_base 17: mod_base = OTHER; note = 2'-O-methyladenosine-3'-phosphate
  modified_base 18: mod_base = OTHER; note = 2'-O-methyluridine-3'-phosphate
  modified_base 19: mod_base = OTHER; note = 2'-O-methyladenosine-3'-phosphate
  modified_base 20: mod_base = OTHER; note = 2'-O-methylguanosine-3'-phosphate
  modified_base 21: mod_base = OTHER; note = 2'-O-methyladenosine
gttgacattttttctcataga

SEQ ID NO: 3604 - RNA, 21 nt, synthetic construct
  source 1..21: mol_type = other RNA
  modified_base 1: mod_base = OTHER; note = 2'-O-methyluridine-3'-phosphate
  modified_base 2: mod_base = OTHER; note = 2'-O-methyluridine-3'-phosphate
  modified_base 3: mod_base = OTHER; note = 2'-O-methylguanosine-3'-phosphate
  modified_base 4: mod_base = OTHER; note = 2'-O-methyladenosine-3'-phosphate
  modified_base 5: mod_base = OTHER; note = 2'-O-methylcytidine-3'-phosphate
  modified_base 6: mod_base = OTHER; note = 2'-O-methyladenosine-3'-phosphate
  modified_base 7: mod_base = OTHER; note = 2'-deoxy-2'-fluorouridine-3'-phosphate
  modified_base 8: mod_base = OTHER; note = 2'-O-methyluridine-3'-phosphate
  modified_base 9: mod_base = OTHER; note = 2'-deoxy-2'-fluorouridine-3'-phosphate
  modified_base 10: mod_base = OTHER; note = 2'-deoxy-2'-fluorouridine-3'-phosphate
  modified_base 11: mod_base = OTHER; note = 2'-deoxy-2'-fluorouridine-3'-phosphate
  modified_base 12: mod_base = OTHER; note = 2'-O-methyluridine-3'-phosphate
  modified_base 13: mod_base = OTHER; note = 2'-O-methylcytidine-3'-phosphate
  modified_base 14: mod_base = OTHER; note = 2'-O-methyluridine-3'-phosphate
  modified_base 15: mod_base = OTHER; note = 2'-O-methylcytidine-3'-phosphate
  modified_base 16: mod_base = OTHER; note = 2'-O-methyladenosine-3'-phosphate
  modified_base 17: mod_base = OTHER; note = 2'-O-methyluridine-3'-phosphate
  modified_base 18: mod_base = OTHER; note = 2'-O-methyladenosine-3'-phosphate
  modified_base 19: mod_base = OTHER; note = 2'-O-methylguanosine-3'-phosphate
  modified_base 20: mod_base = OTHER; note = 2'-O-methyladenosine-3'-phosphate
  modified_base 21: mod_base = OTHER; note = 2'-O-methyladenosine
ttgacattttttctcatagaa

SEQ ID NO: 3605 - RNA, 21 nt, synthetic construct
  source 1..21: mol_type = other RNA
  modified_base 1: mod_base = OTHER; note = 2'-O-methyluridine-3'-phosphate
  modified_base 2: mod_base = OTHER; note = 2'-O-methylguanosine-3'-phosphate
  modified_base 3: mod_base = OTHER; note = 2'-O-methyladenosine-3'-phosphate
  modified_base 4: mod_base = OTHER; note = 2'-O-methylcytidine-3'-phosphate
  modified_base 5: mod_base = OTHER; note = 2'-O-methyladenosine-3'-phosphate
  modified_base 6: mod_base = OTHER; note = 2'-O-methyluridine-3'-phosphate
  modified_base 7: mod_base = OTHER; note = 2'-deoxy-2'-fluorouridine-3'-phosphate
  modified_base 8: mod_base = OTHER; note = 2'-O-methyluridine-3'-phosphate
  modified_base 9: mod_base = OTHER; note = 2'-deoxy-2'-fluorouridine-3'-phosphate
  modified_base 10: mod_base = OTHER; note = 2'-deoxy-2'-fluorouridine-3'-phosphate
  modified_base 11: mod_base = OTHER; note = 2'-deoxy-2'-fluorouridine-3'-phosphate
  modified_base 12: mod_base = OTHER; note = 2'-O-methylcytidine-3'-phosphate
  modified_base 13: mod_base = OTHER; note = 2'-O-methyluridine-3'-phosphate
  modified_base 14: mod_base = OTHER; note = 2'-O-methylcytidine-3'-phosphate
  modified_base 15: mod_base = OTHER; note = 2'-O-methyladenosine-3'-phosphate
  modified_base 16: mod_base = OTHER; note = 2'-O-methyluridine-3'-phosphate
  modified_base 17: mod_base = OTHER; note = 2'-O-methyladenosine-3'-phosphate
  modified_base 18: mod_base = OTHER; note = 2'-O-methylguanosine-3'-phosphate
  modified_base 19: mod_base = OTHER; note = 2'-O-methyladenosine-3'-phosphate
  modified_base 20: mod_base = OTHER; note = 2'-O-methyladenosine-3'-phosphate
  modified_base 21: mod_base = OTHER; note = 2'-O-methyladenosine
tgacattttttctcatagaaa

SEQ ID NO: 3606 - RNA, 21 nt, synthetic construct
  source 1..21: mol_type = other RNA
  modified_base 1: mod_base = OTHER; note = 2'-O-methyluridine-3'-phosphate
  modified_base 2: mod_base = OTHER; note = 2'-O-methylcytidine-3'-phosphate
  modified_base 3: mod_base = OTHER; note = 2'-O-methyluridine-3'-phosphate
  modified_base 4: mod_base = OTHER; note = 2'-O-methylcytidine-3'-phosphate
  modified_base 5: mod_base = OTHER; note = 2'-O-methyladenosine-3'-phosphate
  modified_base 6: mod_base = OTHER; note = 2'-O-methyluridine-3'-phosphate
  modified_base 7: mod_base = OTHER; note = 2'-deoxy-2'-fluoroadenosine-3'-phosphate
  modified_base 8: mod_base = OTHER; note = 2'-O-methylguanosine-3'-phosphate
  modified_base 9: mod_base = OTHER; note = 2'-deoxy-2'-fluoroadenosine-3'-phosphate
  modified_base 10: mod_base = OTHER; note = 2'-deoxy-2'-fluoroadenosine-3'-phosphate
  modified_base 11: mod_base = OTHER; note = 2'-deoxy-2'-fluoroadenosine-3'-phosphate
  modified_base 12: mod_base = OTHER; note = 2'-O-methyluridine-3'-phosphate
  modified_base 13: mod_base = OTHER; note = 2'-O-methyladenosine-3'-phosphate
  modified_base 14: mod_base = OTHER; note = 2'-O-methyluridine-3'-phosphate
  modified_base 15: mod_base = OTHER; note = 2'-O-methylcytidine-3'-phosphate
  modified_base 16: mod_base = OTHER; note = 2'-O-methyladenosine-3'-phosphate
  modified_base 17: mod_base = OTHER; note = 2'-O-methyluridine-3'-phosphate
  modified_base 18: mod_base = OTHER; note = 2'-O-methylguanosine-3'-phosphate
  modified_base 19: mod_base = OTHER; note = 2'-O-methylguanosine-3'-phosphate
  modified_base 20: mod_base = OTHER; note = 2'-O-methyluridine-3'-phosphate
  modified_base 21: mod_base = OTHER; note = 2'-O-methyladenosine
tctcatagaaatatcatggta

SEQ ID NO: 3607 - RNA, 21 nt, synthetic construct
  source 1..21: mol_type = other RNA
  modified_base 1: mod_base = OTHER; note = 2'-O-methylcytidine-3'-phosphate
  modified_base 2: mod_base = OTHER; note = 2'-O-methyluridine-3'-phosphate
  modified_base 3: mod_base = OTHER; note = 2'-O-methylcytidine-3'-phosphate
  modified_base 4: mod_base = OTHER; note = 2'-O-methyladenosine-3'-phosphate
  modified_base 5: mod_base = OTHER; note = 2'-O-methyluridine-3'-phosphate
  modified_base 6: mod_base = OTHER; note = 2'-O-methyladenosine-3'-phosphate
  modified_base 7: mod_base = OTHER; note = 2'-deoxy-2'-fluoroguanosine-3'-phosphate
  modified_base 8: mod_base = OTHER; note = 2'-O-methyladenosine-3'-phosphate
  modified_base 9: mod_base = OTHER; note = 2'-deoxy-2'-fluoroadenosine-3'-phosphate
  modified_base 10: mod_base = OTHER; note = 2'-deoxy-2'-fluoroadenosine-3'-phosphate
  modified_base 11: mod_base = OTHER; note = 2'-deoxy-2'-fluorouridine-3'-phosphate
  modified_base 12: mod_base = OTHER; note = 2'-O-methyladenosine-3'-phosphate
  modified_base 13: mod_base = OTHER; note = 2'-O-methyluridine-3'-phosphate
  modified_base 14: mod_base = OTHER; note = 2'-O-methylcytidine-3'-phosphate
  modified_base 15: mod_base = OTHER; note = 2'-O-methyladenosine-3'-phosphate
  modified_base 16: mod_base = OTHER; note = 2'-O-methyluridine-3'-phosphate
  modified_base 17: mod_base = OTHER; note = 2'-O-methylguanosine-3'-phosphate
  modified_base 18: mod_base = OTHER; note = 2'-O-methylguanosine-3'-phosphate
  modified_base 19: mod_base = OTHER; note = 2'-O-methyluridine-3'-phosphate
  modified_base 20: mod_base = OTHER; note = 2'-O-methyluridine-3'-phosphate
  modified_base 21: mod_base = OTHER; note = 2'-O-methyladenosine
ctcatagaaatatcatggtta

SEQ ID NO: 3608 - RNA, 21 nt, synthetic construct
  source 1..21: mol_type = other RNA
  modified_base 1: mod_base = OTHER; note = 2'-O-methyluridine-3'-phosphate
  modified_base 2: mod_base = OTHER; note = 2'-O-methylcytidine-3'-phosphate
  modified_base 3: mod_base = OTHER; note = 2'-O-methyladenosine-3'-phosphate
  modified_base 4: mod_base = OTHER; note = 2'-O-methyluridine-3'-phosphate
  modified_base 5: mod_base = OTHER; note = 2'-O-methyladenosine-3'-phosphate
  modified_base 6: mod_base = OTHER; note = 2'-O-methylguanosine-3'-phosphate
  modified_base 7: mod_base = OTHER; note = 2'-deoxy-2'-fluoroadenosine-3'-phosphate
  modified_base 8: mod_base = OTHER; note = 2'-O-methyladenosine-3'-phosphate
  modified_base 9: mod_base = OTHER; note = 2'-deoxy-2'-fluoroadenosine-3'-phosphate
  modified_base 10: mod_base = OTHER; note = 2'-deoxy-2'-fluorouridine-3'-phosphate
  modified_base 11: mod_base = OTHER; note = 2'-deoxy-2'-fluoroadenosine-3'-phosphate
  modified_base 12: mod_base = OTHER; note = 2'-O-methyluridine-3'-phosphate
  modified_base 13: mod_base = OTHER; note = 2'-O-methylcytidine-3'-phosphate
  modified_base 14: mod_base = OTHER; note = 2'-O-methyladenosine-3'-phosphate
  modified_base 15: mod_base = OTHER; note = 2'-O-methyluridine-3'-phosphate
  modified_base 16: mod_base = OTHER; note = 2'-O-methylguanosine-3'-phosphate
  modified_base 17: mod_base = OTHER; note = 2'-O-methylguanosine-3'-phosphate
  modified_base 18: mod_base = OTHER; note = 2'-O-methyluridine-3'-phosphate
  modified_base 19: mod_base = OTHER; note = 2'-O-methyluridine-3'-phosphate
  modified_base 20: mod_base = OTHER; note = 2'-O-methyladenosine-3'-phosphate
  modified_base 21: mod_base = OTHER; note = 2'-O-methyladenosine
tcatagaaatatcatggttaa

SEQ ID NO: 3609 - RNA, 21 nt, synthetic construct
  source 1..21: mol_type = other RNA
  modified_base 1: mod_base = OTHER; note = 2'-O-methylcytidine-3'-phosphate
  modified_base 2: mod_base = OTHER; note = 2'-O-methyladenosine-3'-phosphate
  modified_base 3: mod_base = OTHER; note = 2'-O-methyluridine-3'-phosphate
  modified_base 4: mod_base = OTHER; note = 2'-O-methyluridine-3'-phosphate
  modified_base 5: mod_base = OTHER; note = 2'-O-methyluridine-3'-phosphate
  modified_base 6: mod_base = OTHER; note = 2'-O-methylguanosine-3'-phosphate
  modified_base 7: mod_base = OTHER; note = 2'-deoxy-2'-fluorouridine-3'-phosphate
  modified_base 8: mod_base = OTHER; note = 2'-O-methyluridine-3'-phosphate
  modified_base 9: mod_base = OTHER; note = 2'-deoxy-2'-fluoroadenosine-3'-phosphate
  modified_base 10: mod_base = OTHER; note = 2'-deoxy-2'-fluoroadenosine-3'-phosphate
  modified_base 11: mod_base = OTHER; note = 2'-deoxy-2'-fluorouridine-3'-phosphate
  modified_base 12: mod_base = OTHER; note = 2'-O-methylguanosine-3'-phosphate
  modified_base 13: mod_base = OTHER; note = 2'-O-methyladenosine-3'-phosphate
  modified_base 14: mod_base = OTHER; note = 2'-O-methylguanosine-3'-phosphate
  modified_base 15: mod_base = OTHER; note = 2'-O-methylcytidine-3'-phosphate
  modified_base 16: mod_base = OTHER; note = 2'-O-methyladenosine-3'-phosphate
  modified_base 17: mod_base = OTHER; note = 2'-O-methyluridine-3'-phosphate
  modified_base 18: mod_base = OTHER; note = 2'-O-methyluridine-3'-phosphate
  modified_base 19: mod_base = OTHER; note = 2'-O-methyladenosine-3'-phosphate
  modified_base 20: mod_base = OTHER; note = 2'-O-methyladenosine-3'-phosphate
  modified_base 21: mod_base = OTHER; note = 2'-O-methyladenosine
catttgttaatgagcattaaa

SEQ ID NO: 3610 - RNA, 21 nt, synthetic construct
  source 1..21: mol_type = other RNA
  modified_base 1: mod_base = OTHER; note = 2'-O-methyluridine-3'-phosphate
  modified_base 2: mod_base = OTHER; note = 2'-O-methyluridine-3'-phosphate
  modified_base 3: mod_base = OTHER; note = 2'-O-methyluridine-3'-phosphate
  modified_base 4: mod_base = OTHER; note = 2'-O-methylguanosine-3'-phosphate
  modified_base 5: mod_base = OTHER; note = 2'-O-methyluridine-3'-phosphate
  modified_base 6: mod_base = OTHER; note = 2'-O-methyluridine-3'-phosphate
  modified_base 7: mod_base = OTHER; note = 2'-deoxy-2'-fluoroadenosine-3'-phosphate
  modified_base 8: mod_base = OTHER; note = 2'-O-methyladenosine-3'-phosphate
  modified_base 9: mod_base = OTHER; note = 2'-deoxy-2'-fluorouridine-3'-phosphate
  modified_base 10: mod_base = OTHER; note = 2'-deoxy-2'-fluoroguanosine-3'-phosphate
  modified_base 11: mod_base = OTHER; note = 2'-deoxy-2'-fluoroadenosine-3'-phosphate
  modified_base 12: mod_base = OTHER; note = 2'-O-methylguanosine-3'-phosphate
  modified_base 13: mod_base = OTHER; note = 2'-O-methylcytidine-3'-phosphate
  modified_base 14: mod_base = OTHER; note = 2'-O-methyladenosine-3'-phosphate
  modified_base 15: mod_base = OTHER; note = 2'-O-methyluridine-3'-phosphate
  modified_base 16: mod_base = OTHER; note = 2'-O-methyluridine-3'-phosphate
  modified_base 17: mod_base = OTHER; note = 2'-O-methyladenosine-3'-phosphate
  modified_base 18: mod_base = OTHER; note = 2'-O-methyladenosine-3'-phosphate
  modified_base 19: mod_base = OTHER; note = 2'-O-methyluridine-3'-phosphate
  modified_base 20: mod_base = OTHER; note = 2'-O-methylguanosine-3'-phosphate
  modified_base 21: mod_base = OTHER; note = 2'-O-methyladenosine
tttgttaatgagcattaatga

SEQ ID NO: 3611 - RNA, 21 nt, synthetic construct
  source 1..21: mol_type = other RNA
  modified_base 1: mod_base = OTHER; note = 2'-O-methyluridine-3'-phosphate
  modified_base 2: mod_base = OTHER; note = 2'-O-methyladenosine-3'-phosphate
  modified_base 3: mod_base = OTHER; note = 2'-O-methyladenosine-3'-phosphate
  modified_base 4: mod_base = OTHER; note = 2'-O-methyluridine-3'-phosphate
  modified_base 5: mod_base = OTHER; note = 2'-O-methylguanosine-3'-phosphate
  modified_base 6: mod_base = OTHER; note = 2'-O-methyladenosine-3'-phosphate
  modified_base 7: mod_base = OTHER; note = 2'-deoxy-2'-fluoroguanosine-3'-phosphate
  modified_base 8: mod_base = OTHER; note = 2'-O-methylcytidine-3'-phosphate
  modified_base 9: mod_base = OTHER; note = 2'-deoxy-2'-fluoroadenosine-3'-phosphate
  modified_base 10: mod_base = OTHER; note = 2'-deoxy-2'-fluorouridine-3'-phosphate
  modified_base 11: mod_base = OTHER; note = 2'-deoxy-2'-fluorouridine-3'-phosphate
  modified_base 12: mod_base = OTHER; note = 2'-O-methyladenosine-3'-phosphate
  modified_base 13: mod_base = OTHER; note = 2'-O-methyladenosine-3'-phosphate
  modified_base 14: mod_base = OTHER; note = 2'-O-methyluridine-3'-phosphate
  modified_base 15: mod_base = OTHER; note = 2'-O-methylguanosine-3'-phosphate
  modified_base 16: mod_base = OTHER; note = 2'-O-methyluridine-3'-phosphate
  modified_base 17: mod_base = OTHER; note = 2'-O-methyluridine-3'-phosphate
  modified_base 18: mod_base = OTHER; note = 2'-O-methyluridine-3'-phosphate
  modified_base 19: mod_base = OTHER; note = 2'-O-methyluridine-3'-phosphate
  modified_base 20: mod_base = OTHER; note = 2'-O-methylcytidine-3'-phosphate
  modified_base 21: mod_base = OTHER; note = 2'-O-methyladenosine
taatgagcattaatgttttca

SEQ ID NO: 3612 - RNA, 21 nt, synthetic construct
  source 1..21: mol_type = other RNA
  modified_base 1: mod_base = OTHER; note = 2'-O-methyladenosine-3'-phosphate
  modified_base 2: mod_base = OTHER; note = 2'-O-methyluridine-3'-phosphate
  modified_base 3: mod_base = OTHER; note = 2'-O-methylguanosine-3'-phosphate
  modified_base 4: mod_base = OTHER; note = 2'-O-methyladenosine-3'-phosphate
  modified_base 5: mod_base = OTHER; note = 2'-O-methylguanosine-3'-phosphate
  modified_base 6: mod_base = OTHER; note = 2'-O-methylcytidine-3'-phosphate
  modified_base 7: mod_base = OTHER; note = 2'-deoxy-2'-fluoroadenosine-3'-phosphate
  modified_base 8: mod_base = OTHER; note = 2'-O-methyluridine-3'-phosphate
  modified_base 9: mod_base = OTHER; note = 2'-deoxy-2'-fluorouridine-3'-phosphate
  modified_base 10: mod_base = OTHER; note = 2'-deoxy-2'-fluoroadenosine-3'-phosphate
  modified_base 11: mod_base = OTHER; note = 2'-deoxy-2'-fluoroadenosine-3'-phosphate
  modified_base 12: mod_base = OTHER; note = 2'-O-methyluridine-3'-phosphate
  modified_base 13: mod_base = OTHER; note = 2'-O-methylguanosine-3'-phosphate
  modified_base 14: mod_base = OTHER; note = 2'-O-methyluridine-3'-phosphate
  modified_base 15: mod_base = OTHER; note = 2'-O-methyluridine-3'-phosphate
  modified_base 16: mod_base = OTHER; note = 2'-O-methyluridine-3'-phosphate
  modified_base 17: mod_base = OTHER; note = 2'-O-methyluridine-3'-phosphate
  modified_base 18: mod_base = OTHER; note = 2'-O-methylcytidine-3'-phosphate
  modified_base 19: mod_base = OTHER; note = 2'-O-methyluridine-3'-phosphate
  modified_base 20: mod_base = OTHER; note = 2'-O-methylguanosine-3'-phosphate
  modified_base 21: mod_base = OTHER; note = 2'-O-methyladenosine
atgagcattaatgttttctga

SEQ ID NO: 3613 - RNA, 21 nt, synthetic construct
  source 1..21: mol_type = other RNA
  modified_base 1: mod_base = OTHER; note = 2'-O-methyluridine-3'-phosphate
  modified_base 2: mod_base = OTHER; note = 2'-O-methylguanosine-3'-phosphate
  modified_base 3: mod_base = OTHER; note = 2'-O-methyladenosine-3'-phosphate
  modified_base 4: mod_base = OTHER; note = 2'-O-methylguanosine-3'-phosphate
  modified_base 5: mod_base = OTHER; note = 2'-O-methylcytidine-3'-phosphate
  modified_base 6: mod_base = OTHER; note = 2'-O-methyladenosine-3'-phosphate
  modified_base 7: mod_base = OTHER; note = 2'-deoxy-2'-fluorouridine-3'-phosphate
  modified_base 8: mod_base = OTHER; note = 2'-O-methyluridine-3'-phosphate
  modified_base 9: mod_base = OTHER; note = 2'-deoxy-2'-fluoroadenosine-3'-phosphate
  modified_base 10: mod_base = OTHER; note = 2'-deoxy-2'-fluoroadenosine-3'-phosphate
  modified_base 11: mod_base = OTHER; note = 2'-deoxy-2'-fluorouridine-3'-phosphate
  modified_base 12: mod_base = OTHER; note = 2'-O-methylguanosine-3'-phosphate
  modified_base 13: mod_base = OTHER; note = 2'-O-methyluridine-3'-phosphate
  modified_base 14: mod_base = OTHER; note = 2'-O-methyluridine-3'-phosphate
  modified_base 15: mod_base = OTHER; note = 2'-O-methyluridine-3'-phosphate
  modified_base 16: mod_base = OTHER; note = 2'-O-methyluridine-3'-phosphate
  modified_base 17: mod_base = OTHER; note = 2'-O-methylcytidine-3'-phosphate
  modified_base 18: mod_base = OTHER; note = 2'-O-methyluridine-3'-phosphate
  modified_base 19: mod_base = OTHER; note = 2'-O-methylguanosine-3'-phosphate
  modified_base 20: mod_base = OTHER; note = 2'-O-methyladenosine-3'-phosphate
  modified_base 21: mod_base = OTHER; note = 2'-O-methyladenosine
tgagcattaatgttttctgaa

SEQ ID NO: 3614 - RNA, 21 nt, synthetic construct
  source 1..21: mol_type = other RNA
  modified_base 1: mod_base = OTHER; note = 2'-O-methylguanosine-3'-phosphate
  modified_base 2: mod_base = OTHER; note = 2'-O-methyladenosine-3'-phosphate
  modified_base 3: mod_base = OTHER; note = 2'-O-methylguanosine-3'-phosphate
  modified_base 4: mod_base = OTHER; note = 2'-O-methylcytidine-3'-phosphate
  modified_base 5: mod_base = OTHER; note = 2'-O-methyladenosine-3'-phosphate
  modified_base 6: mod_base = OTHER; note = 2'-O-methyluridine-3'-phosphate
  modified_base 7: mod_base = OTHER; note = 2'-deoxy-2'-fluorouridine-3'-phosphate
  modified_base 8: mod_base = OTHER; note = 2'-O-methyladenosine-3'-phosphate
  modified_base 9: mod_base = OTHER; note = 2'-deoxy-2'-fluoroadenosine-3'-phosphate
  modified_base 10: mod_base = OTHER; note = 2'-deoxy-2'-fluorouridine-3'-phosphate
  modified_base 11: mod_base = OTHER; note = 2'-deoxy-2'-fluoroguanosine-3'-phosphate
  modified_base 12: mod_base = OTHER; note = 2'-O-methyluridine-3'-phosphate
  modified_base 13: mod_base = OTHER; note = 2'-O-methyluridine-3'-phosphate
  modified_base 14: mod_base = OTHER; note = 2'-O-methyluridine-3'-phosphate
  modified_base 15: mod_base = OTHER; note = 2'-O-methyluridine-3'-phosphate
  modified_base 16: mod_base = OTHER; note = 2'-O-methylcytidine-3'-phosphate
  modified_base 17: mod_base = OTHER; note = 2'-O-methyluridine-3'-phosphate
  modified_base 18: mod_base = OTHER; note = 2'-O-methylguanosine-3'-phosphate
  modified_base 19: mod_base = OTHER; note = 2'-O-methyladenosine-3'-phosphate
  modified_base 20: mod_base = OTHER; note = 2'-O-methyladenosine-3'-phosphate
  modified_base 21: mod_base = OTHER; note = 2'-O-methyladenosine
gagcattaatgttttctgaaa

SEQ ID NO: 3615 - RNA, 21 nt, synthetic construct
  source 1..21: mol_type = other RNA
  modified_base 1: mod_base = OTHER; note = 2'-O-methyladenosine-3'-phosphate
  modified_base 2: mod_base = OTHER; note = 2'-O-methylguanosine-3'-phosphate
  modified_base 3: mod_base = OTHER; note = 2'-O-methylcytidine-3'-phosphate
  modified_base 4: mod_base = OTHER; note = 2'-O-methyladenosine-3'-phosphate
  modified_base 5: mod_base = OTHER; note = 2'-O-methyluridine-3'-phosphate
  modified_base 6: mod_base = OTHER; note = 2'-O-methyluridine-3'-phosphate
  modified_base 7: mod_base = OTHER; note = 2'-deoxy-2'-fluoroadenosine-3'-phosphate
  modified_base 8: mod_base = OTHER; note = 2'-O-methyladenosine-3'-phosphate
  modified_base 9: mod_base = OTHER; note = 2'-deoxy-2'-fluorouridine-3'-phosphate
  modified_base 10: mod_base = OTHER; note = 2'-deoxy-2'-fluoroguanosine-3'-phosphate
  modified_base 11: mod_base = OTHER; note = 2'-deoxy-2'-fluorouridine-3'-phosphate
  modified_base 12: mod_base = OTHER; note = 2'-O-methyluridine-3'-phosphate
  modified_base 13: mod_base = OTHER; note = 2'-O-methyluridine-3'-phosphate
  modified_base 14: mod_base = OTHER; note = 2'-O-methyluridine-3'-phosphate
  modified_base 15: mod_base = OTHER; note = 2'-O-methylcytidine-3'-phosphate
  modified_base 16: mod_base = OTHER; note = 2'-O-methyluridine-3'-phosphate
  modified_base 17: mod_base = OTHER; note = 2'-O-methylguanosine-3'-phosphate
  modified_base 18: mod_base = OTHER; note = 2'-O-methyladenosine-3'-phosphate
  modified_base 19: mod_base = OTHER; note = 2'-O-methyladenosine-3'-phosphate
  modified_base 20: mod_base = OTHER; note = 2'-O-methylcytidine-3'-phosphate
  modified_base 21: mod_base = OTHER; note = 2'-O-methyladenosine
agcattaatgttttctgaaca

SEQ ID NO: 3616 - RNA, 21 nt, synthetic construct
  source 1..21: mol_type = other RNA
  modified_base 1: mod_base = OTHER; note = 2'-O-methylguanosine-3'-phosphate
  modified_base 2: mod_base = OTHER; note = 2'-O-methylcytidine-3'-phosphate
  modified_base 3: mod_base = OTHER; note = 2'-O-methyladenosine-3'-phosphate
  modified_base 4: mod_base = OTHER; note = 2'-O-methyluridine-3'-phosphate
  modified_base 5: mod_base = OTHER; note = 2'-O-methyluridine-3'-phosphate
  modified_base 6: mod_base = OTHER; note = 2'-O-methyladenosine-3'-phosphate
  modified_base 7: mod_base = OTHER; note = 2'-deoxy-2'-fluoroadenosine-3'-phosphate
  modified_base 8: mod_base = OTHER; note = 2'-O-methyluridine-3'-phosphate
  modified_base 9: mod_base = OTHER; note = 2'-deoxy-2'-fluoroguanosine-3'-phosphate
  modified_base 10: mod_base = OTHER; note = 2'-deoxy-2'-fluorouridine-3'-phosphate
  modified_base 11: mod_base = OTHER; note = 2'-deoxy-2'-fluorouridine-3'-phosphate
  modified_base 12: mod_base = OTHER; note = 2'-O-methyluridine-3'-phosphate
  modified_base 13: mod_base = OTHER; note = 2'-O-methyluridine-3'-phosphate
  modified_base 14: mod_base = OTHER; note = 2'-O-methylcytidine-3'-phosphate
  modified_base 15: mod_base = OTHER; note = 2'-O-methyluridine-3'-phosphate
  modified_base 16: mod_base = OTHER; note = 2'-O-methylguanosine-3'-phosphate
  modified_base 17: mod_base = OTHER; note = 2'-O-methyladenosine-3'-phosphate
  modified_base 18: mod_base = OTHER; note = 2'-O-methyladenosine-3'-phosphate
  modified_base 19: mod_base = OTHER; note = 2'-O-methylcytidine-3'-phosphate
  modified_base 20: mod_base = OTHER; note = 2'-O-methyladenosine-3'-phosphate
  modified_base 21: mod_base = OTHER; note = 2'-O-methyladenosine
gcattaatgttttctgaacaa

SEQ ID NO: 3617 - RNA, 21 nt, synthetic construct
  source 1..21: mol_type = other RNA
  modified_base 1: mod_base = OTHER; note = 2'-O-methylcytidine-3'-phosphate
  modified_base 2: mod_base = OTHER; note = 2'-O-methyladenosine-3'-phosphate
  modified_base 3: mod_base = OTHER; note = 2'-O-methyluridine-3'-phosphate
  modified_base 4: mod_base = OTHER; note = 2'-O-methyluridine-3'-phosphate
  modified_base 5: mod_base = OTHER; note = 2'-O-methyladenosine-3'-phosphate
  modified_base 6: mod_base = OTHER; note = 2'-O-methyladenosine-3'-phosphate
  modified_base 7: mod_base = OTHER; note = 2'-deoxy-2'-fluorouridine-3'-phosphate
  modified_base 8: mod_base = OTHER; note = 2'-O-methylguanosine-3'-phosphate
  modified_base 9: mod_base = OTHER; note = 2'-deoxy-2'-fluorouridine-3'-phosphate
  modified_base 10: mod_base = OTHER; note = 2'-deoxy-2'-fluorouridine-3'-phosphate
  modified_base 11: mod_base = OTHER; note = 2'-deoxy-2'-fluorouridine-3'-phosphate
  modified_base 12: mod_base = OTHER; note = 2'-O-methyluridine-3'-phosphate
  modified_base 13: mod_base = OTHER; note = 2'-O-methylcytidine-3'-phosphate
  modified_base 14: mod_base = OTHER; note = 2'-O-methyluridine-3'-phosphate
  modified_base 15: mod_base = OTHER; note = 2'-O-methylguanosine-3'-phosphate
  modified_base 16: mod_base = OTHER; note = 2'-O-methyladenosine-3'-phosphate
  modified_base 17: mod_base = OTHER; note = 2'-O-methyladenosine-3'-phosphate
  modified_base 18: mod_base = OTHER; note = 2'-O-methylcytidine-3'-phosphate
  modified_base 19: mod_base = OTHER; note = 2'-O-methyladenosine-3'-phosphate
  modified_base 20: mod_base = OTHER; note = 2'-O-methylcytidine-3'-phosphate
  modified_base 21: mod_base = OTHER; note = 2'-O-methyladenosine
cattaatgttttctgaacaca

SEQ ID NO: 3618 - RNA, 21 nt, synthetic construct
  source 1..21: mol_type = other RNA
  modified_base 1: mod_base = OTHER; note = 2'-O-methyladenosine-3'-phosphate
  modified_base 2: mod_base = OTHER; note = 2'-O-methyluridine-3'-phosphate
  modified_base 3: mod_base = OTHER; note = 2'-O-methyluridine-3'-phosphate
  modified_base 4: mod_base = OTHER; note = 2'-O-methyladenosine-3'-phosphate
  modified_base 5: mod_base = OTHER; note = 2'-O-methyladenosine-3'-phosphate
  modified_base 6: mod_base = OTHER; note = 2'-O-methyluridine-3'-phosphate
  modified_base 7: mod_base = OTHER; note = 2'-deoxy-2'-fluoroguanosine-3'-phosphate
  modified_base 8: mod_base = OTHER; note = 2'-O-methyluridine-3'-phosphate
  modified_base 9: mod_base = OTHER; note = 2'-deoxy-2'-fluorouridine-3'-phosphate
  modified_base 10: mod_base = OTHER; note = 2'-deoxy-2'-fluorouridine-3'-phosphate
  modified_base 11: mod_base = OTHER; note = 2'-deoxy-2'-fluorouridine-3'-phosphate
  modified_base 12: mod_base = OTHER; note = 2'-O-methylcytidine-3'-phosphate
  modified_base 13: mod_base = OTHER; note = 2'-O-methyluridine-3'-phosphate
  modified_base 14: mod_base = OTHER; note = 2'-O-methylguanosine-3'-phosphate
  modified_base 15: mod_base = OTHER; note = 2'-O-methyladenosine-3'-phosphate
  modified_base 16: mod_base = OTHER; note = 2'-O-methyladenosine-3'-phosphate
  modified_base 17: mod_base = OTHER; note = 2'-O-methylcytidine-3'-phosphate
  modified_base 18: mod_base = OTHER; note = 2'-O-methyladenosine-3'-phosphate
  modified_base 19: mod_base = OTHER; note = 2'-O-methylcytidine-3'-phosphate
  modified_base 20: mod_base = OTHER; note = 2'-O-methyluridine-3'-phosphate
  modified_base 21: mod_base = OTHER; note = 2'-O-methyladenosine
attaatgttttctgaacacta

SEQ ID NO: 3619 - RNA, 21 nt, synthetic construct
  source 1..21: mol_type = other RNA
  modified_base 1: mod_base = OTHER; note = 2'-O-methyluridine-3'-phosphate
  modified_base 2: mod_base = OTHER; note = 2'-O-methyluridine-3'-phosphate
  modified_base 3: mod_base = OTHER; note = 2'-O-methyladenosine-3'-phosphate
  modified_base 4: mod_base = OTHER; note = 2'-O-methyladenosine-3'-phosphate
  modified_base 5: mod_base = OTHER; note = 2'-O-methyluridine-3'-phosphate
  modified_base 6: mod_base = OTHER; note = 2'-O-methylguanosine-3'-phosphate
  modified_base 7: mod_base = OTHER; note = 2'-deoxy-2'-fluorouridine-3'-phosphate
  modified_base 8: mod_base = OTHER; note = 2'-O-methyluridine-3'-phosphate
  modified_base 9: mod_base = OTHER; note = 2'-deoxy-2'-fluorouridine-3'-phosphate
  modified_base 10: mod_base = OTHER; note = 2'-deoxy-2'-fluorouridine-3'-phosphate
  modified_base 11: mod_base = OTHER; note = 2'-deoxy-2'-fluorocytidine-3'-phosphate
  modified_base 12: mod_base = OTHER; note = 2'-O-methyluridine-3'-phosphate
  modified_base 13: mod_base = OTHER; note = 2'-O-methylguanosine-3'-phosphate
  modified_base 14: mod_base = OTHER; note = 2'-O-methyladenosine-3'-phosphate
  modified_base 15: mod_base = OTHER; note = 2'-O-methyladenosine-3'-phosphate
  modified_base 16: mod_base = OTHER; note = 2'-O-methylcytidine-3'-phosphate
  modified_base 17: mod_base = OTHER; note = 2'-O-methyladenosine-3'-phosphate
  modified_base 18: mod_base = OTHER; note = 2'-O-methylcytidine-3'-phosphate
  modified_base 19: mod_base = OTHER; note = 2'-O-methyluridine-3'-phosphate
  modified_base 20: mod_base = OTHER; note = 2'-O-methyluridine-3'-phosphate
  modified_base 21: mod_base = OTHER; note = 2'-O-methyladenosine
ttaatgttttctgaacactta

SEQ ID NO: 3620 - RNA, 21 nt, synthetic construct
  source 1..21: mol_type = other RNA
  modified_base 1: mod_base = OTHER; note = 2'-O-methyluridine-3'-phosphate
  modified_base 2: mod_base = OTHER; note = 2'-O-methylcytidine-3'-phosphate
  modified_base 3: mod_base = OTHER; note = 2'-O-methyluridine-3'-phosphate
  modified_base 4: mod_base = OTHER; note = 2'-O-methylguanosine-3'-phosphate
  modified_base 5: mod_base = OTHER; note = 2'-O-methyladenosine-3'-phosphate
  modified_base 6: mod_base = OTHER; note = 2'-O-methyladenosine-3'-phosphate
  modified_base 7: mod_base = OTHER; note = 2'-deoxy-2'-fluorocytidine-3'-phosphate
  modified_base 8: mod_base = OTHER; note = 2'-O-methyladenosine-3'-phosphate
  modified_base 9: mod_base = OTHER; note = 2'-deoxy-2'-fluorocytidine-3'-phosphate
  modified_base 10: mod_base = OTHER; note = 2'-deoxy-2'-fluorouridine-3'-phosphate
  modified_base 11: mod_base = OTHER; note = 2'-deoxy-2'-fluorouridine-3'-phosphate
  modified_base 12: mod_base = OTHER; note = 2'-O-methylcytidine-3'-phosphate
  modified_base 13: mod_base = OTHER; note = 2'-O-methylcytidine-3'-phosphate
  modified_base 14: mod_base = OTHER; note = 2'-O-methyladenosine-3'-phosphate
  modified_base 15: mod_base = OTHER; note = 2'-O-methyladenosine-3'-phosphate
  modified_base 16: mod_base = OTHER; note = 2'-O-methyladenosine-3'-phosphate
  modified_base 17: mod_base = OTHER; note = 2'-O-methylguanosine-3'-phosphate
  modified_base 18: mod_base = OTHER; note = 2'-O-methyladenosine-3'-phosphate
  modified_base 19: mod_base = OTHER; note = 2'-O-methyluridine-3'-phosphate
  modified_base 20: mod_base = OTHER; note = 2'-O-methyluridine-3'-phosphate
  modified_base 21: mod_base = OTHER; note = 2'-O-methyladenosine
tctgaacacttccaaagatta

SEQ ID NO: 3621 - RNA, 21 nt, synthetic construct
  source 1..21: mol_type = other RNA
  modified_base 1: mod_base = OTHER; note = 2'-O-methylcytidine-3'-phosphate
  modified_base 2: mod_base = OTHER; note = 2'-O-methyluridine-3'-phosphate
  modified_base 3: mod_base = OTHER; note = 2'-O-methylguanosine-3'-phosphate
  modified_base 4: mod_base = OTHER; note = 2'-O-methyladenosine-3'-phosphate
  modified_base 5: mod_base = OTHER; note = 2'-O-methyladenosine-3'-phosphate
  modified_base 6: mod_base = OTHER; note = 2'-O-methylcytidine-3'-phosphate
  modified_base 7: mod_base = OTHER; note = 2'-deoxy-2'-fluoroadenosine-3'-phosphate
  modified_base 8: mod_base = OTHER; note = 2'-O-methylcytidine-3'-phosphate
  modified_base 9: mod_base = OTHER; note = 2'-deoxy-2'-fluorouridine-3'-phosphate
  modified_base 10: mod_base = OTHER; note = 2'-deoxy-2'-fluorouridine-3'-phosphate
  modified_base 11: mod_base = OTHER; note = 2'-deoxy-2'-fluorocytidine-3'-phosphate
  modified_base 12: mod_base = OTHER; note = 2'-O-methylcytidine-3'-phosphate
  modified_base 13: mod_base = OTHER; note = 2'-O-methyladenosine-3'-phosphate
  modified_base 14: mod_base = OTHER; note = 2'-O-methyladenosine-3'-phosphate
  modified_base 15: mod_base = OTHER; note = 2'-O-methyladenosine-3'-phosphate
  modified_base 16: mod_base = OTHER; note = 2'-O-methylguanosine-3'-phosphate
  modified_base 17: mod_base = OTHER; note = 2'-O-methyladenosine-3'-phosphate
  modified_base 18: mod_base = OTHER; note = 2'-O-methyluridine-3'-phosphate
  modified_base 19: mod_base = OTHER; note = 2'-O-methyluridine-3'-phosphate
  modified_base 20: mod_base = OTHER; note = 2'-O-methyladenosine-3'-phosphate
  modified_base 21: mod_base = OTHER; note = 2'-O-methyladenosine
ctgaacacttccaaagattaa

SEQ ID NO: 3622 - RNA, 21 nt, synthetic construct
  source 1..21: mol_type = other RNA
  modified_base 1: mod_base = OTHER; note = 2'-O-methyluridine-3'-phosphate
  modified_base 2: mod_base = OTHER; note = 2'-O-methylguanosine-3'-phosphate
  modified_base 3: mod_base = OTHER; note = 2'-O-methyladenosine-3'-phosphate
  modified_base 4: mod_base = OTHER; note = 2'-O-methyladenosine-3'-phosphate
  modified_base 5: mod_base = OTHER; note = 2'-O-methylcytidine-3'-phosphate
  modified_base 6: mod_base = OTHER; note = 2'-O-methyladenosine-3'-phosphate
  modified_base 7: mod_base = OTHER; note = 2'-deoxy-2'-fluorocytidine-3'-phosphate
  modified_base 8: mod_base = OTHER; note = 2'-O-methyluridine-3'-phosphate
  modified_base 9: mod_base = OTHER; note = 2'-deoxy-2'-fluorouridine-3'-phosphate
  modified_base 10: mod_base = OTHER; note = 2'-deoxy-2'-fluorocytidine-3'-phosphate
  modified_base 11: mod_base = OTHER; note = 2'-deoxy-2'-fluorocytidine-3'-phosphate
  modified_base 12: mod_base = OTHER; note = 2'-O-methyladenosine-3'-phosphate
  modified_base 13: mod_base = OTHER; note = 2'-O-methyladenosine-3'-phosphate
  modified_base 14: mod_base = OTHER; note = 2'-O-methyladenosine-3'-phosphate
  modified_base 15: mod_base = OTHER; note = 2'-O-methylguanosine-3'-phosphate
  modified_base 16: mod_base = OTHER; note = 2'-O-methyladenosine-3'-phosphate
  modified_base 17: mod_base = OTHER; note = 2'-O-methyluridine-3'-phosphate
  modified_base 18: mod_base = OTHER; note = 2'-O-methyluridine-3'-phosphate
  modified_base 19: mod_base = OTHER; note = 2'-O-methyladenosine-3'-phosphate
  modified_base 20: mod_base = OTHER; note = 2'-O-methyladenosine-3'-phosphate
  modified_base 21: mod_base = OTHER; note = 2'-O-methyladenosine
tgaacacttccaaagattaaa

SEQ ID NO: 3623 - RNA, 21 nt, synthetic construct
  source 1..21: mol_type = other RNA
  modified_base 1: mod_base = OTHER; note = 2'-O-methylguanosine-3'-phosphate
  modified_base 2: mod_base = OTHER; note = 2'-O-methyladenosine-3'-phosphate
  modified_base 3: mod_base = OTHER; note = 2'-O-methyladenosine-3'-phosphate
  modified_base 4: mod_base = OTHER; note = 2'-O-methylcytidine-3'-phosphate
  modified_base 5: mod_base = OTHER; note = 2'-O-methyladenosine-3'-phosphate
  modified_base 6: mod_base = OTHER; note = 2'-O-methylcytidine-3'-phosphate
  modified_base 7: mod_base = OTHER; note = 2'-deoxy-2'-fluorouridine-3'-phosphate
  modified_base 8: mod_base = OTHER; note = 2'-O-methyluridine-3'-phosphate
  modified_base 9: mod_base = OTHER; note = 2'-deoxy-2'-fluorocytidine-3'-phosphate
  modified_base 10: mod_base = OTHER; note = 2'-deoxy-2'-fluorocytidine-3'-phosphate
  modified_base 11: mod_base = OTHER; note = 2'-deoxy-2'-fluoroadenosine-3'-phosphate
  modified_base 12: mod_base = OTHER; note = 2'-O-methyladenosine-3'-phosphate
  modified_base 13: mod_base = OTHER; note = 2'-O-methyladenosine-3'-phosphate
  modified_base 14: mod_base = OTHER; note = 2'-O-methylguanosine-3'-phosphate
  modified_base 15: mod_base = OTHER; note = 2'-O-methyladenosine-3'-phosphate
  modified_base 16: mod_base = OTHER; note = 2'-O-methyluridine-3'-phosphate
  modified_base 17: mod_base = OTHER; note = 2'-O-methyluridine-3'-phosphate
  modified_base 18: mod_base = OTHER; note = 2'-O-methyladenosine-3'-phosphate
  modified_base 19: mod_base = OTHER; note = 2'-O-methyladenosine-3'-phosphate
  modified_base 20: mod_base = OTHER; note = 2'-O-methyluridine-3'-phosphate
  modified_base 21: mod_base = OTHER; note = 2'-O-methyladenosine
gaacacttccaaagattaata

SEQ ID NO: 3624 - RNA, 21 nt, synthetic construct
  source 1..21: mol_type = other RNA
  modified_base 1: mod_base = OTHER; note = 2'-O-methyladenosine-3'-phosphate
  modified_base 2: mod_base = OTHER; note = 2'-O-methyladenosine-3'-phosphate
  modified_base 3: mod_base = OTHER; note = 2'-O-methylcytidine-3'-phosphate
  modified_base 4: mod_base = OTHER; note = 2'-O-methyladenosine-3'-phosphate
  modified_base 5: mod_base = OTHER; note = 2'-O-methylcytidine-3'-phosphate
  modified_base 6: mod_base = OTHER; note = 2'-O-methyluridine-3'-phosphate
  modified_base 7: mod_base = OTHER; note = 2'-deoxy-2'-fluorouridine-3'-phosphate
  modified_base 8: mod_base = OTHER; note = 2'-O-methylcytidine-3'-phosphate
  modified_base 9: mod_base = OTHER; note = 2'-deoxy-2'-fluorocytidine-3'-phosphate
  modified_base 10: mod_base = OTHER; note = 2'-deoxy-2'-fluoroadenosine-3'-phosphate
  modified_base 11: mod_base = OTHER; note = 2'-deoxy-2'-fluoroadenosine-3'-phosphate
  modified_base 12: mod_base = OTHER; note = 2'-O-methyladenosine-3'-phosphate
  modified_base 13: mod_base = OTHER; note = 2'-O-methylguanosine-3'-phosphate
  modified_base 14: mod_base = OTHER; note = 2'-O-methyladenosine-3'-phosphate
  modified_base 15: mod_base = OTHER; note = 2'-O-methyluridine-3'-phosphate
  modified_base 16: mod_base = OTHER; note = 2'-O-methyluridine-3'-phosphate
  modified_base 17: mod_base = OTHER; note = 2'-O-methyladenosine-3'-phosphate
  modified_base 18: mod_base = OTHER; note = 2'-O-methyladenosine-3'-phosphate
  modified_base 19: mod_base = OTHER; note = 2'-O-methyluridine-3'-phosphate
  modified_base 20: mod_base = OTHER; note = 2'-O-methylcytidine-3'-phosphate
  modified_base 21: mod_base = OTHER; note = 2'-O-methyladenosine
aacacttccaaagattaatca

SEQ ID NO: 3625 - RNA, 21 nt, synthetic construct
  source 1..21: mol_type = other RNA
  modified_base 1: mod_base = OTHER; note = 2'-O-methyladenosine-3'-phosphate
  modified_base 2: mod_base = OTHER; note = 2'-O-methylcytidine-3'-phosphate
  modified_base 3: mod_base = OTHER; note = 2'-O-methyladenosine-3'-phosphate
  modified_base 4: mod_base = OTHER; note = 2'-O-methylcytidine-3'-phosphate
  modified_base 5: mod_base = OTHER; note = 2'-O-methyluridine-3'-phosphate
  modified_base 6: mod_base = OTHER; note = 2'-O-methyluridine-3'-phosphate
  modified_base 7: mod_base = OTHER; note = 2'-deoxy-2'-fluorocytidine-3'-phosphate
  modified_base 8: mod_base = OTHER; note = 2'-O-methylcytidine-3'-phosphate
  modified_base 9: mod_base = OTHER; note = 2'-deoxy-2'-fluoroadenosine-3'-phosphate
  modified_base 10: mod_base = OTHER; note = 2'-deoxy-2'-fluoroadenosine-3'-phosphate
  modified_base 11: mod_base = OTHER; note = 2'-deoxy-2'-fluoroadenosine-3'-phosphate
  modified_base 12: mod_base = OTHER; note = 2'-O-methylguanosine-3'-phosphate
  modified_base 13: mod_base = OTHER; note = 2'-O-methyladenosine-3'-phosphate
  modified_base 14: mod_base = OTHER; note = 2'-O-methyluridine-3'-phosphate
  modified_base 15: mod_base = OTHER; note = 2'-O-methyluridine-3'-phosphate
  modified_base 16: mod_base = OTHER; note = 2'-O-methyladenosine-3'-phosphate
  modified_base 17: mod_base = OTHER; note = 2'-O-methyladenosine-3'-phosphate
  modified_base 18: mod_base = OTHER; note = 2'-O-methyluridine-3'-phosphate
  modified_base 19: mod_base = OTHER; note = 2'-O-methylcytidine-3'-phosphate
  modified_base 20: mod_base = OTHER; note = 2'-O-methyladenosine-3'-phosphate
  modified_base 21: mod_base = OTHER; note = 2'-O-methyladenosine
acacttccaaagattaatcaa

SEQ ID NO: 3626 - RNA, 21 nt, synthetic construct
  source 1..21: mol_type = other RNA
  modified_base 1: mod_base = OTHER; note = 2'-O-methylcytidine-3'-phosphate
  modified_base 2: mod_base = OTHER; note = 2'-O-methyladenosine-3'-phosphate
  modified_base 3: mod_base = OTHER; note = 2'-O-methylcytidine-3'-phosphate
  modified_base 4: mod_base = OTHER; note = 2'-O-methyluridine-3'-phosphate
  modified_base 5: mod_base = OTHER; note = 2'-O-methyluridine-3'-phosphate
  modified_base 6: mod_base = OTHER; note = 2'-O-methylcytidine-3'-phosphate
  modified_base 7: mod_base = OTHER; note = 2'-deoxy-2'-fluorocytidine-3'-phosphate
  modified_base 8: mod_base = OTHER; note = 2'-O-methyladenosine-3'-phosphate
  modified_base 9: mod_base = OTHER; note = 2'-deoxy-2'-fluoroadenosine-3'-phosphate
  modified_base 10: mod_base = OTHER; note = 2'-deoxy-2'-fluoroadenosine-3'-phosphate
  modified_base 11: mod_base = OTHER; note = 2'-deoxy-2'-fluoroguanosine-3'-phosphate
  modified_base 12: mod_base = OTHER; note = 2'-O-methyladenosine-3'-phosphate
  modified_base 13: mod_base = OTHER; note = 2'-O-methyluridine-3'-phosphate
  modified_base 14: mod_base = OTHER; note = 2'-O-methyluridine-3'-phosphate
  modified_base 15: mod_base = OTHER; note = 2'-O-methyladenosine-3'-phosphate
  modified_base 16: mod_base = OTHER; note = 2'-O-methyladenosine-3'-phosphate
  modified_base 17: mod_base = OTHER; note = 2'-O-methyluridine-3'-phosphate
  modified_base 18: mod_base = OTHER; note = 2'-O-methylcytidine-3'-phosphate
  modified_base 19: mod_base = OTHER; note = 2'-O-methyladenosine-3'-phosphate
  modified_base 20: mod_base = OTHER; note = 2'-O-methyladenosine-3'-phosphate
  modified_base 21: mod_base = OTHER; note = 2'-O-methyladenosine
cacttccaaagattaatcaaa

SEQ ID NO: 3627 - RNA, 21 nt, synthetic construct
  source 1..21: mol_type = other RNA
  modified_base 1: mod_base = OTHER; note = 2'-O-methyladenosine-3'-phosphate
  modified_base 2: mod_base = OTHER; note = 2'-O-methylcytidine-3'-phosphate
  modified_base 3: mod_base = OTHER; note = 2'-O-methyluridine-3'-phosphate
  modified_base 4: mod_base = OTHER; note = 2'-O-methyluridine-3'-phosphate
  modified_base 5: mod_base = OTHER; note = 2'-O-methylcytidine-3'-phosphate
  modified_base 6: mod_base = OTHER; note = 2'-O-methylcytidine-3'-phosphate
  modified_base 7: mod_base = OTHER; note = 2'-deoxy-2'-fluoroadenosine-3'-phosphate
  modified_base 8: mod_base = OTHER; note = 2'-O-methyladenosine-3'-phosphate
  modified_base 9: mod_base = OTHER; note = 2'-deoxy-2'-fluoroadenosine-3'-phosphate
  modified_base 10: mod_base = OTHER; note = 2'-deoxy-2'-fluoroguanosine-3'-phosphate
  modified_base 11: mod_base = OTHER; note = 2'-deoxy-2'-fluoroadenosine-3'-phosphate
  modified_base 12: mod_base = OTHER; note = 2'-O-methyluridine-3'-phosphate
  modified_base 13: mod_base = OTHER; note = 2'-O-methyluridine-3'-phosphate
  modified_base 14: mod_base = OTHER; note = 2'-O-methyladenosine-3'-phosphate
  modified_base 15: mod_base = OTHER; note = 2'-O-methyladenosine-3'-phosphate
  modified_base 16: mod_base = OTHER; note = 2'-O-methyluridine-3'-phosphate
  modified_base 17: mod_base = OTHER; note = 2'-O-methylcytidine-3'-phosphate
  modified_base 18: mod_base = OTHER; note = 2'-O-methyladenosine-3'-phosphate
  modified_base 19: mod_base = OTHER; note = 2'-O-methyladenosine-3'-phosphate
  modified_base 20: mod_base = OTHER; note = 2'-O-methyladenosine-3'-phosphate
  modified_base 21: mod_base = OTHER; note = 2'-O-methyladenosine
acttccaaagattaatcaaaa

SEQ ID NO: 3628 - RNA, 21 nt, synthetic construct
  source 1..21: mol_type = other RNA
  modified_base 1: mod_base = OTHER; note = 2'-O-methylcytidine-3'-phosphate
  modified_base 2: mod_base = OTHER; note = 2'-O-methyluridine-3'-phosphate
  modified_base 3: mod_base = OTHER; note = 2'-O-methyluridine-3'-phosphate
  modified_base 4: mod_base = OTHER; note = 2'-O-methylcytidine-3'-phosphate
  modified_base 5: mod_base = OTHER; note = 2'-O-methylcytidine-3'-phosphate
  modified_base 6: mod_base = OTHER; note = 2'-O-methyladenosine-3'-phosphate
  modified_base 7: mod_base = OTHER; note = 2'-deoxy-2'-fluoroadenosine-3'-phosphate
  modified_base 8: mod_base = OTHER; note = 2'-O-methyladenosine-3'-phosphate
  modified_base 9: mod_base = OTHER; note = 2'-deoxy-2'-fluoroguanosine-3'-phosphate
  modified_base 10: mod_base = OTHER; note = 2'-deoxy-2'-fluoroadenosine-3'-phosphate
  modified_base 11: mod_base = OTHER; note = 2'-deoxy-2'-fluorouridine-3'-phosphate
  modified_base 12: mod_base = OTHER; note = 2'-O-methyluridine-3'-phosphate
  modified_base 13: mod_base = OTHER; note = 2'-O-methyladenosine-3'-phosphate
  modified_base 14: mod_base = OTHER; note = 2'-O-methyladenosine-3'-phosphate
  modified_base 15: mod_base = OTHER; note = 2'-O-methyluridine-3'-phosphate
  modified_base 16: mod_base = OTHER; note = 2'-O-methylcytidine-3'-phosphate
  modified_base 17: mod_base = OTHER; note = 2'-O-methyladenosine-3'-phosphate
  modified_base 18: mod_base = OTHER; note = 2'-O-methyladenosine-3'-phosphate
  modified_base 19: mod_base = OTHER; note = 2'-O-methyladenosine-3'-phosphate
  modified_base 20: mod_base = OTHER; note = 2'-O-methylcytidine-3'-phosphate
  modified_base 21: mod_base = OTHER; note = 2'-O-methyladenosine
cttccaaagattaatcaaaca

SEQ ID NO: 3629 - RNA, 21 nt, synthetic construct
  source 1..21: mol_type = other RNA
  modified_base 1: mod_base = OTHER; note = 2'-O-methyluridine-3'-phosphate
  modified_base 2: mod_base = OTHER; note = 2'-O-methyluridine-3'-phosphate
  modified_base 3: mod_base = OTHER; note = 2'-O-methylcytidine-3'-phosphate
  modified_base 4: mod_base = OTHER; note = 2'-O-methylcytidine-3'-phosphate
  modified_base 5: mod_base = OTHER; note = 2'-O-methyladenosine-3'-phosphate
  modified_base 6: mod_base = OTHER; note = 2'-O-methyladenosine-3'-phosphate
  modified_base 7: mod_base = OTHER; note = 2'-deoxy-2'-fluoroadenosine-3'-phosphate
  modified_base 8: mod_base = OTHER; note = 2'-O-methylguanosine-3'-phosphate
  modified_base 9: mod_base = OTHER; note = 2'-deoxy-2'-fluoroadenosine-3'-phosphate
  modified_base 10: mod_base = OTHER; note = 2'-deoxy-2'-fluorouridine-3'-phosphate
  modified_base 11: mod_base = OTHER; note = 2'-deoxy-2'-fluorouridine-3'-phosphate
  modified_base 12: mod_base = OTHER; note = 2'-O-methyladenosine-3'-phosphate
  modified_base 13: mod_base = OTHER; note = 2'-O-methyladenosine-3'-phosphate
  modified_base 14: mod_base = OTHER; note = 2'-O-methyluridine-3'-phosphate
  modified_base 15: mod_base = OTHER; note = 2'-O-methylcytidine-3'-phosphate
  modified_base 16: mod_base = OTHER; note = 2'-O-methyladenosine-3'-phosphate
  modified_base 17: mod_base = OTHER; note = 2'-O-methyladenosine-3'-phosphate
  modified_base 18: mod_base = OTHER; note = 2'-O-methyladenosine-3'-phosphate
  modified_base 19: mod_base = OTHER; note = 2'-O-methylcytidine-3'-phosphate
  modified_base 20: mod_base = OTHER; note = 2'-O-methyladenosine-3'-phosphate
  modified_base 21: mod_base = OTHER; note = 2'-O-methyladenosine
ttccaaagattaatcaaacaa

SEQ ID NO: 3630 - RNA, 21 nt, synthetic construct
  source 1..21: mol_type = other RNA
  modified_base 1: mod_base = OTHER; note = 2'-O-methyluridine-3'-phosphate
  modified_base 2: mod_base = OTHER; note = 2'-O-methylcytidine-3'-phosphate
  modified_base 3: mod_base = OTHER; note = 2'-O-methylcytidine-3'-phosphate
  modified_base 4: mod_base = OTHER; note = 2'-O-methyladenosine-3'-phosphate
  modified_base 5: mod_base = OTHER; note = 2'-O-methyladenosine-3'-phosphate
  modified_base 6: mod_base = OTHER; note = 2'-O-methyladenosine-3'-phosphate
  modified_base 7: mod_base = OTHER; note = 2'-deoxy-2'-fluoroguanosine-3'-phosphate
  modified_base 8: mod_base = OTHER; note = 2'-O-methyladenosine-3'-phosphate
  modified_base 9: mod_base = OTHER; note = 2'-deoxy-2'-fluorouridine-3'-phosphate
  modified_base 10: mod_base = OTHER; note = 2'-deoxy-2'-fluorouridine-3'-phosphate
  modified_base 11: mod_base = OTHER; note = 2'-deoxy-2'-fluoroadenosine-3'-phosphate
  modified_base 12: mod_base = OTHER; note = 2'-O-methyladenosine-3'-phosphate
  modified_base 13: mod_base = OTHER; note = 2'-O-methyluridine-3'-phosphate
  modified_base 14: mod_base = OTHER; note = 2'-O-methylcytidine-3'-phosphate
  modified_base 15: mod_base = OTHER; note = 2'-O-methyladenosine-3'-phosphate
  modified_base 16: mod_base = OTHER; note = 2'-O-methyladenosine-3'-phosphate
  modified_base 17: mod_base = OTHER; note = 2'-O-methyladenosine-3'-phosphate
  modified_base 18: mod_base = OTHER; note = 2'-O-methylcytidine-3'-phosphate
  modified_base 19: mod_base = OTHER; note = 2'-O-methyladenosine-3'-phosphate
  modified_base 20: mod_base = OTHER; note = 2'-O-methyluridine-3'-phosphate
  modified_base 21: mod_base = OTHER; note = 2'-O-methyladenosine
tccaaagattaatcaaacata

SEQ ID NO: 3631 - RNA, 21 nt, synthetic construct
  source 1..21: mol_type = other RNA
  modified_base 1: mod_base = OTHER; note = 2'-O-methyladenosine-3'-phosphate
  modified_base 2: mod_base = OTHER; note = 2'-O-methyluridine-3'-phosphate
  modified_base 3: mod_base = OTHER; note = 2'-O-methyluridine-3'-phosphate
  modified_base 4: mod_base = OTHER; note = 2'-O-methylcytidine-3'-phosphate
  modified_base 5: mod_base = OTHER; note = 2'-O-methyladenosine-3'-phosphate
  modified_base 6: mod_base = OTHER; note = 2'-O-methyluridine-3'-phosphate
  modified_base 7: mod_base = OTHER; note = 2'-deoxy-2'-fluorouridine-3'-phosphate
  modified_base 8: mod_base = OTHER; note = 2'-O-methylguanosine-3'-phosphate
  modified_base 9: mod_base = OTHER; note = 2'-deoxy-2'-fluorouridine-3'-phosphate
  modified_base 10: mod_base = OTHER; note = 2'-deoxy-2'-fluorocytidine-3'-phosphate
  modified_base 11: mod_base = OTHER; note = 2'-deoxy-2'-fluorouridine-3'-phosphate
  modified_base 12: mod_base = OTHER; note = 2'-O-methylguanosine-3'-phosphate
  modified_base 13: mod_base = OTHER; note = 2'-O-methyladenosine-3'-phosphate
  modified_base 14: mod_base = OTHER; note = 2'-O-methyladenosine-3'-phosphate
  modified_base 15: mod_base = OTHER; note = 2'-O-methyladenosine-3'-phosphate
  modified_base 16: mod_base = OTHER; note = 2'-O-methyladenosine-3'-phosphate
  modified_base 17: mod_base = OTHER; note = 2'-O-methyluridine-3'-phosphate
  modified_base 18: mod_base = OTHER; note = 2'-O-methylguanosine-3'-phosphate
  modified_base 19: mod_base = OTHER; note = 2'-O-methyluridine-3'-phosphate
  modified_base 20: mod_base = OTHER; note = 2'-O-methylcytidine-3'-phosphate
  modified_base 21: mod_base = OTHER; note = 2'-O-methyladenosine
attcattgtctgaaaatgtca

SEQ ID NO: 3632 - RNA, 21 nt, synthetic construct
  source 1..21: mol_type = other RNA
  modified_base 1: mod_base = OTHER; note = 2'-O-methylcytidine-3'-phosphate
  modified_base 2: mod_base = OTHER; note = 2'-O-methyladenosine-3'-phosphate
  modified_base 3: mod_base = OTHER; note = 2'-O-methyluridine-3'-phosphate
  modified_base 4: mod_base = OTHER; note = 2'-O-methyluridine-3'-phosphate
  modified_base 5: mod_base = OTHER; note = 2'-O-methylguanosine-3'-phosphate
  modified_base 6: mod_base = OTHER; note = 2'-O-methyluridine-3'-phosphate
  modified_base 7: mod_base = OTHER; note = 2'-deoxy-2'-fluorocytidine-3'-phosphate
  modified_base 8: mod_base = OTHER; note = 2'-O-methyluridine-3'-phosphate
  modified_base 9: mod_base = OTHER; note = 2'-deoxy-2'-fluoroguanosine-3'-phosphate
  modified_base 10: mod_base = OTHER; note = 2'-deoxy-2'-fluoroadenosine-3'-phosphate
  modified_base 11: mod_base = OTHER; note = 2'-deoxy-2'-fluoroadenosine-3'-phosphate
  modified_base 12: mod_base = OTHER; note = 2'-O-methyladenosine-3'-phosphate
  modified_base 13: mod_base = OTHER; note = 2'-O-methyladenosine-3'-phosphate
  modified_base 14: mod_base = OTHER; note = 2'-O-methyluridine-3'-phosphate
  modified_base 15: mod_base = OTHER; note = 2'-O-methylguanosine-3'-phosphate
  modified_base 16: mod_base = OTHER; note = 2'-O-methyluridine-3'-phosphate
  modified_base 17: mod_base = OTHER; note = 2'-O-methylcytidine-3'-phosphate
  modified_base 18: mod_base = OTHER; note = 2'-O-methyluridine-3'-phosphate
  modified_base 19: mod_base = OTHER; note = 2'-O-methyluridine-3'-phosphate
  modified_base 20: mod_base = OTHER; note = 2'-O-methyluridine-3'-phosphate
  modified_base 21: mod_base = OTHER; note = 2'-O-methyladenosine
cattgtctgaaaatgtcttta

SEQ ID NO: 3633 - RNA, 21 nt, synthetic construct
  source 1..21: mol_type = other RNA
  modified_base 1: mod_base = OTHER; note = 2'-O-methyladenosine-3'-phosphate
  modified_base 2: mod_base = OTHER; note = 2'-O-methyluridine-3'-phosphate
  modified_base 3: mod_base = OTHER; note = 2'-O-methyluridine-3'-phosphate
  modified_base 4: mod_base = OTHER; note = 2'-O-methylguanosine-3'-phosphate
  modified_base 5: mod_base = OTHER; note = 2'-O-methyluridine-3'-phosphate
  modified_base 6: mod_base = OTHER; note = 2'-O-methylcytidine-3'-phosphate
  modified_base 7: mod_base = OTHER; note = 2'-deoxy-2'-fluorouridine-3'-phosphate
  modified_base 8: mod_base = OTHER; note = 2'-O-methylguanosine-3'-phosphate
  modified_base 9: mod_base = OTHER; note = 2'-deoxy-2'-fluoroadenosine-3'-phosphate
  modified_base 10: mod_base = OTHER; note = 2'-deoxy-2'-fluoroadenosine-3'-phosphate
  modified_base 11: mod_base = OTHER; note = 2'-deoxy-2'-fluoroadenosine-3'-phosphate
  modified_base 12: mod_base = OTHER; note = 2'-O-methyladenosine-3'-phosphate
  modified_base 13: mod_base = OTHER; note = 2'-O-methyluridine-3'-phosphate
  modified_base 14: mod_base = OTHER; note = 2'-O-methylguanosine-3'-phosphate
  modified_base 15: mod_base = OTHER; note = 2'-O-methyluridine-3'-phosphate
  modified_base 16: mod_base = OTHER; note = 2'-O-methylcytidine-3'-phosphate
  modified_base 17: mod_base = OTHER; note = 2'-O-methyluridine-3'-phosphate
  modified_base 18: mod_base = OTHER; note = 2'-O-methyluridine-3'-phosphate
  modified_base 19: mod_base = OTHER; note = 2'-O-methyluridine-3'-phosphate
  modified_base 20: mod_base = OTHER; note = 2'-O-methyladenosine-3'-phosphate
  modified_base 21: mod_base = OTHER; note = 2'-O-methyladenosine
attgtctgaaaatgtctttaa

SEQ ID NO: 3634 - RNA, 21 nt, synthetic construct
  source 1..21: mol_type = other RNA
  modified_base 1: mod_base = OTHER; note = 2'-O-methyluridine-3'-phosphate
  modified_base 2: mod_base = OTHER; note = 2'-O-methyluridine-3'-phosphate
  modified_base 3: mod_base = OTHER; note = 2'-O-methylguanosine-3'-phosphate
  modified_base 4: mod_base = OTHER; note = 2'-O-methyluridine-3'-phosphate
  modified_base 5: mod_base = OTHER; note = 2'-O-methylcytidine-3'-phosphate
  modified_base 6: mod_base = OTHER; note = 2'-O-methyluridine-3'-phosphate
  modified_base 7: mod_base = OTHER; note = 2'-deoxy-2'-fluoroguanosine-3'-phosphate
  modified_base 8: mod_base = OTHER; note = 2'-O-methyladenosine-3'-phosphate
  modified_base 9: mod_base = OTHER; note = 2'-deoxy-2'-fluoroadenosine-3'-phosphate
  modified_base 10: mod_base = OTHER; note = 2'-deoxy-2'-fluoroadenosine-3'-phosphate
  modified_base 11: mod_base = OTHER; note = 2'-deoxy-2'-fluoroadenosine-3'-phosphate
  modified_base 12: mod_base = OTHER; note = 2'-O-methyluridine-3'-phosphate
  modified_base 13: mod_base = OTHER; note = 2'-O-methylguanosine-3'-phosphate
  modified_base 14: mod_base = OTHER; note = 2'-O-methyluridine-3'-phosphate
  modified_base 15: mod_base = OTHER; note = 2'-O-methylcytidine-3'-phosphate
  modified_base 16: mod_base = OTHER; note = 2'-O-methyluridine-3'-phosphate
  modified_base 17: mod_base = OTHER; note = 2'-O-methyluridine-3'-phosphate
  modified_base 18: mod_base = OTHER; note = 2'-O-methyluridine-3'-phosphate
  modified_base 19: mod_base = OTHER; note = 2'-O-methyladenosine-3'-phosphate
  modified_base 20: mod_base = OTHER; note = 2'-O-methyladenosine-3'-phosphate
  modified_base 21: mod_base = OTHER; note = 2'-O-methyladenosine
ttgtctgaaaatgtctttaaa

SEQ ID NO: 3635 - RNA, 21 nt, synthetic construct
  source 1..21: mol_type = other RNA
  modified_base 1: mod_base = OTHER; note = 2'-O-methylguanosine-3'-phosphate
  modified_base 2: mod_base = OTHER; note = 2'-O-methyluridine-3'-phosphate
  modified_base 3: mod_base = OTHER; note = 2'-O-methylcytidine-3'-phosphate
  modified_base 4: mod_base = OTHER; note = 2'-O-methyluridine-3'-phosphate
  modified_base 5: mod_base = OTHER; note = 2'-O-methylguanosine-3'-phosphate
  modified_base 6: mod_base = OTHER; note = 2'-O-methyladenosine-3'-phosphate
  modified_base 7: mod_base = OTHER; note = 2'-deoxy-2'-fluoroadenosine-3'-phosphate
  modified_base 8: mod_base = OTHER; note = 2'-O-methyladenosine-3'-phosphate
  modified_base 9: mod_base = OTHER; note = 2'-deoxy-2'-fluoroadenosine-3'-phosphate
  modified_base 10: mod_base = OTHER; note = 2'-deoxy-2'-fluorouridine-3'-phosphate
  modified_base 11: mod_base = OTHER; note = 2'-deoxy-2'-fluoroguanosine-3'-phosphate
  modified_base 12: mod_base = OTHER; note = 2'-O-methyluridine-3'-phosphate
  modified_base 13: mod_base = OTHER; note = 2'-O-methylcytidine-3'-phosphate
  modified_base 14: mod_base = OTHER; note = 2'-O-methyluridine-3'-phosphate
  modified_base 15: mod_base = OTHER; note = 2'-O-methyluridine-3'-phosphate
  modified_base 16: mod_base = OTHER; note = 2'-O-methyluridine-3'-phosphate
  modified_base 17: mod_base = OTHER; note = 2'-O-methyladenosine-3'-phosphate
  modified_base 18: mod_base = OTHER; note = 2'-O-methyladenosine-3'-phosphate
  modified_base 19: mod_base = OTHER; note = 2'-O-methylguanosine-3'-phosphate
  modified_base 20: mod_base = OTHER; note = 2'-O-methyladenosine-3'-phosphate
  modified_base 21: mod_base = OTHER; note = 2'-O-methyladenosine
gtctgaaaatgtctttaagaa

SEQ ID NO: 3636 - RNA, 21 nt, synthetic construct
  source 1..21: mol_type = other RNA
  modified_base 1: mod_base = OTHER; note = 2'-O-methylcytidine-3'-phosphate
  modified_base 2: mod_base = OTHER; note = 2'-O-methyluridine-3'-phosphate
  modified_base 3: mod_base = OTHER; note = 2'-O-methylguanosine-3'-phosphate
  modified_base 4: mod_base = OTHER; note = 2'-O-methyladenosine-3'-phosphate
  modified_base 5: mod_base = OTHER; note = 2'-O-methyladenosine-3'-phosphate
  modified_base 6: mod_base = OTHER; note = 2'-O-methyladenosine-3'-phosphate
  modified_base 7: mod_base = OTHER; note = 2'-deoxy-2'-fluoroadenosine-3'-phosphate
  modified_base 8: mod_base = OTHER; note = 2'-O-methyluridine-3'-phosphate
  modified_base 9: mod_base = OTHER; note = 2'-deoxy-2'-fluoroguanosine-3'-phosphate
  modified_base 10: mod_base = OTHER; note = 2'-deoxy-2'-fluorouridine-3'-phosphate
  modified_base 11: mod_base = OTHER; note = 2'-deoxy-2'-fluorocytidine-3'-phosphate
  modified_base 12: mod_base = OTHER; note = 2'-O-methyluridine-3'-phosphate
  modified_base 13: mod_base = OTHER; note = 2'-O-methyluridine-3'-phosphate
  modified_base 14: mod_base = OTHER; note = 2'-O-methyluridine-3'-phosphate
  modified_base 15: mod_base = OTHER; note = 2'-O-methyladenosine-3'-phosphate
  modified_base 16: mod_base = OTHER; note = 2'-O-methyladenosine-3'-phosphate
  modified_base 17: mod_base = OTHER; note = 2'-O-methylguanosine-3'-phosphate
  modified_base 18: mod_base = OTHER; note = 2'-O-methyladenosine-3'-phosphate
  modified_base 19: mod_base = OTHER; note = 2'-O-methyluridine-3'-phosphate
  modified_base 20: mod_base = OTHER; note = 2'-O-methyladenosine-3'-phosphate
  modified_base 21: mod_base = OTHER; note = 2'-O-methyladenosine
ctgaaaatgtctttaagataa

SEQ ID NO: 3637 - RNA, 21 nt, synthetic construct
  source 1..21: mol_type = other RNA
  modified_base 1: mod_base = OTHER; note = 2'-O-methyladenosine-3'-phosphate
  modified_base 2: mod_base = OTHER; note = 2'-O-methylguanosine-3'-phosphate
  modified_base 3: mod_base = OTHER; note = 2'-O-methylguanosine-3'-phosphate
  modified_base 4: mod_base = OTHER; note = 2'-O-methyluridine-3'-phosphate
  modified_base 5: mod_base = OTHER; note = 2'-O-methylcytidine-3'-phosphate
  modified_base 6: mod_base = OTHER; note = 2'-O-methylcytidine-3'-phosphate
  modified_base 7: mod_base = OTHER; note = 2'-deoxy-2'-fluorocytidine-3'-phosphate
  modified_base 8: mod_base = OTHER; note = 2'-O-methyluridine-3'-phosphate
  modified_base 9: mod_base = OTHER; note = 2'-deoxy-2'-fluoroadenosine-3'-phosphate
  modified_base 10: mod_base = OTHER; note = 2'-deoxy-2'-fluorouridine-3'-phosphate
  modified_base 11: mod_base = OTHER; note = 2'-deoxy-2'-fluorouridine-3'-phosphate
  modified_base 12: mod_base = OTHER; note = 2'-O-methyluridine-3'-phosphate
  modified_base 13: mod_base = OTHER; note = 2'-O-methylcytidine-3'-phosphate
  modified_base 14: mod_base = OTHER; note = 2'-O-methylcytidine-3'-phosphate
  modified_base 15: mod_base = OTHER; note = 2'-O-methyluridine-3'-phosphate
  modified_base 16: mod_base = OTHER; note = 2'-O-methyluridine-3'-phosphate
  modified_base 17: mod_base = OTHER; note = 2'-O-methyluridine-3'-phosphate
  modified_base 18: mod_base = OTHER; note = 2'-O-methylguanosine-3'-phosphate
  modified_base 19: mod_base = OTHER; note = 2'-O-methyluridine-3'-phosphate
  modified_base 20: mod_base = OTHER; note = 2'-O-methyladenosine-3'-phosphate
  modified_base 21: mod_base = OTHER; note = 2'-O-methyladenosine
aggtccctatttcctttgtaa

SEQ ID NO: 3638 - RNA, 21 nt, synthetic construct
  source 1..21: mol_type = other RNA
  modified_base 1: mod_base = OTHER; note = 2'-O-methylguanosine-3'-phosphate
  modified_base 2: mod_base = OTHER; note = 2'-O-methylguanosine-3'-phosphate
  modified_base 3: mod_base = OTHER; note = 2'-O-methyluridine-3'-phosphate
  modified_base 4: mod_base = OTHER; note = 2'-O-methylcytidine-3'-phosphate
  modified_base 5: mod_base = OTHER; note = 2'-O-methylcytidine-3'-phosphate
  modified_base 6: mod_base = OTHER; note = 2'-O-methylcytidine-3'-phosphate
  modified_base 7: mod_base = OTHER; note = 2'-deoxy-2'-fluorouridine-3'-phosphate
  modified_base 8: mod_base = OTHER; note = 2'-O-methyladenosine-3'-phosphate
  modified_base 9: mod_base = OTHER; note = 2'-deoxy-2'-fluorouridine-3'-phosphate
  modified_base 10: mod_base = OTHER; note = 2'-deoxy-2'-fluorouridine-3'-phosphate
  modified_base 11: mod_base = OTHER; note = 2'-deoxy-2'-fluorouridine-3'-phosphate
  modified_base 12: mod_base = OTHER; note = 2'-O-methylcytidine-3'-phosphate
  modified_base 13: mod_base = OTHER; note = 2'-O-methylcytidine-3'-phosphate
  modified_base 14: mod_base = OTHER; note = 2'-O-methyluridine-3'-phosphate
  modified_base 15: mod_base = OTHER; note = 2'-O-methyluridine-3'-phosphate
  modified_base 16: mod_base = OTHER; note = 2'-O-methyluridine-3'-phosphate
  modified_base 17: mod_base = OTHER; note = 2'-O-methylguanosine-3'-phosphate
  modified_base 18: mod_base = OTHER; note = 2'-O-methyluridine-3'-phosphate
  modified_base 19: mod_base = OTHER; note = 2'-O-methyladenosine-3'-phosphate
  modified_base 20: mod_base = OTHER; note = 2'-O-methylcytidine-3'-phosphate
  modified_base 21: mod_base = OTHER; note = 2'-O-methyladenosine
ggtccctatttcctttgtaca

SEQ ID NO: 3639 - RNA, 21 nt, synthetic construct
  source 1..21: mol_type = other RNA
  modified_base 1: mod_base = OTHER; note = 2'-O-methylguanosine-3'-phosphate
  modified_base 2: mod_base = OTHER; note = 2'-O-methyluridine-3'-phosphate
  modified_base 3: mod_base = OTHER; note = 2'-O-methylcytidine-3'-phosphate
  modified_base 4: mod_base = OTHER; note = 2'-O-methylcytidine-3'-phosphate
  modified_base 5: mod_base = OTHER; note = 2'-O-methylcytidine-3'-phosphate
  modified_base 6: mod_base = OTHER; note = 2'-O-methyluridine-3'-phosphate
  modified_base 7: mod_base = OTHER; note = 2'-deoxy-2'-fluoroadenosine-3'-phosphate
  modified_base 8: mod_base = OTHER; note = 2'-O-methyluridine-3'-phosphate
  modified_base 9: mod_base = OTHER; note = 2'-deoxy-2'-fluorouridine-3'-phosphate
  modified_base 10: mod_base = OTHER; note = 2'-deoxy-2'-fluorouridine-3'-phosphate
  modified_base 11: mod_base = OTHER; note = 2'-deoxy-2'-fluorocytidine-3'-phosphate
  modified_base 12: mod_base = OTHER; note = 2'-O-methylcytidine-3'-phosphate
  modified_base 13: mod_base = OTHER; note = 2'-O-methyluridine-3'-phosphate
  modified_base 14: mod_base = OTHER; note = 2'-O-methyluridine-3'-phosphate
  modified_base 15: mod_base = OTHER; note = 2'-O-methyluridine-3'-phosphate
  modified_base 16: mod_base = OTHER; note = 2'-O-methylguanosine-3'-phosphate
  modified_base 17: mod_base = OTHER; note = 2'-O-methyluridine-3'-phosphate
  modified_base 18: mod_base = OTHER; note = 2'-O-methyladenosine-3'-phosphate
  modified_base 19: mod_base = OTHER; note = 2'-O-methylcytidine-3'-phosphate
  modified_base 20: mod_base = OTHER; note = 2'-O-methyladenosine-3'-phosphate
  modified_base 21: mod_base = OTHER; note = 2'-O-methyladenosine
gtccctatttcctttgtacaa

SEQ ID NO: 3640 - RNA, 21 nt, synthetic construct
  source 1..21: mol_type = other RNA
  modified_base 1: mod_base = OTHER; note = 2'-O-methyluridine-3'-phosphate
  modified_base 2: mod_base = OTHER; note = 2'-O-methylcytidine-3'-phosphate
  modified_base 3: mod_base = OTHER; note = 2'-O-methylcytidine-3'-phosphate
  modified_base 4: mod_base = OTHER; note = 2'-O-methylcytidine-3'-phosphate
  modified_base 5: mod_base = OTHER; note = 2'-O-methyluridine-3'-phosphate
  modified_base 6: mod_base = OTHER; note = 2'-O-methyladenosine-3'-phosphate
  modified_base 7: mod_base = OTHER; note = 2'-deoxy-2'-fluorouridine-3'-phosphate
  modified_base 8: mod_base = OTHER; note = 2'-O-methyluridine-3'-phosphate
  modified_base 9: mod_base = OTHER; note = 2'-deoxy-2'-fluorouridine-3'-phosphate
  modified_base 10: mod_base = OTHER; note = 2'-deoxy-2'-fluorocytidine-3'-phosphate
  modified_base 11: mod_base = OTHER; note = 2'-deoxy-2'-fluorocytidine-3'-phosphate
  modified_base 12: mod_base = OTHER; note = 2'-O-methyluridine-3'-phosphate
  modified_base 13: mod_base = OTHER; note = 2'-O-methyluridine-3'-phosphate
  modified_base 14: mod_base = OTHER; note = 2'-O-methyluridine-3'-phosphate
  modified_base 15: mod_base = OTHER; note = 2'-O-methylguanosine-3'-phosphate
  modified_base 16: mod_base = OTHER; note = 2'-O-methyluridine-3'-phosphate
  modified_base 17: mod_base = OTHER; note = 2'-O-methyladenosine-3'-phosphate
  modified_base 18: mod_base = OTHER; note = 2'-O-methylcytidine-3'-phosphate
  modified_base 19: mod_base = OTHER; note = 2'-O-methyladenosine-3'-phosphate
  modified_base 20: mod_base = OTHER; note = 2'-O-methyluridine-3'-phosphate
  modified_base 21: mod_base = OTHER; note = 2'-O-methyladenosine
tccctatttcctttgtacata

SEQ ID NO: 3641 - RNA, 21 nt, synthetic construct
  source 1..21: mol_type = other RNA
  modified_base 1: mod_base = OTHER; note = 2'-O-methylcytidine-3'-phosphate
  modified_base 2: mod_base = OTHER; note = 2'-O-methylcytidine-3'-phosphate
  modified_base 3: mod_base = OTHER; note = 2'-O-methylcytidine-3'-phosphate
  modified_base 4: mod_base = OTHER; note = 2'-O-methyluridine-3'-phosphate
  modified_base 5: mod_base = OTHER; note = 2'-O-methyladenosine-3'-phosphate
  modified_base 6: mod_base = OTHER; note = 2'-O-methyluridine-3'-phosphate
  modified_base 7: mod_base = OTHER; note = 2'-deoxy-2'-fluorouridine-3'-phosphate
  modified_base 8: mod_base = OTHER; note = 2'-O-methyluridine-3'-phosphate
  modified_base 9: mod_base = OTHER; note = 2'-deoxy-2'-fluorocytidine-3'-phosphate
  modified_base 10: mod_base = OTHER; note = 2'-deoxy-2'-fluorocytidine-3'-phosphate
  modified_base 11: mod_base = OTHER; note = 2'-deoxy-2'-fluorouridine-3'-phosphate
  modified_base 12: mod_base = OTHER; note = 2'-O-methyluridine-3'-phosphate
  modified_base 13: mod_base = OTHER; note = 2'-O-methyluridine-3'-phosphate
  modified_base 14: mod_base = OTHER; note = 2'-O-methylguanosine-3'-phosphate
  modified_base 15: mod_base = OTHER; note = 2'-O-methyluridine-3'-phosphate
  modified_base 16: mod_base = OTHER; note = 2'-O-methyladenosine-3'-phosphate
  modified_base 17: mod_base = OTHER; note = 2'-O-methylcytidine-3'-phosphate
  modified_base 18: mod_base = OTHER; note = 2'-O-methyladenosine-3'-phosphate
  modified_base 19: mod_base = OTHER; note = 2'-O-methyluridine-3'-phosphate
  modified_base 20: mod_base = OTHER; note = 2'-O-methyladenosine-3'-phosphate
  modified_base 21: mod_base = OTHER; note = 2'-O-methyladenosine
ccctatttcctttgtacataa

SEQ ID NO: 3642 - RNA, 21 nt, synthetic construct
  source 1..21: mol_type = other RNA
  modified_base 1: mod_base = OTHER; note = 2'-O-methylcytidine-3'-phosphate
  modified_base 2: mod_base = OTHER; note = 2'-O-methylcytidine-3'-phosphate
  modified_base 3: mod_base = OTHER; note = 2'-O-methyluridine-3'-phosphate
  modified_base 4: mod_base = OTHER; note = 2'-O-methyladenosine-3'-phosphate
  modified_base 5: mod_base = OTHER; note = 2'-O-methyluridine-3'-phosphate
  modified_base 6: mod_base = OTHER; note = 2'-O-methyluridine-3'-phosphate
  modified_base 7: mod_base = OTHER; note = 2'-deoxy-2'-fluorouridine-3'-phosphate
  modified_base 8: mod_base = OTHER; note = 2'-O-methylcytidine-3'-phosphate
  modified_base 9: mod_base = OTHER; note = 2'-deoxy-2'-fluorocytidine-3'-phosphate
  modified_base 10: mod_base = OTHER; note = 2'-deoxy-2'-fluorouridine-3'-phosphate
  modified_base 11: mod_base = OTHER; note = 2'-deoxy-2'-fluorouridine-3'-phosphate
  modified_base 12: mod_base = OTHER; note = 2'-O-methyluridine-3'-phosphate
  modified_base 13: mod_base = OTHER; note = 2'-O-methylguanosine-3'-phosphate
  modified_base 14: mod_base = OTHER; note = 2'-O-methyluridine-3'-phosphate
  modified_base 15: mod_base = OTHER; note = 2'-O-methyladenosine-3'-phosphate
  modified_base 16: mod_base = OTHER; note = 2'-O-methylcytidine-3'-phosphate
  modified_base 17: mod_base = OTHER; note = 2'-O-methyladenosine-3'-phosphate
  modified_base 18: mod_base = OTHER; note = 2'-O-methyluridine-3'-phosphate
  modified_base 19: mod_base = OTHER; note = 2'-O-methyladenosine-3'-phosphate
  modified_base 20: mod_base = OTHER; note = 2'-O-methylcytidine-3'-phosphate
  modified_base 21: mod_base = OTHER; note = 2'-O-methyladenosine
cctatttcctttgtacataca

SEQ ID NO: 3643 - RNA, 21 nt, synthetic construct
  source 1..21: mol_type = other RNA
  modified_base 1: mod_base = OTHER; note = 2'-O-methylcytidine-3'-phosphate
  modified_base 2: mod_base = OTHER; note = 2'-O-methyluridine-3'-phosphate
  modified_base 3: mod_base = OTHER; note = 2'-O-methyladenosine-3'-phosphate
  modified_base 4: mod_base = OTHER; note = 2'-O-methyluridine-3'-phosphate
  modified_base 5: mod_base = OTHER; note = 2'-O-methyluridine-3'-phosphate
  modified_base 6: mod_base = OTHER; note = 2'-O-methyluridine-3'-phosphate
  modified_base 7: mod_base = OTHER; note = 2'-deoxy-2'-fluorocytidine-3'-phosphate
  modified_base 8: mod_base = OTHER; note = 2'-O-methylcytidine-3'-phosphate
  modified_base 9: mod_base = OTHER; note = 2'-deoxy-2'-fluorouridine-3'-phosphate
  modified_base 10: mod_base = OTHER; note = 2'-deoxy-2'-fluorouridine-3'-phosphate
  modified_base 11: mod_base = OTHER; note = 2'-deoxy-2'-fluorouridine-3'-phosphate
  modified_base 12: mod_base = OTHER; note = 2'-O-methylguanosine-3'-phosphate
  modified_base 13: mod_base = OTHER; note = 2'-O-methyluridine-3'-phosphate
  modified_base 14: mod_base = OTHER; note = 2'-O-methyladenosine-3'-phosphate
  modified_base 15: mod_base = OTHER; note = 2'-O-methylcytidine-3'-phosphate
  modified_base 16: mod_base = OTHER; note = 2'-O-methyladenosine-3'-phosphate
  modified_base 17: mod_base = OTHER; note = 2'-O-methyluridine-3'-phosphate
  modified_base 18: mod_base = OTHER; note = 2'-O-methyladenosine-3'-phosphate
  modified_base 19: mod_base = OTHER; note = 2'-O-methylcytidine-3'-phosphate
  modified_base 20: mod_base = OTHER; note = 2'-O-methyladenosine-3'-phosphate
  modified_base 21: mod_base = OTHER; note = 2'-O-methyladenosine
ctatttcctttgtacatacaa

SEQ ID NO: 3644 - RNA, 21 nt, synthetic construct
  source 1..21: mol_type = other RNA
  modified_base 1: mod_base = OTHER; note = 2'-O-methyluridine-3'-phosphate
  modified_base 2: mod_base = OTHER; note = 2'-O-methyladenosine-3'-phosphate
  modified_base 3: mod_base = OTHER; note = 2'-O-methyluridine-3'-phosphate
  modified_base 4: mod_base = OTHER; note = 2'-O-methyluridine-3'-phosphate
  modified_base 5: mod_base = OTHER; note = 2'-O-methyluridine-3'-phosphate
  modified_base 6: mod_base = OTHER; note = 2'-O-methylcytidine-3'-phosphate
  modified_base 7: mod_base = OTHER; note = 2'-deoxy-2'-fluorocytidine-3'-phosphate
  modified_base 8: mod_base = OTHER; note = 2'-O-methyluridine-3'-phosphate
  modified_base 9: mod_base = OTHER; note = 2'-deoxy-2'-fluorouridine-3'-phosphate
  modified_base 10: mod_base = OTHER; note = 2'-deoxy-2'-fluorouridine-3'-phosphate
  modified_base 11: mod_base = OTHER; note = 2'-deoxy-2'-fluoroguanosine-3'-phosphate
  modified_base 12: mod_base = OTHER; note = 2'-O-methyluridine-3'-phosphate
  modified_base 13: mod_base = OTHER; note = 2'-O-methyladenosine-3'-phosphate
  modified_base 14: mod_base = OTHER; note = 2'-O-methylcytidine-3'-phosphate
  modified_base 15: mod_base = OTHER; note = 2'-O-methyladenosine-3'-phosphate
  modified_base 16: mod_base = OTHER; note = 2'-O-methyluridine-3'-phosphate
  modified_base 17: mod_base = OTHER; note = 2'-O-methyladenosine-3'-phosphate
  modified_base 18: mod_base = OTHER; note = 2'-O-methylcytidine-3'-phosphate
  modified_base 19: mod_base = OTHER; note = 2'-O-methyladenosine-3'-phosphate
  modified_base 20: mod_base = OTHER; note = 2'-O-methylcytidine-3'-phosphate
  modified_base 21: mod_base = OTHER; note = 2'-O-methyladenosine
tatttcctttgtacatacaca

SEQ ID NO: 3645 - RNA, 21 nt, synthetic construct
  source 1..21: mol_type = other RNA
  modified_base 1: mod_base = OTHER; note = 2'-O-methylcytidine-3'-phosphate
  modified_base 2: mod_base = OTHER; note = 2'-O-methyladenosine-3'-phosphate
  modified_base 3: mod_base = OTHER; note = 2'-O-methylcytidine-3'-phosphate
  modified_base 4: mod_base = OTHER; note = 2'-O-methyluridine-3'-phosphate
  modified_base 5: mod_base = OTHER; note = 2'-O-methyluridine-3'-phosphate
  modified_base 6: mod_base = OTHER; note = 2'-O-methyladenosine-3'-phosphate
  modified_base 7: mod_base = OTHER; note = 2'-deoxy-2'-fluoroguanosine-3'-phosphate
  modified_base 8: mod_base = OTHER; note = 2'-O-methyladenosine-3'-phosphate
  modified_base 9: mod_base = OTHER; note = 2'-deoxy-2'-fluoroadenosine-3'-phosphate
  modified_base 10: mod_base = OTHER; note = 2'-deoxy-2'-fluoroadenosine-3'-phosphate
  modified_base 11: mod_base = OTHER; note = 2'-deoxy-2'-fluoroguanosine-3'-phosphate
  modified_base 12: mod_base = OTHER; note = 2'-O-methyladenosine-3'-phosphate
  modified_base 13: mod_base = OTHER; note = 2'-O-methyladenosine-3'-phosphate
  modified_base 14: mod_base = OTHER; note = 2'-O-methyladenosine-3'-phosphate
  modified_base 15: mod_base = OTHER; note = 2'-O-methyladenosine-3'-phosphate
  modified_base 16: mod_base = OTHER; note = 2'-O-methylguanosine-3'-phosphate
  modified_base 17: mod_base = OTHER; note = 2'-O-methyladenosine-3'-phosphate
  modified_base 18: mod_base = OTHER; note = 2'-O-methylcytidine-3'-phosphate
  modified_base 19: mod_base = OTHER; note = 2'-O-methyladenosine-3'-phosphate
  modified_base 20: mod_base = OTHER; note = 2'-O-methylguanosine-3'-phosphate
  modified_base 21: mod_base = OTHER; note = 2'-O-methyladenosine
cacttagaaagaaaagacaga

SEQ ID NO: 3646 - RNA, 21 nt, synthetic construct
  source 1..21: mol_type = other RNA
  modified_base 1: mod_base = OTHER; note = 2'-O-methyladenosine-3'-phosphate
  modified_base 2: mod_base = OTHER; note = 2'-O-methylcytidine-3'-phosphate
  modified_base 3: mod_base = OTHER; note = 2'-O-methyluridine-3'-phosphate
  modified_base 4: mod_base = OTHER; note = 2'-O-methyluridine-3'-phosphate
  modified_base 5: mod_base = OTHER; note = 2'-O-methyladenosine-3'-phosphate
  modified_base 6: mod_base = OTHER; note = 2'-O-methylguanosine-3'-phosphate
  modified_base 7: mod_base = OTHER; note = 2'-deoxy-2'-fluoroadenosine-3'-phosphate
  modified_base 8: mod_base = OTHER; note = 2'-O-methyladenosine-3'-phosphate
  modified_base 9: mod_base = OTHER; note = 2'-deoxy-2'-fluoroadenosine-3'-phosphate
  modified_base 10: mod_base = OTHER; note = 2'-deoxy-2'-fluoroguanosine-3'-phosphate
  modified_base 11: mod_base = OTHER; note = 2'-deoxy-2'-fluoroadenosine-3'-phosphate
  modified_base 12: mod_base = OTHER; note = 2'-O-methyladenosine-3'-phosphate
  modified_base 13: mod_base = OTHER; note = 2'-O-methyladenosine-3'-phosphate
  modified_base 14: mod_base = OTHER; note = 2'-O-methyladenosine-3'-phosphate
  modified_base 15: mod_base = OTHER; note = 2'-O-methylguanosine-3'-phosphate
  modified_base 16: mod_base = OTHER; note = 2'-O-methyladenosine-3'-phosphate
  modified_base 17: mod_base = OTHER; note = 2'-O-methylcytidine-3'-phosphate
  modified_base 18: mod_base = OTHER; note = 2'-O-methyladenosine-3'-phosphate
  modified_base 19: mod_base = OTHER; note = 2'-O-methylguanosine-3'-phosphate
  modified_base 20: mod_base = OTHER; note = 2'-O-methyladenosine-3'-phosphate
  modified_base 21: mod_base = OTHER; note = 2'-O-methyladenosine
acttagaaagaaaagacagaa

SEQ ID NO: 3647 - RNA, 21 nt, synthetic construct
  source 1..21: mol_type = other RNA
  modified_base 1: mod_base = OTHER; note = 2'-O-methylcytidine-3'-phosphate
  modified_base 2: mod_base = OTHER; note = 2'-O-methyluridine-3'-phosphate
  modified_base 3: mod_base = OTHER; note = 2'-O-methyluridine-3'-phosphate
  modified_base 4: mod_base = OTHER; note = 2'-O-methyladenosine-3'-phosphate
  modified_base 5: mod_base = OTHER; note = 2'-O-methylguanosine-3'-phosphate
  modified_base 6: mod_base = OTHER; note = 2'-O-methyladenosine-3'-phosphate
  modified_base 7: mod_base = OTHER; note = 2'-deoxy-2'-fluoroadenosine-3'-phosphate
  modified_base 8: mod_base = OTHER; note = 2'-O-methyladenosine-3'-phosphate
  modified_base 9: mod_base = OTHER; note = 2'-deoxy-2'-fluoroguanosine-3'-phosphate
  modified_base 10: mod_base = OTHER; note = 2'-deoxy-2'-fluoroadenosine-3'-phosphate
  modified_base 11: mod_base = OTHER; note = 2'-deoxy-2'-fluoroadenosine-3'-phosphate
  modified_base 12: mod_base = OTHER; note = 2'-O-methyladenosine-3'-phosphate
  modified_base 13: mod_base = OTHER; note = 2'-O-methyladenosine-3'-phosphate
  modified_base 14: mod_base = OTHER; note = 2'-O-methylguanosine-3'-phosphate
  modified_base 15: mod_base = OTHER; note = 2'-O-methyladenosine-3'-phosphate
  modified_base 16: mod_base = OTHER; note = 2'-O-methylcytidine-3'-phosphate
  modified_base 17: mod_base = OTHER; note = 2'-O-methyladenosine-3'-phosphate
  modified_base 18: mod_base = OTHER; note = 2'-O-methylguanosine-3'-phosphate
  modified_base 19: mod_base = OTHER; note = 2'-O-methyladenosine-3'-phosphate
  modified_base 20: mod_base = OTHER; note = 2'-O-methyladenosine-3'-phosphate
  modified_base 21: mod_base = OTHER; note = 2'-O-methyladenosine
cttagaaagaaaagacagaaa

SEQ ID NO: 3648 - RNA, 21 nt, synthetic construct
  source 1..21: mol_type = other RNA
  modified_base 1: mod_base = OTHER; note = 2'-O-methyluridine-3'-phosphate
  modified_base 2: mod_base = OTHER; note = 2'-O-methyluridine-3'-phosphate
  modified_base 3: mod_base = OTHER; note = 2'-O-methyladenosine-3'-phosphate
  modified_base 4: mod_base = OTHER; note = 2'-O-methylguanosine-3'-phosphate
  modified_base 5: mod_base = OTHER; note = 2'-O-methyladenosine-3'-phosphate
  modified_base 6: mod_base = OTHER; note = 2'-O-methyladenosine-3'-phosphate
  modified_base 7: mod_base = OTHER; note = 2'-deoxy-2'-fluoroadenosine-3'-phosphate
  modified_base 8: mod_base = OTHER; note = 2'-O-methylguanosine-3'-phosphate
  modified_base 9: mod_base = OTHER; note = 2'-deoxy-2'-fluoroadenosine-3'-phosphate
  modified_base 10: mod_base = OTHER; note = 2'-deoxy-2'-fluoroadenosine-3'-phosphate
  modified_base 11: mod_base = OTHER; note = 2'-deoxy-2'-fluoroadenosine-3'-phosphate
  modified_base 12: mod_base = OTHER; note = 2'-O-methyladenosine-3'-phosphate
  modified_base 13: mod_base = OTHER; note = 2'-O-methylguanosine-3'-phosphate
  modified_base 14: mod_base = OTHER; note = 2'-O-methyladenosine-3'-phosphate
  modified_base 15: mod_base = OTHER; note = 2'-O-methylcytidine-3'-phosphate
  modified_base 16: mod_base = OTHER; note = 2'-O-methyladenosine-3'-phosphate
  modified_base 17: mod_base = OTHER; note = 2'-O-methylguanosine-3'-phosphate
  modified_base 18: mod_base = OTHER; note = 2'-O-methyladenosine-3'-phosphate
  modified_base 19: mod_base = OTHER; note = 2'-O-methyladenosine-3'-phosphate
  modified_base 20: mod_base = OTHER; note = 2'-O-methyladenosine-3'-phosphate
  modified_base 21: mod_base = OTHER; note = 2'-O-methyladenosine
ttagaaagaaaagacagaaaa

SEQ ID NO: 3649 - RNA, 21 nt, synthetic construct
  source 1..21: mol_type = other RNA
  modified_base 1: mod_base = OTHER; note = 2'-O-methyluridine-3'-phosphate
  modified_base 2: mod_base = OTHER; note = 2'-O-methyladenosine-3'-phosphate
  modified_base 3: mod_base = OTHER; note = 2'-O-methylguanosine-3'-phosphate
  modified_base 4: mod_base = OTHER; note = 2'-O-methyladenosine-3'-phosphate
  modified_base 5: mod_base = OTHER; note = 2'-O-methyladenosine-3'-phosphate
  modified_base 6: mod_base = OTHER; note = 2'-O-methyladenosine-3'-phosphate
  modified_base 7: mod_base = OTHER; note = 2'-deoxy-2'-fluoroguanosine-3'-phosphate
  modified_base 8: mod_base = OTHER; note = 2'-O-methyladenosine-3'-phosphate
  modified_base 9: mod_base = OTHER; note = 2'-deoxy-2'-fluoroadenosine-3'-phosphate
  modified_base 10: mod_base = OTHER; note = 2'-deoxy-2'-fluoroadenosine-3'-phosphate
  modified_base 11: mod_base = OTHER; note = 2'-deoxy-2'-fluoroadenosine-3'-phosphate
  modified_base 12: mod_base = OTHER; note = 2'-O-methylguanosine-3'-phosphate
  modified_base 13: mod_base = OTHER; note = 2'-O-methyladenosine-3'-phosphate
  modified_base 14: mod_base = OTHER; note = 2'-O-methylcytidine-3'-phosphate
  modified_base 15: mod_base = OTHER; note = 2'-O-methyladenosine-3'-phosphate
  modified_base 16: mod_base = OTHER; note = 2'-O-methylguanosine-3'-phosphate
  modified_base 17: mod_base = OTHER; note = 2'-O-methyladenosine-3'-phosphate
  modified_base 18: mod_base = OTHER; note = 2'-O-methyladenosine-3'-phosphate
  modified_base 19: mod_base = OTHER; note = 2'-O-methyladenosine-3'-phosphate
  modified_base 20: mod_base = OTHER; note = 2'-O-methyladenosine-3'-phosphate
  modified_base 21: mod_base = OTHER; note = 2'-O-methyladenosine
tagaaagaaaagacagaaaaa

SEQ ID NO: 3650 - RNA, 21 nt, synthetic construct
  source 1..21: mol_type = other RNA
  modified_base 1: mod_base = OTHER; note = 2'-O-methylguanosine-3'-phosphate
  modified_base 2: mod_base = OTHER; note = 2'-O-methyladenosine-3'-phosphate
  modified_base 3: mod_base = OTHER; note = 2'-O-methylguanosine-3'-phosphate
  modified_base 4: mod_base = OTHER; note = 2'-O-methylguanosine-3'-phosphate
  modified_base 5: mod_base = OTHER; note = 2'-O-methyladenosine-3'-phosphate
  modified_base 6: mod_base = OTHER; note = 2'-O-methyladenosine-3'-phosphate
  modified_base 7: mod_base = OTHER; note = 2'-deoxy-2'-fluoroguanosine-3'-phosphate
  modified_base 8: mod_base = OTHER; note = 2'-O-methylguanosine-3'-phosphate
  modified_base 9: mod_base = OTHER; note = 2'-deoxy-2'-fluoroadenosine-3'-phosphate
  modified_base 10: mod_base = OTHER; note = 2'-deoxy-2'-fluoroadenosine-3'-phosphate
  modified_base 11: mod_base = OTHER; note = 2'-deoxy-2'-fluoroguanosine-3'-phosphate
  modified_base 12: mod_base = OTHER; note = 2'-O-methylguanosine-3'-phosphate
  modified_base 13: mod_base = OTHER; note = 2'-O-methyladenosine-3'-phosphate
  modified_base 14: mod_base = OTHER; note = 2'-O-methyladenosine-3'-phosphate
  modified_base 15: mod_base = OTHER; note = 2'-O-methyladenosine-3'-phosphate
  modified_base 16: mod_base = OTHER; note = 2'-O-methyluridine-3'-phosphate
  modified_base 17: mod_base = OTHER; note = 2'-O-methyladenosine-3'-phosphate
  modified_base 18: mod_base = OTHER; note = 2'-O-methyluridine-3'-phosphate
  modified_base 19: mod_base = OTHER; note = 2'-O-methyluridine-3'-phosphate
  modified_base 20: mod_base = OTHER; note = 2'-O-methyluridine-3'-phosphate
  modified_base 21: mod_base = OTHER; note = 2'-O-methyladenosine
gaggaaggaaggaaatattta

SEQ ID NO: 3651 - RNA, 21 nt, synthetic construct
  source 1..21: mol_type = other RNA
  modified_base 1: mod_base = OTHER; note = 2'-O-methyladenosine-3'-phosphate
  modified_base 2: mod_base = OTHER; note = 2'-O-methylguanosine-3'-phosphate
  modified_base 3: mod_base = OTHER; note = 2'-O-methylguanosine-3'-phosphate
  modified_base 4: mod_base = OTHER; note = 2'-O-methyladenosine-3'-phosphate
  modified_base 5: mod_base = OTHER; note = 2'-O-methyladenosine-3'-phosphate
  modified_base 6: mod_base = OTHER; note = 2'-O-methylguanosine-3'-phosphate
  modified_base 7: mod_base = OTHER; note = 2'-deoxy-2'-fluoroguanosine-3'-phosphate
  modified_base 8: mod_base = OTHER; note = 2'-O-methyladenosine-3'-phosphate
  modified_base 9: mod_base = OTHER; note = 2'-deoxy-2'-fluoroadenosine-3'-phosphate
  modified_base 10: mod_base = OTHER; note = 2'-deoxy-2'-fluoroguanosine-3'-phosphate
  modified_base 11: mod_base = OTHER; note = 2'-deoxy-2'-fluoroguanosine-3'-phosphate
  modified_base 12: mod_base = OTHER; note = 2'-O-methyladenosine-3'-phosphate
  modified_base 13: mod_base = OTHER; note = 2'-O-methyladenosine-3'-phosphate
  modified_base 14: mod_base = OTHER; note = 2'-O-methyladenosine-3'-phosphate
  modified_base 15: mod_base = OTHER; note = 2'-O-methyluridine-3'-phosphate
  modified_base 16: mod_base = OTHER; note = 2'-O-methyladenosine-3'-phosphate
  modified_base 17: mod_base = OTHER; note = 2'-O-methyluridine-3'-phosphate
  modified_base 18: mod_base = OTHER; note = 2'-O-methyluridine-3'-phosphate
  modified_base 19: mod_base = OTHER; note = 2'-O-methyluridine-3'-phosphate
  modified_base 20: mod_base = OTHER; note = 2'-O-methyluridine-3'-phosphate
  modified_base 21: mod_base = OTHER; note = 2'-O-methyladenosine
aggaaggaaggaaatatttta

SEQ ID NO: 3652 - RNA, 21 nt, synthetic construct
  source 1..21: mol_type = other RNA
  modified_base 1: mod_base = OTHER; note = 2'-O-methylguanosine-3'-phosphate
  modified_base 2: mod_base = OTHER; note = 2'-O-methylguanosine-3'-phosphate
  modified_base 3: mod_base = OTHER; note = 2'-O-methyladenosine-3'-phosphate
  modified_base 4: mod_base = OTHER; note = 2'-O-methyladenosine-3'-phosphate
  modified_base 5: mod_base = OTHER; note = 2'-O-methylguanosine-3'-phosphate
  modified_base 6: mod_base = OTHER; note = 2'-O-methylguanosine-3'-phosphate
  modified_base 7: mod_base = OTHER; note = 2'-deoxy-2'-fluoroadenosine-3'-phosphate
  modified_base 8: mod_base = OTHER; note = 2'-O-methyladenosine-3'-phosphate
  modified_base 9: mod_base = OTHER; note = 2'-deoxy-2'-fluoroadenosine-3'-phosphate
  modified_base 10: mod_base = OTHER; note = 2'-deoxy-2'-fluorouridine-3'-phosphate
  modified_base 11: mod_base = OTHER; note = 2'-deoxy-2'-fluoroadenosine-3'-phosphate
  modified_base 12: mod_base = OTHER; note = 2'-O-methyluridine-3'-phosphate
  modified_base 13: mod_base = OTHER; note = 2'-O-methyluridine-3'-phosphate
  modified_base 14: mod_base = OTHER; note = 2'-O-methyluridine-3'-phosphate
  modified_base 15: mod_base = OTHER; note = 2'-O-methyluridine-3'-phosphate
  modified_base 16: mod_base = OTHER; note = 2'-O-methylguanosine-3'-phosphate
  modified_base 17: mod_base = OTHER; note = 2'-O-methyladenosine-3'-phosphate
  modified_base 18: mod_base = OTHER; note = 2'-O-methylguanosine-3'-phosphate
  modified_base 19: mod_base = OTHER; note = 2'-O-methyladenosine-3'-phosphate
  modified_base 20: mod_base = OTHER; note = 2'-O-methyladenosine-3'-phosphate
  modified_base 21: mod_base = OTHER; note = 2'-O-methyladenosine
ggaaggaaatattttgagaaa

SEQ ID NO: 3653 - RNA, 21 nt, synthetic construct
  source 1..21: mol_type = other RNA
  modified_base 1: mod_base = OTHER; note = 2'-O-methylguanosine-3'-phosphate
  modified_base 2: mod_base = OTHER; note = 2'-O-methyladenosine-3'-phosphate
  modified_base 3: mod_base = OTHER; note = 2'-O-methyladenosine-3'-phosphate
  modified_base 4: mod_base = OTHER; note = 2'-O-methylguanosine-3'-phosphate
  modified_base 5: mod_base = OTHER; note = 2'-O-methyladenosine-3'-phosphate
  modified_base 6: mod_base = OTHER; note = 2'-O-methyladenosine-3'-phosphate
  modified_base 7: mod_base = OTHER; note = 2'-deoxy-2'-fluorouridine-3'-phosphate
  modified_base 8: mod_base = OTHER; note = 2'-O-methyluridine-3'-phosphate
  modified_base 9: mod_base = OTHER; note = 2'-deoxy-2'-fluoroadenosine-3'-phosphate
  modified_base 10: mod_base = OTHER; note = 2'-deoxy-2'-fluoroadenosine-3'-phosphate
  modified_base 11: mod_base = OTHER; note = 2'-deoxy-2'-fluoroguanosine-3'-phosphate
  modified_base 12: mod_base = OTHER; note = 2'-O-methyladenosine-3'-phosphate
  modified_base 13: mod_base = OTHER; note = 2'-O-methyladenosine-3'-phosphate
  modified_base 14: mod_base = OTHER; note = 2'-O-methyladenosine-3'-phosphate
  modified_base 15: mod_base = OTHER; note = 2'-O-methyladenosine-3'-phosphate
  modified_base 16: mod_base = OTHER; note = 2'-O-methylcytidine-3'-phosphate
  modified_base 17: mod_base = OTHER; note = 2'-O-methyluridine-3'-phosphate
  modified_base 18: mod_base = OTHER; note = 2'-O-methylcytidine-3'-phosphate
  modified_base 19: mod_base = OTHER; note = 2'-O-methyluridine-3'-phosphate
  modified_base 20: mod_base = OTHER; note = 2'-O-methyluridine-3'-phosphate
  modified_base 21: mod_base = OTHER; note = 2'-O-methyladenosine
gaagaattaagaaaactctta

SEQ ID NO: 3654 - RNA, 21 nt, synthetic construct
  source 1..21: mol_type = other RNA
  modified_base 1: mod_base = OTHER; note = 2'-O-methyladenosine-3'-phosphate
  modified_base 2: mod_base = OTHER; note = 2'-O-methyladenosine-3'-phosphate
  modified_base 3: mod_base = OTHER; note = 2'-O-methyladenosine-3'-phosphate
  modified_base 4: mod_base = OTHER; note = 2'-O-methylcytidine-3'-phosphate
  modified_base 5: mod_base = OTHER; note = 2'-O-methyluridine-3'-phosphate
  modified_base 6: mod_base = OTHER; note = 2'-O-methylcytidine-3'-phosphate
  modified_base 7: mod_base = OTHER; note = 2'-deoxy-2'-fluorouridine-3'-phosphate
  modified_base 8: mod_base = OTHER; note = 2'-O-methyluridine-3'-phosphate
  modified_base 9: mod_base = OTHER; note = 2'-deoxy-2'-fluorocytidine-3'-phosphate
  modified_base 10: mod_base = OTHER; note = 2'-deoxy-2'-fluoroadenosine-3'-phosphate
  modified_base 11: mod_base = OTHER; note = 2'-deoxy-2'-fluoroadenosine-3'-phosphate
  modified_base 12: mod_base = OTHER; note = 2'-O-methyluridine-3'-phosphate
  modified_base 13: mod_base = OTHER; note = 2'-O-methylguanosine-3'-phosphate
  modified_base 14: mod_base = OTHER; note = 2'-O-methyladenosine-3'-phosphate
  modified_base 15: mod_base = OTHER; note = 2'-O-methyladenosine-3'-phosphate
  modified_base 16: mod_base = OTHER; note = 2'-O-methylguanosine-3'-phosphate
  modified_base 17: mod_base = OTHER; note = 2'-O-methyluridine-3'-phosphate
  modified_base 18: mod_base = OTHER; note = 2'-O-methylguanosine-3'-phosphate
  modified_base 19: mod_base = OTHER; note = 2'-O-methyluridine-3'-phosphate
  modified_base 20: mod_base = OTHER; note = 2'-O-methyluridine-3'-phosphate
  modified_base 21: mod_base = OTHER; note = 2'-O-methyladenosine
aaactcttcaatgaagtgtta

SEQ ID NO: 3655 - RNA, 21 nt, synthetic construct
  source 1..21: mol_type = other RNA
  modified_base 1: mod_base = OTHER; note = 2'-O-methylcytidine-3'-phosphate
  modified_base 2: mod_base = OTHER; note = 2'-O-methyluridine-3'-phosphate
  modified_base 3: mod_base = OTHER; note = 2'-O-methyluridine-3'-phosphate
  modified_base 4: mod_base = OTHER; note = 2'-O-methylcytidine-3'-phosphate
  modified_base 5: mod_base = OTHER; note = 2'-O-methyladenosine-3'-phosphate
  modified_base 6: mod_base = OTHER; note = 2'-O-methyladenosine-3'-phosphate
  modified_base 7: mod_base = OTHER; note = 2'-deoxy-2'-fluorouridine-3'-phosphate
  modified_base 8: mod_base = OTHER; note = 2'-O-methylguanosine-3'-phosphate
  modified_base 9: mod_base = OTHER; note = 2'-deoxy-2'-fluoroadenosine-3'-phosphate
  modified_base 10: mod_base = OTHER; note = 2'-deoxy-2'-fluoroadenosine-3'-phosphate
  modified_base 11: mod_base = OTHER; note = 2'-deoxy-2'-fluoroguanosine-3'-phosphate
  modified_base 12: mod_base = OTHER; note = 2'-O-methyluridine-3'-phosphate
  modified_base 13: mod_base = OTHER; note = 2'-O-methylguanosine-3'-phosphate
  modified_base 14: mod_base = OTHER; note = 2'-O-methyluridine-3'-phosphate
  modified_base 15: mod_base = OTHER; note = 2'-O-methyluridine-3'-phosphate
  modified_base 16: mod_base = OTHER; note = 2'-O-methyladenosine-3'-phosphate
  modified_base 17: mod_base = OTHER; note = 2'-O-methyladenosine-3'-phosphate
  modified_base 18: mod_base = OTHER; note = 2'-O-methylcytidine-3'-phosphate
  modified_base 19: mod_base = OTHER; note = 2'-O-methyladenosine-3'-phosphate
  modified_base 20: mod_base = OTHER; note = 2'-O-methyladenosine-3'-phosphate
  modified_base 21: mod_base = OTHER; note = 2'-O-methyladenosine
cttcaatgaagtgttaacaaa

SEQ ID NO: 3656 - RNA, 21 nt, synthetic construct
  source 1..21: mol_type = other RNA
  modified_base 1: mod_base = OTHER; note = 2'-O-methyladenosine-3'-phosphate
  modified_base 2: mod_base = OTHER; note = 2'-O-methyladenosine-3'-phosphate
  modified_base 3: mod_base = OTHER; note = 2'-O-methyluridine-3'-phosphate
  modified_base 4: mod_base = OTHER; note = 2'-O-methylguanosine-3'-phosphate
  modified_base 5: mod_base = OTHER; note = 2'-O-methyladenosine-3'-phosphate
  modified_base 6: mod_base = OTHER; note = 2'-O-methyladenosine-3'-phosphate
  modified_base 7: mod_base = OTHER; note = 2'-deoxy-2'-fluoroguanosine-3'-phosphate
  modified_base 8: mod_base = OTHER; note = 2'-O-methyluridine-3'-phosphate
  modified_base 9: mod_base = OTHER; note = 2'-deoxy-2'-fluoroguanosine-3'-phosphate
  modified_base 10: mod_base = OTHER; note = 2'-deoxy-2'-fluorouridine-3'-phosphate
  modified_base 11: mod_base = OTHER; note = 2'-deoxy-2'-fluorouridine-3'-phosphate
  modified_base 12: mod_base = OTHER; note = 2'-O-methyladenosine-3'-phosphate
  modified_base 13: mod_base = OTHER; note = 2'-O-methyladenosine-3'-phosphate
  modified_base 14: mod_base = OTHER; note = 2'-O-methylcytidine-3'-phosphate
  modified_base 15: mod_base = OTHER; note = 2'-O-methyladenosine-3'-phosphate
  modified_base 16: mod_base = OTHER; note = 2'-O-methyladenosine-3'-phosphate
  modified_base 17: mod_base = OTHER; note = 2'-O-methylcytidine-3'-phosphate
  modified_base 18: mod_base = OTHER; note = 2'-O-methylcytidine-3'-phosphate
  modified_base 19: mod_base = OTHER; note = 2'-O-methyladenosine-3'-phosphate
  modified_base 20: mod_base = OTHER; note = 2'-O-methyladenosine-3'-phosphate
  modified_base 21: mod_base = OTHER; note = 2'-O-methyladenosine
aatgaagtgttaacaaccaaa

SEQ ID NO: 3657 - RNA, 21 nt, synthetic construct
  source 1..21: mol_type = other RNA
  modified_base 1: mod_base = OTHER; note = 2'-O-methyladenosine-3'-phosphate
  modified_base 2: mod_base = OTHER; note = 2'-O-methyluridine-3'-phosphate
  modified_base 3: mod_base = OTHER; note = 2'-O-methylguanosine-3'-phosphate
  modified_base 4: mod_base = OTHER; note = 2'-O-methyladenosine-3'-phosphate
  modified_base 5: mod_base = OTHER; note = 2'-O-methyladenosine-3'-phosphate
  modified_base 6: mod_base = OTHER; note = 2'-O-methylguanosine-3'-phosphate
  modified_base 7: mod_base = OTHER; note = 2'-deoxy-2'-fluorouridine-3'-phosphate
  modified_base 8: mod_base = OTHER; note = 2'-O-methylguanosine-3'-phosphate
  modified_base 9: mod_base = OTHER; note = 2'-deoxy-2'-fluorouridine-3'-phosphate
  modified_base 10: mod_base = OTHER; note = 2'-deoxy-2'-fluorouridine-3'-phosphate
  modified_base 11: mod_base = OTHER; note = 2'-deoxy-2'-fluoroadenosine-3'-phosphate
  modified_base 12: mod_base = OTHER; note = 2'-O-methyladenosine-3'-phosphate
  modified_base 13: mod_base = OTHER; note = 2'-O-methylcytidine-3'-phosphate
  modified_base 14: mod_base = OTHER; note = 2'-O-methyladenosine-3'-phosphate
  modified_base 15: mod_base = OTHER; note = 2'-O-methyladenosine-3'-phosphate
  modified_base 16: mod_base = OTHER; note = 2'-O-methylcytidine-3'-phosphate
  modified_base 17: mod_base = OTHER; note = 2'-O-methylcytidine-3'-phosphate
  modified_base 18: mod_base = OTHER; note = 2'-O-methyladenosine-3'-phosphate
  modified_base 19: mod_base = OTHER; note = 2'-O-methyladenosine-3'-phosphate
  modified_base 20: mod_base = OTHER; note = 2'-O-methyladenosine-3'-phosphate
  modified_base 21: mod_base = OTHER; note = 2'-O-methyladenosine
atgaagtgttaacaaccaaaa

SEQ ID NO: 3658 - RNA, 21 nt, synthetic construct
  source 1..21: mol_type = other RNA
  modified_base 1: mod_base = OTHER; note = 2'-O-methyluridine-3'-phosphate
  modified_base 2: mod_base = OTHER; note = 2'-O-methyladenosine-3'-phosphate
  modified_base 3: mod_base = OTHER; note = 2'-O-methylcytidine-3'-phosphate
  modified_base 4: mod_base = OTHER; note = 2'-O-methyladenosine-3'-phosphate
  modified_base 5: mod_base = OTHER; note = 2'-O-methylguanosine-3'-phosphate
  modified_base 6: mod_base = OTHER; note = 2'-O-methyladenosine-3'-phosphate
  modified_base 7: mod_base = OTHER; note = 2'-deoxy-2'-fluorocytidine-3'-phosphate
  modified_base 8: mod_base = OTHER; note = 2'-O-methylguanosine-3'-phosphate
  modified_base 9: mod_base = OTHER; note = 2'-deoxy-2'-fluoroguanosine-3'-phosphate
  modified_base 10: mod_base = OTHER; note = 2'-deoxy-2'-fluorouridine-3'-phosphate
  modified_base 11: mod_base = OTHER; note = 2'-deoxy-2'-fluoroadenosine-3'-phosphate
  modified_base 12: mod_base = OTHER; note = 2'-O-methyluridine-3'-phosphate
  modified_base 13: mod_base = OTHER; note = 2'-O-methylcytidine-3'-phosphate
  modified_base 14: mod_base = OTHER; note = 2'-O-methyladenosine-3'-phosphate
  modified_base 15: mod_base = OTHER; note = 2'-O-methylguanosine-3'-phosphate
  modified_base 16: mod_base = OTHER; note = 2'-O-methyladenosine-3'-phosphate
  modified_base 17: mod_base = OTHER; note = 2'-O-methyladenosine-3'-phosphate
  modified_base 18: mod_base = OTHER; note = 2'-O-methyladenosine-3'-phosphate
  modified_base 19: mod_base = OTHER; note = 2'-O-methylcytidine-3'-phosphate
  modified_base 20: mod_base = OTHER; note = 2'-O-methyladenosine-3'-phosphate
  modified_base 21: mod_base = OTHER; note = 2'-O-methyladenosine
tacagacggtatcagaaacaa

SEQ ID NO: 3659 - RNA, 21 nt, synthetic construct
  source 1..21: mol_type = other RNA
  modified_base 1: mod_base = OTHER; note = 2'-O-methylcytidine-3'-phosphate
  modified_base 2: mod_base = OTHER; note = 2'-O-methylguanosine-3'-phosphate
  modified_base 3: mod_base = OTHER; note = 2'-O-methylguanosine-3'-phosphate
  modified_base 4: mod_base = OTHER; note = 2'-O-methyluridine-3'-phosphate
  modified_base 5: mod_base = OTHER; note = 2'-O-methyladenosine-3'-phosphate
  modified_base 6: mod_base = OTHER; note = 2'-O-methyluridine-3'-phosphate
  modified_base 7: mod_base = OTHER; note = 2'-deoxy-2'-fluorocytidine-3'-phosphate
  modified_base 8: mod_base = OTHER; note = 2'-O-methyladenosine-3'-phosphate
  modified_base 9: mod_base = OTHER; note = 2'-deoxy-2'-fluoroguanosine-3'-phosphate
  modified_base 10: mod_base = OTHER; note = 2'-deoxy-2'-fluoroadenosine-3'-phosphate
  modified_base 11: mod_base = OTHER; note = 2'-deoxy-2'-fluoroadenosine-3'-phosphate
  modified_base 12: mod_base = OTHER; note = 2'-O-methyladenosine-3'-phosphate
  modified_base 13: mod_base = OTHER; note = 2'-O-methylcytidine-3'-phosphate
  modified_base 14: mod_base = OTHER; note = 2'-O-methyladenosine-3'-phosphate
  modified_base 15: mod_base = OTHER; note = 2'-O-methylguanosine-3'-phosphate
  modified_base 16: mod_base = OTHER; note = 2'-O-methylcytidine-3'-phosphate
  modified_base 17: mod_base = OTHER; note = 2'-O-methyladenosine-3'-phosphate
  modified_base 18: mod_base = OTHER; note = 2'-O-methyladenosine-3'-phosphate
  modified_base 19: mod_base = OTHER; note = 2'-O-methyladenosine-3'-phosphate
  modified_base 20: mod_base = OTHER; note = 2'-O-methyluridine-3'-phosphate
  modified_base 21: mod_base = OTHER; note = 2'-O-methyladenosine
cggtatcagaaacagcaaata

SEQ ID NO: 3660 - RNA, 21 nt, synthetic construct
  source 1..21: mol_type = other RNA
  modified_base 1: mod_base = OTHER; note = 2'-O-methyladenosine-3'-phosphate
  modified_base 2: mod_base = OTHER; note = 2'-O-methyluridine-3'-phosphate
  modified_base 3: mod_base = OTHER; note = 2'-O-methylcytidine-3'-phosphate
  modified_base 4: mod_base = OTHER; note = 2'-O-methyladenosine-3'-phosphate
  modified_base 5: mod_base = OTHER; note = 2'-O-methylguanosine-3'-phosphate
  modified_base 6: mod_base = OTHER; note = 2'-O-methyladenosine-3'-phosphate
  modified_base 7: mod_base = OTHER; note = 2'-deoxy-2'-fluoroadenosine-3'-phosphate
  modified_base 8: mod_base = OTHER; note = 2'-O-methyladenosine-3'-phosphate
  modified_base 9: mod_base = OTHER; note = 2'-deoxy-2'-fluorocytidine-3'-phosphate
  modified_base 10: mod_base = OTHER; note = 2'-deoxy-2'-fluoroadenosine-3'-phosphate
  modified_base 11: mod_base = OTHER; note = 2'-deoxy-2'-fluoroguanosine-3'-phosphate
  modified_base 12: mod_base = OTHER; note = 2'-O-methylcytidine-3'-phosphate
  modified_base 13: mod_base = OTHER; note = 2'-O-methyladenosine-3'-phosphate
  modified_base 14: mod_base = OTHER; note = 2'-O-methyladenosine-3'-phosphate
  modified_base 15: mod_base = OTHER; note = 2'-O-methyladenosine-3'-phosphate
  modified_base 16: mod_base = OTHER; note = 2'-O-methyluridine-3'-phosphate
  modified_base 17: mod_base = OTHER; note = 2'-O-methyladenosine-3'-phosphate
  modified_base 18: mod_base = OTHER; note = 2'-O-methylguanosine-3'-phosphate
  modified_base 19: mod_base = OTHER; note = 2'-O-methyladenosine-3'-phosphate
  modified_base 20: mod_base = OTHER; note = 2'-O-methyluridine-3'-phosphate
  modified_base 21: mod_base = OTHER; note = 2'-O-methyladenosine
atcagaaacagcaaatagata

SEQ ID NO: 3661 - RNA, 21 nt, synthetic construct
  source 1..21: mol_type = other RNA
  modified_base 1: mod_base = OTHER; note = 2'-O-methylcytidine-3'-phosphate
  modified_base 2: mod_base = OTHER; note = 2'-O-methyladenosine-3'-phosphate
  modified_base 3: mod_base = OTHER; note = 2'-O-methylguanosine-3'-phosphate
  modified_base 4: mod_base = OTHER; note = 2'-O-methyladenosine-3'-phosphate
  modified_base 5: mod_base = OTHER; note = 2'-O-methyladenosine-3'-phosphate
  modified_base 6: mod_base = OTHER; note = 2'-O-methyladenosine-3'-phosphate
  modified_base 7: mod_base = OTHER; note = 2'-deoxy-2'-fluorocytidine-3'-phosphate
  modified_base 8: mod_base = OTHER; note = 2'-O-methyladenosine-3'-phosphate
  modified_base 9: mod_base = OTHER; note = 2'-deoxy-2'-fluoroguanosine-3'-phosphate
  modified_base 10: mod_base = OTHER; note = 2'-deoxy-2'-fluorocytidine-3'-phosphate
  modified_base 11: mod_base = OTHER; note = 2'-deoxy-2'-fluoroadenosine-3'-phosphate
  modified_base 12: mod_base = OTHER; note = 2'-O-methyladenosine-3'-phosphate
  modified_base 13: mod_base = OTHER; note = 2'-O-methyladenosine-3'-phosphate
  modified_base 14: mod_base = OTHER; note = 2'-O-methyluridine-3'-phosphate
  modified_base 15: mod_base = OTHER; note = 2'-O-methyladenosine-3'-phosphate
  modified_base 16: mod_base = OTHER; note = 2'-O-methylguanosine-3'-phosphate
  modified_base 17: mod_base = OTHER; note = 2'-O-methyladenosine-3'-phosphate
  modified_base 18: mod_base = OTHER; note = 2'-O-methyluridine-3'-phosphate
  modified_base 19: mod_base = OTHER; note = 2'-O-methyladenosine-3'-phosphate
  modified_base 20: mod_base = OTHER; note = 2'-O-methyluridine-3'-phosphate
  modified_base 21: mod_base = OTHER; note = 2'-O-methyladenosine
cagaaacagcaaatagatata

SEQ ID NO: 3662 - RNA, 21 nt, synthetic construct
  source 1..21: mol_type = other RNA
  modified_base 1: mod_base = OTHER; note = 2'-O-methyladenosine-3'-phosphate
  modified_base 2: mod_base = OTHER; note = 2'-O-methylguanosine-3'-phosphate
  modified_base 3: mod_base = OTHER; note = 2'-O-methyladenosine-3'-phosphate
  modified_base 4: mod_base = OTHER; note = 2'-O-methyladenosine-3'-phosphate
  modified_base 5: mod_base = OTHER; note = 2'-O-methyladenosine-3'-phosphate
  modified_base 6: mod_base = OTHER; note = 2'-O-methylcytidine-3'-phosphate
  modified_base 7: mod_base = OTHER; note = 2'-deoxy-2'-fluoroadenosine-3'-phosphate
  modified_base 8: mod_base = OTHER; note = 2'-O-methylguanosine-3'-phosphate
  modified_base 9: mod_base = OTHER; note = 2'-deoxy-2'-fluorocytidine-3'-phosphate
  modified_base 10: mod_base = OTHER; note = 2'-deoxy-2'-fluoroadenosine-3'-phosphate
  modified_base 11: mod_base = OTHER; note = 2'-deoxy-2'-fluoroadenosine-3'-phosphate
  modified_base 12: mod_base = OTHER; note = 2'-O-methyladenosine-3'-phosphate
  modified_base 13: mod_base = OTHER; note = 2'-O-methyluridine-3'-phosphate
  modified_base 14: mod_base = OTHER; note = 2'-O-methyladenosine-3'-phosphate
  modified_base 15: mod_base = OTHER; note = 2'-O-methylguanosine-3'-phosphate
  modified_base 16: mod_base = OTHER; note = 2'-O-methyladenosine-3'-phosphate
  modified_base 17: mod_base = OTHER; note = 2'-O-methyluridine-3'-phosphate
  modified_base 18: mod_base = OTHER; note = 2'-O-methyladenosine-3'-phosphate
  modified_base 19: mod_base = OTHER; note = 2'-O-methyluridine-3'-phosphate
  modified_base 20: mod_base = OTHER; note = 2'-O-methyluridine-3'-phosphate
  modified_base 21: mod_base = OTHER; note = 2'-O-methyladenosine
agaaacagcaaatagatatta

SEQ ID NO: 3663 - RNA, 21 nt, synthetic construct
  source 1..21: mol_type = other RNA
  modified_base 1: mod_base = OTHER; note = 2'-O-methylguanosine-3'-phosphate
  modified_base 2: mod_base = OTHER; note = 2'-O-methyladenosine-3'-phosphate
  modified_base 3: mod_base = OTHER; note = 2'-O-methyladenosine-3'-phosphate
  modified_base 4: mod_base = OTHER; note = 2'-O-methyladenosine-3'-phosphate
  modified_base 5: mod_base = OTHER; note = 2'-O-methylcytidine-3'-phosphate
  modified_base 6: mod_base = OTHER; note = 2'-O-methyladenosine-3'-phosphate
  modified_base 7: mod_base = OTHER; note = 2'-deoxy-2'-fluoroguanosine-3'-phosphate
  modified_base 8: mod_base = OTHER; note = 2'-O-methylcytidine-3'-phosphate
  modified_base 9: mod_base = OTHER; note = 2'-deoxy-2'-fluoroadenosine-3'-phosphate
  modified_base 10: mod_base = OTHER; note = 2'-deoxy-2'-fluoroadenosine-3'-phosphate
  modified_base 11: mod_base = OTHER; note = 2'-deoxy-2'-fluoroadenosine-3'-phosphate
  modified_base 12: mod_base = OTHER; note = 2'-O-methyluridine-3'-phosphate
  modified_base 13: mod_base = OTHER; note = 2'-O-methyladenosine-3'-phosphate
  modified_base 14: mod_base = OTHER; note = 2'-O-methylguanosine-3'-phosphate
  modified_base 15: mod_base = OTHER; note = 2'-O-methyladenosine-3'-phosphate
  modified_base 16: mod_base = OTHER; note = 2'-O-methyluridine-3'-phosphate
  modified_base 17: mod_base = OTHER; note = 2'-O-methyladenosine-3'-phosphate
  modified_base 18: mod_base = OTHER; note = 2'-O-methyluridine-3'-phosphate
  modified_base 19: mod_base = OTHER; note = 2'-O-methyluridine-3'-phosphate
  modified_base 20: mod_base = OTHER; note = 2'-O-methylcytidine-3'-phosphate
  modified_base 21: mod_base = OTHER; note = 2'-O-methyladenosine
gaaacagcaaatagatattca

SEQ ID NO: 3664 - RNA, 21 nt, synthetic construct
  source 1..21: mol_type = other RNA
  modified_base 1: mod_base = OTHER; note = 2'-O-methyladenosine-3'-phosphate
  modified_base 2: mod_base = OTHER; note = 2'-O-methyladenosine-3'-phosphate
  modified_base 3: mod_base = OTHER; note = 2'-O-methylcytidine-3'-phosphate
  modified_base 4: mod_base = OTHER; note = 2'-O-methyladenosine-3'-phosphate
  modified_base 5: mod_base = OTHER; note = 2'-O-methylguanosine-3'-phosphate
  modified_base 6: mod_base = OTHER; note = 2'-O-methylcytidine-3'-phosphate
  modified_base 7: mod_base = OTHER; note = 2'-deoxy-2'-fluoroadenosine-3'-phosphate
  modified_base 8: mod_base = OTHER; note = 2'-O-methyladenosine-3'-phosphate
  modified_base 9: mod_base = OTHER; note = 2'-deoxy-2'-fluoroadenosine-3'-phosphate
  modified_base 10: mod_base = OTHER; note = 2'-deoxy-2'-fluorouridine-3'-phosphate
  modified_base 11: mod_base = OTHER; note = 2'-deoxy-2'-fluoroadenosine-3'-phosphate
  modified_base 12: mod_base = OTHER; note = 2'-O-methylguanosine-3'-phosphate
  modified_base 13: mod_base = OTHER; note = 2'-O-methyladenosine-3'-phosphate
  modified_base 14: mod_base = OTHER; note = 2'-O-methyluridine-3'-phosphate
  modified_base 15: mod_base = OTHER; note = 2'-O-methyladenosine-3'-phosphate
  modified_base 16: mod_base = OTHER; note = 2'-O-methyluridine-3'-phosphate
  modified_base 17: mod_base = OTHER; note = 2'-O-methyluridine-3'-phosphate
  modified_base 18: mod_base = OTHER; note = 2'-O-methylcytidine-3'-phosphate
  modified_base 19: mod_base = OTHER; note = 2'-O-methylcytidine-3'-phosphate
  modified_base 20: mod_base = OTHER; note = 2'-O-methyluridine-3'-phosphate
  modified_base 21: mod_base = OTHER; note = 2'-O-methyladenosine
aacagcaaatagatattccta

SEQ ID NO: 3665 - RNA, 21 nt, synthetic construct
  source 1..21: mol_type = other RNA
  modified_base 1: mod_base = OTHER; note = 2'-O-methylcytidine-3'-phosphate
  modified_base 2: mod_base = OTHER; note = 2'-O-methyladenosine-3'-phosphate
  modified_base 3: mod_base = OTHER; note = 2'-O-methylguanosine-3'-phosphate
  modified_base 4: mod_base = OTHER; note = 2'-O-methylcytidine-3'-phosphate
  modified_base 5: mod_base = OTHER; note = 2'-O-methyladenosine-3'-phosphate
  modified_base 6: mod_base = OTHER; note = 2'-O-methyladenosine-3'-phosphate
  modified_base 7: mod_base = OTHER; note = 2'-deoxy-2'-fluoroadenosine-3'-phosphate
  modified_base 8: mod_base = OTHER; note = 2'-O-methyluridine-3'-phosphate
  modified_base 9: mod_base = OTHER; note = 2'-deoxy-2'-fluoroadenosine-3'-phosphate
  modified_base 10: mod_base = OTHER; note = 2'-deoxy-2'-fluoroguanosine-3'-phosphate
  modified_base 11: mod_base = OTHER; note = 2'-deoxy-2'-fluoroadenosine-3'-phosphate
  modified_base 12: mod_base = OTHER; note = 2'-O-methyluridine-3'-phosphate
  modified_base 13: mod_base = OTHER; note = 2'-O-methyladenosine-3'-phosphate
  modified_base 14: mod_base = OTHER; note = 2'-O-methyluridine-3'-phosphate
  modified_base 15: mod_base = OTHER; note = 2'-O-methyluridine-3'-phosphate
  modified_base 16: mod_base = OTHER; note = 2'-O-methylcytidine-3'-phosphate
  modified_base 17: mod_base = OTHER; note = 2'-O-methylcytidine-3'-phosphate
  modified_base 18: mod_base = OTHER; note = 2'-O-methyluridine-3'-phosphate
  modified_base 19: mod_base = OTHER; note = 2'-O-methylcytidine-3'-phosphate
  modified_base 20: mod_base = OTHER; note = 2'-O-methyluridine-3'-phosphate
  modified_base 21: mod_base = OTHER; note = 2'-O-methyladenosine
cagcaaatagatattcctcta

SEQ ID NO: 3666 - RNA, 21 nt, synthetic construct
  source 1..21: mol_type = other RNA
  modified_base 1: mod_base = OTHER; note = 2'-O-methyladenosine-3'-phosphate
  modified_base 2: mod_base = OTHER; note = 2'-O-methylguanosine-3'-phosphate
  modified_base 3: mod_base = OTHER; note = 2'-O-methylcytidine-3'-phosphate
  modified_base 4: mod_base = OTHER; note = 2'-O-methyladenosine-3'-phosphate
  modified_base 5: mod_base = OTHER; note = 2'-O-methyladenosine-3'-phosphate
  modified_base 6: mod_base = OTHER; note = 2'-O-methyladenosine-3'-phosphate
  modified_base 7: mod_base = OTHER; note = 2'-deoxy-2'-fluorouridine-3'-phosphate
  modified_base 8: mod_base = OTHER; note = 2'-O-methyladenosine-3'-phosphate
  modified_base 9: mod_base = OTHER; note = 2'-deoxy-2'-fluoroguanosine-3'-phosphate
  modified_base 10: mod_base = OTHER; note = 2'-deoxy-2'-fluoroadenosine-3'-phosphate
  modified_base 11: mod_base = OTHER; note = 2'-deoxy-2'-fluorouridine-3'-phosphate
  modified_base 12: mod_base = OTHER; note = 2'-O-methyladenosine-3'-phosphate
  modified_base 13: mod_base = OTHER; note = 2'-O-methyluridine-3'-phosphate
  modified_base 14: mod_base = OTHER; note = 2'-O-methyluridine-3'-phosphate
  modified_base 15: mod_base = OTHER; note = 2'-O-methylcytidine-3'-phosphate
  modified_base 16: mod_base = OTHER; note = 2'-O-methylcytidine-3'-phosphate
  modified_base 17: mod_base = OTHER; note = 2'-O-methyluridine-3'-phosphate
  modified_base 18: mod_base = OTHER; note = 2'-O-methylcytidine-3'-phosphate
  modified_base 19: mod_base = OTHER; note = 2'-O-methyluridine-3'-phosphate
  modified_base 20: mod_base = OTHER; note = 2'-O-methyladenosine-3'-phosphate
  modified_base 21: mod_base = OTHER; note = 2'-O-methyladenosine
agcaaatagatattcctctaa

SEQ ID NO: 3667 - RNA, 21 nt, synthetic construct
  source 1..21: mol_type = other RNA
  modified_base 1: mod_base = OTHER; note = 2'-O-methylcytidine-3'-phosphate
  modified_base 2: mod_base = OTHER; note = 2'-O-methyladenosine-3'-phosphate
  modified_base 3: mod_base = OTHER; note = 2'-O-methyladenosine-3'-phosphate
  modified_base 4: mod_base = OTHER; note = 2'-O-methyladenosine-3'-phosphate
  modified_base 5: mod_base = OTHER; note = 2'-O-methyluridine-3'-phosphate
  modified_base 6: mod_base = OTHER; note = 2'-O-methyladenosine-3'-phosphate
  modified_base 7: mod_base = OTHER; note = 2'-deoxy-2'-fluoroguanosine-3'-phosphate
  modified_base 8: mod_base = OTHER; note = 2'-O-methyladenosine-3'-phosphate
  modified_base 9: mod_base = OTHER; note = 2'-deoxy-2'-fluorouridine-3'-phosphate
  modified_base 10: mod_base = OTHER; note = 2'-deoxy-2'-fluoroadenosine-3'-phosphate
  modified_base 11: mod_base = OTHER; note = 2'-deoxy-2'-fluorouridine-3'-phosphate
  modified_base 12: mod_base = OTHER; note = 2'-O-methyluridine-3'-phosphate
  modified_base 13: mod_base = OTHER; note = 2'-O-methylcytidine-3'-phosphate
  modified_base 14: mod_base = OTHER; note = 2'-O-methylcytidine-3'-phosphate
  modified_base 15: mod_base = OTHER; note = 2'-O-methyluridine-3'-phosphate
  modified_base 16: mod_base = OTHER; note = 2'-O-methylcytidine-3'-phosphate
  modified_base 17: mod_base = OTHER; note = 2'-O-methyluridine-3'-phosphate
  modified_base 18: mod_base = OTHER; note = 2'-O-methyladenosine-3'-phosphate
  modified_base 19: mod_base = OTHER; note = 2'-O-methylcytidine-3'-phosphate
  modified_base 20: mod_base = OTHER; note = 2'-O-methylcytidine-3'-phosphate
  modified_base 21: mod_base = OTHER; note = 2'-O-methyladenosine
caaatagatattcctctacca

SEQ ID NO: 3668 - RNA, 21 nt, synthetic construct
  source 1..21: mol_type = other RNA
  modified_base 1: mod_base = OTHER; note = 2'-O-methyluridine-3'-phosphate
  modified_base 2: mod_base = OTHER; note = 2'-O-methylguanosine-3'-phosphate
  modified_base 3: mod_base = OTHER; note = 2'-O-methyladenosine-3'-phosphate
  modified_base 4: mod_base = OTHER; note = 2'-O-methylguanosine-3'-phosphate
  modified_base 5: mod_base = OTHER; note = 2'-O-methyluridine-3'-phosphate
  modified_base 6: mod_base = OTHER; note = 2'-O-methyladenosine-3'-phosphate
  modified_base 7: mod_base = OTHER; note = 2'-deoxy-2'-fluorocytidine-3'-phosphate
  modified_base 8: mod_base = OTHER; note = 2'-O-methyladenosine-3'-phosphate
  modified_base 9: mod_base = OTHER; note = 2'-deoxy-2'-fluoroguanosine-3'-phosphate
  modified_base 10: mod_base = OTHER; note = 2'-deoxy-2'-fluoroadenosine-3'-phosphate
  modified_base 11: mod_base = OTHER; note = 2'-deoxy-2'-fluoroadenosine-3'-phosphate
  modified_base 12: mod_base = OTHER; note = 2'-O-methylguanosine-3'-phosphate
  modified_base 13: mod_base = OTHER; note = 2'-O-methyladenosine-3'-phosphate
  modified_base 14: mod_base = OTHER; note = 2'-O-methyladenosine-3'-phosphate
  modified_base 15: mod_base = OTHER; note = 2'-O-methyluridine-3'-phosphate
  modified_base 16: mod_base = OTHER; note = 2'-O-methylguanosine-3'-phosphate
  modified_base 17: mod_base = OTHER; note = 2'-O-methylcytidine-3'-phosphate
  modified_base 18: mod_base = OTHER; note = 2'-O-methyluridine-3'-phosphate
  modified_base 19: mod_base = OTHER; note = 2'-O-methylcytidine-3'-phosphate
  modified_base 20: mod_base = OTHER; note = 2'-O-methyladenosine-3'-phosphate
  modified_base 21: mod_base = OTHER; note = 2'-O-methyladenosine
tgagtacagaagaatgctcaa

SEQ ID NO: 3669 - RNA, 21 nt, synthetic construct
  source 1..21: mol_type = other RNA
  modified_base 1: mod_base = OTHER; note = 2'-O-methylguanosine-3'-phosphate
  modified_base 2: mod_base = OTHER; note = 2'-O-methyluridine-3'-phosphate
  modified_base 3: mod_base = OTHER; note = 2'-O-methyladenosine-3'-phosphate
  modified_base 4: mod_base = OTHER; note = 2'-O-methylcytidine-3'-phosphate
  modified_base 5: mod_base = OTHER; note = 2'-O-methyladenosine-3'-phosphate
  modified_base 6: mod_base = OTHER; note = 2'-O-methylguanosine-3'-phosphate
  modified_base 7: mod_base = OTHER; note = 2'-deoxy-2'-fluoroadenosine-3'-phosphate
  modified_base 8: mod_base = OTHER; note = 2'-O-methyladenosine-3'-phosphate
  modified_base 9: mod_base = OTHER; note = 2'-deoxy-2'-fluoroguanosine-3'-phosphate
  modified_base 10: mod_base = OTHER; note = 2'-deoxy-2'-fluoroadenosine-3'-phosphate
  modified_base 11: mod_base = OTHER; note = 2'-deoxy-2'-fluoroadenosine-3'-phosphate
  modified_base 12: mod_base = OTHER; note = 2'-O-methyluridine-3'-phosphate
  modified_base 13: mod_base = OTHER; note = 2'-O-methylguanosine-3'-phosphate
  modified_base 14: mod_base = OTHER; note = 2'-O-methylcytidine-3'-phosphate
  modified_base 15: mod_base = OTHER; note = 2'-O-methyluridine-3'-phosphate
  modified_base 16: mod_base = OTHER; note = 2'-O-methylcytidine-3'-phosphate
  modified_base 17: mod_base = OTHER; note = 2'-O-methyladenosine-3'-phosphate
  modified_base 18: mod_base = OTHER; note = 2'-O-methyluridine-3'-phosphate
  modified_base 19: mod_base = OTHER; note = 2'-O-methylguanosine-3'-phosphate
  modified_base 20: mod_base = OTHER; note = 2'-O-methyladenosine-3'-phosphate
  modified_base 21: mod_base = OTHER; note = 2'-O-methyladenosine
gtacagaagaatgctcatgaa

SEQ ID NO: 3670 - RNA, 21 nt, synthetic construct
  source 1..21: mol_type = other RNA
  modified_base 1: mod_base = OTHER; note = 2'-O-methyluridine-3'-phosphate
  modified_base 2: mod_base = OTHER; note = 2'-O-methyladenosine-3'-phosphate
  modified_base 3: mod_base = OTHER; note = 2'-O-methylcytidine-3'-phosphate
  modified_base 4: mod_base = OTHER; note = 2'-O-methyladenosine-3'-phosphate
  modified_base 5: mod_base = OTHER; note = 2'-O-methylguanosine-3'-phosphate
  modified_base 6: mod_base = OTHER; note = 2'-O-methyladenosine-3'-phosphate
  modified_base 7: mod_base = OTHER; note = 2'-deoxy-2'-fluoroadenosine-3'-phosphate
  modified_base 8: mod_base = OTHER; note = 2'-O-methylguanosine-3'-phosphate
  modified_base 9: mod_base = OTHER; note = 2'-deoxy-2'-fluoroadenosine-3'-phosphate
  modified_base 10: mod_base = OTHER; note = 2'-deoxy-2'-fluoroadenosine-3'-phosphate
  modified_base 11: mod_base = OTHER; note = 2'-deoxy-2'-fluorouridine-3'-phosphate
  modified_base 12: mod_base = OTHER; note = 2'-O-methylguanosine-3'-phosphate
  modified_base 13: mod_base = OTHER; note = 2'-O-methylcytidine-3'-phosphate
  modified_base 14: mod_base = OTHER; note = 2'-O-methyluridine-3'-phosphate
  modified_base 15: mod_base = OTHER; note = 2'-O-methylcytidine-3'-phosphate
  modified_base 16: mod_base = OTHER; note = 2'-O-methyladenosine-3'-phosphate
  modified_base 17: mod_base = OTHER; note = 2'-O-methyluridine-3'-phosphate
  modified_base 18: mod_base = OTHER; note = 2'-O-methylguanosine-3'-phosphate
  modified_base 19: mod_base = OTHER; note = 2'-O-methyladenosine-3'-phosphate
  modified_base 20: mod_base = OTHER; note = 2'-O-methyluridine-3'-phosphate
  modified_base 21: mod_base = OTHER; note = 2'-O-methyladenosine
tacagaagaatgctcatgata

SEQ ID NO: 3671 - RNA, 21 nt, synthetic construct
  source 1..21: mol_type = other RNA
  modified_base 1: mod_base = OTHER; note = 2'-O-methyladenosine-3'-phosphate
  modified_base 2: mod_base = OTHER; note = 2'-O-methylcytidine-3'-phosphate
  modified_base 3: mod_base = OTHER; note = 2'-O-methyladenosine-3'-phosphate
  modified_base 4: mod_base = OTHER; note = 2'-O-methylguanosine-3'-phosphate
  modified_base 5: mod_base = OTHER; note = 2'-O-methyladenosine-3'-phosphate
  modified_base 6: mod_base = OTHER; note = 2'-O-methyladenosine-3'-phosphate
  modified_base 7: mod_base = OTHER; note = 2'-deoxy-2'-fluoroguanosine-3'-phosphate
  modified_base 8: mod_base = OTHER; note = 2'-O-methyladenosine-3'-phosphate
  modified_base 9: mod_base = OTHER; note = 2'-deoxy-2'-fluoroadenosine-3'-phosphate
  modified_base 10: mod_base = OTHER; note = 2'-deoxy-2'-fluorouridine-3'-phosphate
  modified_base 11: mod_base = OTHER; note = 2'-deoxy-2'-fluoroguanosine-3'-phosphate
  modified_base 12: mod_base = OTHER; note = 2'-O-methylcytidine-3'-phosphate
  modified_base 13: mod_base = OTHER; note = 2'-O-methyluridine-3'-phosphate
  modified_base 14: mod_base = OTHER; note = 2'-O-methylcytidine-3'-phosphate
  modified_base 15: mod_base = OTHER; note = 2'-O-methyladenosine-3'-phosphate
  modified_base 16: mod_base = OTHER; note = 2'-O-methyluridine-3'-phosphate
  modified_base 17: mod_base = OTHER; note = 2'-O-methylguanosine-3'-phosphate
  modified_base 18: mod_base = OTHER; note = 2'-O-methyladenosine-3'-phosphate
  modified_base 19: mod_base = OTHER; note = 2'-O-methyluridine-3'-phosphate
  modified_base 20: mod_base = OTHER; note = 2'-O-methyladenosine-3'-phosphate
  modified_base 21: mod_base = OTHER; note = 2'-O-methyladenosine
acagaagaatgctcatgataa

SEQ ID NO: 3672 - RNA, 21 nt, synthetic construct
  source 1..21: mol_type = other RNA
  modified_base 1: mod_base = OTHER; note = 2'-O-methyladenosine-3'-phosphate
  modified_base 2: mod_base = OTHER; note = 2'-O-methyladenosine-3'-phosphate
  modified_base 3: mod_base = OTHER; note = 2'-O-methylguanosine-3'-phosphate
  modified_base 4: mod_base = OTHER; note = 2'-O-methyladenosine-3'-phosphate
  modified_base 5: mod_base = OTHER; note = 2'-O-methyladenosine-3'-phosphate
  modified_base 6: mod_base = OTHER; note = 2'-O-methyluridine-3'-phosphate
  modified_base 7: mod_base = OTHER; note = 2'-deoxy-2'-fluoroguanosine-3'-phosphate
  modified_base 8: mod_base = OTHER; note = 2'-O-methylcytidine-3'-phosphate
  modified_base 9: mod_base = OTHER; note = 2'-deoxy-2'-fluorouridine-3'-phosphate
  modified_base 10: mod_base = OTHER; note = 2'-deoxy-2'-fluorocytidine-3'-phosphate
  modified_base 11: mod_base = OTHER; note = 2'-deoxy-2'-fluoroadenosine-3'-phosphate
  modified_base 12: mod_base = OTHER; note = 2'-O-methyluridine-3'-phosphate
  modified_base 13: mod_base = OTHER; note = 2'-O-methylguanosine-3'-phosphate
  modified_base 14: mod_base = OTHER; note = 2'-O-methyladenosine-3'-phosphate
  modified_base 15: mod_base = OTHER; note = 2'-O-methyluridine-3'-phosphate
  modified_base 16: mod_base = OTHER; note = 2'-O-methyladenosine-3'-phosphate
  modified_base 17: mod_base = OTHER; note = 2'-O-methylguanosine-3'-phosphate
  modified_base 18: mod_base = OTHER; note = 2'-O-methyluridine-3'-phosphate
  modified_base 19: mod_base = OTHER; note = 2'-O-methyluridine-3'-phosphate
  modified_base 20: mod_base = OTHER; note = 2'-O-methyluridine-3'-phosphate
  modified_base 21: mod_base = OTHER; note = 2'-O-methyladenosine
aagaatgctcatgatagttta

SEQ ID NO: 3673 - RNA, 21 nt, synthetic construct
  source 1..21: mol_type = other RNA
  modified_base 1: mod_base = OTHER; note = 2'-O-methyladenosine-3'-phosphate
  modified_base 2: mod_base = OTHER; note = 2'-O-methylguanosine-3'-phosphate
  modified_base 3: mod_base = OTHER; note = 2'-O-methyladenosine-3'-phosphate
  modified_base 4: mod_base = OTHER; note = 2'-O-methyladenosine-3'-phosphate
  modified_base 5: mod_base = OTHER; note = 2'-O-methyluridine-3'-phosphate
  modified_base 6: mod_base = OTHER; note = 2'-O-methylguanosine-3'-phosphate
  modified_base 7: mod_base = OTHER; note = 2'-deoxy-2'-fluorocytidine-3'-phosphate
  modified_base 8: mod_base = OTHER; note = 2'-O-methyluridine-3'-phosphate
  modified_base 9: mod_base = OTHER; note = 2'-deoxy-2'-fluorocytidine-3'-phosphate
  modified_base 10: mod_base = OTHER; note = 2'-deoxy-2'-fluoroadenosine-3'-phosphate
  modified_base 11: mod_base = OTHER; note = 2'-deoxy-2'-fluorouridine-3'-phosphate
  modified_base 12: mod_base = OTHER; note = 2'-O-methylguanosine-3'-phosphate
  modified_base 13: mod_base = OTHER; note = 2'-O-methyladenosine-3'-phosphate
  modified_base 14: mod_base = OTHER; note = 2'-O-methyluridine-3'-phosphate
  modified_base 15: mod_base = OTHER; note = 2'-O-methyladenosine-3'-phosphate
  modified_base 16: mod_base = OTHER; note = 2'-O-methylguanosine-3'-phosphate
  modified_base 17: mod_base = OTHER; note = 2'-O-methyluridine-3'-phosphate
  modified_base 18: mod_base = OTHER; note = 2'-O-methyluridine-3'-phosphate
  modified_base 19: mod_base = OTHER; note = 2'-O-methyluridine-3'-phosphate
  modified_base 20: mod_base = OTHER; note = 2'-O-methyluridine-3'-phosphate
  modified_base 21: mod_base = OTHER; note = 2'-O-methyladenosine
agaatgctcatgatagtttta

SEQ ID NO: 3674 - RNA, 21 nt, synthetic construct
  source 1..21: mol_type = other RNA
  modified_base 1: mod_base = OTHER; note = 2'-O-methyladenosine-3'-phosphate
  modified_base 2: mod_base = OTHER; note = 2'-O-methyladenosine-3'-phosphate
  modified_base 3: mod_base = OTHER; note = 2'-O-methyluridine-3'-phosphate
  modified_base 4: mod_base = OTHER; note = 2'-O-methylguanosine-3'-phosphate
  modified_base 5: mod_base = OTHER; note = 2'-O-methylcytidine-3'-phosphate
  modified_base 6: mod_base = OTHER; note = 2'-O-methyluridine-3'-phosphate
  modified_base 7: mod_base = OTHER; note = 2'-deoxy-2'-fluorocytidine-3'-phosphate
  modified_base 8: mod_base = OTHER; note = 2'-O-methyladenosine-3'-phosphate
  modified_base 9: mod_base = OTHER; note = 2'-deoxy-2'-fluorouridine-3'-phosphate
  modified_base 10: mod_base = OTHER; note = 2'-deoxy-2'-fluoroguanosine-3'-phosphate
  modified_base 11: mod_base = OTHER; note = 2'-deoxy-2'-fluoroadenosine-3'-phosphate
  modified_base 12: mod_base = OTHER; note = 2'-O-methyluridine-3'-phosphate
  modified_base 13: mod_base = OTHER; note = 2'-O-methyladenosine-3'-phosphate
  modified_base 14: mod_base = OTHER; note = 2'-O-methylguanosine-3'-phosphate
  modified_base 15: mod_base = OTHER; note = 2'-O-methyluridine-3'-phosphate
  modified_base 16: mod_base = OTHER; note = 2'-O-methyluridine-3'-phosphate
  modified_base 17: mod_base = OTHER; note = 2'-O-methyluridine-3'-phosphate
  modified_base 18: mod_base = OTHER; note = 2'-O-methyluridine-3'-phosphate
  modified_base 19: mod_base = OTHER; note = 2'-O-methylguanosine-3'-phosphate
  modified_base 20: mod_base = OTHER; note = 2'-O-methylcytidine-3'-phosphate
  modified_base 21: mod_base = OTHER; note = 2'-O-methyladenosine
aatgctcatgatagttttgca

SEQ ID NO: 3675 - RNA, 21 nt, synthetic construct
  source 1..21: mol_type = other RNA
  modified_base 1: mod_base = OTHER; note = 2'-O-methylguanosine-3'-phosphate
  modified_base 2: mod_base = OTHER; note = 2'-O-methylcytidine-3'-phosphate
  modified_base 3: mod_base = OTHER; note = 2'-O-methyluridine-3'-phosphate
  modified_base 4: mod_base = OTHER; note = 2'-O-methylcytidine-3'-phosphate
  modified_base 5: mod_base = OTHER; note = 2'-O-methyladenosine-3'-phosphate
  modified_base 6: mod_base = OTHER; note = 2'-O-methyluridine-3'-phosphate
  modified_base 7: mod_base = OTHER; note = 2'-deoxy-2'-fluoroguanosine-3'-phosphate
  modified_base 8: mod_base = OTHER; note = 2'-O-methyladenosine-3'-phosphate
  modified_base 9: mod_base = OTHER; note = 2'-deoxy-2'-fluorouridine-3'-phosphate
  modified_base 10: mod_base = OTHER; note = 2'-deoxy-2'-fluoroadenosine-3'-phosphate
  modified_base 11: mod_base = OTHER; note = 2'-deoxy-2'-fluoroguanosine-3'-phosphate
  modified_base 12: mod_base = OTHER; note = 2'-O-methyluridine-3'-phosphate
  modified_base 13: mod_base = OTHER; note = 2'-O-methyluridine-3'-phosphate
  modified_base 14: mod_base = OTHER; note = 2'-O-methyluridine-3'-phosphate
  modified_base 15: mod_base = OTHER; note = 2'-O-methyluridine-3'-phosphate
  modified_base 16: mod_base = OTHER; note = 2'-O-methylguanosine-3'-phosphate
  modified_base 17: mod_base = OTHER; note = 2'-O-methylcytidine-3'-phosphate
  modified_base 18: mod_base = OTHER; note = 2'-O-methylcytidine-3'-phosphate
  modified_base 19: mod_base = OTHER; note = 2'-O-methyluridine-3'-phosphate
  modified_base 20: mod_base = OTHER; note = 2'-O-methyluridine-3'-phosphate
  modified_base 21: mod_base = OTHER; note = 2'-O-methyladenosine
gctcatgatagttttgcctta

SEQ ID NO: 3676 - RNA, 21 nt, synthetic construct
  source 1..21: mol_type = other RNA
  modified_base 1: mod_base = OTHER; note = 2'-O-methyluridine-3'-phosphate
  modified_base 2: mod_base = OTHER; note = 2'-O-methylcytidine-3'-phosphate
  modified_base 3: mod_base = OTHER; note = 2'-O-methyladenosine-3'-phosphate
  modified_base 4: mod_base = OTHER; note = 2'-O-methyluridine-3'-phosphate
  modified_base 5: mod_base = OTHER; note = 2'-O-methylguanosine-3'-phosphate
  modified_base 6: mod_base = OTHER; note = 2'-O-methyladenosine-3'-phosphate
  modified_base 7: mod_base = OTHER; note = 2'-deoxy-2'-fluorouridine-3'-phosphate
  modified_base 8: mod_base = OTHER; note = 2'-O-methyladenosine-3'-phosphate
  modified_base 9: mod_base = OTHER; note = 2'-deoxy-2'-fluoroguanosine-3'-phosphate
  modified_base 10: mod_base = OTHER; note = 2'-deoxy-2'-fluorouridine-3'-phosphate
  modified_base 11: mod_base = OTHER; note = 2'-deoxy-2'-fluorouridine-3'-phosphate
  modified_base 12: mod_base = OTHER; note = 2'-O-methyluridine-3'-phosphate
  modified_base 13: mod_base = OTHER; note = 2'-O-methyluridine-3'-phosphate
  modified_base 14: mod_base = OTHER; note = 2'-O-methylguanosine-3'-phosphate
  modified_base 15: mod_base = OTHER; note = 2'-O-methylcytidine-3'-phosphate
  modified_base 16: mod_base = OTHER; note = 2'-O-methylcytidine-3'-phosphate
  modified_base 17: mod_base = OTHER; note = 2'-O-methyluridine-3'-phosphate
  modified_base 18: mod_base = OTHER; note = 2'-O-methyluridine-3'-phosphate
  modified_base 19: mod_base = OTHER; note = 2'-O-methylcytidine-3'-phosphate
  modified_base 20: mod_base = OTHER; note = 2'-O-methyladenosine-3'-phosphate
  modified_base 21: mod_base = OTHER; note = 2'-O-methyladenosine
tcatgatagttttgccttcaa

SEQ ID NO: 3677 - RNA, 21 nt, synthetic construct
  source 1..21: mol_type = other RNA
  modified_base 1: mod_base = OTHER; note = 2'-O-methyladenosine-3'-phosphate
  modified_base 2: mod_base = OTHER; note = 2'-O-methyluridine-3'-phosphate
  modified_base 3: mod_base = OTHER; note = 2'-O-methylguanosine-3'-phosphate
  modified_base 4: mod_base = OTHER; note = 2'-O-methyladenosine-3'-phosphate
  modified_base 5: mod_base = OTHER; note = 2'-O-methyluridine-3'-phosphate
  modified_base 6: mod_base = OTHER; note = 2'-O-methyladenosine-3'-phosphate
  modified_base 7: mod_base = OTHER; note = 2'-deoxy-2'-fluoroguanosine-3'-phosphate
  modified_base 8: mod_base = OTHER; note = 2'-O-methyluridine-3'-phosphate
  modified_base 9: mod_base = OTHER; note = 2'-deoxy-2'-fluorouridine-3'-phosphate
  modified_base 10: mod_base = OTHER; note = 2'-deoxy-2'-fluorouridine-3'-phosphate
  modified_base 11: mod_base = OTHER; note = 2'-deoxy-2'-fluorouridine-3'-phosphate
  modified_base 12: mod_base = OTHER; note = 2'-O-methylguanosine-3'-phosphate
  modified_base 13: mod_base = OTHER; note = 2'-O-methylcytidine-3'-phosphate
  modified_base 14: mod_base = OTHER; note = 2'-O-methylcytidine-3'-phosphate
  modified_base 15: mod_base = OTHER; note = 2'-O-methyluridine-3'-phosphate
  modified_base 16: mod_base = OTHER; note = 2'-O-methyluridine-3'-phosphate
  modified_base 17: mod_base = OTHER; note = 2'-O-methylcytidine-3'-phosphate
  modified_base 18: mod_base = OTHER; note = 2'-O-methyladenosine-3'-phosphate
  modified_base 19: mod_base = OTHER; note = 2'-O-methyluridine-3'-phosphate
  modified_base 20: mod_base = OTHER; note = 2'-O-methyluridine-3'-phosphate
  modified_base 21: mod_base = OTHER; note = 2'-O-methyladenosine
atgatagttttgccttcatta

SEQ ID NO: 3678 - RNA, 21 nt, synthetic construct
  source 1..21: mol_type = other RNA
  modified_base 1: mod_base = OTHER; note = 2'-O-methyluridine-3'-phosphate
  modified_base 2: mod_base = OTHER; note = 2'-O-methylguanosine-3'-phosphate
  modified_base 3: mod_base = OTHER; note = 2'-O-methyladenosine-3'-phosphate
  modified_base 4: mod_base = OTHER; note = 2'-O-methyluridine-3'-phosphate
  modified_base 5: mod_base = OTHER; note = 2'-O-methyladenosine-3'-phosphate
  modified_base 6: mod_base = OTHER; note = 2'-O-methylguanosine-3'-phosphate
  modified_base 7: mod_base = OTHER; note = 2'-deoxy-2'-fluorouridine-3'-phosphate
  modified_base 8: mod_base = OTHER; note = 2'-O-methyluridine-3'-phosphate
  modified_base 9: mod_base = OTHER; note = 2'-deoxy-2'-fluorouridine-3'-phosphate
  modified_base 10: mod_base = OTHER; note = 2'-deoxy-2'-fluorouridine-3'-phosphate
  modified_base 11: mod_base = OTHER; note = 2'-deoxy-2'-fluoroguanosine-3'-phosphate
  modified_base 12: mod_base = OTHER; note = 2'-O-methylcytidine-3'-phosphate
  modified_base 13: mod_base = OTHER; note = 2'-O-methylcytidine-3'-phosphate
  modified_base 14: mod_base = OTHER; note = 2'-O-methyluridine-3'-phosphate
  modified_base 15: mod_base = OTHER; note = 2'-O-methyluridine-3'-phosphate
  modified_base 16: mod_base = OTHER; note = 2'-O-methylcytidine-3'-phosphate
  modified_base 17: mod_base = OTHER; note = 2'-O-methyladenosine-3'-phosphate
  modified_base 18: mod_base = OTHER; note = 2'-O-methyluridine-3'-phosphate
  modified_base 19: mod_base = OTHER; note = 2'-O-methyluridine-3'-phosphate
  modified_base 20: mod_base = OTHER; note = 2'-O-methylcytidine-3'-phosphate
  modified_base 21: mod_base = OTHER; note = 2'-O-methyladenosine
tgatagttttgccttcattca

SEQ ID NO: 3679 - RNA, 21 nt, synthetic construct
  source 1..21: mol_type = other RNA
  modified_base 1: mod_base = OTHER; note = 2'-O-methyladenosine-3'-phosphate
  modified_base 2: mod_base = OTHER; note = 2'-O-methyluridine-3'-phosphate
  modified_base 3: mod_base = OTHER; note = 2'-O-methyladenosine-3'-phosphate
  modified_base 4: mod_base = OTHER; note = 2'-O-methylguanosine-3'-phosphate
  modified_base 5: mod_base = OTHER; note = 2'-O-methyluridine-3'-phosphate
  modified_base 6: mod_base = OTHER; note = 2'-O-methyluridine-3'-phosphate
  modified_base 7: mod_base = OTHER; note = 2'-deoxy-2'-fluorouridine-3'-phosphate
  modified_base 8: mod_base = OTHER; note = 2'-O-methyluridine-3'-phosphate
  modified_base 9: mod_base = OTHER; note = 2'-deoxy-2'-fluoroguanosine-3'-phosphate
  modified_base 10: mod_base = OTHER; note = 2'-deoxy-2'-fluorocytidine-3'-phosphate
  modified_base 11: mod_base = OTHER; note = 2'-deoxy-2'-fluorocytidine-3'-phosphate
  modified_base 12: mod_base = OTHER; note = 2'-O-methyluridine-3'-phosphate
  modified_base 13: mod_base = OTHER; note = 2'-O-methyluridine-3'-phosphate
  modified_base 14: mod_base = OTHER; note = 2'-O-methylcytidine-3'-phosphate
  modified_base 15: mod_base = OTHER; note = 2'-O-methyladenosine-3'-phosphate
  modified_base 16: mod_base = OTHER; note = 2'-O-methyluridine-3'-phosphate
  modified_base 17: mod_base = OTHER; note = 2'-O-methyluridine-3'-phosphate
  modified_base 18: mod_base = OTHER; note = 2'-O-methylcytidine-3'-phosphate
  modified_base 19: mod_base = OTHER; note = 2'-O-methyluridine-3'-phosphate
  modified_base 20: mod_base = OTHER; note = 2'-O-methyladenosine-3'-phosphate
  modified_base 21: mod_base = OTHER; note = 2'-O-methyladenosine
atagttttgccttcattctaa

SEQ ID NO: 3680 - RNA, 21 nt, synthetic construct
  source 1..21: mol_type = other RNA
  modified_base 1: mod_base = OTHER; note = 2'-O-methyluridine-3'-phosphate
  modified_base 2: mod_base = OTHER; note = 2'-O-methylguanosine-3'-phosphate
  modified_base 3: mod_base = OTHER; note = 2'-O-methylguanosine-3'-phosphate
  modified_base 4: mod_base = OTHER; note = 2'-O-methyladenosine-3'-phosphate
  modified_base 5: mod_base = OTHER; note = 2'-O-methylcytidine-3'-phosphate
  modified_base 6: mod_base = OTHER; note = 2'-O-methyladenosine-3'-phosphate
  modified_base 7: mod_base = OTHER; note = 2'-deoxy-2'-fluorocytidine-3'-phosphate
  modified_base 8: mod_base = OTHER; note = 2'-O-methyladenosine-3'-phosphate
  modified_base 9: mod_base = OTHER; note = 2'-deoxy-2'-fluoroguanosine-3'-phosphate
  modified_base 10: mod_base = OTHER; note = 2'-deoxy-2'-fluoroadenosine-3'-phosphate
  modified_base 11: mod_base = OTHER; note = 2'-deoxy-2'-fluoroguanosine-3'-phosphate
  modified_base 12: mod_base = OTHER; note = 2'-O-methyluridine-3'-phosphate
  modified_base 13: mod_base = OTHER; note = 2'-O-methyladenosine-3'-phosphate
  modified_base 14: mod_base = OTHER; note = 2'-O-methyladenosine-3'-phosphate
  modified_base 15: mod_base = OTHER; note = 2'-O-methyluridine-3'-phosphate
  modified_base 16: mod_base = OTHER; note = 2'-O-methylguanosine-3'-phosphate
  modified_base 17: mod_base = OTHER; note = 2'-O-methyladenosine-3'-phosphate
  modified_base 18: mod_base = OTHER; note = 2'-O-methyladenosine-3'-phosphate
  modified_base 19: mod_base = OTHER; note = 2'-O-methyluridine-3'-phosphate
  modified_base 20: mod_base = OTHER; note = 2'-O-methyladenosine-3'-phosphate
  modified_base 21: mod_base = OTHER; note = 2'-O-methyladenosine
tggacacagagtaatgaataa

SEQ ID NO: 3681 - RNA, 21 nt, synthetic construct
  source 1..21: mol_type = other RNA
  modified_base 1: mod_base = OTHER; note = 2'-O-methyladenosine-3'-phosphate
  modified_base 2: mod_base = OTHER; note = 2'-O-methylcytidine-3'-phosphate
  modified_base 3: mod_base = OTHER; note = 2'-O-methyladenosine-3'-phosphate
  modified_base 4: mod_base = OTHER; note = 2'-O-methylcytidine-3'-phosphate
  modified_base 5: mod_base = OTHER; note = 2'-O-methyladenosine-3'-phosphate
  modified_base 6: mod_base = OTHER; note = 2'-O-methylguanosine-3'-phosphate
  modified_base 7: mod_base = OTHER; note = 2'-deoxy-2'-fluoroadenosine-3'-phosphate
  modified_base 8: mod_base = OTHER; note = 2'-O-methylguanosine-3'-phosphate
  modified_base 9: mod_base = OTHER; note = 2'-deoxy-2'-fluorouridine-3'-phosphate
  modified_base 10: mod_base = OTHER; note = 2'-deoxy-2'-fluoroadenosine-3'-phosphate
  modified_base 11: mod_base = OTHER; note = 2'-deoxy-2'-fluoroadenosine-3'-phosphate
  modified_base 12: mod_base = OTHER; note = 2'-O-methyluridine-3'-phosphate
  modified_base 13: mod_base = OTHER; note = 2'-O-methylguanosine-3'-phosphate
  modified_base 14: mod_base = OTHER; note = 2'-O-methyladenosine-3'-phosphate
  modified_base 15: mod_base = OTHER; note = 2'-O-methyladenosine-3'-phosphate
  modified_base 16: mod_base = OTHER; note = 2'-O-methyluridine-3'-phosphate
  modified_base 17: mod_base = OTHER; note = 2'-O-methyladenosine-3'-phosphate
  modified_base 18: mod_base = OTHER; note = 2'-O-methyluridine-3'-phosphate
  modified_base 19: mod_base = OTHER; note = 2'-O-methyluridine-3'-phosphate
  modified_base 20: mod_base = OTHER; note = 2'-O-methyluridine-3'-phosphate
  modified_base 21: mod_base = OTHER; note = 2'-O-methyladenosine
acacagagtaatgaatattta

SEQ ID NO: 3682 - RNA, 21 nt, synthetic construct
  source 1..21: mol_type = other RNA
  modified_base 1: mod_base = OTHER; note = 2'-O-methyladenosine-3'-phosphate
  modified_base 2: mod_base = OTHER; note = 2'-O-methylguanosine-3'-phosphate
  modified_base 3: mod_base = OTHER; note = 2'-O-methyluridine-3'-phosphate
  modified_base 4: mod_base = OTHER; note = 2'-O-methyladenosine-3'-phosphate
  modified_base 5: mod_base = OTHER; note = 2'-O-methyladenosine-3'-phosphate
  modified_base 6: mod_base = OTHER; note = 2'-O-methyluridine-3'-phosphate
  modified_base 7: mod_base = OTHER; note = 2'-deoxy-2'-fluoroguanosine-3'-phosphate
  modified_base 8: mod_base = OTHER; note = 2'-O-methyladenosine-3'-phosphate
  modified_base 9: mod_base = OTHER; note = 2'-deoxy-2'-fluoroadenosine-3'-phosphate
  modified_base 10: mod_base = OTHER; note = 2'-deoxy-2'-fluorouridine-3'-phosphate
  modified_base 11: mod_base = OTHER; note = 2'-deoxy-2'-fluoroadenosine-3'-phosphate
  modified_base 12: mod_base = OTHER; note = 2'-O-methyluridine-3'-phosphate
  modified_base 13: mod_base = OTHER; note = 2'-O-methyluridine-3'-phosphate
  modified_base 14: mod_base = OTHER; note = 2'-O-methyluridine-3'-phosphate
  modified_base 15: mod_base = OTHER; note = 2'-O-methyladenosine-3'-phosphate
  modified_base 16: mod_base = OTHER; note = 2'-O-methyladenosine-3'-phosphate
  modified_base 17: mod_base = OTHER; note = 2'-O-methyluridine-3'-phosphate
  modified_base 18: mod_base = OTHER; note = 2'-O-methylguanosine-3'-phosphate
  modified_base 19: mod_base = OTHER; note = 2'-O-methylguanosine-3'-phosphate
  modified_base 20: mod_base = OTHER; note = 2'-O-methylguanosine-3'-phosphate
  modified_base 21: mod_base = OTHER; note = 2'-O-methyladenosine
agtaatgaatatttaatggga

SEQ ID NO: 3683 - RNA, 21 nt, synthetic construct
  source 1..21: mol_type = other RNA
  modified_base 1: mod_base = OTHER; note = 2'-O-methyladenosine-3'-phosphate
  modified_base 2: mod_base = OTHER; note = 2'-O-methyladenosine-3'-phosphate
  modified_base 3: mod_base = OTHER; note = 2'-O-methyluridine-3'-phosphate
  modified_base 4: mod_base = OTHER; note = 2'-O-methylguanosine-3'-phosphate
  modified_base 5: mod_base = OTHER; note = 2'-O-methylguanosine-3'-phosphate
  modified_base 6: mod_base = OTHER; note = 2'-O-methylguanosine-3'-phosphate
  modified_base 7: mod_base = OTHER; note = 2'-deoxy-2'-fluoroadenosine-3'-phosphate
  modified_base 8: mod_base = OTHER; note = 2'-O-methylcytidine-3'-phosphate
  modified_base 9: mod_base = OTHER; note = 2'-deoxy-2'-fluoroadenosine-3'-phosphate
  modified_base 10: mod_base = OTHER; note = 2'-deoxy-2'-fluorouridine-3'-phosphate
  modified_base 11: mod_base = OTHER; note = 2'-deoxy-2'-fluorouridine-3'-phosphate
  modified_base 12: mod_base = OTHER; note = 2'-O-methyladenosine-3'-phosphate
  modified_base 13: mod_base = OTHER; note = 2'-O-methyladenosine-3'-phosphate
  modified_base 14: mod_base = OTHER; note = 2'-O-methyladenosine-3'-phosphate
  modified_base 15: mod_base = OTHER; note = 2'-O-methyluridine-3'-phosphate
  modified_base 16: mod_base = OTHER; note = 2'-O-methyladenosine-3'-phosphate
  modified_base 17: mod_base = OTHER; note = 2'-O-methyluridine-3'-phosphate
  modified_base 18: mod_base = OTHER; note = 2'-O-methylguanosine-3'-phosphate
  modified_base 19: mod_base = OTHER; note = 2'-O-methylcytidine-3'-phosphate
  modified_base 20: mod_base = OTHER; note = 2'-O-methylcytidine-3'-phosphate
  modified_base 21: mod_base = OTHER; note = 2'-O-methyladenosine
aatgggacattaaatatgcca

SEQ ID NO: 3684 - RNA, 21 nt, synthetic construct
  source 1..21: mol_type = other RNA
  modified_base 1: mod_base = OTHER; note = 2'-O-methyladenosine-3'-phosphate
  modified_base 2: mod_base = OTHER; note = 2'-O-methyluridine-3'-phosphate
  modified_base 3: mod_base = OTHER; note = 2'-O-methylguanosine-3'-phosphate
  modified_base 4: mod_base = OTHER; note = 2'-O-methylguanosine-3'-phosphate
  modified_base 5: mod_base = OTHER; note = 2'-O-methylguanosine-3'-phosphate
  modified_base 6: mod_base = OTHER; note = 2'-O-methyladenosine-3'-phosphate
  modified_base 7: mod_base = OTHER; note = 2'-deoxy-2'-fluorocytidine-3'-phosphate
  modified_base 8: mod_base = OTHER; note = 2'-O-methyladenosine-3'-phosphate
  modified_base 9: mod_base = OTHER; note = 2'-deoxy-2'-fluorouridine-3'-phosphate
  modified_base 10: mod_base = OTHER; note = 2'-deoxy-2'-fluorouridine-3'-phosphate
  modified_base 11: mod_base = OTHER; note = 2'-deoxy-2'-fluoroadenosine-3'-phosphate
  modified_base 12: mod_base = OTHER; note = 2'-O-methyladenosine-3'-phosphate
  modified_base 13: mod_base = OTHER; note = 2'-O-methyladenosine-3'-phosphate
  modified_base 14: mod_base = OTHER; note = 2'-O-methyluridine-3'-phosphate
  modified_base 15: mod_base = OTHER; note = 2'-O-methyladenosine-3'-phosphate
  modified_base 16: mod_base = OTHER; note = 2'-O-methyluridine-3'-phosphate
  modified_base 17: mod_base = OTHER; note = 2'-O-methylguanosine-3'-phosphate
  modified_base 18: mod_base = OTHER; note = 2'-O-methylcytidine-3'-phosphate
  modified_base 19: mod_base = OTHER; note = 2'-O-methylcytidine-3'-phosphate
  modified_base 20: mod_base = OTHER; note = 2'-O-methylcytidine-3'-phosphate
  modified_base 21: mod_base = OTHER; note = 2'-O-methyladenosine
atgggacattaaatatgccca

SEQ ID NO: 3685 - RNA, 21 nt, synthetic construct
  source 1..21: mol_type = other RNA
  modified_base 1: mod_base = OTHER; note = 2'-O-methyluridine-3'-phosphate
  modified_base 2: mod_base = OTHER; note = 2'-O-methylguanosine-3'-phosphate
  modified_base 3: mod_base = OTHER; note = 2'-O-methylguanosine-3'-phosphate
  modified_base 4: mod_base = OTHER; note = 2'-O-methylguanosine-3'-phosphate
  modified_base 5: mod_base = OTHER; note = 2'-O-methyladenosine-3'-phosphate
  modified_base 6: mod_base = OTHER; note = 2'-O-methylcytidine-3'-phosphate
  modified_base 7: mod_base = OTHER; note = 2'-deoxy-2'-fluoroadenosine-3'-phosphate
  modified_base 8: mod_base = OTHER; note = 2'-O-methyluridine-3'-phosphate
  modified_base 9: mod_base = OTHER; note = 2'-deoxy-2'-fluorouridine-3'-phosphate
  modified_base 10: mod_base = OTHER; note = 2'-deoxy-2'-fluoroadenosine-3'-phosphate
  modified_base 11: mod_base = OTHER; note = 2'-deoxy-2'-fluoroadenosine-3'-phosphate
  modified_base 12: mod_base = OTHER; note = 2'-O-methyladenosine-3'-phosphate
  modified_base 13: mod_base = OTHER; note = 2'-O-methyluridine-3'-phosphate
  modified_base 14: mod_base = OTHER; note = 2'-O-methyladenosine-3'-phosphate
  modified_base 15: mod_base = OTHER; note = 2'-O-methyluridine-3'-phosphate
  modified_base 16: mod_base = OTHER; note = 2'-O-methylguanosine-3'-phosphate
  modified_base 17: mod_base = OTHER; note = 2'-O-methylcytidine-3'-phosphate
  modified_base 18: mod_base = OTHER; note = 2'-O-methylcytidine-3'-phosphate
  modified_base 19: mod_base = OTHER; note = 2'-O-methylcytidine-3'-phosphate
  modified_base 20: mod_base = OTHER; note = 2'-O-methyluridine-3'-phosphate
  modified_base 21: mod_base = OTHER; note = 2'-O-methyladenosine
tgggacattaaatatgcccta

SEQ ID NO: 3686 - RNA, 21 nt, synthetic construct
  source 1..21: mol_type = other RNA
  modified_base 1: mod_base = OTHER; note = 2'-O-methylguanosine-3'-phosphate
  modified_base 2: mod_base = OTHER; note = 2'-O-methylguanosine-3'-phosphate
  modified_base 3: mod_base = OTHER; note = 2'-O-methylguanosine-3'-phosphate
  modified_base 4: mod_base = OTHER; note = 2'-O-methyladenosine-3'-phosphate
  modified_base 5: mod_base = OTHER; note = 2'-O-methylcytidine-3'-phosphate
  modified_base 6: mod_base = OTHER; note = 2'-O-methyladenosine-3'-phosphate
  modified_base 7: mod_base = OTHER; note = 2'-deoxy-2'-fluorouridine-3'-phosphate
  modified_base 8: mod_base = OTHER; note = 2'-O-methyluridine-3'-phosphate
  modified_base 9: mod_base = OTHER; note = 2'-deoxy-2'-fluoroadenosine-3'-phosphate
  modified_base 10: mod_base = OTHER; note = 2'-deoxy-2'-fluoroadenosine-3'-phosphate
  modified_base 11: mod_base = OTHER; note = 2'-deoxy-2'-fluoroadenosine-3'-phosphate
  modified_base 12: mod_base = OTHER; note = 2'-O-methyluridine-3'-phosphate
  modified_base 13: mod_base = OTHER; note = 2'-O-methyladenosine-3'-phosphate
  modified_base 14: mod_base = OTHER; note = 2'-O-methyluridine-3'-phosphate
  modified_base 15: mod_base = OTHER; note = 2'-O-methylguanosine-3'-phosphate
  modified_base 16: mod_base = OTHER; note = 2'-O-methylcytidine-3'-phosphate
  modified_base 17: mod_base = OTHER; note = 2'-O-methylcytidine-3'-phosphate
  modified_base 18: mod_base = OTHER; note = 2'-O-methylcytidine-3'-phosphate
  modified_base 19: mod_base = OTHER; note = 2'-O-methyluridine-3'-phosphate
  modified_base 20: mod_base = OTHER; note = 2'-O-methyluridine-3'-phosphate
  modified_base 21: mod_base = OTHER; note = 2'-O-methyladenosine
gggacattaaatatgccctta

SEQ ID NO: 3687 - RNA, 21 nt, synthetic construct
  source 1..21: mol_type = other RNA
  modified_base 1: mod_base = OTHER; note = 2'-O-methylguanosine-3'-phosphate
  modified_base 2: mod_base = OTHER; note = 2'-O-methylguanosine-3'-phosphate
  modified_base 3: mod_base = OTHER; note = 2'-O-methyladenosine-3'-phosphate
  modified_base 4: mod_base = OTHER; note = 2'-O-methylcytidine-3'-phosphate
  modified_base 5: mod_base = OTHER; note = 2'-O-methyladenosine-3'-phosphate
  modified_base 6: mod_base = OTHER; note = 2'-O-methyluridine-3'-phosphate
  modified_base 7: mod_base = OTHER; note = 2'-deoxy-2'-fluorouridine-3'-phosphate
  modified_base 8: mod_base = OTHER; note = 2'-O-methyladenosine-3'-phosphate
  modified_base 9: mod_base = OTHER; note = 2'-deoxy-2'-fluoroadenosine-3'-phosphate
  modified_base 10: mod_base = OTHER; note = 2'-deoxy-2'-fluoroadenosine-3'-phosphate
  modified_base 11: mod_base = OTHER; note = 2'-deoxy-2'-fluorouridine-3'-phosphate
  modified_base 12: mod_base = OTHER; note = 2'-O-methyladenosine-3'-phosphate
  modified_base 13: mod_base = OTHER; note = 2'-O-methyluridine-3'-phosphate
  modified_base 14: mod_base = OTHER; note = 2'-O-methylguanosine-3'-phosphate
  modified_base 15: mod_base = OTHER; note = 2'-O-methylcytidine-3'-phosphate
  modified_base 16: mod_base = OTHER; note = 2'-O-methylcytidine-3'-phosphate
  modified_base 17: mod_base = OTHER; note = 2'-O-methylcytidine-3'-phosphate
  modified_base 18: mod_base = OTHER; note = 2'-O-methyluridine-3'-phosphate
  modified_base 19: mod_base = OTHER; note = 2'-O-methyluridine-3'-phosphate
  modified_base 20: mod_base = OTHER; note = 2'-O-methylcytidine-3'-phosphate
  modified_base 21: mod_base = OTHER; note = 2'-O-methyladenosine
ggacattaaatatgcccttca

SEQ ID NO: 3688 - RNA, 21 nt, synthetic construct
  source 1..21: mol_type = other RNA
  modified_base 1: mod_base = OTHER; note = 2'-O-methylguanosine-3'-phosphate
  modified_base 2: mod_base = OTHER; note = 2'-O-methyladenosine-3'-phosphate
  modified_base 3: mod_base = OTHER; note = 2'-O-methylcytidine-3'-phosphate
  modified_base 4: mod_base = OTHER; note = 2'-O-methyladenosine-3'-phosphate
  modified_base 5: mod_base = OTHER; note = 2'-O-methyluridine-3'-phosphate
  modified_base 6: mod_base = OTHER; note = 2'-O-methyluridine-3'-phosphate
  modified_base 7: mod_base = OTHER; note = 2'-deoxy-2'-fluoroadenosine-3'-phosphate
  modified_base 8: mod_base = OTHER; note = 2'-O-methyladenosine-3'-phosphate
  modified_base 9: mod_base = OTHER; note = 2'-deoxy-2'-fluoroadenosine-3'-phosphate
  modified_base 10: mod_base = OTHER; note = 2'-deoxy-2'-fluorouridine-3'-phosphate
  modified_base 11: mod_base = OTHER; note = 2'-deoxy-2'-fluoroadenosine-3'-phosphate
  modified_base 12: mod_base = OTHER; note = 2'-O-methyluridine-3'-phosphate
  modified_base 13: mod_base = OTHER; note = 2'-O-methylguanosine-3'-phosphate
  modified_base 14: mod_base = OTHER; note = 2'-O-methylcytidine-3'-phosphate
  modified_base 15: mod_base = OTHER; note = 2'-O-methylcytidine-3'-phosphate
  modified_base 16: mod_base = OTHER; note = 2'-O-methylcytidine-3'-phosphate
  modified_base 17: mod_base = OTHER; note = 2'-O-methyluridine-3'-phosphate
  modified_base 18: mod_base = OTHER; note = 2'-O-methyluridine-3'-phosphate
  modified_base 19: mod_base = OTHER; note = 2'-O-methylcytidine-3'-phosphate
  modified_base 20: mod_base = OTHER; note = 2'-O-methyladenosine-3'-phosphate
  modified_base 21: mod_base = OTHER; note = 2'-O-methyladenosine
gacattaaatatgcccttcaa

SEQ ID NO: 3689 - RNA, 21 nt, synthetic construct
  source 1..21: mol_type = other RNA
  modified_base 1: mod_base = OTHER; note = 2'-O-methyladenosine-3'-phosphate
  modified_base 2: mod_base = OTHER; note = 2'-O-methylcytidine-3'-phosphate
  modified_base 3: mod_base = OTHER; note = 2'-O-methyladenosine-3'-phosphate
  modified_base 4: mod_base = OTHER; note = 2'-O-methyluridine-3'-phosphate
  modified_base 5: mod_base = OTHER; note = 2'-O-methyluridine-3'-phosphate
  modified_base 6: mod_base = OTHER; note = 2'-O-methyladenosine-3'-phosphate
  modified_base 7: mod_base = OTHER; note = 2'-deoxy-2'-fluoroadenosine-3'-phosphate
  modified_base 8: mod_base = OTHER; note = 2'-O-methyladenosine-3'-phosphate
  modified_base 9: mod_base = OTHER; note = 2'-deoxy-2'-fluorouridine-3'-phosphate
  modified_base 10: mod_base = OTHER; note = 2'-deoxy-2'-fluoroadenosine-3'-phosphate
  modified_base 11: mod_base = OTHER; note = 2'-deoxy-2'-fluorouridine-3'-phosphate
  modified_base 12: mod_base = OTHER; note = 2'-O-methylguanosine-3'-phosphate
  modified_base 13: mod_base = OTHER; note = 2'-O-methylcytidine-3'-phosphate
  modified_base 14: mod_base = OTHER; note = 2'-O-methylcytidine-3'-phosphate
  modified_base 15: mod_base = OTHER; note = 2'-O-methylcytidine-3'-phosphate
  modified_base 16: mod_base = OTHER; note = 2'-O-methyluridine-3'-phosphate
  modified_base 17: mod_base = OTHER; note = 2'-O-methyluridine-3'-phosphate
  modified_base 18: mod_base = OTHER; note = 2'-O-methylcytidine-3'-phosphate
  modified_base 19: mod_base = OTHER; note = 2'-O-methyladenosine-3'-phosphate
  modified_base 20: mod_base = OTHER; note = 2'-O-methyladenosine-3'-phosphate
  modified_base 21: mod_base = OTHER; note = 2'-O-methyladenosine
acattaaatatgcccttcaaa

SEQ ID NO: 3690 - RNA, 21 nt, synthetic construct
  source 1..21: mol_type = other RNA
  modified_base 1: mod_base = OTHER; note = 2'-O-methylcytidine-3'-phosphate
  modified_base 2: mod_base = OTHER; note = 2'-O-methyladenosine-3'-phosphate
  modified_base 3: mod_base = OTHER; note = 2'-O-methyluridine-3'-phosphate
  modified_base 4: mod_base = OTHER; note = 2'-O-methyluridine-3'-phosphate
  modified_base 5: mod_base = OTHER; note = 2'-O-methyladenosine-3'-phosphate
  modified_base 6: mod_base = OTHER; note = 2'-O-methyladenosine-3'-phosphate
  modified_base 7: mod_base = OTHER; note = 2'-deoxy-2'-fluoroadenosine-3'-phosphate
  modified_base 8: mod_base = OTHER; note = 2'-O-methyluridine-3'-phosphate
  modified_base 9: mod_base = OTHER; note = 2'-deoxy-2'-fluoroadenosine-3'-phosphate
  modified_base 10: mod_base = OTHER; note = 2'-deoxy-2'-fluorouridine-3'-phosphate
  modified_base 11: mod_base = OTHER; note = 2'-deoxy-2'-fluoroguanosine-3'-phosphate
  modified_base 12: mod_base = OTHER; note = 2'-O-methylcytidine-3'-phosphate
  modified_base 13: mod_base = OTHER; note = 2'-O-methylcytidine-3'-phosphate
  modified_base 14: mod_base = OTHER; note = 2'-O-methylcytidine-3'-phosphate
  modified_base 15: mod_base = OTHER; note = 2'-O-methyluridine-3'-phosphate
  modified_base 16: mod_base = OTHER; note = 2'-O-methyluridine-3'-phosphate
  modified_base 17: mod_base = OTHER; note = 2'-O-methylcytidine-3'-phosphate
  modified_base 18: mod_base = OTHER; note = 2'-O-methyladenosine-3'-phosphate
  modified_base 19: mod_base = OTHER; note = 2'-O-methyladenosine-3'-phosphate
  modified_base 20: mod_base = OTHER; note = 2'-O-methyladenosine-3'-phosphate
  modified_base 21: mod_base = OTHER; note = 2'-O-methyladenosine
cattaaatatgcccttcaaaa

SEQ ID NO: 3691 - RNA, 21 nt, synthetic construct
  source 1..21: mol_type = other RNA
  modified_base 1: mod_base = OTHER; note = 2'-O-methyladenosine-3'-phosphate
  modified_base 2: mod_base = OTHER; note = 2'-O-methyluridine-3'-phosphate
  modified_base 3: mod_base = OTHER; note = 2'-O-methyluridine-3'-phosphate
  modified_base 4: mod_base = OTHER; note = 2'-O-methyladenosine-3'-phosphate
  modified_base 5: mod_base = OTHER; note = 2'-O-methyladenosine-3'-phosphate
  modified_base 6: mod_base = OTHER; note = 2'-O-methyladenosine-3'-phosphate
  modified_base 7: mod_base = OTHER; note = 2'-deoxy-2'-fluorouridine-3'-phosphate
  modified_base 8: mod_base = OTHER; note = 2'-O-methyladenosine-3'-phosphate
  modified_base 9: mod_base = OTHER; note = 2'-deoxy-2'-fluorouridine-3'-phosphate
  modified_base 10: mod_base = OTHER; note = 2'-deoxy-2'-fluoroguanosine-3'-phosphate
  modified_base 11: mod_base = OTHER; note = 2'-deoxy-2'-fluorocytidine-3'-phosphate
  modified_base 12: mod_base = OTHER; note = 2'-O-methylcytidine-3'-phosphate
  modified_base 13: mod_base = OTHER; note = 2'-O-methylcytidine-3'-phosphate
  modified_base 14: mod_base = OTHER; note = 2'-O-methyluridine-3'-phosphate
  modified_base 15: mod_base = OTHER; note = 2'-O-methyluridine-3'-phosphate
  modified_base 16: mod_base = OTHER; note = 2'-O-methylcytidine-3'-phosphate
  modified_base 17: mod_base = OTHER; note = 2'-O-methyladenosine-3'-phosphate
  modified_base 18: mod_base = OTHER; note = 2'-O-methyladenosine-3'-phosphate
  modified_base 19: mod_base = OTHER; note = 2'-O-methyladenosine-3'-phosphate
  modified_base 20: mod_base = OTHER; note = 2'-O-methyluridine-3'-phosphate
  modified_base 21: mod_base = OTHER; note = 2'-O-methyladenosine
attaaatatgcccttcaaata

SEQ ID NO: 3692 - RNA, 21 nt, synthetic construct
  source 1..21: mol_type = other RNA
  modified_base 1: mod_base = OTHER; note = 2'-O-methyluridine-3'-phosphate
  modified_base 2: mod_base = OTHER; note = 2'-O-methyluridine-3'-phosphate
  modified_base 3: mod_base = OTHER; note = 2'-O-methyladenosine-3'-phosphate
  modified_base 4: mod_base = OTHER; note = 2'-O-methyladenosine-3'-phosphate
  modified_base 5: mod_base = OTHER; note = 2'-O-methyladenosine-3'-phosphate
  modified_base 6: mod_base = OTHER; note = 2'-O-methyluridine-3'-phosphate
  modified_base 7: mod_base = OTHER; note = 2'-deoxy-2'-fluoroadenosine-3'-phosphate
  modified_base 8: mod_base = OTHER; note = 2'-O-methyluridine-3'-phosphate
  modified_base 9: mod_base = OTHER; note = 2'-deoxy-2'-fluoroguanosine-3'-phosphate
  modified_base 10: mod_base = OTHER; note = 2'-deoxy-2'-fluorocytidine-3'-phosphate
  modified_base 11: mod_base = OTHER; note = 2'-deoxy-2'-fluorocytidine-3'-phosphate
  modified_base 12: mod_base = OTHER; note = 2'-O-methylcytidine-3'-phosphate
  modified_base 13: mod_base = OTHER; note = 2'-O-methyluridine-3'-phosphate
  modified_base 14: mod_base = OTHER; note = 2'-O-methyluridine-3'-phosphate
  modified_base 15: mod_base = OTHER; note = 2'-O-methylcytidine-3'-phosphate
  modified_base 16: mod_base = OTHER; note = 2'-O-methyladenosine-3'-phosphate
  modified_base 17: mod_base = OTHER; note = 2'-O-methyladenosine-3'-phosphate
  modified_base 18: mod_base = OTHER; note = 2'-O-methyladenosine-3'-phosphate
  modified_base 19: mod_base = OTHER; note = 2'-O-methyluridine-3'-phosphate
  modified_base 20: mod_base = OTHER; note = 2'-O-methylcytidine-3'-phosphate
  modified_base 21: mod_base = OTHER; note = 2'-O-methyladenosine
ttaaatatgcccttcaaatca

SEQ ID NO: 3693 - RNA, 21 nt, synthetic construct
  source 1..21: mol_type = other RNA
  modified_base 1: mod_base = OTHER; note = 2'-O-methyluridine-3'-phosphate
  modified_base 2: mod_base = OTHER; note = 2'-O-methyladenosine-3'-phosphate
  modified_base 3: mod_base = OTHER; note = 2'-O-methyladenosine-3'-phosphate
  modified_base 4: mod_base = OTHER; note = 2'-O-methyladenosine-3'-phosphate
  modified_base 5: mod_base = OTHER; note = 2'-O-methyluridine-3'-phosphate
  modified_base 6: mod_base = OTHER; note = 2'-O-methyladenosine-3'-phosphate
  modified_base 7: mod_base = OTHER; note = 2'-deoxy-2'-fluorouridine-3'-phosphate
  modified_base 8: mod_base = OTHER; note = 2'-O-methylguanosine-3'-phosphate
  modified_base 9: mod_base = OTHER; note = 2'-deoxy-2'-fluorocytidine-3'-phosphate
  modified_base 10: mod_base = OTHER; note = 2'-deoxy-2'-fluorocytidine-3'-phosphate
  modified_base 11: mod_base = OTHER; note = 2'-deoxy-2'-fluorocytidine-3'-phosphate
  modified_base 12: mod_base = OTHER; note = 2'-O-methyluridine-3'-phosphate
  modified_base 13: mod_base = OTHER; note = 2'-O-methyluridine-3'-phosphate
  modified_base 14: mod_base = OTHER; note = 2'-O-methylcytidine-3'-phosphate
  modified_base 15: mod_base = OTHER; note = 2'-O-methyladenosine-3'-phosphate
  modified_base 16: mod_base = OTHER; note = 2'-O-methyladenosine-3'-phosphate
  modified_base 17: mod_base = OTHER; note = 2'-O-methyladenosine-3'-phosphate
  modified_base 18: mod_base = OTHER; note = 2'-O-methyluridine-3'-phosphate
  modified_base 19: mod_base = OTHER; note = 2'-O-methylcytidine-3'-phosphate
  modified_base 20: mod_base = OTHER; note = 2'-O-methyluridine-3'-phosphate
  modified_base 21: mod_base = OTHER; note = 2'-O-methyladenosine
taaatatgcccttcaaatcta

SEQ ID NO: 3694 - RNA, 21 nt, synthetic construct
  source 1..21: mol_type = other RNA
  modified_base 1: mod_base = OTHER; note = 2'-O-methylguanosine-3'-phosphate
  modified_base 2: mod_base = OTHER; note = 2'-O-methylcytidine-3'-phosphate
  modified_base 3: mod_base = OTHER; note = 2'-O-methylcytidine-3'-phosphate
  modified_base 4: mod_base = OTHER; note = 2'-O-methylcytidine-3'-phosphate
  modified_base 5: mod_base = OTHER; note = 2'-O-methyluridine-3'-phosphate
  modified_base 6: mod_base = OTHER; note = 2'-O-methyluridine-3'-phosphate
  modified_base 7: mod_base = OTHER; note = 2'-deoxy-2'-fluorocytidine-3'-phosphate
  modified_base 8: mod_base = OTHER; note = 2'-O-methyladenosine-3'-phosphate
  modified_base 9: mod_base = OTHER; note = 2'-deoxy-2'-fluoroadenosine-3'-phosphate
  modified_base 10: mod_base = OTHER; note = 2'-deoxy-2'-fluoroadenosine-3'-phosphate
  modified_base 11: mod_base = OTHER; note = 2'-deoxy-2'-fluorouridine-3'-phosphate
  modified_base 12: mod_base = OTHER; note = 2'-O-methylcytidine-3'-phosphate
  modified_base 13: mod_base = OTHER; note = 2'-O-methyluridine-3'-phosphate
  modified_base 14: mod_base = OTHER; note = 2'-O-methyladenosine-3'-phosphate
  modified_base 15: mod_base = OTHER; note = 2'-O-methyluridine-3'-phosphate
  modified_base 16: mod_base = OTHER; note = 2'-O-methyladenosine-3'-phosphate
  modified_base 17: mod_base = OTHER; note = 2'-O-methyladenosine-3'-phosphate
  modified_base 18: mod_base = OTHER; note = 2'-O-methyluridine-3'-phosphate
  modified_base 19: mod_base = OTHER; note = 2'-O-methyluridine-3'-phosphate
  modified_base 20: mod_base = OTHER; note = 2'-O-methyluridine-3'-phosphate
  modified_base 21: mod_base = OTHER; note = 2'-O-methyladenosine
gcccttcaaatctataattta

SEQ ID NO: 3695 - RNA, 21 nt, synthetic construct
  source 1..21: mol_type = other RNA
  modified_base 1: mod_base = OTHER; note = 2'-O-methylcytidine-3'-phosphate
  modified_base 2: mod_base = OTHER; note = 2'-O-methylcytidine-3'-phosphate
  modified_base 3: mod_base = OTHER; note = 2'-O-methylcytidine-3'-phosphate
  modified_base 4: mod_base = OTHER; note = 2'-O-methyluridine-3'-phosphate
  modified_base 5: mod_base = OTHER; note = 2'-O-methyluridine-3'-phosphate
  modified_base 6: mod_base = OTHER; note = 2'-O-methylcytidine-3'-phosphate
  modified_base 7: mod_base = OTHER; note = 2'-deoxy-2'-fluoroadenosine-3'-phosphate
  modified_base 8: mod_base = OTHER; note = 2'-O-methyladenosine-3'-phosphate
  modified_base 9: mod_base = OTHER; note = 2'-deoxy-2'-fluoroadenosine-3'-phosphate
  modified_base 10: mod_base = OTHER; note = 2'-deoxy-2'-fluorouridine-3'-phosphate
  modified_base 11: mod_base = OTHER; note = 2'-deoxy-2'-fluorocytidine-3'-phosphate
  modified_base 12: mod_base = OTHER; note = 2'-O-methyluridine-3'-phosphate
  modified_base 13: mod_base = OTHER; note = 2'-O-methyladenosine-3'-phosphate
  modified_base 14: mod_base = OTHER; note = 2'-O-methyluridine-3'-phosphate
  modified_base 15: mod_base = OTHER; note = 2'-O-methyladenosine-3'-phosphate
  modified_base 16: mod_base = OTHER; note = 2'-O-methyladenosine-3'-phosphate
  modified_base 17: mod_base = OTHER; note = 2'-O-methyluridine-3'-phosphate
  modified_base 18: mod_base = OTHER; note = 2'-O-methyluridine-3'-phosphate
  modified_base 19: mod_base = OTHER; note = 2'-O-methyluridine-3'-phosphate
  modified_base 20: mod_base = OTHER; note = 2'-O-methyluridine-3'-phosphate
  modified_base 21: mod_base = OTHER; note = 2'-O-methyladenosine
cccttcaaatctataatttta

SEQ ID NO: 3696 - RNA, 21 nt, synthetic construct
  source 1..21: mol_type = other RNA
  modified_base 1: mod_base = OTHER; note = 2'-O-methyladenosine-3'-phosphate
  modified_base 2: mod_base = OTHER; note = 2'-O-methyluridine-3'-phosphate
  modified_base 3: mod_base = OTHER; note = 2'-O-methyluridine-3'-phosphate
  modified_base 4: mod_base = OTHER; note = 2'-O-methyluridine-3'-phosphate
  modified_base 5: mod_base = OTHER; note = 2'-O-methyluridine-3'-phosphate
  modified_base 6: mod_base = OTHER; note = 2'-O-methyladenosine-3'-phosphate
  modified_base 7: mod_base = OTHER; note = 2'-deoxy-2'-fluorocytidine-3'-phosphate
  modified_base 8: mod_base = OTHER; note = 2'-O-methyluridine-3'-phosphate
  modified_base 9: mod_base = OTHER; note = 2'-deoxy-2'-fluorouridine-3'-phosphate
  modified_base 10: mod_base = OTHER; note = 2'-deoxy-2'-fluorouridine-3'-phosphate
  modified_base 11: mod_base = OTHER; note = 2'-deoxy-2'-fluoroguanosine-3'-phosphate
  modified_base 12: mod_base = OTHER; note = 2'-O-methylguanosine-3'-phosphate
  modified_base 13: mod_base = OTHER; note = 2'-O-methyluridine-3'-phosphate
  modified_base 14: mod_base = OTHER; note = 2'-O-methyladenosine-3'-phosphate
  modified_base 15: mod_base = OTHER; note = 2'-O-methyladenosine-3'-phosphate
  modified_base 16: mod_base = OTHER; note = 2'-O-methyladenosine-3'-phosphate
  modified_base 17: mod_base = OTHER; note = 2'-O-methylcytidine-3'-phosphate
  modified_base 18: mod_base = OTHER; note = 2'-O-methylguanosine-3'-phosphate
  modified_base 19: mod_base = OTHER; note = 2'-O-methyladenosine-3'-phosphate
  modified_base 20: mod_base = OTHER; note = 2'-O-methylguanosine-3'-phosphate
  modified_base 21: mod_base = OTHER; note = 2'-O-methyladenosine
attttactttggtaaacgaga

SEQ ID NO: 3697 - RNA, 21 nt, synthetic construct
  source 1..21: mol_type = other RNA
  modified_base 1: mod_base = OTHER; note = 2'-O-methyluridine-3'-phosphate
  modified_base 2: mod_base = OTHER; note = 2'-O-methyluridine-3'-phosphate
  modified_base 3: mod_base = OTHER; note = 2'-O-methyluridine-3'-phosphate
  modified_base 4: mod_base = OTHER; note = 2'-O-methyluridine-3'-phosphate
  modified_base 5: mod_base = OTHER; note = 2'-O-methyladenosine-3'-phosphate
  modified_base 6: mod_base = OTHER; note = 2'-O-methylcytidine-3'-phosphate
  modified_base 7: mod_base = OTHER; note = 2'-deoxy-2'-fluorouridine-3'-phosphate
  modified_base 8: mod_base = OTHER; note = 2'-O-methyluridine-3'-phosphate
  modified_base 9: mod_base = OTHER; note = 2'-deoxy-2'-fluorouridine-3'-phosphate
  modified_base 10: mod_base = OTHER; note = 2'-deoxy-2'-fluoroguanosine-3'-phosphate
  modified_base 11: mod_base = OTHER; note = 2'-deoxy-2'-fluoroguanosine-3'-phosphate
  modified_base 12: mod_base = OTHER; note = 2'-O-methyluridine-3'-phosphate
  modified_base 13: mod_base = OTHER; note = 2'-O-methyladenosine-3'-phosphate
  modified_base 14: mod_base = OTHER; note = 2'-O-methyladenosine-3'-phosphate
  modified_base 15: mod_base = OTHER; note = 2'-O-methyladenosine-3'-phosphate
  modified_base 16: mod_base = OTHER; note = 2'-O-methylcytidine-3'-phosphate
  modified_base 17: mod_base = OTHER; note = 2'-O-methylguanosine-3'-phosphate
  modified_base 18: mod_base = OTHER; note = 2'-O-methyladenosine-3'-phosphate
  modified_base 19: mod_base = OTHER; note = 2'-O-methylguanosine-3'-phosphate
  modified_base 20: mod_base = OTHER; note = 2'-O-methyladenosine-3'-phosphate
  modified_base 21: mod_base = OTHER; note = 2'-O-methyladenosine
ttttactttggtaaacgagaa

SEQ ID NO: 3698 - RNA, 21 nt, synthetic construct
  source 1..21: mol_type = other RNA
  modified_base 1: mod_base = OTHER; note = 2'-O-methyluridine-3'-phosphate
  modified_base 2: mod_base = OTHER; note = 2'-O-methyluridine-3'-phosphate
  modified_base 3: mod_base = OTHER; note = 2'-O-methyluridine-3'-phosphate
  modified_base 4: mod_base = OTHER; note = 2'-O-methyladenosine-3'-phosphate
  modified_base 5: mod_base = OTHER; note = 2'-O-methylcytidine-3'-phosphate
  modified_base 6: mod_base = OTHER; note = 2'-O-methyluridine-3'-phosphate
  modified_base 7: mod_base = OTHER; note = 2'-deoxy-2'-fluorouridine-3'-phosphate
  modified_base 8: mod_base = OTHER; note = 2'-O-methyluridine-3'-phosphate
  modified_base 9: mod_base = OTHER; note = 2'-deoxy-2'-fluoroguanosine-3'-phosphate
  modified_base 10: mod_base = OTHER; note = 2'-deoxy-2'-fluoroguanosine-3'-phosphate
  modified_base 11: mod_base = OTHER; note = 2'-deoxy-2'-fluorouridine-3'-phosphate
  modified_base 12: mod_base = OTHER; note = 2'-O-methyladenosine-3'-phosphate
  modified_base 13: mod_base = OTHER; note = 2'-O-methyladenosine-3'-phosphate
  modified_base 14: mod_base = OTHER; note = 2'-O-methyladenosine-3'-phosphate
  modified_base 15: mod_base = OTHER; note = 2'-O-methylcytidine-3'-phosphate
  modified_base 16: mod_base = OTHER; note = 2'-O-methylguanosine-3'-phosphate
  modified_base 17: mod_base = OTHER; note = 2'-O-methyladenosine-3'-phosphate
  modified_base 18: mod_base = OTHER; note = 2'-O-methylguanosine-3'-phosphate
  modified_base 19: mod_base = OTHER; note = 2'-O-methyladenosine-3'-phosphate
  modified_base 20: mod_base = OTHER; note = 2'-O-methyluridine-3'-phosphate
  modified_base 21: mod_base = OTHER; note = 2'-O-methyladenosine
tttactttggtaaacgagata

SEQ ID NO: 3699 - RNA, 21 nt, synthetic construct
  source 1..21: mol_type = other RNA
  modified_base 1: mod_base = OTHER; note = 2'-O-methyluridine-3'-phosphate
  modified_base 2: mod_base = OTHER; note = 2'-O-methyluridine-3'-phosphate
  modified_base 3: mod_base = OTHER; note = 2'-O-methyladenosine-3'-phosphate
  modified_base 4: mod_base = OTHER; note = 2'-O-methylcytidine-3'-phosphate
  modified_base 5: mod_base = OTHER; note = 2'-O-methyluridine-3'-phosphate
  modified_base 6: mod_base = OTHER; note = 2'-O-methyluridine-3'-phosphate
  modified_base 7: mod_base = OTHER; note = 2'-deoxy-2'-fluorouridine-3'-phosphate
  modified_base 8: mod_base = OTHER; note = 2'-O-methylguanosine-3'-phosphate
  modified_base 9: mod_base = OTHER; note = 2'-deoxy-2'-fluoroguanosine-3'-phosphate
  modified_base 10: mod_base = OTHER; note = 2'-deoxy-2'-fluorouridine-3'-phosphate
  modified_base 11: mod_base = OTHER; note = 2'-deoxy-2'-fluoroadenosine-3'-phosphate
  modified_base 12: mod_base = OTHER; note = 2'-O-methyladenosine-3'-phosphate
  modified_base 13: mod_base = OTHER; note = 2'-O-methyladenosine-3'-phosphate
  modified_base 14: mod_base = OTHER; note = 2'-O-methylcytidine-3'-phosphate
  modified_base 15: mod_base = OTHER; note = 2'-O-methylguanosine-3'-phosphate
  modified_base 16: mod_base = OTHER; note = 2'-O-methyladenosine-3'-phosphate
  modified_base 17: mod_base = OTHER; note = 2'-O-methylguanosine-3'-phosphate
  modified_base 18: mod_base = OTHER; note = 2'-O-methyladenosine-3'-phosphate
  modified_base 19: mod_base = OTHER; note = 2'-O-methyluridine-3'-phosphate
  modified_base 20: mod_base = OTHER; note = 2'-O-methyluridine-3'-phosphate
  modified_base 21: mod_base = OTHER; note = 2'-O-methyladenosine
ttactttggtaaacgagatta

SEQ ID NO: 3700 - RNA, 21 nt, synthetic construct
  source 1..21: mol_type = other RNA
  modified_base 1: mod_base = OTHER; note = 2'-O-methyluridine-3'-phosphate
  modified_base 2: mod_base = OTHER; note = 2'-O-methyladenosine-3'-phosphate
  modified_base 3: mod_base = OTHER; note = 2'-O-methylcytidine-3'-phosphate
  modified_base 4: mod_base = OTHER; note = 2'-O-methyluridine-3'-phosphate
  modified_base 5: mod_base = OTHER; note = 2'-O-methyluridine-3'-phosphate
  modified_base 6: mod_base = OTHER; note = 2'-O-methyluridine-3'-phosphate
  modified_base 7: mod_base = OTHER; note = 2'-deoxy-2'-fluoroguanosine-3'-phosphate
  modified_base 8: mod_base = OTHER; note = 2'-O-methylguanosine-3'-phosphate
  modified_base 9: mod_base = OTHER; note = 2'-deoxy-2'-fluorouridine-3'-phosphate
  modified_base 10: mod_base = OTHER; note = 2'-deoxy-2'-fluoroadenosine-3'-phosphate
  modified_base 11: mod_base = OTHER; note = 2'-deoxy-2'-fluoroadenosine-3'-phosphate
  modified_base 12: mod_base = OTHER; note = 2'-O-methyladenosine-3'-phosphate
  modified_base 13: mod_base = OTHER; note = 2'-O-methylcytidine-3'-phosphate
  modified_base 14: mod_base = OTHER; note = 2'-O-methylguanosine-3'-phosphate
  modified_base 15: mod_base = OTHER; note = 2'-O-methyladenosine-3'-phosphate
  modified_base 16: mod_base = OTHER; note = 2'-O-methylguanosine-3'-phosphate
  modified_base 17: mod_base = OTHER; note = 2'-O-methyladenosine-3'-phosphate
  modified_base 18: mod_base = OTHER; note = 2'-O-methyluridine-3'-phosphate
  modified_base 19: mod_base = OTHER; note = 2'-O-methyluridine-3'-phosphate
  modified_base 20: mod_base = OTHER; note = 2'-O-methyluridine-3'-phosphate
  modified_base 21: mod_base = OTHER; note = 2'-O-methyladenosine
tactttggtaaacgagattta

SEQ ID NO: 3701 - RNA, 21 nt, synthetic construct
  source 1..21: mol_type = other RNA
  modified_base 1: mod_base = OTHER; note = 2'-O-methylcytidine-3'-phosphate
  modified_base 2: mod_base = OTHER; note = 2'-O-methyluridine-3'-phosphate
  modified_base 3: mod_base = OTHER; note = 2'-O-methyluridine-3'-phosphate
  modified_base 4: mod_base = OTHER; note = 2'-O-methyluridine-3'-phosphate
  modified_base 5: mod_base = OTHER; note = 2'-O-methylguanosine-3'-phosphate
  modified_base 6: mod_base = OTHER; note = 2'-O-methylguanosine-3'-phosphate
  modified_base 7: mod_base = OTHER; note = 2'-deoxy-2'-fluorouridine-3'-phosphate
  modified_base 8: mod_base = OTHER; note = 2'-O-methyladenosine-3'-phosphate
  modified_base 9: mod_base = OTHER; note = 2'-deoxy-2'-fluoroadenosine-3'-phosphate
  modified_base 10: mod_base = OTHER; note = 2'-deoxy-2'-fluoroadenosine-3'-phosphate
  modified_base 11: mod_base = OTHER; note = 2'-deoxy-2'-fluorocytidine-3'-phosphate
  modified_base 12: mod_base = OTHER; note = 2'-O-methylguanosine-3'-phosphate
  modified_base 13: mod_base = OTHER; note = 2'-O-methyladenosine-3'-phosphate
  modified_base 14: mod_base = OTHER; note = 2'-O-methylguanosine-3'-phosphate
  modified_base 15: mod_base = OTHER; note = 2'-O-methyladenosine-3'-phosphate
  modified_base 16: mod_base = OTHER; note = 2'-O-methyluridine-3'-phosphate
  modified_base 17: mod_base = OTHER; note = 2'-O-methyluridine-3'-phosphate
  modified_base 18: mod_base = OTHER; note = 2'-O-methyluridine-3'-phosphate
  modified_base 19: mod_base = OTHER; note = 2'-O-methyladenosine-3'-phosphate
  modified_base 20: mod_base = OTHER; note = 2'-O-methyladenosine-3'-phosphate
  modified_base 21: mod_base = OTHER; note = 2'-O-methyladenosine
ctttggtaaacgagatttaaa

SEQ ID NO: 3702 - RNA, 21 nt, synthetic construct
  source 1..21: mol_type = other RNA
  modified_base 1: mod_base = OTHER; note = 2'-O-methyluridine-3'-phosphate
  modified_base 2: mod_base = OTHER; note = 2'-O-methyluridine-3'-phosphate
  modified_base 3: mod_base = OTHER; note = 2'-O-methylguanosine-3'-phosphate
  modified_base 4: mod_base = OTHER; note = 2'-O-methylguanosine-3'-phosphate
  modified_base 5: mod_base = OTHER; note = 2'-O-methyluridine-3'-phosphate
  modified_base 6: mod_base = OTHER; note = 2'-O-methyladenosine-3'-phosphate
  modified_base 7: mod_base = OTHER; note = 2'-deoxy-2'-fluoroadenosine-3'-phosphate
  modified_base 8: mod_base = OTHER; note = 2'-O-methyladenosine-3'-phosphate
  modified_base 9: mod_base = OTHER; note = 2'-deoxy-2'-fluorocytidine-3'-phosphate
  modified_base 10: mod_base = OTHER; note = 2'-deoxy-2'-fluoroguanosine-3'-phosphate
  modified_base 11: mod_base = OTHER; note = 2'-deoxy-2'-fluoroadenosine-3'-phosphate
  modified_base 12: mod_base = OTHER; note = 2'-O-methylguanosine-3'-phosphate
  modified_base 13: mod_base = OTHER; note = 2'-O-methyladenosine-3'-phosphate
  modified_base 14: mod_base = OTHER; note = 2'-O-methyluridine-3'-phosphate
  modified_base 15: mod_base = OTHER; note = 2'-O-methyluridine-3'-phosphate
  modified_base 16: mod_base = OTHER; note = 2'-O-methyluridine-3'-phosphate
  modified_base 17: mod_base = OTHER; note = 2'-O-methyladenosine-3'-phosphate
  modified_base 18: mod_base = OTHER; note = 2'-O-methyladenosine-3'-phosphate
  modified_base 19: mod_base = OTHER; note = 2'-O-methylcytidine-3'-phosphate
  modified_base 20: mod_base = OTHER; note = 2'-O-methyladenosine-3'-phosphate
  modified_base 21: mod_base = OTHER; note = 2'-O-methyladenosine
ttggtaaacgagatttaacaa

SEQ ID NO: 3703 - RNA, 21 nt, synthetic construct
  source 1..21: mol_type = other RNA
  modified_base 1: mod_base = OTHER; note = 2'-O-methylguanosine-3'-phosphate
  modified_base 2: mod_base = OTHER; note = 2'-O-methylguanosine-3'-phosphate
  modified_base 3: mod_base = OTHER; note = 2'-O-methyluridine-3'-phosphate
  modified_base 4: mod_base = OTHER; note = 2'-O-methyladenosine-3'-phosphate
  modified_base 5: mod_base = OTHER; note = 2'-O-methyladenosine-3'-phosphate
  modified_base 6: mod_base = OTHER; note = 2'-O-methyladenosine-3'-phosphate
  modified_base 7: mod_base = OTHER; note = 2'-deoxy-2'-fluorocytidine-3'-phosphate
  modified_base 8: mod_base = OTHER; note = 2'-O-methylguanosine-3'-phosphate
  modified_base 9: mod_base = OTHER; note = 2'-deoxy-2'-fluoroadenosine-3'-phosphate
  modified_base 10: mod_base = OTHER; note = 2'-deoxy-2'-fluoroguanosine-3'-phosphate
  modified_base 11: mod_base = OTHER; note = 2'-deoxy-2'-fluoroadenosine-3'-phosphate
  modified_base 12: mod_base = OTHER; note = 2'-O-methyluridine-3'-phosphate
  modified_base 13: mod_base = OTHER; note = 2'-O-methyluridine-3'-phosphate
  modified_base 14: mod_base = OTHER; note = 2'-O-methyluridine-3'-phosphate
  modified_base 15: mod_base = OTHER; note = 2'-O-methyladenosine-3'-phosphate
  modified_base 16: mod_base = OTHER; note = 2'-O-methyladenosine-3'-phosphate
  modified_base 17: mod_base = OTHER; note = 2'-O-methylcytidine-3'-phosphate
  modified_base 18: mod_base = OTHER; note = 2'-O-methyladenosine-3'-phosphate
  modified_base 19: mod_base = OTHER; note = 2'-O-methyluridine-3'-phosphate
  modified_base 20: mod_base = OTHER; note = 2'-O-methylguanosine-3'-phosphate
  modified_base 21: mod_base = OTHER; note = 2'-O-methyladenosine
ggtaaacgagatttaacatga

SEQ ID NO: 3704 - RNA, 21 nt, synthetic construct
  source 1..21: mol_type = other RNA
  modified_base 1: mod_base = OTHER; note = 2'-O-methylguanosine-3'-phosphate
  modified_base 2: mod_base = OTHER; note = 2'-O-methyladenosine-3'-phosphate
  modified_base 3: mod_base = OTHER; note = 2'-O-methylguanosine-3'-phosphate
  modified_base 4: mod_base = OTHER; note = 2'-O-methyladenosine-3'-phosphate
  modified_base 5: mod_base = OTHER; note = 2'-O-methyluridine-3'-phosphate
  modified_base 6: mod_base = OTHER; note = 2'-O-methyluridine-3'-phosphate
  modified_base 7: mod_base = OTHER; note = 2'-deoxy-2'-fluorouridine-3'-phosphate
  modified_base 8: mod_base = OTHER; note = 2'-O-methyladenosine-3'-phosphate
  modified_base 9: mod_base = OTHER; note = 2'-deoxy-2'-fluoroadenosine-3'-phosphate
  modified_base 10: mod_base = OTHER; note = 2'-deoxy-2'-fluorocytidine-3'-phosphate
  modified_base 11: mod_base = OTHER; note = 2'-deoxy-2'-fluoroadenosine-3'-phosphate
  modified_base 12: mod_base = OTHER; note = 2'-O-methyluridine-3'-phosphate
  modified_base 13: mod_base = OTHER; note = 2'-O-methylguanosine-3'-phosphate
  modified_base 14: mod_base = OTHER; note = 2'-O-methyladenosine-3'-phosphate
  modified_base 15: mod_base = OTHER; note = 2'-O-methyluridine-3'-phosphate
  modified_base 16: mod_base = OTHER; note = 2'-O-methylguanosine-3'-phosphate
  modified_base 17: mod_base = OTHER; note = 2'-O-methyluridine-3'-phosphate
  modified_base 18: mod_base = OTHER; note = 2'-O-methylcytidine-3'-phosphate
  modified_base 19: mod_base = OTHER; note = 2'-O-methyluridine-3'-phosphate
  modified_base 20: mod_base = OTHER; note = 2'-O-methyluridine-3'-phosphate
  modified_base 21: mod_base = OTHER; note = 2'-O-methyladenosine
gagatttaacatgatgtctta

SEQ ID NO: 3705 - RNA, 21 nt, synthetic construct
  source 1..21: mol_type = other RNA
  modified_base 1: mod_base = OTHER; note = 2'-O-methylguanosine-3'-phosphate
  modified_base 2: mod_base = OTHER; note = 2'-O-methyluridine-3'-phosphate
  modified_base 3: mod_base = OTHER; note = 2'-O-methylcytidine-3'-phosphate
  modified_base 4: mod_base = OTHER; note = 2'-O-methyluridine-3'-phosphate
  modified_base 5: mod_base = OTHER; note = 2'-O-methyluridine-3'-phosphate
  modified_base 6: mod_base = OTHER; note = 2'-O-methyluridine-3'-phosphate
  modified_base 7: mod_base = OTHER; note = 2'-deoxy-2'-fluorouridine-3'-phosphate
  modified_base 8: mod_base = OTHER; note = 2'-O-methyladenosine-3'-phosphate
  modified_base 9: mod_base = OTHER; note = 2'-deoxy-2'-fluorouridine-3'-phosphate
  modified_base 10: mod_base = OTHER; note = 2'-deoxy-2'-fluoroguanosine-3'-phosphate
  modified_base 11: mod_base = OTHER; note = 2'-deoxy-2'-fluorocytidine-3'-phosphate
  modified_base 12: mod_base = OTHER; note = 2'-O-methyluridine-3'-phosphate
  modified_base 13: mod_base = OTHER; note = 2'-O-methylcytidine-3'-phosphate
  modified_base 14: mod_base = OTHER; note = 2'-O-methylcytidine-3'-phosphate
  modified_base 15: mod_base = OTHER; note = 2'-O-methyluridine-3'-phosphate
  modified_base 16: mod_base = OTHER; note = 2'-O-methyladenosine-3'-phosphate
  modified_base 17: mod_base = OTHER; note = 2'-O-methyladenosine-3'-phosphate
  modified_base 18: mod_base = OTHER; note = 2'-O-methyladenosine-3'-phosphate
  modified_base 19: mod_base = OTHER; note = 2'-O-methyladenosine-3'-phosphate
  modified_base 20: mod_base = OTHER; note = 2'-O-methylcytidine-3'-phosphate
  modified_base 21: mod_base = OTHER; note = 2'-O-methyladenosine
gtcttttatgctcctaaaaca

SEQ ID NO: 3706 - RNA, 21 nt, synthetic construct
  source 1..21: mol_type = other RNA
  modified_base 1: mod_base = OTHER; note = 2'-O-methyluridine-3'-phosphate
  modified_base 2: mod_base = OTHER; note = 2'-O-methylcytidine-3'-phosphate
  modified_base 3: mod_base = OTHER; note = 2'-O-methyluridine-3'-phosphate
  modified_base 4: mod_base = OTHER; note = 2'-O-methyluridine-3'-phosphate
  modified_base 5: mod_base = OTHER; note = 2'-O-methyluridine-3'-phosphate
  modified_base 6: mod_base = OTHER; note = 2'-O-methyluridine-3'-phosphate
  modified_base 7: mod_base = OTHER; note = 2'-deoxy-2'-fluorouridine-3'-phosphate
  modified_base 8: mod_base = OTHER; note = 2'-O-methyluridine-3'-phosphate
  modified_base 9: mod_base = OTHER; note = 2'-deoxy-2'-fluorocytidine-3'-phosphate
  modified_base 10: mod_base = OTHER; note = 2'-deoxy-2'-fluoroadenosine-3'-phosphate
  modified_base 11: mod_base = OTHER; note = 2'-deoxy-2'-fluoroadenosine-3'-phosphate
  modified_base 12: mod_base = OTHER; note = 2'-O-methyladenosine-3'-phosphate
  modified_base 13: mod_base = OTHER; note = 2'-O-methylcytidine-3'-phosphate
  modified_base 14: mod_base = OTHER; note = 2'-O-methyluridine-3'-phosphate
  modified_base 15: mod_base = OTHER; note = 2'-O-methylcytidine-3'-phosphate
  modified_base 16: mod_base = OTHER; note = 2'-O-methylcytidine-3'-phosphate
  modified_base 17: mod_base = OTHER; note = 2'-O-methyladenosine-3'-phosphate
  modified_base 18: mod_base = OTHER; note = 2'-O-methyluridine-3'-phosphate
  modified_base 19: mod_base = OTHER; note = 2'-O-methyluridine-3'-phosphate
  modified_base 20: mod_base = OTHER; note = 2'-O-methylcytidine-3'-phosphate
  modified_base 21: mod_base = OTHER; note = 2'-O-methyladenosine
tcttttttcaaactccattca

SEQ ID NO: 3707 - RNA, 21 nt, synthetic construct
  source 1..21: mol_type = other RNA
  modified_base 1: mod_base = OTHER; note = 2'-O-methylcytidine-3'-phosphate
  modified_base 2: mod_base = OTHER; note = 2'-O-methyluridine-3'-phosphate
  modified_base 3: mod_base = OTHER; note = 2'-O-methyluridine-3'-phosphate
  modified_base 4: mod_base = OTHER; note = 2'-O-methyluridine-3'-phosphate
  modified_base 5: mod_base = OTHER; note = 2'-O-methyluridine-3'-phosphate
  modified_base 6: mod_base = OTHER; note = 2'-O-methyluridine-3'-phosphate
  modified_base 7: mod_base = OTHER; note = 2'-deoxy-2'-fluorouridine-3'-phosphate
  modified_base 8: mod_base = OTHER; note = 2'-O-methylcytidine-3'-phosphate
  modified_base 9: mod_base = OTHER; note = 2'-deoxy-2'-fluoroadenosine-3'-phosphate
  modified_base 10: mod_base = OTHER; note = 2'-deoxy-2'-fluoroadenosine-3'-phosphate
  modified_base 11: mod_base = OTHER; note = 2'-deoxy-2'-fluoroadenosine-3'-phosphate
  modified_base 12: mod_base = OTHER; note = 2'-O-methylcytidine-3'-phosphate
  modified_base 13: mod_base = OTHER; note = 2'-O-methyluridine-3'-phosphate
  modified_base 14: mod_base = OTHER; note = 2'-O-methylcytidine-3'-phosphate
  modified_base 15: mod_base = OTHER; note = 2'-O-methylcytidine-3'-phosphate
  modified_base 16: mod_base = OTHER; note = 2'-O-methyladenosine-3'-phosphate
  modified_base 17: mod_base = OTHER; note = 2'-O-methyluridine-3'-phosphate
  modified_base 18: mod_base = OTHER; note = 2'-O-methyluridine-3'-phosphate
  modified_base 19: mod_base = OTHER; note = 2'-O-methylcytidine-3'-phosphate
  modified_base 20: mod_base = OTHER; note = 2'-O-methylcytidine-3'-phosphate
  modified_base 21: mod_base = OTHER; note = 2'-O-methyladenosine
cttttttcaaactccattcca

SEQ ID NO: 3708 - RNA, 21 nt, synthetic construct
  source 1..21: mol_type = other RNA
  modified_base 1: mod_base = OTHER; note = 2'-O-methyluridine-3'-phosphate
  modified_base 2: mod_base = OTHER; note = 2'-O-methyluridine-3'-phosphate
  modified_base 3: mod_base = OTHER; note = 2'-O-methyluridine-3'-phosphate
  modified_base 4: mod_base = OTHER; note = 2'-O-methyluridine-3'-phosphate
  modified_base 5: mod_base = OTHER; note = 2'-O-methyluridine-3'-phosphate
  modified_base 6: mod_base = OTHER; note = 2'-O-methyluridine-3'-phosphate
  modified_base 7: mod_base = OTHER; note = 2'-deoxy-2'-fluorocytidine-3'-phosphate
  modified_base 8: mod_base = OTHER; note = 2'-O-methyladenosine-3'-phosphate
  modified_base 9: mod_base = OTHER; note = 2'-deoxy-2'-fluoroadenosine-3'-phosphate
  modified_base 10: mod_base = OTHER; note = 2'-deoxy-2'-fluoroadenosine-3'-phosphate
  modified_base 11: mod_base = OTHER; note = 2'-deoxy-2'-fluorocytidine-3'-phosphate
  modified_base 12: mod_base = OTHER; note = 2'-O-methyluridine-3'-phosphate
  modified_base 13: mod_base = OTHER; note = 2'-O-methylcytidine-3'-phosphate
  modified_base 14: mod_base = OTHER; note = 2'-O-methylcytidine-3'-phosphate
  modified_base 15: mod_base = OTHER; note = 2'-O-methyladenosine-3'-phosphate
  modified_base 16: mod_base = OTHER; note = 2'-O-methyluridine-3'-phosphate
  modified_base 17: mod_base = OTHER; note = 2'-O-methyluridine-3'-phosphate
  modified_base 18: mod_base = OTHER; note = 2'-O-methylcytidine-3'-phosphate
  modified_base 19: mod_base = OTHER; note = 2'-O-methylcytidine-3'-phosphate
  modified_base 20: mod_base = OTHER; note = 2'-O-methyluridine-3'-phosphate
  modified_base 21: mod_base = OTHER; note = 2'-O-methyladenosine
ttttttcaaactccattccta

SEQ ID NO: 3709 - RNA, 21 nt, synthetic construct
  source 1..21: mol_type = other RNA
  modified_base 1: mod_base = OTHER; note = 2'-O-methyluridine-3'-phosphate
  modified_base 2: mod_base = OTHER; note = 2'-O-methyluridine-3'-phosphate
  modified_base 3: mod_base = OTHER; note = 2'-O-methyluridine-3'-phosphate
  modified_base 4: mod_base = OTHER; note = 2'-O-methyluridine-3'-phosphate
  modified_base 5: mod_base = OTHER; note = 2'-O-methylcytidine-3'-phosphate
  modified_base 6: mod_base = OTHER; note = 2'-O-methyladenosine-3'-phosphate
  modified_base 7: mod_base = OTHER; note = 2'-deoxy-2'-fluoroadenosine-3'-phosphate
  modified_base 8: mod_base = OTHER; note = 2'-O-methyladenosine-3'-phosphate
  modified_base 9: mod_base = OTHER; note = 2'-deoxy-2'-fluorocytidine-3'-phosphate
  modified_base 10: mod_base = OTHER; note = 2'-deoxy-2'-fluorouridine-3'-phosphate
  modified_base 11: mod_base = OTHER; note = 2'-deoxy-2'-fluorocytidine-3'-phosphate
  modified_base 12: mod_base = OTHER; note = 2'-O-methylcytidine-3'-phosphate
  modified_base 13: mod_base = OTHER; note = 2'-O-methyladenosine-3'-phosphate
  modified_base 14: mod_base = OTHER; note = 2'-O-methyluridine-3'-phosphate
  modified_base 15: mod_base = OTHER; note = 2'-O-methyluridine-3'-phosphate
  modified_base 16: mod_base = OTHER; note = 2'-O-methylcytidine-3'-phosphate
  modified_base 17: mod_base = OTHER; note = 2'-O-methylcytidine-3'-phosphate
  modified_base 18: mod_base = OTHER; note = 2'-O-methyluridine-3'-phosphate
  modified_base 19: mod_base = OTHER; note = 2'-O-methyluridine-3'-phosphate
  modified_base 20: mod_base = OTHER; note = 2'-O-methyladenosine-3'-phosphate
  modified_base 21: mod_base = OTHER; note = 2'-O-methyladenosine
ttttcaaactccattccttaa

SEQ ID NO: 3710 - RNA, 21 nt, synthetic construct
  source 1..21: mol_type = other RNA
  modified_base 1: mod_base = OTHER; note = 2'-O-methyluridine-3'-phosphate
  modified_base 2: mod_base = OTHER; note = 2'-O-methyluridine-3'-phosphate
  modified_base 3: mod_base = OTHER; note = 2'-O-methyluridine-3'-phosphate
  modified_base 4: mod_base = OTHER; note = 2'-O-methylcytidine-3'-phosphate
  modified_base 5: mod_base = OTHER; note = 2'-O-methyladenosine-3'-phosphate
  modified_base 6: mod_base = OTHER; note = 2'-O-methyladenosine-3'-phosphate
  modified_base 7: mod_base = OTHER; note = 2'-deoxy-2'-fluoroadenosine-3'-phosphate
  modified_base 8: mod_base = OTHER; note = 2'-O-methylcytidine-3'-phosphate
  modified_base 9: mod_base = OTHER; note = 2'-deoxy-2'-fluorouridine-3'-phosphate
  modified_base 10: mod_base = OTHER; note = 2'-deoxy-2'-fluorocytidine-3'-phosphate
  modified_base 11: mod_base = OTHER; note = 2'-deoxy-2'-fluorocytidine-3'-phosphate
  modified_base 12: mod_base = OTHER; note = 2'-O-methyladenosine-3'-phosphate
  modified_base 13: mod_base = OTHER; note = 2'-O-methyluridine-3'-phosphate
  modified_base 14: mod_base = OTHER; note = 2'-O-methyluridine-3'-phosphate
  modified_base 15: mod_base = OTHER; note = 2'-O-methylcytidine-3'-phosphate
  modified_base 16: mod_base = OTHER; note = 2'-O-methylcytidine-3'-phosphate
  modified_base 17: mod_base = OTHER; note = 2'-O-methyluridine-3'-phosphate
  modified_base 18: mod_base = OTHER; note = 2'-O-methyluridine-3'-phosphate
  modified_base 19: mod_base = OTHER; note = 2'-O-methyladenosine-3'-phosphate
  modified_base 20: mod_base = OTHER; note = 2'-O-methylguanosine-3'-phosphate
  modified_base 21: mod_base = OTHER; note = 2'-O-methyladenosine
tttcaaactccattccttaga

SEQ ID NO: 3711 - RNA, 21 nt, synthetic construct
  source 1..21: mol_type = other RNA
  modified_base 1: mod_base = OTHER; note = 2'-O-methyluridine-3'-phosphate
  modified_base 2: mod_base = OTHER; note = 2'-O-methylcytidine-3'-phosphate
  modified_base 3: mod_base = OTHER; note = 2'-O-methyladenosine-3'-phosphate
  modified_base 4: mod_base = OTHER; note = 2'-O-methyladenosine-3'-phosphate
  modified_base 5: mod_base = OTHER; note = 2'-O-methyladenosine-3'-phosphate
  modified_base 6: mod_base = OTHER; note = 2'-O-methylcytidine-3'-phosphate
  modified_base 7: mod_base = OTHER; note = 2'-deoxy-2'-fluorouridine-3'-phosphate
  modified_base 8: mod_base = OTHER; note = 2'-O-methylcytidine-3'-phosphate
  modified_base 9: mod_base = OTHER; note = 2'-deoxy-2'-fluorocytidine-3'-phosphate
  modified_base 10: mod_base = OTHER; note = 2'-deoxy-2'-fluoroadenosine-3'-phosphate
  modified_base 11: mod_base = OTHER; note = 2'-deoxy-2'-fluorouridine-3'-phosphate
  modified_base 12: mod_base = OTHER; note = 2'-O-methyluridine-3'-phosphate
  modified_base 13: mod_base = OTHER; note = 2'-O-methylcytidine-3'-phosphate
  modified_base 14: mod_base = OTHER; note = 2'-O-methylcytidine-3'-phosphate
  modified_base 15: mod_base = OTHER; note = 2'-O-methyluridine-3'-phosphate
  modified_base 16: mod_base = OTHER; note = 2'-O-methyluridine-3'-phosphate
  modified_base 17: mod_base = OTHER; note = 2'-O-methyladenosine-3'-phosphate
  modified_base 18: mod_base = OTHER; note = 2'-O-methylguanosine-3'-phosphate
  modified_base 19: mod_base = OTHER; note = 2'-O-methyladenosine-3'-phosphate
  modified_base 20: mod_base = OTHER; note = 2'-O-methyladenosine-3'-phosphate
  modified_base 21: mod_base = OTHER; note = 2'-O-methyladenosine
tcaaactccattccttagaaa

SEQ ID NO: 3712 - RNA, 21 nt, synthetic construct
  source 1..21: mol_type = other RNA
  modified_base 1: mod_base = OTHER; note = 2'-O-methylcytidine-3'-phosphate
  modified_base 2: mod_base = OTHER; note = 2'-O-methyladenosine-3'-phosphate
  modified_base 3: mod_base = OTHER; note = 2'-O-methyladenosine-3'-phosphate
  modified_base 4: mod_base = OTHER; note = 2'-O-methyladenosine-3'-phosphate
  modified_base 5: mod_base = OTHER; note = 2'-O-methylcytidine-3'-phosphate
  modified_base 6: mod_base = OTHER; note = 2'-O-methyluridine-3'-phosphate
  modified_base 7: mod_base = OTHER; note = 2'-deoxy-2'-fluorocytidine-3'-phosphate
  modified_base 8: mod_base = OTHER; note = 2'-O-methylcytidine-3'-phosphate
  modified_base 9: mod_base = OTHER; note = 2'-deoxy-2'-fluoroadenosine-3'-phosphate
  modified_base 10: mod_base = OTHER; note = 2'-deoxy-2'-fluorouridine-3'-phosphate
  modified_base 11: mod_base = OTHER; note = 2'-deoxy-2'-fluorouridine-3'-phosphate
  modified_base 12: mod_base = OTHER; note = 2'-O-methylcytidine-3'-phosphate
  modified_base 13: mod_base = OTHER; note = 2'-O-methylcytidine-3'-phosphate
  modified_base 14: mod_base = OTHER; note = 2'-O-methyluridine-3'-phosphate
  modified_base 15: mod_base = OTHER; note = 2'-O-methyluridine-3'-phosphate
  modified_base 16: mod_base = OTHER; note = 2'-O-methyladenosine-3'-phosphate
  modified_base 17: mod_base = OTHER; note = 2'-O-methylguanosine-3'-phosphate
  modified_base 18: mod_base = OTHER; note = 2'-O-methyladenosine-3'-phosphate
  modified_base 19: mod_base = OTHER; note = 2'-O-methyladenosine-3'-phosphate
  modified_base 20: mod_base = OTHER; note = 2'-O-methylcytidine-3'-phosphate
  modified_base 21: mod_base = OTHER; note = 2'-O-methyladenosine
caaactccattccttagaaca

SEQ ID NO: 3713 - RNA, 21 nt, synthetic construct
  source 1..21: mol_type = other RNA
  modified_base 1: mod_base = OTHER; note = 2'-O-methyladenosine-3'-phosphate
  modified_base 2: mod_base = OTHER; note = 2'-O-methyladenosine-3'-phosphate
  modified_base 3: mod_base = OTHER; note = 2'-O-methyladenosine-3'-phosphate
  modified_base 4: mod_base = OTHER; note = 2'-O-methylcytidine-3'-phosphate
  modified_base 5: mod_base = OTHER; note = 2'-O-methyluridine-3'-phosphate
  modified_base 6: mod_base = OTHER; note = 2'-O-methylcytidine-3'-phosphate
  modified_base 7: mod_base = OTHER; note = 2'-deoxy-2'-fluorocytidine-3'-phosphate
  modified_base 8: mod_base = OTHER; note = 2'-O-methyladenosine-3'-phosphate
  modified_base 9: mod_base = OTHER; note = 2'-deoxy-2'-fluorouridine-3'-phosphate
  modified_base 10: mod_base = OTHER; note = 2'-deoxy-2'-fluorouridine-3'-phosphate
  modified_base 11: mod_base = OTHER; note = 2'-deoxy-2'-fluorocytidine-3'-phosphate
  modified_base 12: mod_base = OTHER; note = 2'-O-methylcytidine-3'-phosphate
  modified_base 13: mod_base = OTHER; note = 2'-O-methyluridine-3'-phosphate
  modified_base 14: mod_base = OTHER; note = 2'-O-methyluridine-3'-phosphate
  modified_base 15: mod_base = OTHER; note = 2'-O-methyladenosine-3'-phosphate
  modified_base 16: mod_base = OTHER; note = 2'-O-methylguanosine-3'-phosphate
  modified_base 17: mod_base = OTHER; note = 2'-O-methyladenosine-3'-phosphate
  modified_base 18: mod_base = OTHER; note = 2'-O-methyladenosine-3'-phosphate
  modified_base 19: mod_base = OTHER; note = 2'-O-methylcytidine-3'-phosphate
  modified_base 20: mod_base = OTHER; note = 2'-O-methyladenosine-3'-phosphate
  modified_base 21: mod_base = OTHER; note = 2'-O-methyladenosine
aaactccattccttagaacaa

SEQ ID NO: 3714 - RNA, 21 nt, synthetic construct
  source 1..21: mol_type = other RNA
  modified_base 1: mod_base = OTHER; note = 2'-O-methyladenosine-3'-phosphate
  modified_base 2: mod_base = OTHER; note = 2'-O-methyladenosine-3'-phosphate
  modified_base 3: mod_base = OTHER; note = 2'-O-methylcytidine-3'-phosphate
  modified_base 4: mod_base = OTHER; note = 2'-O-methyluridine-3'-phosphate
  modified_base 5: mod_base = OTHER; note = 2'-O-methylcytidine-3'-phosphate
  modified_base 6: mod_base = OTHER; note = 2'-O-methylcytidine-3'-phosphate
  modified_base 7: mod_base = OTHER; note = 2'-deoxy-2'-fluoroadenosine-3'-phosphate
  modified_base 8: mod_base = OTHER; note = 2'-O-methyluridine-3'-phosphate
  modified_base 9: mod_base = OTHER; note = 2'-deoxy-2'-fluorouridine-3'-phosphate
  modified_base 10: mod_base = OTHER; note = 2'-deoxy-2'-fluorocytidine-3'-phosphate
  modified_base 11: mod_base = OTHER; note = 2'-deoxy-2'-fluorocytidine-3'-phosphate
  modified_base 12: mod_base = OTHER; note = 2'-O-methyluridine-3'-phosphate
  modified_base 13: mod_base = OTHER; note = 2'-O-methyluridine-3'-phosphate
  modified_base 14: mod_base = OTHER; note = 2'-O-methyladenosine-3'-phosphate
  modified_base 15: mod_base = OTHER; note = 2'-O-methylguanosine-3'-phosphate
  modified_base 16: mod_base = OTHER; note = 2'-O-methyladenosine-3'-phosphate
  modified_base 17: mod_base = OTHER; note = 2'-O-methyladenosine-3'-phosphate
  modified_base 18: mod_base = OTHER; note = 2'-O-methylcytidine-3'-phosphate
  modified_base 19: mod_base = OTHER; note = 2'-O-methyladenosine-3'-phosphate
  modified_base 20: mod_base = OTHER; note = 2'-O-methyluridine-3'-phosphate
  modified_base 21: mod_base = OTHER; note = 2'-O-methyladenosine
aactccattccttagaacata

SEQ ID NO: 3715 - RNA, 21 nt, synthetic construct
  source 1..21: mol_type = other RNA
  modified_base 1: mod_base = OTHER; note = 2'-O-methyladenosine-3'-phosphate
  modified_base 2: mod_base = OTHER; note = 2'-O-methylcytidine-3'-phosphate
  modified_base 3: mod_base = OTHER; note = 2'-O-methyluridine-3'-phosphate
  modified_base 4: mod_base = OTHER; note = 2'-O-methylcytidine-3'-phosphate
  modified_base 5: mod_base = OTHER; note = 2'-O-methylcytidine-3'-phosphate
  modified_base 6: mod_base = OTHER; note = 2'-O-methyladenosine-3'-phosphate
  modified_base 7: mod_base = OTHER; note = 2'-deoxy-2'-fluorouridine-3'-phosphate
  modified_base 8: mod_base = OTHER; note = 2'-O-methyluridine-3'-phosphate
  modified_base 9: mod_base = OTHER; note = 2'-deoxy-2'-fluorocytidine-3'-phosphate
  modified_base 10: mod_base = OTHER; note = 2'-deoxy-2'-fluorocytidine-3'-phosphate
  modified_base 11: mod_base = OTHER; note = 2'-deoxy-2'-fluorouridine-3'-phosphate
  modified_base 12: mod_base = OTHER; note = 2'-O-methyluridine-3'-phosphate
  modified_base 13: mod_base = OTHER; note = 2'-O-methyladenosine-3'-phosphate
  modified_base 14: mod_base = OTHER; note = 2'-O-methylguanosine-3'-phosphate
  modified_base 15: mod_base = OTHER; note = 2'-O-methyladenosine-3'-phosphate
  modified_base 16: mod_base = OTHER; note = 2'-O-methyladenosine-3'-phosphate
  modified_base 17: mod_base = OTHER; note = 2'-O-methylcytidine-3'-phosphate
  modified_base 18: mod_base = OTHER; note = 2'-O-methyladenosine-3'-phosphate
  modified_base 19: mod_base = OTHER; note = 2'-O-methyluridine-3'-phosphate
  modified_base 20: mod_base = OTHER; note = 2'-O-methyluridine-3'-phosphate
  modified_base 21: mod_base = OTHER; note = 2'-O-methyladenosine
actccattccttagaacatta

SEQ ID NO: 3716 - RNA, 21 nt, synthetic construct
  source 1..21: mol_type = other RNA
  modified_base 1: mod_base = OTHER; note = 2'-O-methylcytidine-3'-phosphate
  modified_base 2: mod_base = OTHER; note = 2'-O-methyluridine-3'-phosphate
  modified_base 3: mod_base = OTHER; note = 2'-O-methylcytidine-3'-phosphate
  modified_base 4: mod_base = OTHER; note = 2'-O-methylcytidine-3'-phosphate
  modified_base 5: mod_base = OTHER; note = 2'-O-methyladenosine-3'-phosphate
  modified_base 6: mod_base = OTHER; note = 2'-O-methyluridine-3'-phosphate
  modified_base 7: mod_base = OTHER; note = 2'-deoxy-2'-fluorouridine-3'-phosphate
  modified_base 8: mod_base = OTHER; note = 2'-O-methylcytidine-3'-phosphate
  modified_base 9: mod_base = OTHER; note = 2'-deoxy-2'-fluorocytidine-3'-phosphate
  modified_base 10: mod_base = OTHER; note = 2'-deoxy-2'-fluorouridine-3'-phosphate
  modified_base 11: mod_base = OTHER; note = 2'-deoxy-2'-fluorouridine-3'-phosphate
  modified_base 12: mod_base = OTHER; note = 2'-O-methyladenosine-3'-phosphate
  modified_base 13: mod_base = OTHER; note = 2'-O-methylguanosine-3'-phosphate
  modified_base 14: mod_base = OTHER; note = 2'-O-methyladenosine-3'-phosphate
  modified_base 15: mod_base = OTHER; note = 2'-O-methyladenosine-3'-phosphate
  modified_base 16: mod_base = OTHER; note = 2'-O-methylcytidine-3'-phosphate
  modified_base 17: mod_base = OTHER; note = 2'-O-methyladenosine-3'-phosphate
  modified_base 18: mod_base = OTHER; note = 2'-O-methyluridine-3'-phosphate
  modified_base 19: mod_base = OTHER; note = 2'-O-methyluridine-3'-phosphate
  modified_base 20: mod_base = OTHER; note = 2'-O-methylcytidine-3'-phosphate
  modified_base 21: mod_base = OTHER; note = 2'-O-methyladenosine
ctccattccttagaacattca

SEQ ID NO: 3717 - RNA, 21 nt, synthetic construct
  source 1..21: mol_type = other RNA
  modified_base 1: mod_base = OTHER; note = 2'-O-methyluridine-3'-phosphate
  modified_base 2: mod_base = OTHER; note = 2'-O-methylcytidine-3'-phosphate
  modified_base 3: mod_base = OTHER; note = 2'-O-methylcytidine-3'-phosphate
  modified_base 4: mod_base = OTHER; note = 2'-O-methyladenosine-3'-phosphate
  modified_base 5: mod_base = OTHER; note = 2'-O-methyluridine-3'-phosphate
  modified_base 6: mod_base = OTHER; note = 2'-O-methyluridine-3'-phosphate
  modified_base 7: mod_base = OTHER; note = 2'-deoxy-2'-fluorocytidine-3'-phosphate
  modified_base 8: mod_base = OTHER; note = 2'-O-methylcytidine-3'-phosphate
  modified_base 9: mod_base = OTHER; note = 2'-deoxy-2'-fluorouridine-3'-phosphate
  modified_base 10: mod_base = OTHER; note = 2'-deoxy-2'-fluorouridine-3'-phosphate
  modified_base 11: mod_base = OTHER; note = 2'-deoxy-2'-fluoroadenosine-3'-phosphate
  modified_base 12: mod_base = OTHER; note = 2'-O-methylguanosine-3'-phosphate
  modified_base 13: mod_base = OTHER; note = 2'-O-methyladenosine-3'-phosphate
  modified_base 14: mod_base = OTHER; note = 2'-O-methyladenosine-3'-phosphate
  modified_base 15: mod_base = OTHER; note = 2'-O-methylcytidine-3'-phosphate
  modified_base 16: mod_base = OTHER; note = 2'-O-methyladenosine-3'-phosphate
  modified_base 17: mod_base = OTHER; note = 2'-O-methyluridine-3'-phosphate
  modified_base 18: mod_base = OTHER; note = 2'-O-methyluridine-3'-phosphate
  modified_base 19: mod_base = OTHER; note = 2'-O-methylcytidine-3'-phosphate
  modified_base 20: mod_base = OTHER; note = 2'-O-methyluridine-3'-phosphate
  modified_base 21: mod_base = OTHER; note = 2'-O-methyladenosine
tccattccttagaacattcta

SEQ ID NO: 3718 - RNA, 21 nt, synthetic construct
  source 1..21: mol_type = other RNA
  modified_base 1: mod_base = OTHER; note = 2'-O-methylcytidine-3'-phosphate
  modified_base 2: mod_base = OTHER; note = 2'-O-methylcytidine-3'-phosphate
  modified_base 3: mod_base = OTHER; note = 2'-O-methyladenosine-3'-phosphate
  modified_base 4: mod_base = OTHER; note = 2'-O-methyluridine-3'-phosphate
  modified_base 5: mod_base = OTHER; note = 2'-O-methyluridine-3'-phosphate
  modified_base 6: mod_base = OTHER; note = 2'-O-methylcytidine-3'-phosphate
  modified_base 7: mod_base = OTHER; note = 2'-deoxy-2'-fluorocytidine-3'-phosphate
  modified_base 8: mod_base = OTHER; note = 2'-O-methyluridine-3'-phosphate
  modified_base 9: mod_base = OTHER; note = 2'-deoxy-2'-fluorouridine-3'-phosphate
  modified_base 10: mod_base = OTHER; note = 2'-deoxy-2'-fluoroadenosine-3'-phosphate
  modified_base 11: mod_base = OTHER; note = 2'-deoxy-2'-fluoroguanosine-3'-phosphate
  modified_base 12: mod_base = OTHER; note = 2'-O-methyladenosine-3'-phosphate
  modified_base 13: mod_base = OTHER; note = 2'-O-methyladenosine-3'-phosphate
  modified_base 14: mod_base = OTHER; note = 2'-O-methylcytidine-3'-phosphate
  modified_base 15: mod_base = OTHER; note = 2'-O-methyladenosine-3'-phosphate
  modified_base 16: mod_base = OTHER; note = 2'-O-methyluridine-3'-phosphate
  modified_base 17: mod_base = OTHER; note = 2'-O-methyluridine-3'-phosphate
  modified_base 18: mod_base = OTHER; note = 2'-O-methylcytidine-3'-phosphate
  modified_base 19: mod_base = OTHER; note = 2'-O-methyluridine-3'-phosphate
  modified_base 20: mod_base = OTHER; note = 2'-O-methyluridine-3'-phosphate
  modified_base 21: mod_base = OTHER; note = 2'-O-methyladenosine
ccattccttagaacattctta

SEQ ID NO: 3719 - RNA, 21 nt, synthetic construct
  source 1..21: mol_type = other RNA
  modified_base 1: mod_base = OTHER; note = 2'-O-methylcytidine-3'-phosphate
  modified_base 2: mod_base = OTHER; note = 2'-O-methyladenosine-3'-phosphate
  modified_base 3: mod_base = OTHER; note = 2'-O-methyluridine-3'-phosphate
  modified_base 4: mod_base = OTHER; note = 2'-O-methyluridine-3'-phosphate
  modified_base 5: mod_base = OTHER; note = 2'-O-methylcytidine-3'-phosphate
  modified_base 6: mod_base = OTHER; note = 2'-O-methylcytidine-3'-phosphate
  modified_base 7: mod_base = OTHER; note = 2'-deoxy-2'-fluorouridine-3'-phosphate
  modified_base 8: mod_base = OTHER; note = 2'-O-methyluridine-3'-phosphate
  modified_base 9: mod_base = OTHER; note = 2'-deoxy-2'-fluoroadenosine-3'-phosphate
  modified_base 10: mod_base = OTHER; note = 2'-deoxy-2'-fluoroguanosine-3'-phosphate
  modified_base 11: mod_base = OTHER; note = 2'-deoxy-2'-fluoroadenosine-3'-phosphate
  modified_base 12: mod_base = OTHER; note = 2'-O-methyladenosine-3'-phosphate
  modified_base 13: mod_base = OTHER; note = 2'-O-methylcytidine-3'-phosphate
  modified_base 14: mod_base = OTHER; note = 2'-O-methyladenosine-3'-phosphate
  modified_base 15: mod_base = OTHER; note = 2'-O-methyluridine-3'-phosphate
  modified_base 16: mod_base = OTHER; note = 2'-O-methyluridine-3'-phosphate
  modified_base 17: mod_base = OTHER; note = 2'-O-methylcytidine-3'-phosphate
  modified_base 18: mod_base = OTHER; note = 2'-O-methyluridine-3'-phosphate
  modified_base 19: mod_base = OTHER; note = 2'-O-methyluridine-3'-phosphate
  modified_base 20: mod_base = OTHER; note = 2'-O-methylcytidine-3'-phosphate
  modified_base 21: mod_base = OTHER; note = 2'-O-methyladenosine
cattccttagaacattcttca

SEQ ID NO: 3720 - RNA, 21 nt, synthetic construct
  source 1..21: mol_type = other RNA
  modified_base 1: mod_base = OTHER; note = 2'-O-methyladenosine-3'-phosphate
  modified_base 2: mod_base = OTHER; note = 2'-O-methyluridine-3'-phosphate
  modified_base 3: mod_base = OTHER; note = 2'-O-methyluridine-3'-phosphate
  modified_base 4: mod_base = OTHER; note = 2'-O-methylcytidine-3'-phosphate
  modified_base 5: mod_base = OTHER; note = 2'-O-methylcytidine-3'-phosphate
  modified_base 6: mod_base = OTHER; note = 2'-O-methyluridine-3'-phosphate
  modified_base 7: mod_base = OTHER; note = 2'-deoxy-2'-fluorouridine-3'-phosphate
  modified_base 8: mod_base = OTHER; note = 2'-O-methyladenosine-3'-phosphate
  modified_base 9: mod_base = OTHER; note = 2'-deoxy-2'-fluoroguanosine-3'-phosphate
  modified_base 10: mod_base = OTHER; note = 2'-deoxy-2'-fluoroadenosine-3'-phosphate
  modified_base 11: mod_base = OTHER; note = 2'-deoxy-2'-fluoroadenosine-3'-phosphate
  modified_base 12: mod_base = OTHER; note = 2'-O-methylcytidine-3'-phosphate
  modified_base 13: mod_base = OTHER; note = 2'-O-methyladenosine-3'-phosphate
  modified_base 14: mod_base = OTHER; note = 2'-O-methyluridine-3'-phosphate
  modified_base 15: mod_base = OTHER; note = 2'-O-methyluridine-3'-phosphate
  modified_base 16: mod_base = OTHER; note = 2'-O-methylcytidine-3'-phosphate
  modified_base 17: mod_base = OTHER; note = 2'-O-methyluridine-3'-phosphate
  modified_base 18: mod_base = OTHER; note = 2'-O-methyluridine-3'-phosphate
  modified_base 19: mod_base = OTHER; note = 2'-O-methylcytidine-3'-phosphate
  modified_base 20: mod_base = OTHER; note = 2'-O-methyluridine-3'-phosphate
  modified_base 21: mod_base = OTHER; note = 2'-O-methyladenosine
attccttagaacattcttcta

SEQ ID NO: 3721 - RNA, 21 nt, synthetic construct
  source 1..21: mol_type = other RNA
  modified_base 1: mod_base = OTHER; note = 2'-O-methyluridine-3'-phosphate
  modified_base 2: mod_base = OTHER; note = 2'-O-methyluridine-3'-phosphate
  modified_base 3: mod_base = OTHER; note = 2'-O-methylcytidine-3'-phosphate
  modified_base 4: mod_base = OTHER; note = 2'-O-methylcytidine-3'-phosphate
  modified_base 5: mod_base = OTHER; note = 2'-O-methyluridine-3'-phosphate
  modified_base 6: mod_base = OTHER; note = 2'-O-methyluridine-3'-phosphate
  modified_base 7: mod_base = OTHER; note = 2'-deoxy-2'-fluoroadenosine-3'-phosphate
  modified_base 8: mod_base = OTHER; note = 2'-O-methylguanosine-3'-phosphate
  modified_base 9: mod_base = OTHER; note = 2'-deoxy-2'-fluoroadenosine-3'-phosphate
  modified_base 10: mod_base = OTHER; note = 2'-deoxy-2'-fluoroadenosine-3'-phosphate
  modified_base 11: mod_base = OTHER; note = 2'-deoxy-2'-fluorocytidine-3'-phosphate
  modified_base 12: mod_base = OTHER; note = 2'-O-methyladenosine-3'-phosphate
  modified_base 13: mod_base = OTHER; note = 2'-O-methyluridine-3'-phosphate
  modified_base 14: mod_base = OTHER; note = 2'-O-methyluridine-3'-phosphate
  modified_base 15: mod_base = OTHER; note = 2'-O-methylcytidine-3'-phosphate
  modified_base 16: mod_base = OTHER; note = 2'-O-methyluridine-3'-phosphate
  modified_base 17: mod_base = OTHER; note = 2'-O-methyluridine-3'-phosphate
  modified_base 18: mod_base = OTHER; note = 2'-O-methylcytidine-3'-phosphate
  modified_base 19: mod_base = OTHER; note = 2'-O-methyluridine-3'-phosphate
  modified_base 20: mod_base = OTHER; note = 2'-O-methyladenosine-3'-phosphate
  modified_base 21: mod_base = OTHER; note = 2'-O-methyladenosine
ttccttagaacattcttctaa

SEQ ID NO: 3722 - RNA, 21 nt, synthetic construct
  source 1..21: mol_type = other RNA
  modified_base 1: mod_base = OTHER; note = 2'-O-methyluridine-3'-phosphate
  modified_base 2: mod_base = OTHER; note = 2'-O-methylcytidine-3'-phosphate
  modified_base 3: mod_base = OTHER; note = 2'-O-methylcytidine-3'-phosphate
  modified_base 4: mod_base = OTHER; note = 2'-O-methyluridine-3'-phosphate
  modified_base 5: mod_base = OTHER; note = 2'-O-methyluridine-3'-phosphate
  modified_base 6: mod_base = OTHER; note = 2'-O-methyladenosine-3'-phosphate
  modified_base 7: mod_base = OTHER; note = 2'-deoxy-2'-fluoroguanosine-3'-phosphate
  modified_base 8: mod_base = OTHER; note = 2'-O-methyladenosine-3'-phosphate
  modified_base 9: mod_base = OTHER; note = 2'-deoxy-2'-fluoroadenosine-3'-phosphate
  modified_base 10: mod_base = OTHER; note = 2'-deoxy-2'-fluorocytidine-3'-phosphate
  modified_base 11: mod_base = OTHER; note = 2'-deoxy-2'-fluoroadenosine-3'-phosphate
  modified_base 12: mod_base = OTHER; note = 2'-O-methyluridine-3'-phosphate
  modified_base 13: mod_base = OTHER; note = 2'-O-methyluridine-3'-phosphate
  modified_base 14: mod_base = OTHER; note = 2'-O-methylcytidine-3'-phosphate
  modified_base 15: mod_base = OTHER; note = 2'-O-methyluridine-3'-phosphate
  modified_base 16: mod_base = OTHER; note = 2'-O-methyluridine-3'-phosphate
  modified_base 17: mod_base = OTHER; note = 2'-O-methylcytidine-3'-phosphate
  modified_base 18: mod_base = OTHER; note = 2'-O-methyluridine-3'-phosphate
  modified_base 19: mod_base = OTHER; note = 2'-O-methyladenosine-3'-phosphate
  modified_base 20: mod_base = OTHER; note = 2'-O-methylcytidine-3'-phosphate
  modified_base 21: mod_base = OTHER; note = 2'-O-methyladenosine
tccttagaacattcttctaca

SEQ ID NO: 3723 - RNA, 21 nt, synthetic construct
  source 1..21: mol_type = other RNA
  modified_base 1: mod_base = OTHER; note = 2'-O-methylcytidine-3'-phosphate
  modified_base 2: mod_base = OTHER; note = 2'-O-methylcytidine-3'-phosphate
  modified_base 3: mod_base = OTHER; note = 2'-O-methyluridine-3'-phosphate
  modified_base 4: mod_base = OTHER; note = 2'-O-methyluridine-3'-phosphate
  modified_base 5: mod_base = OTHER; note = 2'-O-methyladenosine-3'-phosphate
  modified_base 6: mod_base = OTHER; note = 2'-O-methylguanosine-3'-phosphate
  modified_base 7: mod_base = OTHER; note = 2'-deoxy-2'-fluoroadenosine-3'-phosphate
  modified_base 8: mod_base = OTHER; note = 2'-O-methyladenosine-3'-phosphate
  modified_base 9: mod_base = OTHER; note = 2'-deoxy-2'-fluorocytidine-3'-phosphate
  modified_base 10: mod_base = OTHER; note = 2'-deoxy-2'-fluoroadenosine-3'-phosphate
  modified_base 11: mod_base = OTHER; note = 2'-deoxy-2'-fluorouridine-3'-phosphate
  modified_base 12: mod_base = OTHER; note = 2'-O-methyluridine-3'-phosphate
  modified_base 13: mod_base = OTHER; note = 2'-O-methylcytidine-3'-phosphate
  modified_base 14: mod_base = OTHER; note = 2'-O-methyluridine-3'-phosphate
  modified_base 15: mod_base = OTHER; note = 2'-O-methyluridine-3'-phosphate
  modified_base 16: mod_base = OTHER; note = 2'-O-methylcytidine-3'-phosphate
  modified_base 17: mod_base = OTHER; note = 2'-O-methyluridine-3'-phosphate
  modified_base 18: mod_base = OTHER; note = 2'-O-methyladenosine-3'-phosphate
  modified_base 19: mod_base = OTHER; note = 2'-O-methylcytidine-3'-phosphate
  modified_base 20: mod_base = OTHER; note = 2'-O-methyluridine-3'-phosphate
  modified_base 21: mod_base = OTHER; note = 2'-O-methyladenosine
ccttagaacattcttctacta

SEQ ID NO: 3724 - RNA, 21 nt, synthetic construct
  source 1..21: mol_type = other RNA
  modified_base 1: mod_base = OTHER; note = 2'-O-methylcytidine-3'-phosphate
  modified_base 2: mod_base = OTHER; note = 2'-O-methyluridine-3'-phosphate
  modified_base 3: mod_base = OTHER; note = 2'-O-methyluridine-3'-phosphate
  modified_base 4: mod_base = OTHER; note = 2'-O-methyladenosine-3'-phosphate
  modified_base 5: mod_base = OTHER; note = 2'-O-methylguanosine-3'-phosphate
  modified_base 6: mod_base = OTHER; note = 2'-O-methyladenosine-3'-phosphate
  modified_base 7: mod_base = OTHER; note = 2'-deoxy-2'-fluoroadenosine-3'-phosphate
  modified_base 8: mod_base = OTHER; note = 2'-O-methylcytidine-3'-phosphate
  modified_base 9: mod_base = OTHER; note = 2'-deoxy-2'-fluoroadenosine-3'-phosphate
  modified_base 10: mod_base = OTHER; note = 2'-deoxy-2'-fluorouridine-3'-phosphate
  modified_base 11: mod_base = OTHER; note = 2'-deoxy-2'-fluorouridine-3'-phosphate
  modified_base 12: mod_base = OTHER; note = 2'-O-methylcytidine-3'-phosphate
  modified_base 13: mod_base = OTHER; note = 2'-O-methyluridine-3'-phosphate
  modified_base 14: mod_base = OTHER; note = 2'-O-methyluridine-3'-phosphate
  modified_base 15: mod_base = OTHER; note = 2'-O-methylcytidine-3'-phosphate
  modified_base 16: mod_base = OTHER; note = 2'-O-methyluridine-3'-phosphate
  modified_base 17: mod_base = OTHER; note = 2'-O-methyladenosine-3'-phosphate
  modified_base 18: mod_base = OTHER; note = 2'-O-methylcytidine-3'-phosphate
  modified_base 19: mod_base = OTHER; note = 2'-O-methyluridine-3'-phosphate
  modified_base 20: mod_base = OTHER; note = 2'-O-methylguanosine-3'-phosphate
  modified_base 21: mod_base = OTHER; note = 2'-O-methyladenosine
cttagaacattcttctactga

SEQ ID NO: 3725 - RNA, 21 nt, synthetic construct
  source 1..21: mol_type = other RNA
  modified_base 1: mod_base = OTHER; note = 2'-O-methyluridine-3'-phosphate
  modified_base 2: mod_base = OTHER; note = 2'-O-methyluridine-3'-phosphate
  modified_base 3: mod_base = OTHER; note = 2'-O-methyladenosine-3'-phosphate
  modified_base 4: mod_base = OTHER; note = 2'-O-methylguanosine-3'-phosphate
  modified_base 5: mod_base = OTHER; note = 2'-O-methyladenosine-3'-phosphate
  modified_base 6: mod_base = OTHER; note = 2'-O-methyladenosine-3'-phosphate
  modified_base 7: mod_base = OTHER; note = 2'-deoxy-2'-fluorocytidine-3'-phosphate
  modified_base 8: mod_base = OTHER; note = 2'-O-methyladenosine-3'-phosphate
  modified_base 9: mod_base = OTHER; note = 2'-deoxy-2'-fluorouridine-3'-phosphate
  modified_base 10: mod_base = OTHER; note = 2'-deoxy-2'-fluorouridine-3'-phosphate
  modified_base 11: mod_base = OTHER; note = 2'-deoxy-2'-fluorocytidine-3'-phosphate
  modified_base 12: mod_base = OTHER; note = 2'-O-methyluridine-3'-phosphate
  modified_base 13: mod_base = OTHER; note = 2'-O-methyluridine-3'-phosphate
  modified_base 14: mod_base = OTHER; note = 2'-O-methylcytidine-3'-phosphate
  modified_base 15: mod_base = OTHER; note = 2'-O-methyluridine-3'-phosphate
  modified_base 16: mod_base = OTHER; note = 2'-O-methyladenosine-3'-phosphate
  modified_base 17: mod_base = OTHER; note = 2'-O-methylcytidine-3'-phosphate
  modified_base 18: mod_base = OTHER; note = 2'-O-methyluridine-3'-phosphate
  modified_base 19: mod_base = OTHER; note = 2'-O-methylguanosine-3'-phosphate
  modified_base 20: mod_base = OTHER; note = 2'-O-methyladenosine-3'-phosphate
  modified_base 21: mod_base = OTHER; note = 2'-O-methyladenosine
ttagaacattcttctactgaa

SEQ ID NO: 3726 - RNA, 21 nt, synthetic construct
  source 1..21: mol_type = other RNA
  modified_base 1: mod_base = OTHER; note = 2'-O-methyluridine-3'-phosphate
  modified_base 2: mod_base = OTHER; note = 2'-O-methyladenosine-3'-phosphate
  modified_base 3: mod_base = OTHER; note = 2'-O-methylguanosine-3'-phosphate
  modified_base 4: mod_base = OTHER; note = 2'-O-methyladenosine-3'-phosphate
  modified_base 5: mod_base = OTHER; note = 2'-O-methyladenosine-3'-phosphate
  modified_base 6: mod_base = OTHER; note = 2'-O-methylcytidine-3'-phosphate
  modified_base 7: mod_base = OTHER; note = 2'-deoxy-2'-fluoroadenosine-3'-phosphate
  modified_base 8: mod_base = OTHER; note = 2'-O-methyluridine-3'-phosphate
  modified_base 9: mod_base = OTHER; note = 2'-deoxy-2'-fluorouridine-3'-phosphate
  modified_base 10: mod_base = OTHER; note = 2'-deoxy-2'-fluorocytidine-3'-phosphate
  modified_base 11: mod_base = OTHER; note = 2'-deoxy-2'-fluorouridine-3'-phosphate
  modified_base 12: mod_base = OTHER; note = 2'-O-methyluridine-3'-phosphate
  modified_base 13: mod_base = OTHER; note = 2'-O-methylcytidine-3'-phosphate
  modified_base 14: mod_base = OTHER; note = 2'-O-methyluridine-3'-phosphate
  modified_base 15: mod_base = OTHER; note = 2'-O-methyladenosine-3'-phosphate
  modified_base 16: mod_base = OTHER; note = 2'-O-methylcytidine-3'-phosphate
  modified_base 17: mod_base = OTHER; note = 2'-O-methyluridine-3'-phosphate
  modified_base 18: mod_base = OTHER; note = 2'-O-methylguanosine-3'-phosphate
  modified_base 19: mod_base = OTHER; note = 2'-O-methyladenosine-3'-phosphate
  modified_base 20: mod_base = OTHER; note = 2'-O-methylguanosine-3'-phosphate
  modified_base 21: mod_base = OTHER; note = 2'-O-methyladenosine
tagaacattcttctactgaga

SEQ ID NO: 3727 - RNA, 21 nt, synthetic construct
  source 1..21: mol_type = other RNA
  modified_base 1: mod_base = OTHER; note = 2'-O-methyladenosine-3'-phosphate
  modified_base 2: mod_base = OTHER; note = 2'-O-methylguanosine-3'-phosphate
  modified_base 3: mod_base = OTHER; note = 2'-O-methyladenosine-3'-phosphate
  modified_base 4: mod_base = OTHER; note = 2'-O-methyladenosine-3'-phosphate
  modified_base 5: mod_base = OTHER; note = 2'-O-methylcytidine-3'-phosphate
  modified_base 6: mod_base = OTHER; note = 2'-O-methyladenosine-3'-phosphate
  modified_base 7: mod_base = OTHER; note = 2'-deoxy-2'-fluorouridine-3'-phosphate
  modified_base 8: mod_base = OTHER; note = 2'-O-methyluridine-3'-phosphate
  modified_base 9: mod_base = OTHER; note = 2'-deoxy-2'-fluorocytidine-3'-phosphate
  modified_base 10: mod_base = OTHER; note = 2'-deoxy-2'-fluorouridine-3'-phosphate
  modified_base 11: mod_base = OTHER; note = 2'-deoxy-2'-fluorouridine-3'-phosphate
  modified_base 12: mod_base = OTHER; note = 2'-O-methylcytidine-3'-phosphate
  modified_base 13: mod_base = OTHER; note = 2'-O-methyluridine-3'-phosphate
  modified_base 14: mod_base = OTHER; note = 2'-O-methyladenosine-3'-phosphate
  modified_base 15: mod_base = OTHER; note = 2'-O-methylcytidine-3'-phosphate
  modified_base 16: mod_base = OTHER; note = 2'-O-methyluridine-3'-phosphate
  modified_base 17: mod_base = OTHER; note = 2'-O-methylguanosine-3'-phosphate
  modified_base 18: mod_base = OTHER; note = 2'-O-methyladenosine-3'-phosphate
  modified_base 19: mod_base = OTHER; note = 2'-O-methylguanosine-3'-phosphate
  modified_base 20: mod_base = OTHER; note = 2'-O-methyladenosine-3'-phosphate
  modified_base 21: mod_base = OTHER; note = 2'-O-methyladenosine
agaacattcttctactgagaa

SEQ ID NO: 3728 - RNA, 21 nt, synthetic construct
  source 1..21: mol_type = other RNA
  modified_base 1: mod_base = OTHER; note = 2'-O-methylguanosine-3'-phosphate
  modified_base 2: mod_base = OTHER; note = 2'-O-methyladenosine-3'-phosphate
  modified_base 3: mod_base = OTHER; note = 2'-O-methyladenosine-3'-phosphate
  modified_base 4: mod_base = OTHER; note = 2'-O-methylcytidine-3'-phosphate
  modified_base 5: mod_base = OTHER; note = 2'-O-methyladenosine-3'-phosphate
  modified_base 6: mod_base = OTHER; note = 2'-O-methyluridine-3'-phosphate
  modified_base 7: mod_base = OTHER; note = 2'-deoxy-2'-fluorouridine-3'-phosphate
  modified_base 8: mod_base = OTHER; note = 2'-O-methylcytidine-3'-phosphate
  modified_base 9: mod_base = OTHER; note = 2'-deoxy-2'-fluorouridine-3'-phosphate
  modified_base 10: mod_base = OTHER; note = 2'-deoxy-2'-fluorouridine-3'-phosphate
  modified_base 11: mod_base = OTHER; note = 2'-deoxy-2'-fluorocytidine-3'-phosphate
  modified_base 12: mod_base = OTHER; note = 2'-O-methyluridine-3'-phosphate
  modified_base 13: mod_base = OTHER; note = 2'-O-methyladenosine-3'-phosphate
  modified_base 14: mod_base = OTHER; note = 2'-O-methylcytidine-3'-phosphate
  modified_base 15: mod_base = OTHER; note = 2'-O-methyluridine-3'-phosphate
  modified_base 16: mod_base = OTHER; note = 2'-O-methylguanosine-3'-phosphate
  modified_base 17: mod_base = OTHER; note = 2'-O-methyladenosine-3'-phosphate
  modified_base 18: mod_base = OTHER; note = 2'-O-methylguanosine-3'-phosphate
  modified_base 19: mod_base = OTHER; note = 2'-O-methyladenosine-3'-phosphate
  modified_base 20: mod_base = OTHER; note = 2'-O-methyluridine-3'-phosphate
  modified_base 21: mod_base = OTHER; note = 2'-O-methyladenosine
gaacattcttctactgagata

SEQ ID NO: 3729 - RNA, 21 nt, synthetic construct
  source 1..21: mol_type = other RNA
  modified_base 1: mod_base = OTHER; note = 2'-O-methylcytidine-3'-phosphate
  modified_base 2: mod_base = OTHER; note = 2'-O-methyladenosine-3'-phosphate
  modified_base 3: mod_base = OTHER; note = 2'-O-methyluridine-3'-phosphate
  modified_base 4: mod_base = OTHER; note = 2'-O-methyluridine-3'-phosphate
  modified_base 5: mod_base = OTHER; note = 2'-O-methylcytidine-3'-phosphate
  modified_base 6: mod_base = OTHER; note = 2'-O-methyluridine-3'-phosphate
  modified_base 7: mod_base = OTHER; note = 2'-deoxy-2'-fluorouridine-3'-phosphate
  modified_base 8: mod_base = OTHER; note = 2'-O-methylcytidine-3'-phosphate
  modified_base 9: mod_base = OTHER; note = 2'-deoxy-2'-fluorouridine-3'-phosphate
  modified_base 10: mod_base = OTHER; note = 2'-deoxy-2'-fluoroadenosine-3'-phosphate
  modified_base 11: mod_base = OTHER; note = 2'-deoxy-2'-fluorocytidine-3'-phosphate
  modified_base 12: mod_base = OTHER; note = 2'-O-methyluridine-3'-phosphate
  modified_base 13: mod_base = OTHER; note = 2'-O-methylguanosine-3'-phosphate
  modified_base 14: mod_base = OTHER; note = 2'-O-methyladenosine-3'-phosphate
  modified_base 15: mod_base = OTHER; note = 2'-O-methylguanosine-3'-phosphate
  modified_base 16: mod_base = OTHER; note = 2'-O-methyladenosine-3'-phosphate
  modified_base 17: mod_base = OTHER; note = 2'-O-methyluridine-3'-phosphate
  modified_base 18: mod_base = OTHER; note = 2'-O-methylguanosine-3'-phosphate
  modified_base 19: mod_base = OTHER; note = 2'-O-methyladenosine-3'-phosphate
  modified_base 20: mod_base = OTHER; note = 2'-O-methyluridine-3'-phosphate
  modified_base 21: mod_base = OTHER; note = 2'-O-methyladenosine
cattcttctactgagatgata

SEQ ID NO: 3730 - RNA, 21 nt, synthetic construct
  source 1..21: mol_type = other RNA
  modified_base 1: mod_base = OTHER; note = 2'-O-methyladenosine-3'-phosphate
  modified_base 2: mod_base = OTHER; note = 2'-O-methyluridine-3'-phosphate
  modified_base 3: mod_base = OTHER; note = 2'-O-methyluridine-3'-phosphate
  modified_base 4: mod_base = OTHER; note = 2'-O-methylcytidine-3'-phosphate
  modified_base 5: mod_base = OTHER; note = 2'-O-methyluridine-3'-phosphate
  modified_base 6: mod_base = OTHER; note = 2'-O-methyluridine-3'-phosphate
  modified_base 7: mod_base = OTHER; note = 2'-deoxy-2'-fluorocytidine-3'-phosphate
  modified_base 8: mod_base = OTHER; note = 2'-O-methyluridine-3'-phosphate
  modified_base 9: mod_base = OTHER; note = 2'-deoxy-2'-fluoroadenosine-3'-phosphate
  modified_base 10: mod_base = OTHER; note = 2'-deoxy-2'-fluorocytidine-3'-phosphate
  modified_base 11: mod_base = OTHER; note = 2'-deoxy-2'-fluorouridine-3'-phosphate
  modified_base 12: mod_base = OTHER; note = 2'-O-methylguanosine-3'-phosphate
  modified_base 13: mod_base = OTHER; note = 2'-O-methyladenosine-3'-phosphate
  modified_base 14: mod_base = OTHER; note = 2'-O-methylguanosine-3'-phosphate
  modified_base 15: mod_base = OTHER; note = 2'-O-methyladenosine-3'-phosphate
  modified_base 16: mod_base = OTHER; note = 2'-O-methyluridine-3'-phosphate
  modified_base 17: mod_base = OTHER; note = 2'-O-methylguanosine-3'-phosphate
  modified_base 18: mod_base = OTHER; note = 2'-O-methyladenosine-3'-phosphate
  modified_base 19: mod_base = OTHER; note = 2'-O-methyluridine-3'-phosphate
  modified_base 20: mod_base = OTHER; note = 2'-O-methylcytidine-3'-phosphate
  modified_base 21: mod_base = OTHER; note = 2'-O-methyladenosine
attcttctactgagatgatca

SEQ ID NO: 3731 - RNA, 21 nt, synthetic construct
  source 1..21: mol_type = other RNA
  modified_base 1: mod_base = OTHER; note = 2'-O-methyluridine-3'-phosphate
  modified_base 2: mod_base = OTHER; note = 2'-O-methyluridine-3'-phosphate
  modified_base 3: mod_base = OTHER; note = 2'-O-methylcytidine-3'-phosphate
  modified_base 4: mod_base = OTHER; note = 2'-O-methyluridine-3'-phosphate
  modified_base 5: mod_base = OTHER; note = 2'-O-methyluridine-3'-phosphate
  modified_base 6: mod_base = OTHER; note = 2'-O-methylcytidine-3'-phosphate
  modified_base 7: mod_base = OTHER; note = 2'-deoxy-2'-fluorouridine-3'-phosphate
  modified_base 8: mod_base = OTHER; note = 2'-O-methyladenosine-3'-phosphate
  modified_base 9: mod_base = OTHER; note = 2'-deoxy-2'-fluorocytidine-3'-phosphate
  modified_base 10: mod_base = OTHER; note = 2'-deoxy-2'-fluorouridine-3'-phosphate
  modified_base 11: mod_base = OTHER; note = 2'-deoxy-2'-fluoroguanosine-3'-phosphate
  modified_base 12: mod_base = OTHER; note = 2'-O-methyladenosine-3'-phosphate
  modified_base 13: mod_base = OTHER; note = 2'-O-methylguanosine-3'-phosphate
  modified_base 14: mod_base = OTHER; note = 2'-O-methyladenosine-3'-phosphate
  modified_base 15: mod_base = OTHER; note = 2'-O-methyluridine-3'-phosphate
  modified_base 16: mod_base = OTHER; note = 2'-O-methylguanosine-3'-phosphate
  modified_base 17: mod_base = OTHER; note = 2'-O-methyladenosine-3'-phosphate
  modified_base 18: mod_base = OTHER; note = 2'-O-methyluridine-3'-phosphate
  modified_base 19: mod_base = OTHER; note = 2'-O-methylcytidine-3'-phosphate
  modified_base 20: mod_base = OTHER; note = 2'-O-methylcytidine-3'-phosphate
  modified_base 21: mod_base = OTHER; note = 2'-O-methyladenosine
ttcttctactgagatgatcca

SEQ ID NO: 3732 - RNA, 21 nt, synthetic construct
  source 1..21: mol_type = other RNA
  modified_base 1: mod_base = OTHER; note = 2'-O-methyluridine-3'-phosphate
  modified_base 2: mod_base = OTHER; note = 2'-O-methylcytidine-3'-phosphate
  modified_base 3: mod_base = OTHER; note = 2'-O-methyluridine-3'-phosphate
  modified_base 4: mod_base = OTHER; note = 2'-O-methyluridine-3'-phosphate
  modified_base 5: mod_base = OTHER; note = 2'-O-methylcytidine-3'-phosphate
  modified_base 6: mod_base = OTHER; note = 2'-O-methyluridine-3'-phosphate
  modified_base 7: mod_base = OTHER; note = 2'-deoxy-2'-fluoroadenosine-3'-phosphate
  modified_base 8: mod_base = OTHER; note = 2'-O-methylcytidine-3'-phosphate
  modified_base 9: mod_base = OTHER; note = 2'-deoxy-2'-fluorouridine-3'-phosphate
  modified_base 10: mod_base = OTHER; note = 2'-deoxy-2'-fluoroguanosine-3'-phosphate
  modified_base 11: mod_base = OTHER; note = 2'-deoxy-2'-fluoroadenosine-3'-phosphate
  modified_base 12: mod_base = OTHER; note = 2'-O-methylguanosine-3'-phosphate
  modified_base 13: mod_base = OTHER; note = 2'-O-methyladenosine-3'-phosphate
  modified_base 14: mod_base = OTHER; note = 2'-O-methyluridine-3'-phosphate
  modified_base 15: mod_base = OTHER; note = 2'-O-methylguanosine-3'-phosphate
  modified_base 16: mod_base = OTHER; note = 2'-O-methyladenosine-3'-phosphate
  modified_base 17: mod_base = OTHER; note = 2'-O-methyluridine-3'-phosphate
  modified_base 18: mod_base = OTHER; note = 2'-O-methylcytidine-3'-phosphate
  modified_base 19: mod_base = OTHER; note = 2'-O-methylcytidine-3'-phosphate
  modified_base 20: mod_base = OTHER; note = 2'-O-methyladenosine-3'-phosphate
  modified_base 21: mod_base = OTHER; note = 2'-O-methyladenosine
tcttctactgagatgatccaa

SEQ ID NO: 3733 - RNA, 21 nt, synthetic construct
  source 1..21: mol_type = other RNA
  modified_base 1: mod_base = OTHER; note = 2'-O-methylcytidine-3'-phosphate
  modified_base 2: mod_base = OTHER; note = 2'-O-methyluridine-3'-phosphate
  modified_base 3: mod_base = OTHER; note = 2'-O-methyluridine-3'-phosphate
  modified_base 4: mod_base = OTHER; note = 2'-O-methylcytidine-3'-phosphate
  modified_base 5: mod_base = OTHER; note = 2'-O-methyluridine-3'-phosphate
  modified_base 6: mod_base = OTHER; note = 2'-O-methyladenosine-3'-phosphate
  modified_base 7: mod_base = OTHER; note = 2'-deoxy-2'-fluorocytidine-3'-phosphate
  modified_base 8: mod_base = OTHER; note = 2'-O-methyluridine-3'-phosphate
  modified_base 9: mod_base = OTHER; note = 2'-deoxy-2'-fluoroguanosine-3'-phosphate
  modified_base 10: mod_base = OTHER; note = 2'-deoxy-2'-fluoroadenosine-3'-phosphate
  modified_base 11: mod_base = OTHER; note = 2'-deoxy-2'-fluoroguanosine-3'-phosphate
  modified_base 12: mod_base = OTHER; note = 2'-O-methyladenosine-3'-phosphate
  modified_base 13: mod_base = OTHER; note = 2'-O-methyluridine-3'-phosphate
  modified_base 14: mod_base = OTHER; note = 2'-O-methylguanosine-3'-phosphate
  modified_base 15: mod_base = OTHER; note = 2'-O-methyladenosine-3'-phosphate
  modified_base 16: mod_base = OTHER; note = 2'-O-methyluridine-3'-phosphate
  modified_base 17: mod_base = OTHER; note = 2'-O-methylcytidine-3'-phosphate
  modified_base 18: mod_base = OTHER; note = 2'-O-methylcytidine-3'-phosphate
  modified_base 19: mod_base = OTHER; note = 2'-O-methyladenosine-3'-phosphate
  modified_base 20: mod_base = OTHER; note = 2'-O-methyladenosine-3'-phosphate
  modified_base 21: mod_base = OTHER; note = 2'-O-methyladenosine
cttctactgagatgatccaaa

SEQ ID NO: 3734 - RNA, 21 nt, synthetic construct
  source 1..21: mol_type = other RNA
  modified_base 1: mod_base = OTHER; note = 2'-O-methyluridine-3'-phosphate
  modified_base 2: mod_base = OTHER; note = 2'-O-methyluridine-3'-phosphate
  modified_base 3: mod_base = OTHER; note = 2'-O-methylcytidine-3'-phosphate
  modified_base 4: mod_base = OTHER; note = 2'-O-methyluridine-3'-phosphate
  modified_base 5: mod_base = OTHER; note = 2'-O-methyladenosine-3'-phosphate
  modified_base 6: mod_base = OTHER; note = 2'-O-methylcytidine-3'-phosphate
  modified_base 7: mod_base = OTHER; note = 2'-deoxy-2'-fluorouridine-3'-phosphate
  modified_base 8: mod_base = OTHER; note = 2'-O-methylguanosine-3'-phosphate
  modified_base 9: mod_base = OTHER; note = 2'-deoxy-2'-fluoroadenosine-3'-phosphate
  modified_base 10: mod_base = OTHER; note = 2'-deoxy-2'-fluoroguanosine-3'-phosphate
  modified_base 11: mod_base = OTHER; note = 2'-deoxy-2'-fluoroadenosine-3'-phosphate
  modified_base 12: mod_base = OTHER; note = 2'-O-methyluridine-3'-phosphate
  modified_base 13: mod_base = OTHER; note = 2'-O-methylguanosine-3'-phosphate
  modified_base 14: mod_base = OTHER; note = 2'-O-methyladenosine-3'-phosphate
  modified_base 15: mod_base = OTHER; note = 2'-O-methyluridine-3'-phosphate
  modified_base 16: mod_base = OTHER; note = 2'-O-methylcytidine-3'-phosphate
  modified_base 17: mod_base = OTHER; note = 2'-O-methylcytidine-3'-phosphate
  modified_base 18: mod_base = OTHER; note = 2'-O-methyladenosine-3'-phosphate
  modified_base 19: mod_base = OTHER; note = 2'-O-methyladenosine-3'-phosphate
  modified_base 20: mod_base = OTHER; note = 2'-O-methylguanosine-3'-phosphate
  modified_base 21: mod_base = OTHER; note = 2'-O-methyladenosine
ttctactgagatgatccaaga

SEQ ID NO: 3735 - RNA, 21 nt, synthetic construct
  source 1..21: mol_type = other RNA
  modified_base 1: mod_base = OTHER; note = 2'-O-methyluridine-3'-phosphate
  modified_base 2: mod_base = OTHER; note = 2'-O-methylcytidine-3'-phosphate
  modified_base 3: mod_base = OTHER; note = 2'-O-methyluridine-3'-phosphate
  modified_base 4: mod_base = OTHER; note = 2'-O-methyladenosine-3'-phosphate
  modified_base 5: mod_base = OTHER; note = 2'-O-methylcytidine-3'-phosphate
  modified_base 6: mod_base = OTHER; note = 2'-O-methyluridine-3'-phosphate
  modified_base 7: mod_base = OTHER; note = 2'-deoxy-2'-fluoroguanosine-3'-phosphate
  modified_base 8: mod_base = OTHER; note = 2'-O-methyladenosine-3'-phosphate
  modified_base 9: mod_base = OTHER; note = 2'-deoxy-2'-fluoroguanosine-3'-phosphate
  modified_base 10: mod_base = OTHER; note = 2'-deoxy-2'-fluoroadenosine-3'-phosphate
  modified_base 11: mod_base = OTHER; note = 2'-deoxy-2'-fluorouridine-3'-phosphate
  modified_base 12: mod_base = OTHER; note = 2'-O-methylguanosine-3'-phosphate
  modified_base 13: mod_base = OTHER; note = 2'-O-methyladenosine-3'-phosphate
  modified_base 14: mod_base = OTHER; note = 2'-O-methyluridine-3'-phosphate
  modified_base 15: mod_base = OTHER; note = 2'-O-methylcytidine-3'-phosphate
  modified_base 16: mod_base = OTHER; note = 2'-O-methylcytidine-3'-phosphate
  modified_base 17: mod_base = OTHER; note = 2'-O-methyladenosine-3'-phosphate
  modified_base 18: mod_base = OTHER; note = 2'-O-methyladenosine-3'-phosphate
  modified_base 19: mod_base = OTHER; note = 2'-O-methylguanosine-3'-phosphate
  modified_base 20: mod_base = OTHER; note = 2'-O-methyladenosine-3'-phosphate
  modified_base 21: mod_base = OTHER; note = 2'-O-methyladenosine
tctactgagatgatccaagaa

SEQ ID NO: 3736 - RNA, 21 nt, synthetic construct
  source 1..21: mol_type = other RNA
  modified_base 1: mod_base = OTHER; note = 2'-O-methylcytidine-3'-phosphate
  modified_base 2: mod_base = OTHER; note = 2'-O-methyluridine-3'-phosphate
  modified_base 3: mod_base = OTHER; note = 2'-O-methyladenosine-3'-phosphate
  modified_base 4: mod_base = OTHER; note = 2'-O-methylcytidine-3'-phosphate
  modified_base 5: mod_base = OTHER; note = 2'-O-methyluridine-3'-phosphate
  modified_base 6: mod_base = OTHER; note = 2'-O-methylguanosine-3'-phosphate
  modified_base 7: mod_base = OTHER; note = 2'-deoxy-2'-fluoroadenosine-3'-phosphate
  modified_base 8: mod_base = OTHER; note = 2'-O-methylguanosine-3'-phosphate
  modified_base 9: mod_base = OTHER; note = 2'-deoxy-2'-fluoroadenosine-3'-phosphate
  modified_base 10: mod_base = OTHER; note = 2'-deoxy-2'-fluorouridine-3'-phosphate
  modified_base 11: mod_base = OTHER; note = 2'-deoxy-2'-fluoroguanosine-3'-phosphate
  modified_base 12: mod_base = OTHER; note = 2'-O-methyladenosine-3'-phosphate
  modified_base 13: mod_base = OTHER; note = 2'-O-methyluridine-3'-phosphate
  modified_base 14: mod_base = OTHER; note = 2'-O-methylcytidine-3'-phosphate
  modified_base 15: mod_base = OTHER; note = 2'-O-methylcytidine-3'-phosphate
  modified_base 16: mod_base = OTHER; note = 2'-O-methyladenosine-3'-phosphate
  modified_base 17: mod_base = OTHER; note = 2'-O-methyladenosine-3'-phosphate
  modified_base 18: mod_base = OTHER; note = 2'-O-methylguanosine-3'-phosphate
  modified_base 19: mod_base = OTHER; note = 2'-O-methyladenosine-3'-phosphate
  modified_base 20: mod_base = OTHER; note = 2'-O-methylcytidine-3'-phosphate
  modified_base 21: mod_base = OTHER; note = 2'-O-methyladenosine
ctactgagatgatccaagaca

SEQ ID NO: 3737 - RNA, 21 nt, synthetic construct
  source 1..21: mol_type = other RNA
  modified_base 1: mod_base = OTHER; note = 2'-O-methyluridine-3'-phosphate
  modified_base 2: mod_base = OTHER; note = 2'-O-methyladenosine-3'-phosphate
  modified_base 3: mod_base = OTHER; note = 2'-O-methylcytidine-3'-phosphate
  modified_base 4: mod_base = OTHER; note = 2'-O-methyluridine-3'-phosphate
  modified_base 5: mod_base = OTHER; note = 2'-O-methylguanosine-3'-phosphate
  modified_base 6: mod_base = OTHER; note = 2'-O-methyladenosine-3'-phosphate
  modified_base 7: mod_base = OTHER; note = 2'-deoxy-2'-fluoroguanosine-3'-phosphate
  modified_base 8: mod_base = OTHER; note = 2'-O-methyladenosine-3'-phosphate
  modified_base 9: mod_base = OTHER; note = 2'-deoxy-2'-fluorouridine-3'-phosphate
  modified_base 10: mod_base = OTHER; note = 2'-deoxy-2'-fluoroguanosine-3'-phosphate
  modified_base 11: mod_base = OTHER; note = 2'-deoxy-2'-fluoroadenosine-3'-phosphate
  modified_base 12: mod_base = OTHER; note = 2'-O-methyluridine-3'-phosphate
  modified_base 13: mod_base = OTHER; note = 2'-O-methylcytidine-3'-phosphate
  modified_base 14: mod_base = OTHER; note = 2'-O-methylcytidine-3'-phosphate
  modified_base 15: mod_base = OTHER; note = 2'-O-methyladenosine-3'-phosphate
  modified_base 16: mod_base = OTHER; note = 2'-O-methyladenosine-3'-phosphate
  modified_base 17: mod_base = OTHER; note = 2'-O-methylguanosine-3'-phosphate
  modified_base 18: mod_base = OTHER; note = 2'-O-methyladenosine-3'-phosphate
  modified_base 19: mod_base = OTHER; note = 2'-O-methylcytidine-3'-phosphate
  modified_base 20: mod_base = OTHER; note = 2'-O-methylcytidine-3'-phosphate
  modified_base 21: mod_base = OTHER; note = 2'-O-methyladenosine
tactgagatgatccaagacca

SEQ ID NO: 3738 - RNA, 21 nt, synthetic construct
  source 1..21: mol_type = other RNA
  modified_base 1: mod_base = OTHER; note = 2'-O-methyladenosine-3'-phosphate
  modified_base 2: mod_base = OTHER; note = 2'-O-methylcytidine-3'-phosphate
  modified_base 3: mod_base = OTHER; note = 2'-O-methyluridine-3'-phosphate
  modified_base 4: mod_base = OTHER; note = 2'-O-methylguanosine-3'-phosphate
  modified_base 5: mod_base = OTHER; note = 2'-O-methyladenosine-3'-phosphate
  modified_base 6: mod_base = OTHER; note = 2'-O-methylguanosine-3'-phosphate
  modified_base 7: mod_base = OTHER; note = 2'-deoxy-2'-fluoroadenosine-3'-phosphate
  modified_base 8: mod_base = OTHER; note = 2'-O-methyluridine-3'-phosphate
  modified_base 9: mod_base = OTHER; note = 2'-deoxy-2'-fluoroguanosine-3'-phosphate
  modified_base 10: mod_base = OTHER; note = 2'-deoxy-2'-fluoroadenosine-3'-phosphate
  modified_base 11: mod_base = OTHER; note = 2'-deoxy-2'-fluorouridine-3'-phosphate
  modified_base 12: mod_base = OTHER; note = 2'-O-methylcytidine-3'-phosphate
  modified_base 13: mod_base = OTHER; note = 2'-O-methylcytidine-3'-phosphate
  modified_base 14: mod_base = OTHER; note = 2'-O-methyladenosine-3'-phosphate
  modified_base 15: mod_base = OTHER; note = 2'-O-methyladenosine-3'-phosphate
  modified_base 16: mod_base = OTHER; note = 2'-O-methylguanosine-3'-phosphate
  modified_base 17: mod_base = OTHER; note = 2'-O-methyladenosine-3'-phosphate
  modified_base 18: mod_base = OTHER; note = 2'-O-methylcytidine-3'-phosphate
  modified_base 19: mod_base = OTHER; note = 2'-O-methylcytidine-3'-phosphate
  modified_base 20: mod_base = OTHER; note = 2'-O-methyladenosine-3'-phosphate
  modified_base 21: mod_base = OTHER; note = 2'-O-methyladenosine
actgagatgatccaagaccaa

SEQ ID NO: 3739 - RNA, 21 nt, synthetic construct
  source 1..21: mol_type = other RNA
  modified_base 1: mod_base = OTHER; note = 2'-O-methylcytidine-3'-phosphate
  modified_base 2: mod_base = OTHER; note = 2'-O-methyluridine-3'-phosphate
  modified_base 3: mod_base = OTHER; note = 2'-O-methylguanosine-3'-phosphate
  modified_base 4: mod_base = OTHER; note = 2'-O-methyladenosine-3'-phosphate
  modified_base 5: mod_base = OTHER; note = 2'-O-methylguanosine-3'-phosphate
  modified_base 6: mod_base = OTHER; note = 2'-O-methyladenosine-3'-phosphate
  modified_base 7: mod_base = OTHER; note = 2'-deoxy-2'-fluorouridine-3'-phosphate
  modified_base 8: mod_base = OTHER; note = 2'-O-methylguanosine-3'-phosphate
  modified_base 9: mod_base = OTHER; note = 2'-deoxy-2'-fluoroadenosine-3'-phosphate
  modified_base 10: mod_base = OTHER; note = 2'-deoxy-2'-fluorouridine-3'-phosphate
  modified_base 11: mod_base = OTHER; note = 2'-deoxy-2'-fluorocytidine-3'-phosphate
  modified_base 12: mod_base = OTHER; note = 2'-O-methylcytidine-3'-phosphate
  modified_base 13: mod_base = OTHER; note = 2'-O-methyladenosine-3'-phosphate
  modified_base 14: mod_base = OTHER; note = 2'-O-methyladenosine-3'-phosphate
  modified_base 15: mod_base = OTHER; note = 2'-O-methylguanosine-3'-phosphate
  modified_base 16: mod_base = OTHER; note = 2'-O-methyladenosine-3'-phosphate
  modified_base 17: mod_base = OTHER; note = 2'-O-methylcytidine-3'-phosphate
  modified_base 18: mod_base = OTHER; note = 2'-O-methylcytidine-3'-phosphate
  modified_base 19: mod_base = OTHER; note = 2'-O-methyladenosine-3'-phosphate
  modified_base 20: mod_base = OTHER; note = 2'-O-methyladenosine-3'-phosphate
  modified_base 21: mod_base = OTHER; note = 2'-O-methyladenosine
ctgagatgatccaagaccaaa

SEQ ID NO: 3740 - RNA, 21 nt, synthetic construct
  source 1..21: mol_type = other RNA
  modified_base 1: mod_base = OTHER; note = 2'-O-methylcytidine-3'-phosphate
  modified_base 2: mod_base = OTHER; note = 2'-O-methylcytidine-3'-phosphate
  modified_base 3: mod_base = OTHER; note = 2'-O-methyladenosine-3'-phosphate
  modified_base 4: mod_base = OTHER; note = 2'-O-methyladenosine-3'-phosphate
  modified_base 5: mod_base = OTHER; note = 2'-O-methylguanosine-3'-phosphate
  modified_base 6: mod_base = OTHER; note = 2'-O-methyladenosine-3'-phosphate
  modified_base 7: mod_base = OTHER; note = 2'-deoxy-2'-fluorocytidine-3'-phosphate
  modified_base 8: mod_base = OTHER; note = 2'-O-methylcytidine-3'-phosphate
  modified_base 9: mod_base = OTHER; note = 2'-deoxy-2'-fluoroadenosine-3'-phosphate
  modified_base 10: mod_base = OTHER; note = 2'-deoxy-2'-fluoroadenosine-3'-phosphate
  modified_base 11: mod_base = OTHER; note = 2'-deoxy-2'-fluoroadenosine-3'-phosphate
  modified_base 12: mod_base = OTHER; note = 2'-O-methyladenosine-3'-phosphate
  modified_base 13: mod_base = OTHER; note = 2'-O-methylguanosine-3'-phosphate
  modified_base 14: mod_base = OTHER; note = 2'-O-methyluridine-3'-phosphate
  modified_base 15: mod_base = OTHER; note = 2'-O-methylguanosine-3'-phosphate
  modified_base 16: mod_base = OTHER; note = 2'-O-methyluridine-3'-phosphate
  modified_base 17: mod_base = OTHER; note = 2'-O-methyluridine-3'-phosphate
  modified_base 18: mod_base = OTHER; note = 2'-O-methylcytidine-3'-phosphate
  modified_base 19: mod_base = OTHER; note = 2'-O-methyluridine-3'-phosphate
  modified_base 20: mod_base = OTHER; note = 2'-O-methyluridine-3'-phosphate
  modified_base 21: mod_base = OTHER; note = 2'-O-methyladenosine
ccaagaccaaaagtgttctta

SEQ ID NO: 3741 - RNA, 21 nt, synthetic construct
  source 1..21: mol_type = other RNA
  modified_base 1: mod_base = OTHER; note = 2'-O-methylcytidine-3'-phosphate
  modified_base 2: mod_base = OTHER; note = 2'-O-methyladenosine-3'-phosphate
  modified_base 3: mod_base = OTHER; note = 2'-O-methyladenosine-3'-phosphate
  modified_base 4: mod_base = OTHER; note = 2'-O-methylguanosine-3'-phosphate
  modified_base 5: mod_base = OTHER; note = 2'-O-methyladenosine-3'-phosphate
  modified_base 6: mod_base = OTHER; note = 2'-O-methylcytidine-3'-phosphate
  modified_base 7: mod_base = OTHER; note = 2'-deoxy-2'-fluorocytidine-3'-phosphate
  modified_base 8: mod_base = OTHER; note = 2'-O-methyladenosine-3'-phosphate
  modified_base 9: mod_base = OTHER; note = 2'-deoxy-2'-fluoroadenosine-3'-phosphate
  modified_base 10: mod_base = OTHER; note = 2'-deoxy-2'-fluoroadenosine-3'-phosphate
  modified_base 11: mod_base = OTHER; note = 2'-deoxy-2'-fluoroadenosine-3'-phosphate
  modified_base 12: mod_base = OTHER; note = 2'-O-methylguanosine-3'-phosphate
  modified_base 13: mod_base = OTHER; note = 2'-O-methyluridine-3'-phosphate
  modified_base 14: mod_base = OTHER; note = 2'-O-methylguanosine-3'-phosphate
  modified_base 15: mod_base = OTHER; note = 2'-O-methyluridine-3'-phosphate
  modified_base 16: mod_base = OTHER; note = 2'-O-methyluridine-3'-phosphate
  modified_base 17: mod_base = OTHER; note = 2'-O-methylcytidine-3'-phosphate
  modified_base 18: mod_base = OTHER; note = 2'-O-methyluridine-3'-phosphate
  modified_base 19: mod_base = OTHER; note = 2'-O-methyluridine-3'-phosphate
  modified_base 20: mod_base = OTHER; note = 2'-O-methyluridine-3'-phosphate
  modified_base 21: mod_base = OTHER; note = 2'-O-methyladenosine
caagaccaaaagtgttcttta

SEQ ID NO: 3742 - RNA, 21 nt, synthetic construct
  source 1..21: mol_type = other RNA
  modified_base 1: mod_base = OTHER; note = 2'-O-methyladenosine-3'-phosphate
  modified_base 2: mod_base = OTHER; note = 2'-O-methyladenosine-3'-phosphate
  modified_base 3: mod_base = OTHER; note = 2'-O-methylguanosine-3'-phosphate
  modified_base 4: mod_base = OTHER; note = 2'-O-methyladenosine-3'-phosphate
  modified_base 5: mod_base = OTHER; note = 2'-O-methylcytidine-3'-phosphate
  modified_base 6: mod_base = OTHER; note = 2'-O-methylcytidine-3'-phosphate
  modified_base 7: mod_base = OTHER; note = 2'-deoxy-2'-fluoroadenosine-3'-phosphate
  modified_base 8: mod_base = OTHER; note = 2'-O-methyladenosine-3'-phosphate
  modified_base 9: mod_base = OTHER; note = 2'-deoxy-2'-fluoroadenosine-3'-phosphate
  modified_base 10: mod_base = OTHER; note = 2'-deoxy-2'-fluoroadenosine-3'-phosphate
  modified_base 11: mod_base = OTHER; note = 2'-deoxy-2'-fluoroguanosine-3'-phosphate
  modified_base 12: mod_base = OTHER; note = 2'-O-methyluridine-3'-phosphate
  modified_base 13: mod_base = OTHER; note = 2'-O-methylguanosine-3'-phosphate
  modified_base 14: mod_base = OTHER; note = 2'-O-methyluridine-3'-phosphate
  modified_base 15: mod_base = OTHER; note = 2'-O-methyluridine-3'-phosphate
  modified_base 16: mod_base = OTHER; note = 2'-O-methylcytidine-3'-phosphate
  modified_base 17: mod_base = OTHER; note = 2'-O-methyluridine-3'-phosphate
  modified_base 18: mod_base = OTHER; note = 2'-O-methyluridine-3'-phosphate
  modified_base 19: mod_base = OTHER; note = 2'-O-methyluridine-3'-phosphate
  modified_base 20: mod_base = OTHER; note = 2'-O-methylguanosine-3'-phosphate
  modified_base 21: mod_base = OTHER; note = 2'-O-methyladenosine
aagaccaaaagtgttctttga

SEQ ID NO: 3743 - RNA, 21 nt, synthetic construct
  source 1..21: mol_type = other RNA
  modified_base 1: mod_base = OTHER; note = 2'-O-methyladenosine-3'-phosphate
  modified_base 2: mod_base = OTHER; note = 2'-O-methylguanosine-3'-phosphate
  modified_base 3: mod_base = OTHER; note = 2'-O-methyladenosine-3'-phosphate
  modified_base 4: mod_base = OTHER; note = 2'-O-methylcytidine-3'-phosphate
  modified_base 5: mod_base = OTHER; note = 2'-O-methylcytidine-3'-phosphate
  modified_base 6: mod_base = OTHER; note = 2'-O-methyladenosine-3'-phosphate
  modified_base 7: mod_base = OTHER; note = 2'-deoxy-2'-fluoroadenosine-3'-phosphate
  modified_base 8: mod_base = OTHER; note = 2'-O-methyladenosine-3'-phosphate
  modified_base 9: mod_base = OTHER; note = 2'-deoxy-2'-fluoroadenosine-3'-phosphate
  modified_base 10: mod_base = OTHER; note = 2'-deoxy-2'-fluoroguanosine-3'-phosphate
  modified_base 11: mod_base = OTHER; note = 2'-deoxy-2'-fluorouridine-3'-phosphate
  modified_base 12: mod_base = OTHER; note = 2'-O-methylguanosine-3'-phosphate
  modified_base 13: mod_base = OTHER; note = 2'-O-methyluridine-3'-phosphate
  modified_base 14: mod_base = OTHER; note = 2'-O-methyluridine-3'-phosphate
  modified_base 15: mod_base = OTHER; note = 2'-O-methylcytidine-3'-phosphate
  modified_base 16: mod_base = OTHER; note = 2'-O-methyluridine-3'-phosphate
  modified_base 17: mod_base = OTHER; note = 2'-O-methyluridine-3'-phosphate
  modified_base 18: mod_base = OTHER; note = 2'-O-methyluridine-3'-phosphate
  modified_base 19: mod_base = OTHER; note = 2'-O-methylguanosine-3'-phosphate
  modified_base 20: mod_base = OTHER; note = 2'-O-methylguanosine-3'-phosphate
  modified_base 21: mod_base = OTHER; note = 2'-O-methyladenosine
agaccaaaagtgttctttgga

SEQ ID NO: 3744 - RNA, 21 nt, synthetic construct
  source 1..21: mol_type = other RNA
  modified_base 1: mod_base = OTHER; note = 2'-O-methylguanosine-3'-phosphate
  modified_base 2: mod_base = OTHER; note = 2'-O-methyladenosine-3'-phosphate
  modified_base 3: mod_base = OTHER; note = 2'-O-methylcytidine-3'-phosphate
  modified_base 4: mod_base = OTHER; note = 2'-O-methylcytidine-3'-phosphate
  modified_base 5: mod_base = OTHER; note = 2'-O-methyladenosine-3'-phosphate
  modified_base 6: mod_base = OTHER; note = 2'-O-methyladenosine-3'-phosphate
  modified_base 7: mod_base = OTHER; note = 2'-deoxy-2'-fluoroadenosine-3'-phosphate
  modified_base 8: mod_base = OTHER; note = 2'-O-methyladenosine-3'-phosphate
  modified_base 9: mod_base = OTHER; note = 2'-deoxy-2'-fluoroguanosine-3'-phosphate
  modified_base 10: mod_base = OTHER; note = 2'-deoxy-2'-fluorouridine-3'-phosphate
  modified_base 11: mod_base = OTHER; note = 2'-deoxy-2'-fluoroguanosine-3'-phosphate
  modified_base 12: mod_base = OTHER; note = 2'-O-methyluridine-3'-phosphate
  modified_base 13: mod_base = OTHER; note = 2'-O-methyluridine-3'-phosphate
  modified_base 14: mod_base = OTHER; note = 2'-O-methylcytidine-3'-phosphate
  modified_base 15: mod_base = OTHER; note = 2'-O-methyluridine-3'-phosphate
  modified_base 16: mod_base = OTHER; note = 2'-O-methyluridine-3'-phosphate
  modified_base 17: mod_base = OTHER; note = 2'-O-methyluridine-3'-phosphate
  modified_base 18: mod_base = OTHER; note = 2'-O-methylguanosine-3'-phosphate
  modified_base 19: mod_base = OTHER; note = 2'-O-methylguanosine-3'-phosphate
  modified_base 20: mod_base = OTHER; note = 2'-O-methyluridine-3'-phosphate
  modified_base 21: mod_base = OTHER; note = 2'-O-methyladenosine
gaccaaaagtgttctttggta

SEQ ID NO: 3745 - RNA, 21 nt, synthetic construct
  source 1..21: mol_type = other RNA
  modified_base 1: mod_base = OTHER; note = 2'-O-methyladenosine-3'-phosphate
  modified_base 2: mod_base = OTHER; note = 2'-O-methylcytidine-3'-phosphate
  modified_base 3: mod_base = OTHER; note = 2'-O-methylcytidine-3'-phosphate
  modified_base 4: mod_base = OTHER; note = 2'-O-methyladenosine-3'-phosphate
  modified_base 5: mod_base = OTHER; note = 2'-O-methyladenosine-3'-phosphate
  modified_base 6: mod_base = OTHER; note = 2'-O-methyladenosine-3'-phosphate
  modified_base 7: mod_base = OTHER; note = 2'-deoxy-2'-fluoroadenosine-3'-phosphate
  modified_base 8: mod_base = OTHER; note = 2'-O-methylguanosine-3'-phosphate
  modified_base 9: mod_base = OTHER; note = 2'-deoxy-2'-fluorouridine-3'-phosphate
  modified_base 10: mod_base = OTHER; note = 2'-deoxy-2'-fluoroguanosine-3'-phosphate
  modified_base 11: mod_base = OTHER; note = 2'-deoxy-2'-fluorouridine-3'-phosphate
  modified_base 12: mod_base = OTHER; note = 2'-O-methyluridine-3'-phosphate
  modified_base 13: mod_base = OTHER; note = 2'-O-methylcytidine-3'-phosphate
  modified_base 14: mod_base = OTHER; note = 2'-O-methyluridine-3'-phosphate
  modified_base 15: mod_base = OTHER; note = 2'-O-methyluridine-3'-phosphate
  modified_base 16: mod_base = OTHER; note = 2'-O-methyluridine-3'-phosphate
  modified_base 17: mod_base = OTHER; note = 2'-O-methylguanosine-3'-phosphate
  modified_base 18: mod_base = OTHER; note = 2'-O-methylguanosine-3'-phosphate
  modified_base 19: mod_base = OTHER; note = 2'-O-methyluridine-3'-phosphate
  modified_base 20: mod_base = OTHER; note = 2'-O-methyladenosine-3'-phosphate
  modified_base 21: mod_base = OTHER; note = 2'-O-methyladenosine
accaaaagtgttctttggtaa

SEQ ID NO: 3746 - RNA, 21 nt, synthetic construct
  source 1..21: mol_type = other RNA
  modified_base 1: mod_base = OTHER; note = 2'-O-methylcytidine-3'-phosphate
  modified_base 2: mod_base = OTHER; note = 2'-O-methylcytidine-3'-phosphate
  modified_base 3: mod_base = OTHER; note = 2'-O-methyladenosine-3'-phosphate
  modified_base 4: mod_base = OTHER; note = 2'-O-methyladenosine-3'-phosphate
  modified_base 5: mod_base = OTHER; note = 2'-O-methyladenosine-3'-phosphate
  modified_base 6: mod_base = OTHER; note = 2'-O-methyladenosine-3'-phosphate
  modified_base 7: mod_base = OTHER; note = 2'-deoxy-2'-fluoroguanosine-3'-phosphate
  modified_base 8: mod_base = OTHER; note = 2'-O-methyluridine-3'-phosphate
  modified_base 9: mod_base = OTHER; note = 2'-deoxy-2'-fluoroguanosine-3'-phosphate
  modified_base 10: mod_base = OTHER; note = 2'-deoxy-2'-fluorouridine-3'-phosphate
  modified_base 11: mod_base = OTHER; note = 2'-deoxy-2'-fluorouridine-3'-phosphate
  modified_base 12: mod_base = OTHER; note = 2'-O-methylcytidine-3'-phosphate
  modified_base 13: mod_base = OTHER; note = 2'-O-methyluridine-3'-phosphate
  modified_base 14: mod_base = OTHER; note = 2'-O-methyluridine-3'-phosphate
  modified_base 15: mod_base = OTHER; note = 2'-O-methyluridine-3'-phosphate
  modified_base 16: mod_base = OTHER; note = 2'-O-methylguanosine-3'-phosphate
  modified_base 17: mod_base = OTHER; note = 2'-O-methylguanosine-3'-phosphate
  modified_base 18: mod_base = OTHER; note = 2'-O-methyluridine-3'-phosphate
  modified_base 19: mod_base = OTHER; note = 2'-O-methyladenosine-3'-phosphate
  modified_base 20: mod_base = OTHER; note = 2'-O-methylcytidine-3'-phosphate
  modified_base 21: mod_base = OTHER; note = 2'-O-methyladenosine
ccaaaagtgttctttggtaca

SEQ ID NO: 3747 - RNA, 21 nt, synthetic construct
  source 1..21: mol_type = other RNA
  modified_base 1: mod_base = OTHER; note = 2'-O-methylcytidine-3'-phosphate
  modified_base 2: mod_base = OTHER; note = 2'-O-methyladenosine-3'-phosphate
  modified_base 3: mod_base = OTHER; note = 2'-O-methyladenosine-3'-phosphate
  modified_base 4: mod_base = OTHER; note = 2'-O-methyladenosine-3'-phosphate
  modified_base 5: mod_base = OTHER; note = 2'-O-methyladenosine-3'-phosphate
  modified_base 6: mod_base = OTHER; note = 2'-O-methylguanosine-3'-phosphate
  modified_base 7: mod_base = OTHER; note = 2'-deoxy-2'-fluorouridine-3'-phosphate
  modified_base 8: mod_base = OTHER; note = 2'-O-methylguanosine-3'-phosphate
  modified_base 9: mod_base = OTHER; note = 2'-deoxy-2'-fluorouridine-3'-phosphate
  modified_base 10: mod_base = OTHER; note = 2'-deoxy-2'-fluorouridine-3'-phosphate
  modified_base 11: mod_base = OTHER; note = 2'-deoxy-2'-fluorocytidine-3'-phosphate
  modified_base 12: mod_base = OTHER; note = 2'-O-methyluridine-3'-phosphate
  modified_base 13: mod_base = OTHER; note = 2'-O-methyluridine-3'-phosphate
  modified_base 14: mod_base = OTHER; note = 2'-O-methyluridine-3'-phosphate
  modified_base 15: mod_base = OTHER; note = 2'-O-methylguanosine-3'-phosphate
  modified_base 16: mod_base = OTHER; note = 2'-O-methylguanosine-3'-phosphate
  modified_base 17: mod_base = OTHER; note = 2'-O-methyluridine-3'-phosphate
  modified_base 18: mod_base = OTHER; note = 2'-O-methyladenosine-3'-phosphate
  modified_base 19: mod_base = OTHER; note = 2'-O-methylcytidine-3'-phosphate
  modified_base 20: mod_base = OTHER; note = 2'-O-methyluridine-3'-phosphate
  modified_base 21: mod_base = OTHER; note = 2'-O-methyladenosine
caaaagtgttctttggtacta

SEQ ID NO: 3748 - RNA, 21 nt, synthetic construct
  source 1..21: mol_type = other RNA
  modified_base 1: mod_base = OTHER; note = 2'-O-methyladenosine-3'-phosphate
  modified_base 2: mod_base = OTHER; note = 2'-O-methyladenosine-3'-phosphate
  modified_base 3: mod_base = OTHER; note = 2'-O-methyladenosine-3'-phosphate
  modified_base 4: mod_base = OTHER; note = 2'-O-methyladenosine-3'-phosphate
  modified_base 5: mod_base = OTHER; note = 2'-O-methylguanosine-3'-phosphate
  modified_base 6: mod_base = OTHER; note = 2'-O-methyluridine-3'-phosphate
  modified_base 7: mod_base = OTHER; note = 2'-deoxy-2'-fluoroguanosine-3'-phosphate
  modified_base 8: mod_base = OTHER; note = 2'-O-methyluridine-3'-phosphate
  modified_base 9: mod_base = OTHER; note = 2'-deoxy-2'-fluorouridine-3'-phosphate
  modified_base 10: mod_base = OTHER; note = 2'-deoxy-2'-fluorocytidine-3'-phosphate
  modified_base 11: mod_base = OTHER; note = 2'-deoxy-2'-fluorouridine-3'-phosphate
  modified_base 12: mod_base = OTHER; note = 2'-O-methyluridine-3'-phosphate
  modified_base 13: mod_base = OTHER; note = 2'-O-methyluridine-3'-phosphate
  modified_base 14: mod_base = OTHER; note = 2'-O-methylguanosine-3'-phosphate
  modified_base 15: mod_base = OTHER; note = 2'-O-methylguanosine-3'-phosphate
  modified_base 16: mod_base = OTHER; note = 2'-O-methyluridine-3'-phosphate
  modified_base 17: mod_base = OTHER; note = 2'-O-methyladenosine-3'-phosphate
  modified_base 18: mod_base = OTHER; note = 2'-O-methylcytidine-3'-phosphate
  modified_base 19: mod_base = OTHER; note = 2'-O-methyluridine-3'-phosphate
  modified_base 20: mod_base = OTHER; note = 2'-O-methyluridine-3'-phosphate
  modified_base 21: mod_base = OTHER; note = 2'-O-methyladenosine
aaaagtgttctttggtactta

SEQ ID NO: 3749 - RNA, 21 nt, synthetic construct
  source 1..21: mol_type = other RNA
  modified_base 1: mod_base = OTHER; note = 2'-O-methyladenosine-3'-phosphate
  modified_base 2: mod_base = OTHER; note = 2'-O-methyladenosine-3'-phosphate
  modified_base 3: mod_base = OTHER; note = 2'-O-methyladenosine-3'-phosphate
  modified_base 4: mod_base = OTHER; note = 2'-O-methylguanosine-3'-phosphate
  modified_base 5: mod_base = OTHER; note = 2'-O-methyluridine-3'-phosphate
  modified_base 6: mod_base = OTHER; note = 2'-O-methylguanosine-3'-phosphate
  modified_base 7: mod_base = OTHER; note = 2'-deoxy-2'-fluorouridine-3'-phosphate
  modified_base 8: mod_base = OTHER; note = 2'-O-methyluridine-3'-phosphate
  modified_base 9: mod_base = OTHER; note = 2'-deoxy-2'-fluorocytidine-3'-phosphate
  modified_base 10: mod_base = OTHER; note = 2'-deoxy-2'-fluorouridine-3'-phosphate
  modified_base 11: mod_base = OTHER; note = 2'-deoxy-2'-fluorouridine-3'-phosphate
  modified_base 12: mod_base = OTHER; note = 2'-O-methyluridine-3'-phosphate
  modified_base 13: mod_base = OTHER; note = 2'-O-methylguanosine-3'-phosphate
  modified_base 14: mod_base = OTHER; note = 2'-O-methylguanosine-3'-phosphate
  modified_base 15: mod_base = OTHER; note = 2'-O-methyluridine-3'-phosphate
  modified_base 16: mod_base = OTHER; note = 2'-O-methyladenosine-3'-phosphate
  modified_base 17: mod_base = OTHER; note = 2'-O-methylcytidine-3'-phosphate
  modified_base 18: mod_base = OTHER; note = 2'-O-methyluridine-3'-phosphate
  modified_base 19: mod_base = OTHER; note = 2'-O-methyluridine-3'-phosphate
  modified_base 20: mod_base = OTHER; note = 2'-O-methylguanosine-3'-phosphate
  modified_base 21: mod_base = OTHER; note = 2'-O-methyladenosine
aaagtgttctttggtacttga

SEQ ID NO: 3750 - RNA, 21 nt, synthetic construct
  source 1..21: mol_type = other RNA
  modified_base 1: mod_base = OTHER; note = 2'-O-methyladenosine-3'-phosphate
  modified_base 2: mod_base = OTHER; note = 2'-O-methyladenosine-3'-phosphate
  modified_base 3: mod_base = OTHER; note = 2'-O-methylguanosine-3'-phosphate
  modified_base 4: mod_base = OTHER; note = 2'-O-methyluridine-3'-phosphate
  modified_base 5: mod_base = OTHER; note = 2'-O-methylguanosine-3'-phosphate
  modified_base 6: mod_base = OTHER; note = 2'-O-methyluridine-3'-phosphate
  modified_base 7: mod_base = OTHER; note = 2'-deoxy-2'-fluorouridine-3'-phosphate
  modified_base 8: mod_base = OTHER; note = 2'-O-methylcytidine-3'-phosphate
  modified_base 9: mod_base = OTHER; note = 2'-deoxy-2'-fluorouridine-3'-phosphate
  modified_base 10: mod_base = OTHER; note = 2'-deoxy-2'-fluorouridine-3'-phosphate
  modified_base 11: mod_base = OTHER; note = 2'-deoxy-2'-fluorouridine-3'-phosphate
  modified_base 12: mod_base = OTHER; note = 2'-O-methylguanosine-3'-phosphate
  modified_base 13: mod_base = OTHER; note = 2'-O-methylguanosine-3'-phosphate
  modified_base 14: mod_base = OTHER; note = 2'-O-methyluridine-3'-phosphate
  modified_base 15: mod_base = OTHER; note = 2'-O-methyladenosine-3'-phosphate
  modified_base 16: mod_base = OTHER; note = 2'-O-methylcytidine-3'-phosphate
  modified_base 17: mod_base = OTHER; note = 2'-O-methyluridine-3'-phosphate
  modified_base 18: mod_base = OTHER; note = 2'-O-methyluridine-3'-phosphate
  modified_base 19: mod_base = OTHER; note = 2'-O-methylguanosine-3'-phosphate
  modified_base 20: mod_base = OTHER; note = 2'-O-methylcytidine-3'-phosphate
  modified_base 21: mod_base = OTHER; note = 2'-O-methyladenosine
aagtgttctttggtacttgca

SEQ ID NO: 3751 - RNA, 21 nt, synthetic construct
  source 1..21: mol_type = other RNA
  modified_base 1: mod_base = OTHER; note = 2'-O-methyluridine-3'-phosphate
  modified_base 2: mod_base = OTHER; note = 2'-O-methylcytidine-3'-phosphate
  modified_base 3: mod_base = OTHER; note = 2'-O-methyluridine-3'-phosphate
  modified_base 4: mod_base = OTHER; note = 2'-O-methyluridine-3'-phosphate
  modified_base 5: mod_base = OTHER; note = 2'-O-methyluridine-3'-phosphate
  modified_base 6: mod_base = OTHER; note = 2'-O-methylguanosine-3'-phosphate
  modified_base 7: mod_base = OTHER; note = 2'-deoxy-2'-fluoroguanosine-3'-phosphate
  modified_base 8: mod_base = OTHER; note = 2'-O-methyluridine-3'-phosphate
  modified_base 9: mod_base = OTHER; note = 2'-deoxy-2'-fluoroadenosine-3'-phosphate
  modified_base 10: mod_base = OTHER; note = 2'-deoxy-2'-fluorocytidine-3'-phosphate
  modified_base 11: mod_base = OTHER; note = 2'-deoxy-2'-fluorouridine-3'-phosphate
  modified_base 12: mod_base = OTHER; note = 2'-O-methyluridine-3'-phosphate
  modified_base 13: mod_base = OTHER; note = 2'-O-methylguanosine-3'-phosphate
  modified_base 14: mod_base = OTHER; note = 2'-O-methylcytidine-3'-phosphate
  modified_base 15: mod_base = OTHER; note = 2'-O-methyluridine-3'-phosphate
  modified_base 16: mod_base = OTHER; note = 2'-O-methyluridine-3'-phosphate
  modified_base 17: mod_base = OTHER; note = 2'-O-methyladenosine-3'-phosphate
  modified_base 18: mod_base = OTHER; note = 2'-O-methyluridine-3'-phosphate
  modified_base 19: mod_base = OTHER; note = 2'-O-methyladenosine-3'-phosphate
  modified_base 20: mod_base = OTHER; note = 2'-O-methyladenosine-3'-phosphate
  modified_base 21: mod_base = OTHER; note = 2'-O-methyladenosine
tctttggtacttgcttataaa

SEQ ID NO: 3752 - RNA, 21 nt, synthetic construct
  source 1..21: mol_type = other RNA
  modified_base 1: mod_base = OTHER; note = 2'-O-methylcytidine-3'-phosphate
  modified_base 2: mod_base = OTHER; note = 2'-O-methyluridine-3'-phosphate
  modified_base 3: mod_base = OTHER; note = 2'-O-methyluridine-3'-phosphate
  modified_base 4: mod_base = OTHER; note = 2'-O-methyluridine-3'-phosphate
  modified_base 5: mod_base = OTHER; note = 2'-O-methylguanosine-3'-phosphate
  modified_base 6: mod_base = OTHER; note = 2'-O-methylguanosine-3'-phosphate
  modified_base 7: mod_base = OTHER; note = 2'-deoxy-2'-fluorouridine-3'-phosphate
  modified_base 8: mod_base = OTHER; note = 2'-O-methyladenosine-3'-phosphate
  modified_base 9: mod_base = OTHER; note = 2'-deoxy-2'-fluorocytidine-3'-phosphate
  modified_base 10: mod_base = OTHER; note = 2'-deoxy-2'-fluorouridine-3'-phosphate
  modified_base 11: mod_base = OTHER; note = 2'-deoxy-2'-fluorouridine-3'-phosphate
  modified_base 12: mod_base = OTHER; note = 2'-O-methylguanosine-3'-phosphate
  modified_base 13: mod_base = OTHER; note = 2'-O-methylcytidine-3'-phosphate
  modified_base 14: mod_base = OTHER; note = 2'-O-methyluridine-3'-phosphate
  modified_base 15: mod_base = OTHER; note = 2'-O-methyluridine-3'-phosphate
  modified_base 16: mod_base = OTHER; note = 2'-O-methyladenosine-3'-phosphate
  modified_base 17: mod_base = OTHER; note = 2'-O-methyluridine-3'-phosphate
  modified_base 18: mod_base = OTHER; note = 2'-O-methyladenosine-3'-phosphate
  modified_base 19: mod_base = OTHER; note = 2'-O-methyladenosine-3'-phosphate
  modified_base 20: mod_base = OTHER; note = 2'-O-methyladenosine-3'-phosphate
  modified_base 21: mod_base = OTHER; note = 2'-O-methyladenosine
ctttggtacttgcttataaaa

SEQ ID NO: 3753 - RNA, 21 nt, synthetic construct
  source 1..21: mol_type = other RNA
  modified_base 1: mod_base = OTHER; note = 2'-O-methyluridine-3'-phosphate
  modified_base 2: mod_base = OTHER; note = 2'-O-methyluridine-3'-phosphate
  modified_base 3: mod_base = OTHER; note = 2'-O-methylguanosine-3'-phosphate
  modified_base 4: mod_base = OTHER; note = 2'-O-methylguanosine-3'-phosphate
  modified_base 5: mod_base = OTHER; note = 2'-O-methyluridine-3'-phosphate
  modified_base 6: mod_base = OTHER; note = 2'-O-methyladenosine-3'-phosphate
  modified_base 7: mod_base = OTHER; note = 2'-deoxy-2'-fluorocytidine-3'-phosphate
  modified_base 8: mod_base = OTHER; note = 2'-O-methyluridine-3'-phosphate
  modified_base 9: mod_base = OTHER; note = 2'-deoxy-2'-fluorouridine-3'-phosphate
  modified_base 10: mod_base = OTHER; note = 2'-deoxy-2'-fluoroguanosine-3'-phosphate
  modified_base 11: mod_base = OTHER; note = 2'-deoxy-2'-fluorocytidine-3'-phosphate
  modified_base 12: mod_base = OTHER; note = 2'-O-methyluridine-3'-phosphate
  modified_base 13: mod_base = OTHER; note = 2'-O-methyluridine-3'-phosphate
  modified_base 14: mod_base = OTHER; note = 2'-O-methyladenosine-3'-phosphate
  modified_base 15: mod_base = OTHER; note = 2'-O-methyluridine-3'-phosphate
  modified_base 16: mod_base = OTHER; note = 2'-O-methyladenosine-3'-phosphate
  modified_base 17: mod_base = OTHER; note = 2'-O-methyladenosine-3'-phosphate
  modified_base 18: mod_base = OTHER; note = 2'-O-methyladenosine-3'-phosphate
  modified_base 19: mod_base = OTHER; note = 2'-O-methylguanosine-3'-phosphate
  modified_base 20: mod_base = OTHER; note = 2'-O-methyluridine-3'-phosphate
  modified_base 21: mod_base = OTHER; note = 2'-O-methyladenosine
ttggtacttgcttataaagta

SEQ ID NO: 3754 - RNA, 21 nt, synthetic construct
  source 1..21: mol_type = other RNA
  modified_base 1: mod_base = OTHER; note = 2'-O-methyluridine-3'-phosphate
  modified_base 2: mod_base = OTHER; note = 2'-O-methylguanosine-3'-phosphate
  modified_base 3: mod_base = OTHER; note = 2'-O-methylguanosine-3'-phosphate
  modified_base 4: mod_base = OTHER; note = 2'-O-methyluridine-3'-phosphate
  modified_base 5: mod_base = OTHER; note = 2'-O-methyladenosine-3'-phosphate
  modified_base 6: mod_base = OTHER; note = 2'-O-methylcytidine-3'-phosphate
  modified_base 7: mod_base = OTHER; note = 2'-deoxy-2'-fluorouridine-3'-phosphate
  modified_base 8: mod_base = OTHER; note = 2'-O-methyluridine-3'-phosphate
  modified_base 9: mod_base = OTHER; note = 2'-deoxy-2'-fluoroguanosine-3'-phosphate
  modified_base 10: mod_base = OTHER; note = 2'-deoxy-2'-fluorocytidine-3'-phosphate
  modified_base 11: mod_base = OTHER; note = 2'-deoxy-2'-fluorouridine-3'-phosphate
  modified_base 12: mod_base = OTHER; note = 2'-O-methyluridine-3'-phosphate
  modified_base 13: mod_base = OTHER; note = 2'-O-methyladenosine-3'-phosphate
  modified_base 14: mod_base = OTHER; note = 2'-O-methyluridine-3'-phosphate
  modified_base 15: mod_base = OTHER; note = 2'-O-methyladenosine-3'-phosphate
  modified_base 16: mod_base = OTHER; note = 2'-O-methyladenosine-3'-phosphate
  modified_base 17: mod_base = OTHER; note = 2'-O-methyladenosine-3'-phosphate
  modified_base 18: mod_base = OTHER; note = 2'-O-methylguanosine-3'-phosphate
  modified_base 19: mod_base = OTHER; note = 2'-O-methyluridine-3'-phosphate
  modified_base 20: mod_base = OTHER; note = 2'-O-methylguanosine-3'-phosphate
  modified_base 21: mod_base = OTHER; note = 2'-O-methyladenosine
tggtacttgcttataaagtga

SEQ ID NO: 3755 - RNA, 21 nt, synthetic construct
  source 1..21: mol_type = other RNA
  modified_base 1: mod_base = OTHER; note = 2'-O-methyluridine-3'-phosphate
  modified_base 2: mod_base = OTHER; note = 2'-O-methyladenosine-3'-phosphate
  modified_base 3: mod_base = OTHER; note = 2'-O-methylcytidine-3'-phosphate
  modified_base 4: mod_base = OTHER; note = 2'-O-methyluridine-3'-phosphate
  modified_base 5: mod_base = OTHER; note = 2'-O-methyluridine-3'-phosphate
  modified_base 6: mod_base = OTHER; note = 2'-O-methylguanosine-3'-phosphate
  modified_base 7: mod_base = OTHER; note = 2'-deoxy-2'-fluorocytidine-3'-phosphate
  modified_base 8: mod_base = OTHER; note = 2'-O-methyluridine-3'-phosphate
  modified_base 9: mod_base = OTHER; note = 2'-deoxy-2'-fluorouridine-3'-phosphate
  modified_base 10: mod_base = OTHER; note = 2'-deoxy-2'-fluoroadenosine-3'-phosphate
  modified_base 11: mod_base = OTHER; note = 2'-deoxy-2'-fluorouridine-3'-phosphate
  modified_base 12: mod_base = OTHER; note = 2'-O-methyladenosine-3'-phosphate
  modified_base 13: mod_base = OTHER; note = 2'-O-methyladenosine-3'-phosphate
  modified_base 14: mod_base = OTHER; note = 2'-O-methyladenosine-3'-phosphate
  modified_base 15: mod_base = OTHER; note = 2'-O-methylguanosine-3'-phosphate
  modified_base 16: mod_base = OTHER; note = 2'-O-methyluridine-3'-phosphate
  modified_base 17: mod_base = OTHER; note = 2'-O-methylguanosine-3'-phosphate
  modified_base 18: mod_base = OTHER; note = 2'-O-methyladenosine-3'-phosphate
  modified_base 19: mod_base = OTHER; note = 2'-O-methyluridine-3'-phosphate
  modified_base 20: mod_base = OTHER; note = 2'-O-methyladenosine-3'-phosphate
  modified_base 21: mod_base = OTHER; note = 2'-O-methyladenosine
tacttgcttataaagtgataa

SEQ ID NO: 3756 - RNA, 21 nt, synthetic construct
  source 1..21: mol_type = other RNA
  modified_base 1: mod_base = OTHER; note = 2'-O-methyluridine-3'-phosphate
  modified_base 2: mod_base = OTHER; note = 2'-O-methyluridine-3'-phosphate
  modified_base 3: mod_base = OTHER; note = 2'-O-methylguanosine-3'-phosphate
  modified_base 4: mod_base = OTHER; note = 2'-O-methylcytidine-3'-phosphate
  modified_base 5: mod_base = OTHER; note = 2'-O-methyluridine-3'-phosphate
  modified_base 6: mod_base = OTHER; note = 2'-O-methyluridine-3'-phosphate
  modified_base 7: mod_base = OTHER; note = 2'-deoxy-2'-fluoroadenosine-3'-phosphate
  modified_base 8: mod_base = OTHER; note = 2'-O-methyluridine-3'-phosphate
  modified_base 9: mod_base = OTHER; note = 2'-deoxy-2'-fluoroadenosine-3'-phosphate
  modified_base 10: mod_base = OTHER; note = 2'-deoxy-2'-fluoroadenosine-3'-phosphate
  modified_base 11: mod_base = OTHER; note = 2'-deoxy-2'-fluoroadenosine-3'-phosphate
  modified_base 12: mod_base = OTHER; note = 2'-O-methylguanosine-3'-phosphate
  modified_base 13: mod_base = OTHER; note = 2'-O-methyluridine-3'-phosphate
  modified_base 14: mod_base = OTHER; note = 2'-O-methylguanosine-3'-phosphate
  modified_base 15: mod_base = OTHER; note = 2'-O-methyladenosine-3'-phosphate
  modified_base 16: mod_base = OTHER; note = 2'-O-methyluridine-3'-phosphate
  modified_base 17: mod_base = OTHER; note = 2'-O-methyladenosine-3'-phosphate
  modified_base 18: mod_base = OTHER; note = 2'-O-methylguanosine-3'-phosphate
  modified_base 19: mod_base = OTHER; note = 2'-O-methyluridine-3'-phosphate
  modified_base 20: mod_base = OTHER; note = 2'-O-methyladenosine-3'-phosphate
  modified_base 21: mod_base = OTHER; note = 2'-O-methyladenosine
ttgcttataaagtgatagtaa

SEQ ID NO: 3757 - RNA, 21 nt, synthetic construct
  source 1..21: mol_type = other RNA
  modified_base 1: mod_base = OTHER; note = 2'-O-methylcytidine-3'-phosphate
  modified_base 2: mod_base = OTHER; note = 2'-O-methyluridine-3'-phosphate
  modified_base 3: mod_base = OTHER; note = 2'-O-methyluridine-3'-phosphate
  modified_base 4: mod_base = OTHER; note = 2'-O-methyladenosine-3'-phosphate
  modified_base 5: mod_base = OTHER; note = 2'-O-methyluridine-3'-phosphate
  modified_base 6: mod_base = OTHER; note = 2'-O-methyladenosine-3'-phosphate
  modified_base 7: mod_base = OTHER; note = 2'-deoxy-2'-fluoroadenosine-3'-phosphate
  modified_base 8: mod_base = OTHER; note = 2'-O-methyladenosine-3'-phosphate
  modified_base 9: mod_base = OTHER; note = 2'-deoxy-2'-fluoroguanosine-3'-phosphate
  modified_base 10: mod_base = OTHER; note = 2'-deoxy-2'-fluorouridine-3'-phosphate
  modified_base 11: mod_base = OTHER; note = 2'-deoxy-2'-fluoroguanosine-3'-phosphate
  modified_base 12: mod_base = OTHER; note = 2'-O-methyladenosine-3'-phosphate
  modified_base 13: mod_base = OTHER; note = 2'-O-methyluridine-3'-phosphate
  modified_base 14: mod_base = OTHER; note = 2'-O-methyladenosine-3'-phosphate
  modified_base 15: mod_base = OTHER; note = 2'-O-methylguanosine-3'-phosphate
  modified_base 16: mod_base = OTHER; note = 2'-O-methyluridine-3'-phosphate
  modified_base 17: mod_base = OTHER; note = 2'-O-methyladenosine-3'-phosphate
  modified_base 18: mod_base = OTHER; note = 2'-O-methylcytidine-3'-phosphate
  modified_base 19: mod_base = OTHER; note = 2'-O-methyladenosine-3'-phosphate
  modified_base 20: mod_base = OTHER; note = 2'-O-methyluridine-3'-phosphate
  modified_base 21: mod_base = OTHER; note = 2'-O-methyladenosine
cttataaagtgatagtacata

SEQ ID NO: 3758 - RNA, 21 nt, synthetic construct
  source 1..21: mol_type = other RNA
  modified_base 1: mod_base = OTHER; note = 2'-O-methyluridine-3'-phosphate
  modified_base 2: mod_base = OTHER; note = 2'-O-methyluridine-3'-phosphate
  modified_base 3: mod_base = OTHER; note = 2'-O-methyladenosine-3'-phosphate
  modified_base 4: mod_base = OTHER; note = 2'-O-methyluridine-3'-phosphate
  modified_base 5: mod_base = OTHER; note = 2'-O-methyladenosine-3'-phosphate
  modified_base 6: mod_base = OTHER; note = 2'-O-methyladenosine-3'-phosphate
  modified_base 7: mod_base = OTHER; note = 2'-deoxy-2'-fluoroadenosine-3'-phosphate
  modified_base 8: mod_base = OTHER; note = 2'-O-methylguanosine-3'-phosphate
  modified_base 9: mod_base = OTHER; note = 2'-deoxy-2'-fluorouridine-3'-phosphate
  modified_base 10: mod_base = OTHER; note = 2'-deoxy-2'-fluoroguanosine-3'-phosphate
  modified_base 11: mod_base = OTHER; note = 2'-deoxy-2'-fluoroadenosine-3'-phosphate
  modified_base 12: mod_base = OTHER; note = 2'-O-methyluridine-3'-phosphate
  modified_base 13: mod_base = OTHER; note = 2'-O-methyladenosine-3'-phosphate
  modified_base 14: mod_base = OTHER; note = 2'-O-methylguanosine-3'-phosphate
  modified_base 15: mod_base = OTHER; note = 2'-O-methyluridine-3'-phosphate
  modified_base 16: mod_base = OTHER; note = 2'-O-methyladenosine-3'-phosphate
  modified_base 17: mod_base = OTHER; note = 2'-O-methylcytidine-3'-phosphate
  modified_base 18: mod_base = OTHER; note = 2'-O-methyladenosine-3'-phosphate
  modified_base 19: mod_base = OTHER; note = 2'-O-methyluridine-3'-phosphate
  modified_base 20: mod_base = OTHER; note = 2'-O-methylguanosine-3'-phosphate
  modified_base 21: mod_base = OTHER; note = 2'-O-methyladenosine
ttataaagtgatagtacatga

SEQ ID NO: 3759 - RNA, 21 nt, synthetic construct
  source 1..21: mol_type = other RNA
  modified_base 1: mod_base = OTHER; note = 2'-O-methyluridine-3'-phosphate
  modified_base 2: mod_base = OTHER; note = 2'-O-methyladenosine-3'-phosphate
  modified_base 3: mod_base = OTHER; note = 2'-O-methyluridine-3'-phosphate
  modified_base 4: mod_base = OTHER; note = 2'-O-methyladenosine-3'-phosphate
  modified_base 5: mod_base = OTHER; note = 2'-O-methyladenosine-3'-phosphate
  modified_base 6: mod_base = OTHER; note = 2'-O-methyladenosine-3'-phosphate
  modified_base 7: mod_base = OTHER; note = 2'-deoxy-2'-fluoroguanosine-3'-phosphate
  modified_base 8: mod_base = OTHER; note = 2'-O-methyluridine-3'-phosphate
  modified_base 9: mod_base = OTHER; note = 2'-deoxy-2'-fluoroguanosine-3'-phosphate
  modified_base 10: mod_base = OTHER; note = 2'-deoxy-2'-fluoroadenosine-3'-phosphate
  modified_base 11: mod_base = OTHER; note = 2'-deoxy-2'-fluorouridine-3'-phosphate
  modified_base 12: mod_base = OTHER; note = 2'-O-methyladenosine-3'-phosphate
  modified_base 13: mod_base = OTHER; note = 2'-O-methylguanosine-3'-phosphate
  modified_base 14: mod_base = OTHER; note = 2'-O-methyluridine-3'-phosphate
  modified_base 15: mod_base = OTHER; note = 2'-O-methyladenosine-3'-phosphate
  modified_base 16: mod_base = OTHER; note = 2'-O-methylcytidine-3'-phosphate
  modified_base 17: mod_base = OTHER; note = 2'-O-methyladenosine-3'-phosphate
  modified_base 18: mod_base = OTHER; note = 2'-O-methyluridine-3'-phosphate
  modified_base 19: mod_base = OTHER; note = 2'-O-methylguanosine-3'-phosphate
  modified_base 20: mod_base = OTHER; note = 2'-O-methyluridine-3'-phosphate
  modified_base 21: mod_base = OTHER; note = 2'-O-methyladenosine
tataaagtgatagtacatgta

SEQ ID NO: 3760 - RNA, 21 nt, synthetic construct
  source 1..21: mol_type = other RNA
  modified_base 1: mod_base = OTHER; note = 2'-O-methyladenosine-3'-phosphate
  modified_base 2: mod_base = OTHER; note = 2'-O-methyladenosine-3'-phosphate
  modified_base 3: mod_base = OTHER; note = 2'-O-methyladenosine-3'-phosphate
  modified_base 4: mod_base = OTHER; note = 2'-O-methylguanosine-3'-phosphate
  modified_base 5: mod_base = OTHER; note = 2'-O-methyluridine-3'-phosphate
  modified_base 6: mod_base = OTHER; note = 2'-O-methylguanosine-3'-phosphate
  modified_base 7: mod_base = OTHER; note = 2'-deoxy-2'-fluoroadenosine-3'-phosphate
  modified_base 8: mod_base = OTHER; note = 2'-O-methyluridine-3'-phosphate
  modified_base 9: mod_base = OTHER; note = 2'-deoxy-2'-fluoroadenosine-3'-phosphate
  modified_base 10: mod_base = OTHER; note = 2'-deoxy-2'-fluoroguanosine-3'-phosphate
  modified_base 11: mod_base = OTHER; note = 2'-deoxy-2'-fluorouridine-3'-phosphate
  modified_base 12: mod_base = OTHER; note = 2'-O-methyladenosine-3'-phosphate
  modified_base 13: mod_base = OTHER; note = 2'-O-methylcytidine-3'-phosphate
  modified_base 14: mod_base = OTHER; note = 2'-O-methyladenosine-3'-phosphate
  modified_base 15: mod_base = OTHER; note = 2'-O-methyluridine-3'-phosphate
  modified_base 16: mod_base = OTHER; note = 2'-O-methylguanosine-3'-phosphate
  modified_base 17: mod_base = OTHER; note = 2'-O-methyluridine-3'-phosphate
  modified_base 18: mod_base = OTHER; note = 2'-O-methyluridine-3'-phosphate
  modified_base 19: mod_base = OTHER; note = 2'-O-methyladenosine-3'-phosphate
  modified_base 20: mod_base = OTHER; note = 2'-O-methylguanosine-3'-phosphate
  modified_base 21: mod_base = OTHER; note = 2'-O-methyladenosine
aaagtgatagtacatgttaga

SEQ ID NO: 3761 - RNA, 21 nt, synthetic construct
  source 1..21: mol_type = other RNA
  modified_base 1: mod_base = OTHER; note = 2'-O-methyladenosine-3'-phosphate
  modified_base 2: mod_base = OTHER; note = 2'-O-methyladenosine-3'-phosphate
  modified_base 3: mod_base = OTHER; note = 2'-O-methylguanosine-3'-phosphate
  modified_base 4: mod_base = OTHER; note = 2'-O-methyluridine-3'-phosphate
  modified_base 5: mod_base = OTHER; note = 2'-O-methylguanosine-3'-phosphate
  modified_base 6: mod_base = OTHER; note = 2'-O-methyladenosine-3'-phosphate
  modified_base 7: mod_base = OTHER; note = 2'-deoxy-2'-fluorouridine-3'-phosphate
  modified_base 8: mod_base = OTHER; note = 2'-O-methyladenosine-3'-phosphate
  modified_base 9: mod_base = OTHER; note = 2'-deoxy-2'-fluoroguanosine-3'-phosphate
  modified_base 10: mod_base = OTHER; note = 2'-deoxy-2'-fluorouridine-3'-phosphate
  modified_base 11: mod_base = OTHER; note = 2'-deoxy-2'-fluoroadenosine-3'-phosphate
  modified_base 12: mod_base = OTHER; note = 2'-O-methylcytidine-3'-phosphate
  modified_base 13: mod_base = OTHER; note = 2'-O-methyladenosine-3'-phosphate
  modified_base 14: mod_base = OTHER; note = 2'-O-methyluridine-3'-phosphate
  modified_base 15: mod_base = OTHER; note = 2'-O-methylguanosine-3'-phosphate
  modified_base 16: mod_base = OTHER; note = 2'-O-methyluridine-3'-phosphate
  modified_base 17: mod_base = OTHER; note = 2'-O-methyluridine-3'-phosphate
  modified_base 18: mod_base = OTHER; note = 2'-O-methyladenosine-3'-phosphate
  modified_base 19: mod_base = OTHER; note = 2'-O-methylguanosine-3'-phosphate
  modified_base 20: mod_base = OTHER; note = 2'-O-methylcytidine-3'-phosphate
  modified_base 21: mod_base = OTHER; note = 2'-O-methyladenosine
aagtgatagtacatgttagca

SEQ ID NO: 3762 - RNA, 21 nt, synthetic construct
  source 1..21: mol_type = other RNA
  modified_base 1: mod_base = OTHER; note = 2'-O-methyladenosine-3'-phosphate
  modified_base 2: mod_base = OTHER; note = 2'-O-methylguanosine-3'-phosphate
  modified_base 3: mod_base = OTHER; note = 2'-O-methyluridine-3'-phosphate
  modified_base 4: mod_base = OTHER; note = 2'-O-methylguanosine-3'-phosphate
  modified_base 5: mod_base = OTHER; note = 2'-O-methyladenosine-3'-phosphate
  modified_base 6: mod_base = OTHER; note = 2'-O-methyluridine-3'-phosphate
  modified_base 7: mod_base = OTHER; note = 2'-deoxy-2'-fluoroadenosine-3'-phosphate
  modified_base 8: mod_base = OTHER; note = 2'-O-methylguanosine-3'-phosphate
  modified_base 9: mod_base = OTHER; note = 2'-deoxy-2'-fluorouridine-3'-phosphate
  modified_base 10: mod_base = OTHER; note = 2'-deoxy-2'-fluoroadenosine-3'-phosphate
  modified_base 11: mod_base = OTHER; note = 2'-deoxy-2'-fluorocytidine-3'-phosphate
  modified_base 12: mod_base = OTHER; note = 2'-O-methyladenosine-3'-phosphate
  modified_base 13: mod_base = OTHER; note = 2'-O-methyluridine-3'-phosphate
  modified_base 14: mod_base = OTHER; note = 2'-O-methylguanosine-3'-phosphate
  modified_base 15: mod_base = OTHER; note = 2'-O-methyluridine-3'-phosphate
  modified_base 16: mod_base = OTHER; note = 2'-O-methyluridine-3'-phosphate
  modified_base 17: mod_base = OTHER; note = 2'-O-methyladenosine-3'-phosphate
  modified_base 18: mod_base = OTHER; note = 2'-O-methylguanosine-3'-phosphate
  modified_base 19: mod_base = OTHER; note = 2'-O-methylcytidine-3'-phosphate
  modified_base 20: mod_base = OTHER; note = 2'-O-methyladenosine-3'-phosphate
  modified_base 21: mod_base = OTHER; note = 2'-O-methyladenosine
agtgatagtacatgttagcaa

SEQ ID NO: 3763 - RNA, 21 nt, synthetic construct
  source 1..21: mol_type = other RNA
  modified_base 1: mod_base = OTHER; note = 2'-O-methylguanosine-3'-phosphate
  modified_base 2: mod_base = OTHER; note = 2'-O-methyluridine-3'-phosphate
  modified_base 3: mod_base = OTHER; note = 2'-O-methylguanosine-3'-phosphate
  modified_base 4: mod_base = OTHER; note = 2'-O-methyladenosine-3'-phosphate
  modified_base 5: mod_base = OTHER; note = 2'-O-methyluridine-3'-phosphate
  modified_base 6: mod_base = OTHER; note = 2'-O-methyladenosine-3'-phosphate
  modified_base 7: mod_base = OTHER; note = 2'-deoxy-2'-fluoroguanosine-3'-phosphate
  modified_base 8: mod_base = OTHER; note = 2'-O-methyluridine-3'-phosphate
  modified_base 9: mod_base = OTHER; note = 2'-deoxy-2'-fluoroadenosine-3'-phosphate
  modified_base 10: mod_base = OTHER; note = 2'-deoxy-2'-fluorocytidine-3'-phosphate
  modified_base 11: mod_base = OTHER; note = 2'-deoxy-2'-fluoroadenosine-3'-phosphate
  modified_base 12: mod_base = OTHER; note = 2'-O-methyluridine-3'-phosphate
  modified_base 13: mod_base = OTHER; note = 2'-O-methylguanosine-3'-phosphate
  modified_base 14: mod_base = OTHER; note = 2'-O-methyluridine-3'-phosphate
  modified_base 15: mod_base = OTHER; note = 2'-O-methyluridine-3'-phosphate
  modified_base 16: mod_base = OTHER; note = 2'-O-methyladenosine-3'-phosphate
  modified_base 17: mod_base = OTHER; note = 2'-O-methylguanosine-3'-phosphate
  modified_base 18: mod_base = OTHER; note = 2'-O-methylcytidine-3'-phosphate
  modified_base 19: mod_base = OTHER; note = 2'-O-methyladenosine-3'-phosphate
  modified_base 20: mod_base = OTHER; note = 2'-O-methyluridine-3'-phosphate
  modified_base 21: mod_base = OTHER; note = 2'-O-methyladenosine
gtgatagtacatgttagcata

SEQ ID NO: 3764 - RNA, 21 nt, synthetic construct
  source 1..21: mol_type = other RNA
  modified_base 1: mod_base = OTHER; note = 2'-O-methyluridine-3'-phosphate
  modified_base 2: mod_base = OTHER; note = 2'-O-methylguanosine-3'-phosphate
  modified_base 3: mod_base = OTHER; note = 2'-O-methyladenosine-3'-phosphate
  modified_base 4: mod_base = OTHER; note = 2'-O-methyluridine-3'-phosphate
  modified_base 5: mod_base = OTHER; note = 2'-O-methyladenosine-3'-phosphate
  modified_base 6: mod_base = OTHER; note = 2'-O-methylguanosine-3'-phosphate
  modified_base 7: mod_base = OTHER; note = 2'-deoxy-2'-fluorouridine-3'-phosphate
  modified_base 8: mod_base = OTHER; note = 2'-O-methyladenosine-3'-phosphate
  modified_base 9: mod_base = OTHER; note = 2'-deoxy-2'-fluorocytidine-3'-phosphate
  modified_base 10: mod_base = OTHER; note = 2'-deoxy-2'-fluoroadenosine-3'-phosphate
  modified_base 11: mod_base = OTHER; note = 2'-deoxy-2'-fluorouridine-3'-phosphate
  modified_base 12: mod_base = OTHER; note = 2'-O-methylguanosine-3'-phosphate
  modified_base 13: mod_base = OTHER; note = 2'-O-methyluridine-3'-phosphate
  modified_base 14: mod_base = OTHER; note = 2'-O-methyluridine-3'-phosphate
  modified_base 15: mod_base = OTHER; note = 2'-O-methyladenosine-3'-phosphate
  modified_base 16: mod_base = OTHER; note = 2'-O-methylguanosine-3'-phosphate
  modified_base 17: mod_base = OTHER; note = 2'-O-methylcytidine-3'-phosphate
  modified_base 18: mod_base = OTHER; note = 2'-O-methyladenosine-3'-phosphate
  modified_base 19: mod_base = OTHER; note = 2'-O-methyluridine-3'-phosphate
  modified_base 20: mod_base = OTHER; note = 2'-O-methyladenosine-3'-phosphate
  modified_base 21: mod_base = OTHER; note = 2'-O-methyladenosine
tgatagtacatgttagcataa

SEQ ID NO: 3765 - RNA, 21 nt, synthetic construct
  source 1..21: mol_type = other RNA
  modified_base 1: mod_base = OTHER; note = 2'-O-methylguanosine-3'-phosphate
  modified_base 2: mod_base = OTHER; note = 2'-O-methyladenosine-3'-phosphate
  modified_base 3: mod_base = OTHER; note = 2'-O-methyluridine-3'-phosphate
  modified_base 4: mod_base = OTHER; note = 2'-O-methyladenosine-3'-phosphate
  modified_base 5: mod_base = OTHER; note = 2'-O-methylguanosine-3'-phosphate
  modified_base 6: mod_base = OTHER; note = 2'-O-methyluridine-3'-phosphate
  modified_base 7: mod_base = OTHER; note = 2'-deoxy-2'-fluoroadenosine-3'-phosphate
  modified_base 8: mod_base = OTHER; note = 2'-O-methylcytidine-3'-phosphate
  modified_base 9: mod_base = OTHER; note = 2'-deoxy-2'-fluoroadenosine-3'-phosphate
  modified_base 10: mod_base = OTHER; note = 2'-deoxy-2'-fluorouridine-3'-phosphate
  modified_base 11: mod_base = OTHER; note = 2'-deoxy-2'-fluoroguanosine-3'-phosphate
  modified_base 12: mod_base = OTHER; note = 2'-O-methyluridine-3'-phosphate
  modified_base 13: mod_base = OTHER; note = 2'-O-methyluridine-3'-phosphate
  modified_base 14: mod_base = OTHER; note = 2'-O-methyladenosine-3'-phosphate
  modified_base 15: mod_base = OTHER; note = 2'-O-methylguanosine-3'-phosphate
  modified_base 16: mod_base = OTHER; note = 2'-O-methylcytidine-3'-phosphate
  modified_base 17: mod_base = OTHER; note = 2'-O-methyladenosine-3'-phosphate
  modified_base 18: mod_base = OTHER; note = 2'-O-methyluridine-3'-phosphate
  modified_base 19: mod_base = OTHER; note = 2'-O-methyladenosine-3'-phosphate
  modified_base 20: mod_base = OTHER; note = 2'-O-methyluridine-3'-phosphate
  modified_base 21: mod_base = OTHER; note = 2'-O-methyladenosine
gatagtacatgttagcatata

SEQ ID NO: 3766 - RNA, 21 nt, synthetic construct
  source 1..21: mol_type = other RNA
  modified_base 1: mod_base = OTHER; note = 2'-O-methyladenosine-3'-phosphate
  modified_base 2: mod_base = OTHER; note = 2'-O-methyluridine-3'-phosphate
  modified_base 3: mod_base = OTHER; note = 2'-O-methyladenosine-3'-phosphate
  modified_base 4: mod_base = OTHER; note = 2'-O-methylguanosine-3'-phosphate
  modified_base 5: mod_base = OTHER; note = 2'-O-methyluridine-3'-phosphate
  modified_base 6: mod_base = OTHER; note = 2'-O-methyladenosine-3'-phosphate
  modified_base 7: mod_base = OTHER; note = 2'-deoxy-2'-fluorocytidine-3'-phosphate
  modified_base 8: mod_base = OTHER; note = 2'-O-methyladenosine-3'-phosphate
  modified_base 9: mod_base = OTHER; note = 2'-deoxy-2'-fluorouridine-3'-phosphate
  modified_base 10: mod_base = OTHER; note = 2'-deoxy-2'-fluoroguanosine-3'-phosphate
  modified_base 11: mod_base = OTHER; note = 2'-deoxy-2'-fluorouridine-3'-phosphate
  modified_base 12: mod_base = OTHER; note = 2'-O-methyluridine-3'-phosphate
  modified_base 13: mod_base = OTHER; note = 2'-O-methyladenosine-3'-phosphate
  modified_base 14: mod_base = OTHER; note = 2'-O-methylguanosine-3'-phosphate
  modified_base 15: mod_base = OTHER; note = 2'-O-methylcytidine-3'-phosphate
  modified_base 16: mod_base = OTHER; note = 2'-O-methyladenosine-3'-phosphate
  modified_base 17: mod_base = OTHER; note = 2'-O-methyluridine-3'-phosphate
  modified_base 18: mod_base = OTHER; note = 2'-O-methyladenosine-3'-phosphate
  modified_base 19: mod_base = OTHER; note = 2'-O-methyluridine-3'-phosphate
  modified_base 20: mod_base = OTHER; note = 2'-O-methyladenosine-3'-phosphate
  modified_base 21: mod_base = OTHER; note = 2'-O-methyladenosine
atagtacatgttagcatataa

SEQ ID NO: 3767 - RNA, 21 nt, synthetic construct
  source 1..21: mol_type = other RNA
  modified_base 1: mod_base = OTHER; note = 2'-O-methyluridine-3'-phosphate
  modified_base 2: mod_base = OTHER; note = 2'-O-methyladenosine-3'-phosphate
  modified_base 3: mod_base = OTHER; note = 2'-O-methylguanosine-3'-phosphate
  modified_base 4: mod_base = OTHER; note = 2'-O-methyluridine-3'-phosphate
  modified_base 5: mod_base = OTHER; note = 2'-O-methyladenosine-3'-phosphate
  modified_base 6: mod_base = OTHER; note = 2'-O-methylcytidine-3'-phosphate
  modified_base 7: mod_base = OTHER; note = 2'-deoxy-2'-fluoroadenosine-3'-phosphate
  modified_base 8: mod_base = OTHER; note = 2'-O-methyluridine-3'-phosphate
  modified_base 9: mod_base = OTHER; note = 2'-deoxy-2'-fluoroguanosine-3'-phosphate
  modified_base 10: mod_base = OTHER; note = 2'-deoxy-2'-fluorouridine-3'-phosphate
  modified_base 11: mod_base = OTHER; note = 2'-deoxy-2'-fluorouridine-3'-phosphate
  modified_base 12: mod_base = OTHER; note = 2'-O-methyladenosine-3'-phosphate
  modified_base 13: mod_base = OTHER; note = 2'-O-methylguanosine-3'-phosphate
  modified_base 14: mod_base = OTHER; note = 2'-O-methylcytidine-3'-phosphate
  modified_base 15: mod_base = OTHER; note = 2'-O-methyladenosine-3'-phosphate
  modified_base 16: mod_base = OTHER; note = 2'-O-methyluridine-3'-phosphate
  modified_base 17: mod_base = OTHER; note = 2'-O-methyladenosine-3'-phosphate
  modified_base 18: mod_base = OTHER; note = 2'-O-methyluridine-3'-phosphate
  modified_base 19: mod_base = OTHER; note = 2'-O-methyladenosine-3'-phosphate
  modified_base 20: mod_base = OTHER; note = 2'-O-methyladenosine-3'-phosphate
  modified_base 21: mod_base = OTHER; note = 2'-O-methyladenosine
tagtacatgttagcatataaa

SEQ ID NO: 3768 - RNA, 21 nt, synthetic construct
  source 1..21: mol_type = other RNA
  modified_base 1: mod_base = OTHER; note = 2'-O-methylguanosine-3'-phosphate
  modified_base 2: mod_base = OTHER; note = 2'-O-methyluridine-3'-phosphate
  modified_base 3: mod_base = OTHER; note = 2'-O-methyladenosine-3'-phosphate
  modified_base 4: mod_base = OTHER; note = 2'-O-methylcytidine-3'-phosphate
  modified_base 5: mod_base = OTHER; note = 2'-O-methyladenosine-3'-phosphate
  modified_base 6: mod_base = OTHER; note = 2'-O-methyluridine-3'-phosphate
  modified_base 7: mod_base = OTHER; note = 2'-deoxy-2'-fluoroguanosine-3'-phosphate
  modified_base 8: mod_base = OTHER; note = 2'-O-methyluridine-3'-phosphate
  modified_base 9: mod_base = OTHER; note = 2'-deoxy-2'-fluorouridine-3'-phosphate
  modified_base 10: mod_base = OTHER; note = 2'-deoxy-2'-fluoroadenosine-3'-phosphate
  modified_base 11: mod_base = OTHER; note = 2'-deoxy-2'-fluoroguanosine-3'-phosphate
  modified_base 12: mod_base = OTHER; note = 2'-O-methylcytidine-3'-phosphate
  modified_base 13: mod_base = OTHER; note = 2'-O-methyladenosine-3'-phosphate
  modified_base 14: mod_base = OTHER; note = 2'-O-methyluridine-3'-phosphate
  modified_base 15: mod_base = OTHER; note = 2'-O-methyladenosine-3'-phosphate
  modified_base 16: mod_base = OTHER; note = 2'-O-methyluridine-3'-phosphate
  modified_base 17: mod_base = OTHER; note = 2'-O-methyladenosine-3'-phosphate
  modified_base 18: mod_base = OTHER; note = 2'-O-methyladenosine-3'-phosphate
  modified_base 19: mod_base = OTHER; note = 2'-O-methyluridine-3'-phosphate
  modified_base 20: mod_base = OTHER; note = 2'-O-methylguanosine-3'-phosphate
  modified_base 21: mod_base = OTHER; note = 2'-O-methyladenosine
gtacatgttagcatataatga

SEQ ID NO: 3769 - RNA, 21 nt, synthetic construct
  source 1..21: mol_type = other RNA
  modified_base 1: mod_base = OTHER; note = 2'-O-methyluridine-3'-phosphate
  modified_base 2: mod_base = OTHER; note = 2'-O-methyladenosine-3'-phosphate
  modified_base 3: mod_base = OTHER; note = 2'-O-methylcytidine-3'-phosphate
  modified_base 4: mod_base = OTHER; note = 2'-O-methyladenosine-3'-phosphate
  modified_base 5: mod_base = OTHER; note = 2'-O-methyluridine-3'-phosphate
  modified_base 6: mod_base = OTHER; note = 2'-O-methylguanosine-3'-phosphate
  modified_base 7: mod_base = OTHER; note = 2'-deoxy-2'-fluorouridine-3'-phosphate
  modified_base 8: mod_base = OTHER; note = 2'-O-methyluridine-3'-phosphate
  modified_base 9: mod_base = OTHER; note = 2'-deoxy-2'-fluoroadenosine-3'-phosphate
  modified_base 10: mod_base = OTHER; note = 2'-deoxy-2'-fluoroguanosine-3'-phosphate
  modified_base 11: mod_base = OTHER; note = 2'-deoxy-2'-fluorocytidine-3'-phosphate
  modified_base 12: mod_base = OTHER; note = 2'-O-methyladenosine-3'-phosphate
  modified_base 13: mod_base = OTHER; note = 2'-O-methyluridine-3'-phosphate
  modified_base 14: mod_base = OTHER; note = 2'-O-methyladenosine-3'-phosphate
  modified_base 15: mod_base = OTHER; note = 2'-O-methyluridine-3'-phosphate
  modified_base 16: mod_base = OTHER; note = 2'-O-methyladenosine-3'-phosphate
  modified_base 17: mod_base = OTHER; note = 2'-O-methyladenosine-3'-phosphate
  modified_base 18: mod_base = OTHER; note = 2'-O-methyluridine-3'-phosphate
  modified_base 19: mod_base = OTHER; note = 2'-O-methylguanosine-3'-phosphate
  modified_base 20: mod_base = OTHER; note = 2'-O-methyluridine-3'-phosphate
  modified_base 21: mod_base = OTHER; note = 2'-O-methyladenosine
tacatgttagcatataatgta

SEQ ID NO: 3770 - RNA, 21 nt, synthetic construct
  source 1..21: mol_type = other RNA
  modified_base 1: mod_base = OTHER; note = 2'-O-methyladenosine-3'-phosphate
  modified_base 2: mod_base = OTHER; note = 2'-O-methylcytidine-3'-phosphate
  modified_base 3: mod_base = OTHER; note = 2'-O-methyladenosine-3'-phosphate
  modified_base 4: mod_base = OTHER; note = 2'-O-methyluridine-3'-phosphate
  modified_base 5: mod_base = OTHER; note = 2'-O-methylguanosine-3'-phosphate
  modified_base 6: mod_base = OTHER; note = 2'-O-methyluridine-3'-phosphate
  modified_base 7: mod_base = OTHER; note = 2'-deoxy-2'-fluorouridine-3'-phosphate
  modified_base 8: mod_base = OTHER; note = 2'-O-methyladenosine-3'-phosphate
  modified_base 9: mod_base = OTHER; note = 2'-deoxy-2'-fluoroguanosine-3'-phosphate
  modified_base 10: mod_base = OTHER; note = 2'-deoxy-2'-fluorocytidine-3'-phosphate
  modified_base 11: mod_base = OTHER; note = 2'-deoxy-2'-fluoroadenosine-3'-phosphate
  modified_base 12: mod_base = OTHER; note = 2'-O-methyluridine-3'-phosphate
  modified_base 13: mod_base = OTHER; note = 2'-O-methyladenosine-3'-phosphate
  modified_base 14: mod_base = OTHER; note = 2'-O-methyluridine-3'-phosphate
  modified_base 15: mod_base = OTHER; note = 2'-O-methyladenosine-3'-phosphate
  modified_base 16: mod_base = OTHER; note = 2'-O-methyladenosine-3'-phosphate
  modified_base 17: mod_base = OTHER; note = 2'-O-methyluridine-3'-phosphate
  modified_base 18: mod_base = OTHER; note = 2'-O-methylguanosine-3'-phosphate
  modified_base 19: mod_base = OTHER; note = 2'-O-methyluridine-3'-phosphate
  modified_base 20: mod_base = OTHER; note = 2'-O-methyladenosine-3'-phosphate
  modified_base 21: mod_base = OTHER; note = 2'-O-methyladenosine
acatgttagcatataatgtaa

SEQ ID NO: 3771 - RNA, 21 nt, synthetic construct
  source 1..21: mol_type = other RNA
  modified_base 1: mod_base = OTHER; note = 2'-O-methyladenosine-3'-phosphate
  modified_base 2: mod_base = OTHER; note = 2'-O-methyluridine-3'-phosphate
  modified_base 3: mod_base = OTHER; note = 2'-O-methyladenosine-3'-phosphate
  modified_base 4: mod_base = OTHER; note = 2'-O-methyluridine-3'-phosphate
  modified_base 5: mod_base = OTHER; note = 2'-O-methyladenosine-3'-phosphate
  modified_base 6: mod_base = OTHER; note = 2'-O-methyladenosine-3'-phosphate
  modified_base 7: mod_base = OTHER; note = 2'-deoxy-2'-fluorouridine-3'-phosphate
  modified_base 8: mod_base = OTHER; note = 2'-O-methylguanosine-3'-phosphate
  modified_base 9: mod_base = OTHER; note = 2'-deoxy-2'-fluorouridine-3'-phosphate
  modified_base 10: mod_base = OTHER; note = 2'-deoxy-2'-fluoroadenosine-3'-phosphate
  modified_base 11: mod_base = OTHER; note = 2'-deoxy-2'-fluorouridine-3'-phosphate
  modified_base 12: mod_base = OTHER; note = 2'-O-methyluridine-3'-phosphate
  modified_base 13: mod_base = OTHER; note = 2'-O-methyluridine-3'-phosphate
  modified_base 14: mod_base = OTHER; note = 2'-O-methyluridine-3'-phosphate
  modified_base 15: mod_base = OTHER; note = 2'-O-methylguanosine-3'-phosphate
  modified_base 16: mod_base = OTHER; note = 2'-O-methyladenosine-3'-phosphate
  modified_base 17: mod_base = OTHER; note = 2'-O-methyladenosine-3'-phosphate
  modified_base 18: mod_base = OTHER; note = 2'-O-methylguanosine-3'-phosphate
  modified_base 19: mod_base = OTHER; note = 2'-O-methyladenosine-3'-phosphate
  modified_base 20: mod_base = OTHER; note = 2'-O-methylguanosine-3'-phosphate
  modified_base 21: mod_base = OTHER; note = 2'-O-methyladenosine
atataatgtattttgaagaga

SEQ ID NO: 3772 - RNA, 21 nt, synthetic construct
  source 1..21: mol_type = other RNA
  modified_base 1: mod_base = OTHER; note = 2'-O-methyladenosine-3'-phosphate
  modified_base 2: mod_base = OTHER; note = 2'-O-methyluridine-3'-phosphate
  modified_base 3: mod_base = OTHER; note = 2'-O-methyluridine-3'-phosphate
  modified_base 4: mod_base = OTHER; note = 2'-O-methyluridine-3'-phosphate
  modified_base 5: mod_base = OTHER; note = 2'-O-methyluridine-3'-phosphate
  modified_base 6: mod_base = OTHER; note = 2'-O-methylguanosine-3'-phosphate
  modified_base 7: mod_base = OTHER; note = 2'-deoxy-2'-fluoroadenosine-3'-phosphate
  modified_base 8: mod_base = OTHER; note = 2'-O-methyladenosine-3'-phosphate
  modified_base 9: mod_base = OTHER; note = 2'-deoxy-2'-fluoroguanosine-3'-phosphate
  modified_base 10: mod_base = OTHER; note = 2'-deoxy-2'-fluoroadenosine-3'-phosphate
  modified_base 11: mod_base = OTHER; note = 2'-deoxy-2'-fluoroguanosine-3'-phosphate
  modified_base 12: mod_base = OTHER; note = 2'-O-methyluridine-3'-phosphate
  modified_base 13: mod_base = OTHER; note = 2'-O-methylguanosine-3'-phosphate
  modified_base 14: mod_base = OTHER; note = 2'-O-methyladenosine-3'-phosphate
  modified_base 15: mod_base = OTHER; note = 2'-O-methyladenosine-3'-phosphate
  modified_base 16: mod_base = OTHER; note = 2'-O-methylguanosine-3'-phosphate
  modified_base 17: mod_base = OTHER; note = 2'-O-methyluridine-3'-phosphate
  modified_base 18: mod_base = OTHER; note = 2'-O-methyladenosine-3'-phosphate
  modified_base 19: mod_base = OTHER; note = 2'-O-methyladenosine-3'-phosphate
  modified_base 20: mod_base = OTHER; note = 2'-O-methyladenosine-3'-phosphate
  modified_base 21: mod_base = OTHER; note = 2'-O-methyladenosine
attttgaagagtgaagtaaaa

SEQ ID NO: 3773 - RNA, 21 nt, synthetic construct
  source 1..21: mol_type = other RNA
  modified_base 1: mod_base = OTHER; note = 2'-O-methyluridine-3'-phosphate
  modified_base 2: mod_base = OTHER; note = 2'-O-methyluridine-3'-phosphate
  modified_base 3: mod_base = OTHER; note = 2'-O-methyluridine-3'-phosphate
  modified_base 4: mod_base = OTHER; note = 2'-O-methylguanosine-3'-phosphate
  modified_base 5: mod_base = OTHER; note = 2'-O-methyladenosine-3'-phosphate
  modified_base 6: mod_base = OTHER; note = 2'-O-methyladenosine-3'-phosphate
  modified_base 7: mod_base = OTHER; note = 2'-deoxy-2'-fluoroguanosine-3'-phosphate
  modified_base 8: mod_base = OTHER; note = 2'-O-methyladenosine-3'-phosphate
  modified_base 9: mod_base = OTHER; note = 2'-deoxy-2'-fluoroguanosine-3'-phosphate
  modified_base 10: mod_base = OTHER; note = 2'-deoxy-2'-fluorouridine-3'-phosphate
  modified_base 11: mod_base = OTHER; note = 2'-deoxy-2'-fluoroguanosine-3'-phosphate
  modified_base 12: mod_base = OTHER; note = 2'-O-methyladenosine-3'-phosphate
  modified_base 13: mod_base = OTHER; note = 2'-O-methyladenosine-3'-phosphate
  modified_base 14: mod_base = OTHER; note = 2'-O-methylguanosine-3'-phosphate
  modified_base 15: mod_base = OTHER; note = 2'-O-methyluridine-3'-phosphate
  modified_base 16: mod_base = OTHER; note = 2'-O-methyladenosine-3'-phosphate
  modified_base 17: mod_base = OTHER; note = 2'-O-methyladenosine-3'-phosphate
  modified_base 18: mod_base = OTHER; note = 2'-O-methyladenosine-3'-phosphate
  modified_base 19: mod_base = OTHER; note = 2'-O-methyluridine-3'-phosphate
  modified_base 20: mod_base = OTHER; note = 2'-O-methylguanosine-3'-phosphate
  modified_base 21: mod_base = OTHER; note = 2'-O-methyladenosine
tttgaagagtgaagtaaatga

SEQ ID NO: 3774 - RNA, 21 nt, synthetic construct
  source 1..21: mol_type = other RNA
  modified_base 1: mod_base = OTHER; note = 2'-O-methyluridine-3'-phosphate
  modified_base 2: mod_base = OTHER; note = 2'-O-methyluridine-3'-phosphate
  modified_base 3: mod_base = OTHER; note = 2'-O-methylguanosine-3'-phosphate
  modified_base 4: mod_base = OTHER; note = 2'-O-methyladenosine-3'-phosphate
  modified_base 5: mod_base = OTHER; note = 2'-O-methyladenosine-3'-phosphate
  modified_base 6: mod_base = OTHER; note = 2'-O-methylguanosine-3'-phosphate
  modified_base 7: mod_base = OTHER; note = 2'-deoxy-2'-fluoroadenosine-3'-phosphate
  modified_base 8: mod_base = OTHER; note = 2'-O-methylguanosine-3'-phosphate
  modified_base 9: mod_base = OTHER; note = 2'-deoxy-2'-fluorouridine-3'-phosphate
  modified_base 10: mod_base = OTHER; note = 2'-deoxy-2'-fluoroguanosine-3'-phosphate
  modified_base 11: mod_base = OTHER; note = 2'-deoxy-2'-fluoroadenosine-3'-phosphate
  modified_base 12: mod_base = OTHER; note = 2'-O-methyladenosine-3'-phosphate
  modified_base 13: mod_base = OTHER; note = 2'-O-methylguanosine-3'-phosphate
  modified_base 14: mod_base = OTHER; note = 2'-O-methyluridine-3'-phosphate
  modified_base 15: mod_base = OTHER; note = 2'-O-methyladenosine-3'-phosphate
  modified_base 16: mod_base = OTHER; note = 2'-O-methyladenosine-3'-phosphate
  modified_base 17: mod_base = OTHER; note = 2'-O-methyladenosine-3'-phosphate
  modified_base 18: mod_base = OTHER; note = 2'-O-methyluridine-3'-phosphate
  modified_base 19: mod_base = OTHER; note = 2'-O-methylguanosine-3'-phosphate
  modified_base 20: mod_base = OTHER; note = 2'-O-methylcytidine-3'-phosphate
  modified_base 21: mod_base = OTHER; note = 2'-O-methyladenosine
ttgaagagtgaagtaaatgca

SEQ ID NO: 3775 - RNA, 21 nt, synthetic construct
  source 1..21: mol_type = other RNA
  modified_base 1: mod_base = OTHER; note = 2'-O-methyluridine-3'-phosphate
  modified_base 2: mod_base = OTHER; note = 2'-O-methylguanosine-3'-phosphate
  modified_base 3: mod_base = OTHER; note = 2'-O-methyladenosine-3'-phosphate
  modified_base 4: mod_base = OTHER; note = 2'-O-methyladenosine-3'-phosphate
  modified_base 5: mod_base = OTHER; note = 2'-O-methylguanosine-3'-phosphate
  modified_base 6: mod_base = OTHER; note = 2'-O-methyladenosine-3'-phosphate
  modified_base 7: mod_base = OTHER; note = 2'-deoxy-2'-fluoroguanosine-3'-phosphate
  modified_base 8: mod_base = OTHER; note = 2'-O-methyluridine-3'-phosphate
  modified_base 9: mod_base = OTHER; note = 2'-deoxy-2'-fluoroguanosine-3'-phosphate
  modified_base 10: mod_base = OTHER; note = 2'-deoxy-2'-fluoroadenosine-3'-phosphate
  modified_base 11: mod_base = OTHER; note = 2'-deoxy-2'-fluoroadenosine-3'-phosphate
  modified_base 12: mod_base = OTHER; note = 2'-O-methylguanosine-3'-phosphate
  modified_base 13: mod_base = OTHER; note = 2'-O-methyluridine-3'-phosphate
  modified_base 14: mod_base = OTHER; note = 2'-O-methyladenosine-3'-phosphate
  modified_base 15: mod_base = OTHER; note = 2'-O-methyladenosine-3'-phosphate
  modified_base 16: mod_base = OTHER; note = 2'-O-methyladenosine-3'-phosphate
  modified_base 17: mod_base = OTHER; note = 2'-O-methyluridine-3'-phosphate
  modified_base 18: mod_base = OTHER; note = 2'-O-methylguanosine-3'-phosphate
  modified_base 19: mod_base = OTHER; note = 2'-O-methylcytidine-3'-phosphate
  modified_base 20: mod_base = OTHER; note = 2'-O-methyluridine-3'-phosphate
  modified_base 21: mod_base = OTHER; note = 2'-O-methyladenosine
tgaagagtgaagtaaatgcta

SEQ ID NO: 3776 - RNA, 21 nt, synthetic construct
  source 1..21: mol_type = other RNA
  modified_base 1: mod_base = OTHER; note = 2'-O-methylguanosine-3'-phosphate
  modified_base 2: mod_base = OTHER; note = 2'-O-methyladenosine-3'-phosphate
  modified_base 3: mod_base = OTHER; note = 2'-O-methyladenosine-3'-phosphate
  modified_base 4: mod_base = OTHER; note = 2'-O-methylguanosine-3'-phosphate
  modified_base 5: mod_base = OTHER; note = 2'-O-methyladenosine-3'-phosphate
  modified_base 6: mod_base = OTHER; note = 2'-O-methylguanosine-3'-phosphate
  modified_base 7: mod_base = OTHER; note = 2'-deoxy-2'-fluorouridine-3'-phosphate
  modified_base 8: mod_base = OTHER; note = 2'-O-methylguanosine-3'-phosphate
  modified_base 9: mod_base = OTHER; note = 2'-deoxy-2'-fluoroadenosine-3'-phosphate
  modified_base 10: mod_base = OTHER; note = 2'-deoxy-2'-fluoroadenosine-3'-phosphate
  modified_base 11: mod_base = OTHER; note = 2'-deoxy-2'-fluoroguanosine-3'-phosphate
  modified_base 12: mod_base = OTHER; note = 2'-O-methyluridine-3'-phosphate
  modified_base 13: mod_base = OTHER; note = 2'-O-methyladenosine-3'-phosphate
  modified_base 14: mod_base = OTHER; note = 2'-O-methyladenosine-3'-phosphate
  modified_base 15: mod_base = OTHER; note = 2'-O-methyladenosine-3'-phosphate
  modified_base 16: mod_base = OTHER; note = 2'-O-methyluridine-3'-phosphate
  modified_base 17: mod_base = OTHER; note = 2'-O-methylguanosine-3'-phosphate
  modified_base 18: mod_base = OTHER; note = 2'-O-methylcytidine-3'-phosphate
  modified_base 19: mod_base = OTHER; note = 2'-O-methyluridine-3'-phosphate
  modified_base 20: mod_base = OTHER; note = 2'-O-methyladenosine-3'-phosphate
  modified_base 21: mod_base = OTHER; note = 2'-O-methyladenosine
gaagagtgaagtaaatgctaa

SEQ ID NO: 3777 - RNA, 21 nt, synthetic construct
  source 1..21: mol_type = other RNA
  modified_base 1: mod_base = OTHER; note = 2'-O-methyladenosine-3'-phosphate
  modified_base 2: mod_base = OTHER; note = 2'-O-methyladenosine-3'-phosphate
  modified_base 3: mod_base = OTHER; note = 2'-O-methylguanosine-3'-phosphate
  modified_base 4: mod_base = OTHER; note = 2'-O-methyladenosine-3'-phosphate
  modified_base 5: mod_base = OTHER; note = 2'-O-methylguanosine-3'-phosphate
  modified_base 6: mod_base = OTHER; note = 2'-O-methyluridine-3'-phosphate
  modified_base 7: mod_base = OTHER; note = 2'-deoxy-2'-fluoroguanosine-3'-phosphate
  modified_base 8: mod_base = OTHER; note = 2'-O-methyladenosine-3'-phosphate
  modified_base 9: mod_base = OTHER; note = 2'-deoxy-2'-fluoroadenosine-3'-phosphate
  modified_base 10: mod_base = OTHER; note = 2'-deoxy-2'-fluoroguanosine-3'-phosphate
  modified_base 11: mod_base = OTHER; note = 2'-deoxy-2'-fluorouridine-3'-phosphate
  modified_base 12: mod_base = OTHER; note = 2'-O-methyladenosine-3'-phosphate
  modified_base 13: mod_base = OTHER; note = 2'-O-methyladenosine-3'-phosphate
  modified_base 14: mod_base = OTHER; note = 2'-O-methyladenosine-3'-phosphate
  modified_base 15: mod_base = OTHER; note = 2'-O-methyluridine-3'-phosphate
  modified_base 16: mod_base = OTHER; note = 2'-O-methylguanosine-3'-phosphate
  modified_base 17: mod_base = OTHER; note = 2'-O-methylcytidine-3'-phosphate
  modified_base 18: mod_base = OTHER; note = 2'-O-methyluridine-3'-phosphate
  modified_base 19: mod_base = OTHER; note = 2'-O-methyladenosine-3'-phosphate
  modified_base 20: mod_base = OTHER; note = 2'-O-methyluridine-3'-phosphate
  modified_base 21: mod_base = OTHER; note = 2'-O-methyladenosine
aagagtgaagtaaatgctata

SEQ ID NO: 3778 - RNA, 21 nt, synthetic construct
  source 1..21: mol_type = other RNA
  modified_base 1: mod_base = OTHER; note = 2'-O-methyladenosine-3'-phosphate
  modified_base 2: mod_base = OTHER; note = 2'-O-methylguanosine-3'-phosphate
  modified_base 3: mod_base = OTHER; note = 2'-O-methyladenosine-3'-phosphate
  modified_base 4: mod_base = OTHER; note = 2'-O-methylguanosine-3'-phosphate
  modified_base 5: mod_base = OTHER; note = 2'-O-methyluridine-3'-phosphate
  modified_base 6: mod_base = OTHER; note = 2'-O-methylguanosine-3'-phosphate
  modified_base 7: mod_base = OTHER; note = 2'-deoxy-2'-fluoroadenosine-3'-phosphate
  modified_base 8: mod_base = OTHER; note = 2'-O-methyladenosine-3'-phosphate
  modified_base 9: mod_base = OTHER; note = 2'-deoxy-2'-fluoroguanosine-3'-phosphate
  modified_base 10: mod_base = OTHER; note = 2'-deoxy-2'-fluorouridine-3'-phosphate
  modified_base 11: mod_base = OTHER; note = 2'-deoxy-2'-fluoroadenosine-3'-phosphate
  modified_base 12: mod_base = OTHER; note = 2'-O-methyladenosine-3'-phosphate
  modified_base 13: mod_base = OTHER; note = 2'-O-methyladenosine-3'-phosphate
  modified_base 14: mod_base = OTHER; note = 2'-O-methyluridine-3'-phosphate
  modified_base 15: mod_base = OTHER; note = 2'-O-methylguanosine-3'-phosphate
  modified_base 16: mod_base = OTHER; note = 2'-O-methylcytidine-3'-phosphate
  modified_base 17: mod_base = OTHER; note = 2'-O-methyluridine-3'-phosphate
  modified_base 18: mod_base = OTHER; note = 2'-O-methyladenosine-3'-phosphate
  modified_base 19: mod_base = OTHER; note = 2'-O-methyluridine-3'-phosphate
  modified_base 20: mod_base = OTHER; note = 2'-O-methyluridine-3'-phosphate
  modified_base 21: mod_base = OTHER; note = 2'-O-methyladenosine
agagtgaagtaaatgctatta

SEQ ID NO: 3779 - RNA, 21 nt, synthetic construct
  source 1..21: mol_type = other RNA
  modified_base 1: mod_base = OTHER; note = 2'-O-methylguanosine-3'-phosphate
  modified_base 2: mod_base = OTHER; note = 2'-O-methyladenosine-3'-phosphate
  modified_base 3: mod_base = OTHER; note = 2'-O-methylguanosine-3'-phosphate
  modified_base 4: mod_base = OTHER; note = 2'-O-methyluridine-3'-phosphate
  modified_base 5: mod_base = OTHER; note = 2'-O-methylguanosine-3'-phosphate
  modified_base 6: mod_base = OTHER; note = 2'-O-methyladenosine-3'-phosphate
  modified_base 7: mod_base = OTHER; note = 2'-deoxy-2'-fluoroadenosine-3'-phosphate
  modified_base 8: mod_base = OTHER; note = 2'-O-methylguanosine-3'-phosphate
  modified_base 9: mod_base = OTHER; note = 2'-deoxy-2'-fluorouridine-3'-phosphate
  modified_base 10: mod_base = OTHER; note = 2'-deoxy-2'-fluoroadenosine-3'-phosphate
  modified_base 11: mod_base = OTHER; note = 2'-deoxy-2'-fluoroadenosine-3'-phosphate
  modified_base 12: mod_base = OTHER; note = 2'-O-methyladenosine-3'-phosphate
  modified_base 13: mod_base = OTHER; note = 2'-O-methyluridine-3'-phosphate
  modified_base 14: mod_base = OTHER; note = 2'-O-methylguanosine-3'-phosphate
  modified_base 15: mod_base = OTHER; note = 2'-O-methylcytidine-3'-phosphate
  modified_base 16: mod_base = OTHER; note = 2'-O-methyluridine-3'-phosphate
  modified_base 17: mod_base = OTHER; note = 2'-O-methyladenosine-3'-phosphate
  modified_base 18: mod_base = OTHER; note = 2'-O-methyluridine-3'-phosphate
  modified_base 19: mod_base = OTHER; note = 2'-O-methyluridine-3'-phosphate
  modified_base 20: mod_base = OTHER; note = 2'-O-methylguanosine-3'-phosphate
  modified_base 21: mod_base = OTHER; note = 2'-O-methyladenosine
gagtgaagtaaatgctattga

SEQ ID NO: 3780 - RNA, 21 nt, synthetic construct
  source 1..21: mol_type = other RNA
  modified_base 1: mod_base = OTHER; note = 2'-O-methyladenosine-3'-phosphate
  modified_base 2: mod_base = OTHER; note = 2'-O-methylguanosine-3'-phosphate
  modified_base 3: mod_base = OTHER; note = 2'-O-methyluridine-3'-phosphate
  modified_base 4: mod_base = OTHER; note = 2'-O-methylguanosine-3'-phosphate
  modified_base 5: mod_base = OTHER; note = 2'-O-methyladenosine-3'-phosphate
  modified_base 6: mod_base = OTHER; note = 2'-O-methyladenosine-3'-phosphate
  modified_base 7: mod_base = OTHER; note = 2'-deoxy-2'-fluoroguanosine-3'-phosphate
  modified_base 8: mod_base = OTHER; note = 2'-O-methyluridine-3'-phosphate
  modified_base 9: mod_base = OTHER; note = 2'-deoxy-2'-fluoroadenosine-3'-phosphate
  modified_base 10: mod_base = OTHER; note = 2'-deoxy-2'-fluoroadenosine-3'-phosphate
  modified_base 11: mod_base = OTHER; note = 2'-deoxy-2'-fluoroadenosine-3'-phosphate
  modified_base 12: mod_base = OTHER; note = 2'-O-methyluridine-3'-phosphate
  modified_base 13: mod_base = OTHER; note = 2'-O-methylguanosine-3'-phosphate
  modified_base 14: mod_base = OTHER; note = 2'-O-methylcytidine-3'-phosphate
  modified_base 15: mod_base = OTHER; note = 2'-O-methyluridine-3'-phosphate
  modified_base 16: mod_base = OTHER; note = 2'-O-methyladenosine-3'-phosphate
  modified_base 17: mod_base = OTHER; note = 2'-O-methyluridine-3'-phosphate
  modified_base 18: mod_base = OTHER; note = 2'-O-methyluridine-3'-phosphate
  modified_base 19: mod_base = OTHER; note = 2'-O-methylguanosine-3'-phosphate
  modified_base 20: mod_base = OTHER; note = 2'-O-methyladenosine-3'-phosphate
  modified_base 21: mod_base = OTHER; note = 2'-O-methyladenosine
agtgaagtaaatgctattgaa

SEQ ID NO: 3781 - RNA, 21 nt, synthetic construct
  source 1..21: mol_type = other RNA
  modified_base 1: mod_base = OTHER; note = 2'-O-methylguanosine-3'-phosphate
  modified_base 2: mod_base = OTHER; note = 2'-O-methyluridine-3'-phosphate
  modified_base 3: mod_base = OTHER; note = 2'-O-methylguanosine-3'-phosphate
  modified_base 4: mod_base = OTHER; note = 2'-O-methyladenosine-3'-phosphate
  modified_base 5: mod_base = OTHER; note = 2'-O-methyladenosine-3'-phosphate
  modified_base 6: mod_base = OTHER; note = 2'-O-methylguanosine-3'-phosphate
  modified_base 7: mod_base = OTHER; note = 2'-deoxy-2'-fluorouridine-3'-phosphate
  modified_base 8: mod_base = OTHER; note = 2'-O-methyladenosine-3'-phosphate
  modified_base 9: mod_base = OTHER; note = 2'-deoxy-2'-fluoroadenosine-3'-phosphate
  modified_base 10: mod_base = OTHER; note = 2'-deoxy-2'-fluoroadenosine-3'-phosphate
  modified_base 11: mod_base = OTHER; note = 2'-deoxy-2'-fluorouridine-3'-phosphate
  modified_base 12: mod_base = OTHER; note = 2'-O-methylguanosine-3'-phosphate
  modified_base 13: mod_base = OTHER; note = 2'-O-methylcytidine-3'-phosphate
  modified_base 14: mod_base = OTHER; note = 2'-O-methyluridine-3'-phosphate
  modified_base 15: mod_base = OTHER; note = 2'-O-methyladenosine-3'-phosphate
  modified_base 16: mod_base = OTHER; note = 2'-O-methyluridine-3'-phosphate
  modified_base 17: mod_base = OTHER; note = 2'-O-methyluridine-3'-phosphate
  modified_base 18: mod_base = OTHER; note = 2'-O-methylguanosine-3'-phosphate
  modified_base 19: mod_base = OTHER; note = 2'-O-methyladenosine-3'-phosphate
  modified_base 20: mod_base = OTHER; note = 2'-O-methyluridine-3'-phosphate
  modified_base 21: mod_base = OTHER; note = 2'-O-methyladenosine
gtgaagtaaatgctattgata

SEQ ID NO: 3782 - RNA, 21 nt, synthetic construct
  source 1..21: mol_type = other RNA
  modified_base 1: mod_base = OTHER; note = 2'-O-methyluridine-3'-phosphate
  modified_base 2: mod_base = OTHER; note = 2'-O-methylguanosine-3'-phosphate
  modified_base 3: mod_base = OTHER; note = 2'-O-methyladenosine-3'-phosphate
  modified_base 4: mod_base = OTHER; note = 2'-O-methyladenosine-3'-phosphate
  modified_base 5: mod_base = OTHER; note = 2'-O-methylguanosine-3'-phosphate
  modified_base 6: mod_base = OTHER; note = 2'-O-methyluridine-3'-phosphate
  modified_base 7: mod_base = OTHER; note = 2'-deoxy-2'-fluoroadenosine-3'-phosphate
  modified_base 8: mod_base = OTHER; note = 2'-O-methyladenosine-3'-phosphate
  modified_base 9: mod_base = OTHER; note = 2'-deoxy-2'-fluoroadenosine-3'-phosphate
  modified_base 10: mod_base = OTHER; note = 2'-deoxy-2'-fluorouridine-3'-phosphate
  modified_base 11: mod_base = OTHER; note = 2'-deoxy-2'-fluoroguanosine-3'-phosphate
  modified_base 12: mod_base = OTHER; note = 2'-O-methylcytidine-3'-phosphate
  modified_base 13: mod_base = OTHER; note = 2'-O-methyluridine-3'-phosphate
  modified_base 14: mod_base = OTHER; note = 2'-O-methyladenosine-3'-phosphate
  modified_base 15: mod_base = OTHER; note = 2'-O-methyluridine-3'-phosphate
  modified_base 16: mod_base = OTHER; note = 2'-O-methyluridine-3'-phosphate
  modified_base 17: mod_base = OTHER; note = 2'-O-methylguanosine-3'-phosphate
  modified_base 18: mod_base = OTHER; note = 2'-O-methyladenosine-3'-phosphate
  modified_base 19: mod_base = OTHER; note = 2'-O-methyluridine-3'-phosphate
  modified_base 20: mod_base = OTHER; note = 2'-O-methyladenosine-3'-phosphate
  modified_base 21: mod_base = OTHER; note = 2'-O-methyladenosine
tgaagtaaatgctattgataa

SEQ ID NO: 3783 - RNA, 21 nt, synthetic construct
  source 1..21: mol_type = other RNA
  modified_base 1: mod_base = OTHER; note = 2'-O-methylguanosine-3'-phosphate
  modified_base 2: mod_base = OTHER; note = 2'-O-methyladenosine-3'-phosphate
  modified_base 3: mod_base = OTHER; note = 2'-O-methyladenosine-3'-phosphate
  modified_base 4: mod_base = OTHER; note = 2'-O-methylguanosine-3'-phosphate
  modified_base 5: mod_base = OTHER; note = 2'-O-methyluridine-3'-phosphate
  modified_base 6: mod_base = OTHER; note = 2'-O-methyladenosine-3'-phosphate
  modified_base 7: mod_base = OTHER; note = 2'-deoxy-2'-fluoroadenosine-3'-phosphate
  modified_base 8: mod_base = OTHER; note = 2'-O-methyladenosine-3'-phosphate
  modified_base 9: mod_base = OTHER; note = 2'-deoxy-2'-fluorouridine-3'-phosphate
  modified_base 10: mod_base = OTHER; note = 2'-deoxy-2'-fluoroguanosine-3'-phosphate
  modified_base 11: mod_base = OTHER; note = 2'-deoxy-2'-fluorocytidine-3'-phosphate
  modified_base 12: mod_base = OTHER; note = 2'-O-methyluridine-3'-phosphate
  modified_base 13: mod_base = OTHER; note = 2'-O-methyladenosine-3'-phosphate
  modified_base 14: mod_base = OTHER; note = 2'-O-methyluridine-3'-phosphate
  modified_base 15: mod_base = OTHER; note = 2'-O-methyluridine-3'-phosphate
  modified_base 16: mod_base = OTHER; note = 2'-O-methylguanosine-3'-phosphate
  modified_base 17: mod_base = OTHER; note = 2'-O-methyladenosine-3'-phosphate
  modified_base 18: mod_base = OTHER; note = 2'-O-methyluridine-3'-phosphate
  modified_base 19: mod_base = OTHER; note = 2'-O-methyladenosine-3'-phosphate
  modified_base 20: mod_base = OTHER; note = 2'-O-methyladenosine-3'-phosphate
  modified_base 21: mod_base = OTHER; note = 2'-O-methyladenosine
gaagtaaatgctattgataaa

SEQ ID NO: 3784 - RNA, 21 nt, synthetic construct
  source 1..21: mol_type = other RNA
  modified_base 1: mod_base = OTHER; note = 2'-O-methyluridine-3'-phosphate
  modified_base 2: mod_base = OTHER; note = 2'-O-methyladenosine-3'-phosphate
  modified_base 3: mod_base = OTHER; note = 2'-O-methyladenosine-3'-phosphate
  modified_base 4: mod_base = OTHER; note = 2'-O-methyluridine-3'-phosphate
  modified_base 5: mod_base = OTHER; note = 2'-O-methyladenosine-3'-phosphate
  modified_base 6: mod_base = OTHER; note = 2'-O-methyladenosine-3'-phosphate
  modified_base 7: mod_base = OTHER; note = 2'-deoxy-2'-fluorocytidine-3'-phosphate
  modified_base 8: mod_base = OTHER; note = 2'-O-methyladenosine-3'-phosphate
  modified_base 9: mod_base = OTHER; note = 2'-deoxy-2'-fluoroguanosine-3'-phosphate
  modified_base 10: mod_base = OTHER; note = 2'-deoxy-2'-fluorouridine-3'-phosphate
  modified_base 11: mod_base = OTHER; note = 2'-deoxy-2'-fluoroadenosine-3'-phosphate
  modified_base 12: mod_base = OTHER; note = 2'-O-methyladenosine-3'-phosphate
  modified_base 13: mod_base = OTHER; note = 2'-O-methyladenosine-3'-phosphate
  modified_base 14: mod_base = OTHER; note = 2'-O-methylguanosine-3'-phosphate
  modified_base 15: mod_base = OTHER; note = 2'-O-methyladenosine-3'-phosphate
  modified_base 16: mod_base = OTHER; note = 2'-O-methyladenosine-3'-phosphate
  modified_base 17: mod_base = OTHER; note = 2'-O-methyladenosine-3'-phosphate
  modified_base 18: mod_base = OTHER; note = 2'-O-methyluridine-3'-phosphate
  modified_base 19: mod_base = OTHER; note = 2'-O-methylguanosine-3'-phosphate
  modified_base 20: mod_base = OTHER; note = 2'-O-methylcytidine-3'-phosphate
  modified_base 21: mod_base = OTHER; note = 2'-O-methyladenosine
taataacagtaaagaaatgca

SEQ ID NO: 3785 - RNA, 21 nt, synthetic construct
  source 1..21: mol_type = other RNA
  modified_base 1: mod_base = OTHER; note = 2'-O-methyladenosine-3'-phosphate
  modified_base 2: mod_base = OTHER; note = 2'-O-methyladenosine-3'-phosphate
  modified_base 3: mod_base = OTHER; note = 2'-O-methyluridine-3'-phosphate
  modified_base 4: mod_base = OTHER; note = 2'-O-methyladenosine-3'-phosphate
  modified_base 5: mod_base = OTHER; note = 2'-O-methyladenosine-3'-phosphate
  modified_base 6: mod_base = OTHER; note = 2'-O-methylcytidine-3'-phosphate
  modified_base 7: mod_base = OTHER; note = 2'-deoxy-2'-fluoroadenosine-3'-phosphate
  modified_base 8: mod_base = OTHER; note = 2'-O-methylguanosine-3'-phosphate
  modified_base 9: mod_base = OTHER; note = 2'-deoxy-2'-fluorouridine-3'-phosphate
  modified_base 10: mod_base = OTHER; note = 2'-deoxy-2'-fluoroadenosine-3'-phosphate
  modified_base 11: mod_base = OTHER; note = 2'-deoxy-2'-fluoroadenosine-3'-phosphate
  modified_base 12: mod_base = OTHER; note = 2'-O-methyladenosine-3'-phosphate
  modified_base 13: mod_base = OTHER; note = 2'-O-methylguanosine-3'-phosphate
  modified_base 14: mod_base = OTHER; note = 2'-O-methyladenosine-3'-phosphate
  modified_base 15: mod_base = OTHER; note = 2'-O-methyladenosine-3'-phosphate
  modified_base 16: mod_base = OTHER; note = 2'-O-methyladenosine-3'-phosphate
  modified_base 17: mod_base = OTHER; note = 2'-O-methyluridine-3'-phosphate
  modified_base 18: mod_base = OTHER; note = 2'-O-methylguanosine-3'-phosphate
  modified_base 19: mod_base = OTHER; note = 2'-O-methylcytidine-3'-phosphate
  modified_base 20: mod_base = OTHER; note = 2'-O-methyluridine-3'-phosphate
  modified_base 21: mod_base = OTHER; note = 2'-O-methyladenosine
aataacagtaaagaaatgcta

SEQ ID NO: 3786 - RNA, 21 nt, synthetic construct
  source 1..21: mol_type = other RNA
  modified_base 1: mod_base = OTHER; note = 2'-O-methyluridine-3'-phosphate
  modified_base 2: mod_base = OTHER; note = 2'-O-methyladenosine-3'-phosphate
  modified_base 3: mod_base = OTHER; note = 2'-O-methyladenosine-3'-phosphate
  modified_base 4: mod_base = OTHER; note = 2'-O-methylcytidine-3'-phosphate
  modified_base 5: mod_base = OTHER; note = 2'-O-methyladenosine-3'-phosphate
  modified_base 6: mod_base = OTHER; note = 2'-O-methylguanosine-3'-phosphate
  modified_base 7: mod_base = OTHER; note = 2'-deoxy-2'-fluorouridine-3'-phosphate
  modified_base 8: mod_base = OTHER; note = 2'-O-methyladenosine-3'-phosphate
  modified_base 9: mod_base = OTHER; note = 2'-deoxy-2'-fluoroadenosine-3'-phosphate
  modified_base 10: mod_base = OTHER; note = 2'-deoxy-2'-fluoroadenosine-3'-phosphate
  modified_base 11: mod_base = OTHER; note = 2'-deoxy-2'-fluoroguanosine-3'-phosphate
  modified_base 12: mod_base = OTHER; note = 2'-O-methyladenosine-3'-phosphate
  modified_base 13: mod_base = OTHER; note = 2'-O-methyladenosine-3'-phosphate
  modified_base 14: mod_base = OTHER; note = 2'-O-methyladenosine-3'-phosphate
  modified_base 15: mod_base = OTHER; note = 2'-O-methyluridine-3'-phosphate
  modified_base 16: mod_base = OTHER; note = 2'-O-methylguanosine-3'-phosphate
  modified_base 17: mod_base = OTHER; note = 2'-O-methylcytidine-3'-phosphate
  modified_base 18: mod_base = OTHER; note = 2'-O-methyluridine-3'-phosphate
  modified_base 19: mod_base = OTHER; note = 2'-O-methyladenosine-3'-phosphate
  modified_base 20: mod_base = OTHER; note = 2'-O-methylcytidine-3'-phosphate
  modified_base 21: mod_base = OTHER; note = 2'-O-methyladenosine
taacagtaaagaaatgctaca

SEQ ID NO: 3787 - RNA, 21 nt, synthetic construct
  source 1..21: mol_type = other RNA
  modified_base 1: mod_base = OTHER; note = 2'-O-methyladenosine-3'-phosphate
  modified_base 2: mod_base = OTHER; note = 2'-O-methyladenosine-3'-phosphate
  modified_base 3: mod_base = OTHER; note = 2'-O-methylcytidine-3'-phosphate
  modified_base 4: mod_base = OTHER; note = 2'-O-methyladenosine-3'-phosphate
  modified_base 5: mod_base = OTHER; note = 2'-O-methylguanosine-3'-phosphate
  modified_base 6: mod_base = OTHER; note = 2'-O-methyluridine-3'-phosphate
  modified_base 7: mod_base = OTHER; note = 2'-deoxy-2'-fluoroadenosine-3'-phosphate
  modified_base 8: mod_base = OTHER; note = 2'-O-methyladenosine-3'-phosphate
  modified_base 9: mod_base = OTHER; note = 2'-deoxy-2'-fluoroadenosine-3'-phosphate
  modified_base 10: mod_base = OTHER; note = 2'-deoxy-2'-fluoroguanosine-3'-phosphate
  modified_base 11: mod_base = OTHER; note = 2'-deoxy-2'-fluoroadenosine-3'-phosphate
  modified_base 12: mod_base = OTHER; note = 2'-O-methyladenosine-3'-phosphate
  modified_base 13: mod_base = OTHER; note = 2'-O-methyladenosine-3'-phosphate
  modified_base 14: mod_base = OTHER; note = 2'-O-methyluridine-3'-phosphate
  modified_base 15: mod_base = OTHER; note = 2'-O-methylguanosine-3'-phosphate
  modified_base 16: mod_base = OTHER; note = 2'-O-methylcytidine-3'-phosphate
  modified_base 17: mod_base = OTHER; note = 2'-O-methyluridine-3'-phosphate
  modified_base 18: mod_base = OTHER; note = 2'-O-methyladenosine-3'-phosphate
  modified_base 19: mod_base = OTHER; note = 2'-O-methylcytidine-3'-phosphate
  modified_base 20: mod_base = OTHER; note = 2'-O-methyluridine-3'-phosphate
  modified_base 21: mod_base = OTHER; note = 2'-O-methyladenosine
aacagtaaagaaatgctacta

SEQ ID NO: 3788 - RNA, 21 nt, synthetic construct
  source 1..21: mol_type = other RNA
  modified_base 1: mod_base = OTHER; note = 2'-O-methyladenosine-3'-phosphate
  modified_base 2: mod_base = OTHER; note = 2'-O-methylcytidine-3'-phosphate
  modified_base 3: mod_base = OTHER; note = 2'-O-methyladenosine-3'-phosphate
  modified_base 4: mod_base = OTHER; note = 2'-O-methylguanosine-3'-phosphate
  modified_base 5: mod_base = OTHER; note = 2'-O-methyluridine-3'-phosphate
  modified_base 6: mod_base = OTHER; note = 2'-O-methyladenosine-3'-phosphate
  modified_base 7: mod_base = OTHER; note = 2'-deoxy-2'-fluoroadenosine-3'-phosphate
  modified_base 8: mod_base = OTHER; note = 2'-O-methyladenosine-3'-phosphate
  modified_base 9: mod_base = OTHER; note = 2'-deoxy-2'-fluoroguanosine-3'-phosphate
  modified_base 10: mod_base = OTHER; note = 2'-deoxy-2'-fluoroadenosine-3'-phosphate
  modified_base 11: mod_base = OTHER; note = 2'-deoxy-2'-fluoroadenosine-3'-phosphate
  modified_base 12: mod_base = OTHER; note = 2'-O-methyladenosine-3'-phosphate
  modified_base 13: mod_base = OTHER; note = 2'-O-methyluridine-3'-phosphate
  modified_base 14: mod_base = OTHER; note = 2'-O-methylguanosine-3'-phosphate
  modified_base 15: mod_base = OTHER; note = 2'-O-methylcytidine-3'-phosphate
  modified_base 16: mod_base = OTHER; note = 2'-O-methyluridine-3'-phosphate
  modified_base 17: mod_base = OTHER; note = 2'-O-methyladenosine-3'-phosphate
  modified_base 18: mod_base = OTHER; note = 2'-O-methylcytidine-3'-phosphate
  modified_base 19: mod_base = OTHER; note = 2'-O-methyluridine-3'-phosphate
  modified_base 20: mod_base = OTHER; note = 2'-O-methyluridine-3'-phosphate
  modified_base 21: mod_base = OTHER; note = 2'-O-methyladenosine
acagtaaagaaatgctactta

SEQ ID NO: 3789 - RNA, 21 nt, synthetic construct
  source 1..21: mol_type = other RNA
  modified_base 1: mod_base = OTHER; note = 2'-O-methylcytidine-3'-phosphate
  modified_base 2: mod_base = OTHER; note = 2'-O-methyladenosine-3'-phosphate
  modified_base 3: mod_base = OTHER; note = 2'-O-methylguanosine-3'-phosphate
  modified_base 4: mod_base = OTHER; note = 2'-O-methyluridine-3'-phosphate
  modified_base 5: mod_base = OTHER; note = 2'-O-methyladenosine-3'-phosphate
  modified_base 6: mod_base = OTHER; note = 2'-O-methyladenosine-3'-phosphate
  modified_base 7: mod_base = OTHER; note = 2'-deoxy-2'-fluoroadenosine-3'-phosphate
  modified_base 8: mod_base = OTHER; note = 2'-O-methylguanosine-3'-phosphate
  modified_base 9: mod_base = OTHER; note = 2'-deoxy-2'-fluoroadenosine-3'-phosphate
  modified_base 10: mod_base = OTHER; note = 2'-deoxy-2'-fluoroadenosine-3'-phosphate
  modified_base 11: mod_base = OTHER; note = 2'-deoxy-2'-fluoroadenosine-3'-phosphate
  modified_base 12: mod_base = OTHER; note = 2'-O-methyluridine-3'-phosphate
  modified_base 13: mod_base = OTHER; note = 2'-O-methylguanosine-3'-phosphate
  modified_base 14: mod_base = OTHER; note = 2'-O-methylcytidine-3'-phosphate
  modified_base 15: mod_base = OTHER; note = 2'-O-methyluridine-3'-phosphate
  modified_base 16: mod_base = OTHER; note = 2'-O-methyladenosine-3'-phosphate
  modified_base 17: mod_base = OTHER; note = 2'-O-methylcytidine-3'-phosphate
  modified_base 18: mod_base = OTHER; note = 2'-O-methyluridine-3'-phosphate
  modified_base 19: mod_base = OTHER; note = 2'-O-methyluridine-3'-phosphate
  modified_base 20: mod_base = OTHER; note = 2'-O-methylguanosine-3'-phosphate
  modified_base 21: mod_base = OTHER; note = 2'-O-methyladenosine
cagtaaagaaatgctacttga

SEQ ID NO: 3790 - RNA, 21 nt, synthetic construct
  source 1..21: mol_type = other RNA
  modified_base 1: mod_base = OTHER; note = 2'-O-methyladenosine-3'-phosphate
  modified_base 2: mod_base = OTHER; note = 2'-O-methylguanosine-3'-phosphate
  modified_base 3: mod_base = OTHER; note = 2'-O-methyluridine-3'-phosphate
  modified_base 4: mod_base = OTHER; note = 2'-O-methyladenosine-3'-phosphate
  modified_base 5: mod_base = OTHER; note = 2'-O-methyladenosine-3'-phosphate
  modified_base 6: mod_base = OTHER; note = 2'-O-methyladenosine-3'-phosphate
  modified_base 7: mod_base = OTHER; note = 2'-deoxy-2'-fluoroguanosine-3'-phosphate
  modified_base 8: mod_base = OTHER; note = 2'-O-methyladenosine-3'-phosphate
  modified_base 9: mod_base = OTHER; note = 2'-deoxy-2'-fluoroadenosine-3'-phosphate
  modified_base 10: mod_base = OTHER; note = 2'-deoxy-2'-fluoroadenosine-3'-phosphate
  modified_base 11: mod_base = OTHER; note = 2'-deoxy-2'-fluorouridine-3'-phosphate
  modified_base 12: mod_base = OTHER; note = 2'-O-methylguanosine-3'-phosphate
  modified_base 13: mod_base = OTHER; note = 2'-O-methylcytidine-3'-phosphate
  modified_base 14: mod_base = OTHER; note = 2'-O-methyluridine-3'-phosphate
  modified_base 15: mod_base = OTHER; note = 2'-O-methyladenosine-3'-phosphate
  modified_base 16: mod_base = OTHER; note = 2'-O-methylcytidine-3'-phosphate
  modified_base 17: mod_base = OTHER; note = 2'-O-methyluridine-3'-phosphate
  modified_base 18: mod_base = OTHER; note = 2'-O-methyluridine-3'-phosphate
  modified_base 19: mod_base = OTHER; note = 2'-O-methylguanosine-3'-phosphate
  modified_base 20: mod_base = OTHER; note = 2'-O-methyladenosine-3'-phosphate
  modified_base 21: mod_base = OTHER; note = 2'-O-methyladenosine
agtaaagaaatgctacttgaa

SEQ ID NO: 3791 - RNA, 21 nt, synthetic construct
  source 1..21: mol_type = other RNA
  modified_base 1: mod_base = OTHER; note = 2'-O-methylguanosine-3'-phosphate
  modified_base 2: mod_base = OTHER; note = 2'-O-methyluridine-3'-phosphate
  modified_base 3: mod_base = OTHER; note = 2'-O-methyladenosine-3'-phosphate
  modified_base 4: mod_base = OTHER; note = 2'-O-methyladenosine-3'-phosphate
  modified_base 5: mod_base = OTHER; note = 2'-O-methyladenosine-3'-phosphate
  modified_base 6: mod_base = OTHER; note = 2'-O-methylguanosine-3'-phosphate
  modified_base 7: mod_base = OTHER; note = 2'-deoxy-2'-fluoroadenosine-3'-phosphate
  modified_base 8: mod_base = OTHER; note = 2'-O-methyladenosine-3'-phosphate
  modified_base 9: mod_base = OTHER; note = 2'-deoxy-2'-fluoroadenosine-3'-phosphate
  modified_base 10: mod_base = OTHER; note = 2'-deoxy-2'-fluorouridine-3'-phosphate
  modified_base 11: mod_base = OTHER; note = 2'-deoxy-2'-fluoroguanosine-3'-phosphate
  modified_base 12: mod_base = OTHER; note = 2'-O-methylcytidine-3'-phosphate
  modified_base 13: mod_base = OTHER; note = 2'-O-methyluridine-3'-phosphate
  modified_base 14: mod_base = OTHER; note = 2'-O-methyladenosine-3'-phosphate
  modified_base 15: mod_base = OTHER; note = 2'-O-methylcytidine-3'-phosphate
  modified_base 16: mod_base = OTHER; note = 2'-O-methyluridine-3'-phosphate
  modified_base 17: mod_base = OTHER; note = 2'-O-methyluridine-3'-phosphate
  modified_base 18: mod_base = OTHER; note = 2'-O-methylguanosine-3'-phosphate
  modified_base 19: mod_base = OTHER; note = 2'-O-methyladenosine-3'-phosphate
  modified_base 20: mod_base = OTHER; note = 2'-O-methyluridine-3'-phosphate
  modified_base 21: mod_base = OTHER; note = 2'-O-methyladenosine
gtaaagaaatgctacttgata

SEQ ID NO: 3792 - RNA, 21 nt, synthetic construct
  source 1..21: mol_type = other RNA
  modified_base 1: mod_base = OTHER; note = 2'-O-methyluridine-3'-phosphate
  modified_base 2: mod_base = OTHER; note = 2'-O-methyladenosine-3'-phosphate
  modified_base 3: mod_base = OTHER; note = 2'-O-methyladenosine-3'-phosphate
  modified_base 4: mod_base = OTHER; note = 2'-O-methyladenosine-3'-phosphate
  modified_base 5: mod_base = OTHER; note = 2'-O-methylguanosine-3'-phosphate
  modified_base 6: mod_base = OTHER; note = 2'-O-methyladenosine-3'-phosphate
  modified_base 7: mod_base = OTHER; note = 2'-deoxy-2'-fluoroadenosine-3'-phosphate
  modified_base 8: mod_base = OTHER; note = 2'-O-methyladenosine-3'-phosphate
  modified_base 9: mod_base = OTHER; note = 2'-deoxy-2'-fluorouridine-3'-phosphate
  modified_base 10: mod_base = OTHER; note = 2'-deoxy-2'-fluoroguanosine-3'-phosphate
  modified_base 11: mod_base = OTHER; note = 2'-deoxy-2'-fluorocytidine-3'-phosphate
  modified_base 12: mod_base = OTHER; note = 2'-O-methyluridine-3'-phosphate
  modified_base 13: mod_base = OTHER; note = 2'-O-methyladenosine-3'-phosphate
  modified_base 14: mod_base = OTHER; note = 2'-O-methylcytidine-3'-phosphate
  modified_base 15: mod_base = OTHER; note = 2'-O-methyluridine-3'-phosphate
  modified_base 16: mod_base = OTHER; note = 2'-O-methyluridine-3'-phosphate
  modified_base 17: mod_base = OTHER; note = 2'-O-methylguanosine-3'-phosphate
  modified_base 18: mod_base = OTHER; note = 2'-O-methyladenosine-3'-phosphate
  modified_base 19: mod_base = OTHER; note = 2'-O-methyluridine-3'-phosphate
  modified_base 20: mod_base = OTHER; note = 2'-O-methyluridine-3'-phosphate
  modified_base 21: mod_base = OTHER; note = 2'-O-methyladenosine
taaagaaatgctacttgatta

SEQ ID NO: 3793 - RNA, 21 nt, synthetic construct
  source 1..21: mol_type = other RNA
  modified_base 1: mod_base = OTHER; note = 2'-O-methyladenosine-3'-phosphate
  modified_base 2: mod_base = OTHER; note = 2'-O-methyladenosine-3'-phosphate
  modified_base 3: mod_base = OTHER; note = 2'-O-methyladenosine-3'-phosphate
  modified_base 4: mod_base = OTHER; note = 2'-O-methylguanosine-3'-phosphate
  modified_base 5: mod_base = OTHER; note = 2'-O-methyladenosine-3'-phosphate
  modified_base 6: mod_base = OTHER; note = 2'-O-methyladenosine-3'-phosphate
  modified_base 7: mod_base = OTHER; note = 2'-deoxy-2'-fluoroadenosine-3'-phosphate
  modified_base 8: mod_base = OTHER; note = 2'-O-methyluridine-3'-phosphate
  modified_base 9: mod_base = OTHER; note = 2'-deoxy-2'-fluoroguanosine-3'-phosphate
  modified_base 10: mod_base = OTHER; note = 2'-deoxy-2'-fluorocytidine-3'-phosphate
  modified_base 11: mod_base = OTHER; note = 2'-deoxy-2'-fluorouridine-3'-phosphate
  modified_base 12: mod_base = OTHER; note = 2'-O-methyladenosine-3'-phosphate
  modified_base 13: mod_base = OTHER; note = 2'-O-methylcytidine-3'-phosphate
  modified_base 14: mod_base = OTHER; note = 2'-O-methyluridine-3'-phosphate
  modified_base 15: mod_base = OTHER; note = 2'-O-methyluridine-3'-phosphate
  modified_base 16: mod_base = OTHER; note = 2'-O-methylguanosine-3'-phosphate
  modified_base 17: mod_base = OTHER; note = 2'-O-methyladenosine-3'-phosphate
  modified_base 18: mod_base = OTHER; note = 2'-O-methyluridine-3'-phosphate
  modified_base 19: mod_base = OTHER; note = 2'-O-methyluridine-3'-phosphate
  modified_base 20: mod_base = OTHER; note = 2'-O-methyluridine-3'-phosphate
  modified_base 21: mod_base = OTHER; note = 2'-O-methyladenosine
aaagaaatgctacttgattta

SEQ ID NO: 3794 - RNA, 21 nt, synthetic construct
  source 1..21: mol_type = other RNA
  modified_base 1: mod_base = OTHER; note = 2'-O-methyladenosine-3'-phosphate
  modified_base 2: mod_base = OTHER; note = 2'-O-methyladenosine-3'-phosphate
  modified_base 3: mod_base = OTHER; note = 2'-O-methylcytidine-3'-phosphate
  modified_base 4: mod_base = OTHER; note = 2'-O-methyluridine-3'-phosphate
  modified_base 5: mod_base = OTHER; note = 2'-O-methylguanosine-3'-phosphate
  modified_base 6: mod_base = OTHER; note = 2'-O-methylguanosine-3'-phosphate
  modified_base 7: mod_base = OTHER; note = 2'-deoxy-2'-fluoroadenosine-3'-phosphate
  modified_base 8: mod_base = OTHER; note = 2'-O-methyluridine-3'-phosphate
  modified_base 9: mod_base = OTHER; note = 2'-deoxy-2'-fluorouridine-3'-phosphate
  modified_base 10: mod_base = OTHER; note = 2'-deoxy-2'-fluoroguanosine-3'-phosphate
  modified_base 11: mod_base = OTHER; note = 2'-deoxy-2'-fluorocytidine-3'-phosphate
  modified_base 12: mod_base = OTHER; note = 2'-O-methyluridine-3'-phosphate
  modified_base 13: mod_base = OTHER; note = 2'-O-methylcytidine-3'-phosphate
  modified_base 14: mod_base = OTHER; note = 2'-O-methyladenosine-3'-phosphate
  modified_base 15: mod_base = OTHER; note = 2'-O-methylguanosine-3'-phosphate
  modified_base 16: mod_base = OTHER; note = 2'-O-methyladenosine-3'-phosphate
  modified_base 17: mod_base = OTHER; note = 2'-O-methyluridine-3'-phosphate
  modified_base 18: mod_base = OTHER; note = 2'-O-methyluridine-3'-phosphate
  modified_base 19: mod_base = OTHER; note = 2'-O-methyladenosine-3'-phosphate
  modified_base 20: mod_base = OTHER; note = 2'-O-methylcytidine-3'-phosphate
  modified_base 21: mod_base = OTHER; note = 2'-O-methyladenosine
aactggattgctcagattaca

SEQ ID NO: 3795 - RNA, 21 nt, synthetic construct
  source 1..21: mol_type = other RNA
  modified_base 1: mod_base = OTHER; note = 2'-O-methyladenosine-3'-phosphate
  modified_base 2: mod_base = OTHER; note = 2'-O-methyluridine-3'-phosphate
  modified_base 3: mod_base = OTHER; note = 2'-O-methyluridine-3'-phosphate
  modified_base 4: mod_base = OTHER; note = 2'-O-methylguanosine-3'-phosphate
  modified_base 5: mod_base = OTHER; note = 2'-O-methylcytidine-3'-phosphate
  modified_base 6: mod_base = OTHER; note = 2'-O-methyluridine-3'-phosphate
  modified_base 7: mod_base = OTHER; note = 2'-deoxy-2'-fluorocytidine-3'-phosphate
  modified_base 8: mod_base = OTHER; note = 2'-O-methyladenosine-3'-phosphate
  modified_base 9: mod_base = OTHER; note = 2'-deoxy-2'-fluoroguanosine-3'-phosphate
  modified_base 10: mod_base = OTHER; note = 2'-deoxy-2'-fluoroadenosine-3'-phosphate
  modified_base 11: mod_base = OTHER; note = 2'-deoxy-2'-fluorouridine-3'-phosphate
  modified_base 12: mod_base = OTHER; note = 2'-O-methyluridine-3'-phosphate
  modified_base 13: mod_base = OTHER; note = 2'-O-methyladenosine-3'-phosphate
  modified_base 14: mod_base = OTHER; note = 2'-O-methylcytidine-3'-phosphate
  modified_base 15: mod_base = OTHER; note = 2'-O-methylcytidine-3'-phosphate
  modified_base 16: mod_base = OTHER; note = 2'-O-methyluridine-3'-phosphate
  modified_base 17: mod_base = OTHER; note = 2'-O-methylguanosine-3'-phosphate
  modified_base 18: mod_base = OTHER; note = 2'-O-methyladenosine-3'-phosphate
  modified_base 19: mod_base = OTHER; note = 2'-O-methyluridine-3'-phosphate
  modified_base 20: mod_base = OTHER; note = 2'-O-methylcytidine-3'-phosphate
  modified_base 21: mod_base = OTHER; note = 2'-O-methyladenosine
attgctcagattacctgatca

SEQ ID NO: 3796 - RNA, 21 nt, synthetic construct
  source 1..21: mol_type = other RNA
  modified_base 1: mod_base = OTHER; note = 2'-O-methylcytidine-3'-phosphate
  modified_base 2: mod_base = OTHER; note = 2'-O-methyladenosine-3'-phosphate
  modified_base 3: mod_base = OTHER; note = 2'-O-methylguanosine-3'-phosphate
  modified_base 4: mod_base = OTHER; note = 2'-O-methyladenosine-3'-phosphate
  modified_base 5: mod_base = OTHER; note = 2'-O-methyluridine-3'-phosphate
  modified_base 6: mod_base = OTHER; note = 2'-O-methyluridine-3'-phosphate
  modified_base 7: mod_base = OTHER; note = 2'-deoxy-2'-fluoroadenosine-3'-phosphate
  modified_base 8: mod_base = OTHER; note = 2'-O-methylcytidine-3'-phosphate
  modified_base 9: mod_base = OTHER; note = 2'-deoxy-2'-fluorocytidine-3'-phosphate
  modified_base 10: mod_base = OTHER; note = 2'-deoxy-2'-fluorouridine-3'-phosphate
  modified_base 11: mod_base = OTHER; note = 2'-deoxy-2'-fluoroguanosine-3'-phosphate
  modified_base 12: mod_base = OTHER; note = 2'-O-methyladenosine-3'-phosphate
  modified_base 13: mod_base = OTHER; note = 2'-O-methyluridine-3'-phosphate
  modified_base 14: mod_base = OTHER; note = 2'-O-methylcytidine-3'-phosphate
  modified_base 15: mod_base = OTHER; note = 2'-O-methylguanosine-3'-phosphate
  modified_base 16: mod_base = OTHER; note = 2'-O-methyluridine-3'-phosphate
  modified_base 17: mod_base = OTHER; note = 2'-O-methylguanosine-3'-phosphate
  modified_base 18: mod_base = OTHER; note = 2'-O-methylguanosine-3'-phosphate
  modified_base 19: mod_base = OTHER; note = 2'-O-methyluridine-3'-phosphate
  modified_base 20: mod_base = OTHER; note = 2'-O-methylguanosine-3'-phosphate
  modified_base 21: mod_base = OTHER; note = 2'-O-methyladenosine
cagattacctgatcgtggtga

SEQ ID NO: 3797 - RNA, 21 nt, synthetic construct
  source 1..21: mol_type = other RNA
  modified_base 1: mod_base = OTHER; note = 2'-O-methyladenosine-3'-phosphate
  modified_base 2: mod_base = OTHER; note = 2'-O-methylguanosine-3'-phosphate
  modified_base 3: mod_base = OTHER; note = 2'-O-methyladenosine-3'-phosphate
  modified_base 4: mod_base = OTHER; note = 2'-O-methyluridine-3'-phosphate
  modified_base 5: mod_base = OTHER; note = 2'-O-methyluridine-3'-phosphate
  modified_base 6: mod_base = OTHER; note = 2'-O-methyladenosine-3'-phosphate
  modified_base 7: mod_base = OTHER; note = 2'-deoxy-2'-fluorocytidine-3'-phosphate
  modified_base 8: mod_base = OTHER; note = 2'-O-methylcytidine-3'-phosphate
  modified_base 9: mod_base = OTHER; note = 2'-deoxy-2'-fluorouridine-3'-phosphate
  modified_base 10: mod_base = OTHER; note = 2'-deoxy-2'-fluoroguanosine-3'-phosphate
  modified_base 11: mod_base = OTHER; note = 2'-deoxy-2'-fluoroadenosine-3'-phosphate
  modified_base 12: mod_base = OTHER; note = 2'-O-methyluridine-3'-phosphate
  modified_base 13: mod_base = OTHER; note = 2'-O-methylcytidine-3'-phosphate
  modified_base 14: mod_base = OTHER; note = 2'-O-methylguanosine-3'-phosphate
  modified_base 15: mod_base = OTHER; note = 2'-O-methyluridine-3'-phosphate
  modified_base 16: mod_base = OTHER; note = 2'-O-methylguanosine-3'-phosphate
  modified_base 17: mod_base = OTHER; note = 2'-O-methylguanosine-3'-phosphate
  modified_base 18: mod_base = OTHER; note = 2'-O-methyluridine-3'-phosphate
  modified_base 19: mod_base = OTHER; note = 2'-O-methylguanosine-3'-phosphate
  modified_base 20: mod_base = OTHER; note = 2'-O-methylguanosine-3'-phosphate
  modified_base 21: mod_base = OTHER; note = 2'-O-methyladenosine
agattacctgatcgtggtgga

SEQ ID NO: 3798 - RNA, 21 nt, synthetic construct
  source 1..21: mol_type = other RNA
  modified_base 1: mod_base = OTHER; note = 2'-O-methylguanosine-3'-phosphate
  modified_base 2: mod_base = OTHER; note = 2'-O-methyladenosine-3'-phosphate
  modified_base 3: mod_base = OTHER; note = 2'-O-methyluridine-3'-phosphate
  modified_base 4: mod_base = OTHER; note = 2'-O-methyluridine-3'-phosphate
  modified_base 5: mod_base = OTHER; note = 2'-O-methyladenosine-3'-phosphate
  modified_base 6: mod_base = OTHER; note = 2'-O-methylcytidine-3'-phosphate
  modified_base 7: mod_base = OTHER; note = 2'-deoxy-2'-fluorocytidine-3'-phosphate
  modified_base 8: mod_base = OTHER; note = 2'-O-methyluridine-3'-phosphate
  modified_base 9: mod_base = OTHER; note = 2'-deoxy-2'-fluoroguanosine-3'-phosphate
  modified_base 10: mod_base = OTHER; note = 2'-deoxy-2'-fluoroadenosine-3'-phosphate
  modified_base 11: mod_base = OTHER; note = 2'-deoxy-2'-fluorouridine-3'-phosphate
  modified_base 12: mod_base = OTHER; note = 2'-O-methylcytidine-3'-phosphate
  modified_base 13: mod_base = OTHER; note = 2'-O-methylguanosine-3'-phosphate
  modified_base 14: mod_base = OTHER; note = 2'-O-methyluridine-3'-phosphate
  modified_base 15: mod_base = OTHER; note = 2'-O-methylguanosine-3'-phosphate
  modified_base 16: mod_base = OTHER; note = 2'-O-methylguanosine-3'-phosphate
  modified_base 17: mod_base = OTHER; note = 2'-O-methyluridine-3'-phosphate
  modified_base 18: mod_base = OTHER; note = 2'-O-methylguanosine-3'-phosphate
  modified_base 19: mod_base = OTHER; note = 2'-O-methylguanosine-3'-phosphate
  modified_base 20: mod_base = OTHER; note = 2'-O-methyladenosine-3'-phosphate
  modified_base 21: mod_base = OTHER; note = 2'-O-methyladenosine
gattacctgatcgtggtggaa

SEQ ID NO: 3799 - RNA, 21 nt, synthetic construct
  source 1..21: mol_type = other RNA
  modified_base 1: mod_base = OTHER; note = 2'-O-methyladenosine-3'-phosphate
  modified_base 2: mod_base = OTHER; note = 2'-O-methyluridine-3'-phosphate
  modified_base 3: mod_base = OTHER; note = 2'-O-methyluridine-3'-phosphate
  modified_base 4: mod_base = OTHER; note = 2'-O-methyladenosine-3'-phosphate
  modified_base 5: mod_base = OTHER; note = 2'-O-methylcytidine-3'-phosphate
  modified_base 6: mod_base = OTHER; note = 2'-O-methylcytidine-3'-phosphate
  modified_base 7: mod_base = OTHER; note = 2'-deoxy-2'-fluorouridine-3'-phosphate
  modified_base 8: mod_base = OTHER; note = 2'-O-methylguanosine-3'-phosphate
  modified_base 9: mod_base = OTHER; note = 2'-deoxy-2'-fluoroadenosine-3'-phosphate
  modified_base 10: mod_base = OTHER; note = 2'-deoxy-2'-fluorouridine-3'-phosphate
  modified_base 11: mod_base = OTHER; note = 2'-deoxy-2'-fluorocytidine-3'-phosphate
  modified_base 12: mod_base = OTHER; note = 2'-O-methylguanosine-3'-phosphate
  modified_base 13: mod_base = OTHER; note = 2'-O-methyluridine-3'-phosphate
  modified_base 14: mod_base = OTHER; note = 2'-O-methylguanosine-3'-phosphate
  modified_base 15: mod_base = OTHER; note = 2'-O-methylguanosine-3'-phosphate
  modified_base 16: mod_base = OTHER; note = 2'-O-methyluridine-3'-phosphate
  modified_base 17: mod_base = OTHER; note = 2'-O-methylguanosine-3'-phosphate
  modified_base 18: mod_base = OTHER; note = 2'-O-methylguanosine-3'-phosphate
  modified_base 19: mod_base = OTHER; note = 2'-O-methyladenosine-3'-phosphate
  modified_base 20: mod_base = OTHER; note = 2'-O-methyladenosine-3'-phosphate
  modified_base 21: mod_base = OTHER; note = 2'-O-methyladenosine
attacctgatcgtggtggaaa

SEQ ID NO: 3800 - RNA, 21 nt, synthetic construct
  source 1..21: mol_type = other RNA
  modified_base 1: mod_base = OTHER; note = 2'-O-methyluridine-3'-phosphate
  modified_base 2: mod_base = OTHER; note = 2'-O-methyluridine-3'-phosphate
  modified_base 3: mod_base = OTHER; note = 2'-O-methyladenosine-3'-phosphate
  modified_base 4: mod_base = OTHER; note = 2'-O-methylcytidine-3'-phosphate
  modified_base 5: mod_base = OTHER; note = 2'-O-methylcytidine-3'-phosphate
  modified_base 6: mod_base = OTHER; note = 2'-O-methyluridine-3'-phosphate
  modified_base 7: mod_base = OTHER; note = 2'-deoxy-2'-fluoroguanosine-3'-phosphate
  modified_base 8: mod_base = OTHER; note = 2'-O-methyladenosine-3'-phosphate
  modified_base 9: mod_base = OTHER; note = 2'-deoxy-2'-fluorouridine-3'-phosphate
  modified_base 10: mod_base = OTHER; note = 2'-deoxy-2'-fluorocytidine-3'-phosphate
  modified_base 11: mod_base = OTHER; note = 2'-deoxy-2'-fluoroguanosine-3'-phosphate
  modified_base 12: mod_base = OTHER; note = 2'-O-methyluridine-3'-phosphate
  modified_base 13: mod_base = OTHER; note = 2'-O-methylguanosine-3'-phosphate
  modified_base 14: mod_base = OTHER; note = 2'-O-methylguanosine-3'-phosphate
  modified_base 15: mod_base = OTHER; note = 2'-O-methyluridine-3'-phosphate
  modified_base 16: mod_base = OTHER; note = 2'-O-methylguanosine-3'-phosphate
  modified_base 17: mod_base = OTHER; note = 2'-O-methylguanosine-3'-phosphate
  modified_base 18: mod_base = OTHER; note = 2'-O-methyladenosine-3'-phosphate
  modified_base 19: mod_base = OTHER; note = 2'-O-methyladenosine-3'-phosphate
  modified_base 20: mod_base = OTHER; note = 2'-O-methylcytidine-3'-phosphate
  modified_base 21: mod_base = OTHER; note = 2'-O-methyladenosine
ttacctgatcgtggtggaaca

SEQ ID NO: 3801 - RNA, 21 nt, synthetic construct
  source 1..21: mol_type = other RNA
  modified_base 1: mod_base = OTHER; note = 2'-O-methyluridine-3'-phosphate
  modified_base 2: mod_base = OTHER; note = 2'-O-methyladenosine-3'-phosphate
  modified_base 3: mod_base = OTHER; note = 2'-O-methylcytidine-3'-phosphate
  modified_base 4: mod_base = OTHER; note = 2'-O-methylcytidine-3'-phosphate
  modified_base 5: mod_base = OTHER; note = 2'-O-methyluridine-3'-phosphate
  modified_base 6: mod_base = OTHER; note = 2'-O-methylguanosine-3'-phosphate
  modified_base 7: mod_base = OTHER; note = 2'-deoxy-2'-fluoroadenosine-3'-phosphate
  modified_base 8: mod_base = OTHER; note = 2'-O-methyluridine-3'-phosphate
  modified_base 9: mod_base = OTHER; note = 2'-deoxy-2'-fluorocytidine-3'-phosphate
  modified_base 10: mod_base = OTHER; note = 2'-deoxy-2'-fluoroguanosine-3'-phosphate
  modified_base 11: mod_base = OTHER; note = 2'-deoxy-2'-fluorouridine-3'-phosphate
  modified_base 12: mod_base = OTHER; note = 2'-O-methylguanosine-3'-phosphate
  modified_base 13: mod_base = OTHER; note = 2'-O-methylguanosine-3'-phosphate
  modified_base 14: mod_base = OTHER; note = 2'-O-methyluridine-3'-phosphate
  modified_base 15: mod_base = OTHER; note = 2'-O-methylguanosine-3'-phosphate
  modified_base 16: mod_base = OTHER; note = 2'-O-methylguanosine-3'-phosphate
  modified_base 17: mod_base = OTHER; note = 2'-O-methyladenosine-3'-phosphate
  modified_base 18: mod_base = OTHER; note = 2'-O-methyladenosine-3'-phosphate
  modified_base 19: mod_base = OTHER; note = 2'-O-methylcytidine-3'-phosphate
  modified_base 20: mod_base = OTHER; note = 2'-O-methylcytidine-3'-phosphate
  modified_base 21: mod_base = OTHER; note = 2'-O-methyladenosine
tacctgatcgtggtggaacca

SEQ ID NO: 3802 - RNA, 21 nt, synthetic construct
  source 1..21: mol_type = other RNA
  modified_base 1: mod_base = OTHER; note = 2'-O-methyladenosine-3'-phosphate
  modified_base 2: mod_base = OTHER; note = 2'-O-methylcytidine-3'-phosphate
  modified_base 3: mod_base = OTHER; note = 2'-O-methylcytidine-3'-phosphate
  modified_base 4: mod_base = OTHER; note = 2'-O-methyluridine-3'-phosphate
  modified_base 5: mod_base = OTHER; note = 2'-O-methylguanosine-3'-phosphate
  modified_base 6: mod_base = OTHER; note = 2'-O-methyladenosine-3'-phosphate
  modified_base 7: mod_base = OTHER; note = 2'-deoxy-2'-fluorouridine-3'-phosphate
  modified_base 8: mod_base = OTHER; note = 2'-O-methylcytidine-3'-phosphate
  modified_base 9: mod_base = OTHER; note = 2'-deoxy-2'-fluoroguanosine-3'-phosphate
  modified_base 10: mod_base = OTHER; note = 2'-deoxy-2'-fluorouridine-3'-phosphate
  modified_base 11: mod_base = OTHER; note = 2'-deoxy-2'-fluoroguanosine-3'-phosphate
  modified_base 12: mod_base = OTHER; note = 2'-O-methylguanosine-3'-phosphate
  modified_base 13: mod_base = OTHER; note = 2'-O-methyluridine-3'-phosphate
  modified_base 14: mod_base = OTHER; note = 2'-O-methylguanosine-3'-phosphate
  modified_base 15: mod_base = OTHER; note = 2'-O-methylguanosine-3'-phosphate
  modified_base 16: mod_base = OTHER; note = 2'-O-methyladenosine-3'-phosphate
  modified_base 17: mod_base = OTHER; note = 2'-O-methyladenosine-3'-phosphate
  modified_base 18: mod_base = OTHER; note = 2'-O-methylcytidine-3'-phosphate
  modified_base 19: mod_base = OTHER; note = 2'-O-methylcytidine-3'-phosphate
  modified_base 20: mod_base = OTHER; note = 2'-O-methylcytidine-3'-phosphate
  modified_base 21: mod_base = OTHER; note = 2'-O-methyladenosine
acctgatcgtggtggaaccca

SEQ ID NO: 3803 - RNA, 21 nt, synthetic construct
  source 1..21: mol_type = other RNA
  modified_base 1: mod_base = OTHER; note = 2'-O-methylcytidine-3'-phosphate
  modified_base 2: mod_base = OTHER; note = 2'-O-methylcytidine-3'-phosphate
  modified_base 3: mod_base = OTHER; note = 2'-O-methyluridine-3'-phosphate
  modified_base 4: mod_base = OTHER; note = 2'-O-methylguanosine-3'-phosphate
  modified_base 5: mod_base = OTHER; note = 2'-O-methyladenosine-3'-phosphate
  modified_base 6: mod_base = OTHER; note = 2'-O-methyluridine-3'-phosphate
  modified_base 7: mod_base = OTHER; note = 2'-deoxy-2'-fluorocytidine-3'-phosphate
  modified_base 8: mod_base = OTHER; note = 2'-O-methylguanosine-3'-phosphate
  modified_base 9: mod_base = OTHER; note = 2'-deoxy-2'-fluorouridine-3'-phosphate
  modified_base 10: mod_base = OTHER; note = 2'-deoxy-2'-fluoroguanosine-3'-phosphate
  modified_base 11: mod_base = OTHER; note = 2'-deoxy-2'-fluoroguanosine-3'-phosphate
  modified_base 12: mod_base = OTHER; note = 2'-O-methyluridine-3'-phosphate
  modified_base 13: mod_base = OTHER; note = 2'-O-methylguanosine-3'-phosphate
  modified_base 14: mod_base = OTHER; note = 2'-O-methylguanosine-3'-phosphate
  modified_base 15: mod_base = OTHER; note = 2'-O-methyladenosine-3'-phosphate
  modified_base 16: mod_base = OTHER; note = 2'-O-methyladenosine-3'-phosphate
  modified_base 17: mod_base = OTHER; note = 2'-O-methylcytidine-3'-phosphate
  modified_base 18: mod_base = OTHER; note = 2'-O-methylcytidine-3'-phosphate
  modified_base 19: mod_base = OTHER; note = 2'-O-methylcytidine-3'-phosphate
  modified_base 20: mod_base = OTHER; note = 2'-O-methyluridine-3'-phosphate
  modified_base 21: mod_base = OTHER; note = 2'-O-methyladenosine
cctgatcgtggtggaacccta

SEQ ID NO: 3804 - RNA, 21 nt, synthetic construct
  source 1..21: mol_type = other RNA
  modified_base 1: mod_base = OTHER; note = 2'-O-methyluridine-3'-phosphate
  modified_base 2: mod_base = OTHER; note = 2'-O-methyladenosine-3'-phosphate
  modified_base 3: mod_base = OTHER; note = 2'-O-methyluridine-3'-phosphate
  modified_base 4: mod_base = OTHER; note = 2'-O-methylcytidine-3'-phosphate
  modified_base 5: mod_base = OTHER; note = 2'-O-methylcytidine-3'-phosphate
  modified_base 6: mod_base = OTHER; note = 2'-O-methylcytidine-3'-phosphate
  modified_base 7: mod_base = OTHER; note = 2'-deoxy-2'-fluoroadenosine-3'-phosphate
  modified_base 8: mod_base = OTHER; note = 2'-O-methyluridine-3'-phosphate
  modified_base 9: mod_base = OTHER; note = 2'-deoxy-2'-fluoroadenosine-3'-phosphate
  modified_base 10: mod_base = OTHER; note = 2'-deoxy-2'-fluorouridine-3'-phosphate
  modified_base 11: mod_base = OTHER; note = 2'-deoxy-2'-fluorouridine-3'-phosphate
  modified_base 12: mod_base = OTHER; note = 2'-O-methyluridine-3'-phosphate
  modified_base 13: mod_base = OTHER; note = 2'-O-methyladenosine-3'-phosphate
  modified_base 14: mod_base = OTHER; note = 2'-O-methyladenosine-3'-phosphate
  modified_base 15: mod_base = OTHER; note = 2'-O-methylcytidine-3'-phosphate
  modified_base 16: mod_base = OTHER; note = 2'-O-methyluridine-3'-phosphate
  modified_base 17: mod_base = OTHER; note = 2'-O-methylguanosine-3'-phosphate
  modified_base 18: mod_base = OTHER; note = 2'-O-methyluridine-3'-phosphate
  modified_base 19: mod_base = OTHER; note = 2'-O-methyluridine-3'-phosphate
  modified_base 20: mod_base = OTHER; note = 2'-O-methylcytidine-3'-phosphate
  modified_base 21: mod_base = OTHER; note = 2'-O-methyladenosine
tatcccatatttaactgttca

SEQ ID NO: 3805 - RNA, 21 nt, synthetic construct
  source 1..21: mol_type = other RNA
  modified_base 1: mod_base = OTHER; note = 2'-O-methyladenosine-3'-phosphate
  modified_base 2: mod_base = OTHER; note = 2'-O-methyluridine-3'-phosphate
  modified_base 3: mod_base = OTHER; note = 2'-O-methylcytidine-3'-phosphate
  modified_base 4: mod_base = OTHER; note = 2'-O-methylcytidine-3'-phosphate
  modified_base 5: mod_base = OTHER; note = 2'-O-methylcytidine-3'-phosphate
  modified_base 6: mod_base = OTHER; note = 2'-O-methyladenosine-3'-phosphate
  modified_base 7: mod_base = OTHER; note = 2'-deoxy-2'-fluorouridine-3'-phosphate
  modified_base 8: mod_base = OTHER; note = 2'-O-methyladenosine-3'-phosphate
  modified_base 9: mod_base = OTHER; note = 2'-deoxy-2'-fluorouridine-3'-phosphate
  modified_base 10: mod_base = OTHER; note = 2'-deoxy-2'-fluorouridine-3'-phosphate
  modified_base 11: mod_base = OTHER; note = 2'-deoxy-2'-fluorouridine-3'-phosphate
  modified_base 12: mod_base = OTHER; note = 2'-O-methyladenosine-3'-phosphate
  modified_base 13: mod_base = OTHER; note = 2'-O-methyladenosine-3'-phosphate
  modified_base 14: mod_base = OTHER; note = 2'-O-methylcytidine-3'-phosphate
  modified_base 15: mod_base = OTHER; note = 2'-O-methyluridine-3'-phosphate
  modified_base 16: mod_base = OTHER; note = 2'-O-methylguanosine-3'-phosphate
  modified_base 17: mod_base = OTHER; note = 2'-O-methyluridine-3'-phosphate
  modified_base 18: mod_base = OTHER; note = 2'-O-methyluridine-3'-phosphate
  modified_base 19: mod_base = OTHER; note = 2'-O-methylcytidine-3'-phosphate
  modified_base 20: mod_base = OTHER; note = 2'-O-methyluridine-3'-phosphate
  modified_base 21: mod_base = OTHER; note = 2'-O-methyladenosine
atcccatatttaactgttcta

SEQ ID NO: 3806 - RNA, 21 nt, synthetic construct
  source 1..21: mol_type = other RNA
  modified_base 1: mod_base = OTHER; note = 2'-O-methyluridine-3'-phosphate
  modified_base 2: mod_base = OTHER; note = 2'-O-methylcytidine-3'-phosphate
  modified_base 3: mod_base = OTHER; note = 2'-O-methylcytidine-3'-phosphate
  modified_base 4: mod_base = OTHER; note = 2'-O-methylcytidine-3'-phosphate
  modified_base 5: mod_base = OTHER; note = 2'-O-methyladenosine-3'-phosphate
  modified_base 6: mod_base = OTHER; note = 2'-O-methyluridine-3'-phosphate
  modified_base 7: mod_base = OTHER; note = 2'-deoxy-2'-fluoroadenosine-3'-phosphate
  modified_base 8: mod_base = OTHER; note = 2'-O-methyluridine-3'-phosphate
  modified_base 9: mod_base = OTHER; note = 2'-deoxy-2'-fluorouridine-3'-phosphate
  modified_base 10: mod_base = OTHER; note = 2'-deoxy-2'-fluorouridine-3'-phosphate
  modified_base 11: mod_base = OTHER; note = 2'-deoxy-2'-fluoroadenosine-3'-phosphate
  modified_base 12: mod_base = OTHER; note = 2'-O-methyladenosine-3'-phosphate
  modified_base 13: mod_base = OTHER; note = 2'-O-methylcytidine-3'-phosphate
  modified_base 14: mod_base = OTHER; note = 2'-O-methyluridine-3'-phosphate
  modified_base 15: mod_base = OTHER; note = 2'-O-methylguanosine-3'-phosphate
  modified_base 16: mod_base = OTHER; note = 2'-O-methyluridine-3'-phosphate
  modified_base 17: mod_base = OTHER; note = 2'-O-methyluridine-3'-phosphate
  modified_base 18: mod_base = OTHER; note = 2'-O-methylcytidine-3'-phosphate
  modified_base 19: mod_base = OTHER; note = 2'-O-methyluridine-3'-phosphate
  modified_base 20: mod_base = OTHER; note = 2'-O-methyladenosine-3'-phosphate
  modified_base 21: mod_base = OTHER; note = 2'-O-methyladenosine
tcccatatttaactgttctaa

SEQ ID NO: 3807 - RNA, 21 nt, synthetic construct
  source 1..21: mol_type = other RNA
  modified_base 1: mod_base = OTHER; note = 2'-O-methylcytidine-3'-phosphate
  modified_base 2: mod_base = OTHER; note = 2'-O-methylcytidine-3'-phosphate
  modified_base 3: mod_base = OTHER; note = 2'-O-methylcytidine-3'-phosphate
  modified_base 4: mod_base = OTHER; note = 2'-O-methyladenosine-3'-phosphate
  modified_base 5: mod_base = OTHER; note = 2'-O-methyluridine-3'-phosphate
  modified_base 6: mod_base = OTHER; note = 2'-O-methyladenosine-3'-phosphate
  modified_base 7: mod_base = OTHER; note = 2'-deoxy-2'-fluorouridine-3'-phosphate
  modified_base 8: mod_base = OTHER; note = 2'-O-methyluridine-3'-phosphate
  modified_base 9: mod_base = OTHER; note = 2'-deoxy-2'-fluorouridine-3'-phosphate
  modified_base 10: mod_base = OTHER; note = 2'-deoxy-2'-fluoroadenosine-3'-phosphate
  modified_base 11: mod_base = OTHER; note = 2'-deoxy-2'-fluoroadenosine-3'-phosphate
  modified_base 12: mod_base = OTHER; note = 2'-O-methylcytidine-3'-phosphate
  modified_base 13: mod_base = OTHER; note = 2'-O-methyluridine-3'-phosphate
  modified_base 14: mod_base = OTHER; note = 2'-O-methylguanosine-3'-phosphate
  modified_base 15: mod_base = OTHER; note = 2'-O-methyluridine-3'-phosphate
  modified_base 16: mod_base = OTHER; note = 2'-O-methyluridine-3'-phosphate
  modified_base 17: mod_base = OTHER; note = 2'-O-methylcytidine-3'-phosphate
  modified_base 18: mod_base = OTHER; note = 2'-O-methyluridine-3'-phosphate
  modified_base 19: mod_base = OTHER; note = 2'-O-methyladenosine-3'-phosphate
  modified_base 20: mod_base = OTHER; note = 2'-O-methyluridine-3'-phosphate
  modified_base 21: mod_base = OTHER; note = 2'-O-methyladenosine
cccatatttaactgttctata

SEQ ID NO: 3808 - RNA, 21 nt, synthetic construct
  source 1..21: mol_type = other RNA
  modified_base 1: mod_base = OTHER; note = 2'-O-methylcytidine-3'-phosphate
  modified_base 2: mod_base = OTHER; note = 2'-O-methylcytidine-3'-phosphate
  modified_base 3: mod_base = OTHER; note = 2'-O-methyladenosine-3'-phosphate
  modified_base 4: mod_base = OTHER; note = 2'-O-methyluridine-3'-phosphate
  modified_base 5: mod_base = OTHER; note = 2'-O-methyladenosine-3'-phosphate
  modified_base 6: mod_base = OTHER; note = 2'-O-methyluridine-3'-phosphate
  modified_base 7: mod_base = OTHER; note = 2'-deoxy-2'-fluorouridine-3'-phosphate
  modified_base 8: mod_base = OTHER; note = 2'-O-methyluridine-3'-phosphate
  modified_base 9: mod_base = OTHER; note = 2'-deoxy-2'-fluoroadenosine-3'-phosphate
  modified_base 10: mod_base = OTHER; note = 2'-deoxy-2'-fluoroadenosine-3'-phosphate
  modified_base 11: mod_base = OTHER; note = 2'-deoxy-2'-fluorocytidine-3'-phosphate
  modified_base 12: mod_base = OTHER; note = 2'-O-methyluridine-3'-phosphate
  modified_base 13: mod_base = OTHER; note = 2'-O-methylguanosine-3'-phosphate
  modified_base 14: mod_base = OTHER; note = 2'-O-methyluridine-3'-phosphate
  modified_base 15: mod_base = OTHER; note = 2'-O-methyluridine-3'-phosphate
  modified_base 16: mod_base = OTHER; note = 2'-O-methylcytidine-3'-phosphate
  modified_base 17: mod_base = OTHER; note = 2'-O-methyluridine-3'-phosphate
  modified_base 18: mod_base = OTHER; note = 2'-O-methyladenosine-3'-phosphate
  modified_base 19: mod_base = OTHER; note = 2'-O-methyluridine-3'-phosphate
  modified_base 20: mod_base = OTHER; note = 2'-O-methyladenosine-3'-phosphate
  modified_base 21: mod_base = OTHER; note = 2'-O-methyladenosine
ccatatttaactgttctataa

SEQ ID NO: 3809 - RNA, 21 nt, synthetic construct
  source 1..21: mol_type = other RNA
  modified_base 1: mod_base = OTHER; note = 2'-O-methylcytidine-3'-phosphate
  modified_base 2: mod_base = OTHER; note = 2'-O-methyladenosine-3'-phosphate
  modified_base 3: mod_base = OTHER; note = 2'-O-methyluridine-3'-phosphate
  modified_base 4: mod_base = OTHER; note = 2'-O-methyladenosine-3'-phosphate
  modified_base 5: mod_base = OTHER; note = 2'-O-methyluridine-3'-phosphate
  modified_base 6: mod_base = OTHER; note = 2'-O-methyluridine-3'-phosphate
  modified_base 7: mod_base = OTHER; note = 2'-deoxy-2'-fluorouridine-3'-phosphate
  modified_base 8: mod_base = OTHER; note = 2'-O-methyladenosine-3'-phosphate
  modified_base 9: mod_base = OTHER; note = 2'-deoxy-2'-fluoroadenosine-3'-phosphate
  modified_base 10: mod_base = OTHER; note = 2'-deoxy-2'-fluorocytidine-3'-phosphate
  modified_base 11: mod_base = OTHER; note = 2'-deoxy-2'-fluorouridine-3'-phosphate
  modified_base 12: mod_base = OTHER; note = 2'-O-methylguanosine-3'-phosphate
  modified_base 13: mod_base = OTHER; note = 2'-O-methyluridine-3'-phosphate
  modified_base 14: mod_base = OTHER; note = 2'-O-methyluridine-3'-phosphate
  modified_base 15: mod_base = OTHER; note = 2'-O-methylcytidine-3'-phosphate
  modified_base 16: mod_base = OTHER; note = 2'-O-methyluridine-3'-phosphate
  modified_base 17: mod_base = OTHER; note = 2'-O-methyladenosine-3'-phosphate
  modified_base 18: mod_base = OTHER; note = 2'-O-methyluridine-3'-phosphate
  modified_base 19: mod_base = OTHER; note = 2'-O-methyladenosine-3'-phosphate
  modified_base 20: mod_base = OTHER; note = 2'-O-methyladenosine-3'-phosphate
  modified_base 21: mod_base = OTHER; note = 2'-O-methyladenosine
catatttaactgttctataaa

SEQ ID NO: 3810 - RNA, 21 nt, synthetic construct
  source 1..21: mol_type = other RNA
  modified_base 1: mod_base = OTHER; note = 2'-O-methyladenosine-3'-phosphate
  modified_base 2: mod_base = OTHER; note = 2'-O-methyladenosine-3'-phosphate
  modified_base 3: mod_base = OTHER; note = 2'-O-methylcytidine-3'-phosphate
  modified_base 4: mod_base = OTHER; note = 2'-O-methyluridine-3'-phosphate
  modified_base 5: mod_base = OTHER; note = 2'-O-methylguanosine-3'-phosphate
  modified_base 6: mod_base = OTHER; note = 2'-O-methyluridine-3'-phosphate
  modified_base 7: mod_base = OTHER; note = 2'-deoxy-2'-fluorouridine-3'-phosphate
  modified_base 8: mod_base = OTHER; note = 2'-O-methylcytidine-3'-phosphate
  modified_base 9: mod_base = OTHER; note = 2'-deoxy-2'-fluorouridine-3'-phosphate
  modified_base 10: mod_base = OTHER; note = 2'-deoxy-2'-fluoroadenosine-3'-phosphate
  modified_base 11: mod_base = OTHER; note = 2'-deoxy-2'-fluorouridine-3'-phosphate
  modified_base 12: mod_base = OTHER; note = 2'-O-methyladenosine-3'-phosphate
  modified_base 13: mod_base = OTHER; note = 2'-O-methyladenosine-3'-phosphate
  modified_base 14: mod_base = OTHER; note = 2'-O-methyladenosine-3'-phosphate
  modified_base 15: mod_base = OTHER; note = 2'-O-methylguanosine-3'-phosphate
  modified_base 16: mod_base = OTHER; note = 2'-O-methylcytidine-3'-phosphate
  modified_base 17: mod_base = OTHER; note = 2'-O-methyladenosine-3'-phosphate
  modified_base 18: mod_base = OTHER; note = 2'-O-methyladenosine-3'-phosphate
  modified_base 19: mod_base = OTHER; note = 2'-O-methyladenosine-3'-phosphate
  modified_base 20: mod_base = OTHER; note = 2'-O-methylguanosine-3'-phosphate
  modified_base 21: mod_base = OTHER; note = 2'-O-methyladenosine
aactgttctataaagcaaaga

SEQ ID NO: 3811 - RNA, 21 nt, synthetic construct
  source 1..21: mol_type = other RNA
  modified_base 1: mod_base = OTHER; note = 2'-O-methyladenosine-3'-phosphate
  modified_base 2: mod_base = OTHER; note = 2'-O-methylcytidine-3'-phosphate
  modified_base 3: mod_base = OTHER; note = 2'-O-methyluridine-3'-phosphate
  modified_base 4: mod_base = OTHER; note = 2'-O-methylguanosine-3'-phosphate
  modified_base 5: mod_base = OTHER; note = 2'-O-methyluridine-3'-phosphate
  modified_base 6: mod_base = OTHER; note = 2'-O-methyluridine-3'-phosphate
  modified_base 7: mod_base = OTHER; note = 2'-deoxy-2'-fluorocytidine-3'-phosphate
  modified_base 8: mod_base = OTHER; note = 2'-O-methyluridine-3'-phosphate
  modified_base 9: mod_base = OTHER; note = 2'-deoxy-2'-fluoroadenosine-3'-phosphate
  modified_base 10: mod_base = OTHER; note = 2'-deoxy-2'-fluorouridine-3'-phosphate
  modified_base 11: mod_base = OTHER; note = 2'-deoxy-2'-fluoroadenosine-3'-phosphate
  modified_base 12: mod_base = OTHER; note = 2'-O-methyladenosine-3'-phosphate
  modified_base 13: mod_base = OTHER; note = 2'-O-methyladenosine-3'-phosphate
  modified_base 14: mod_base = OTHER; note = 2'-O-methylguanosine-3'-phosphate
  modified_base 15: mod_base = OTHER; note = 2'-O-methylcytidine-3'-phosphate
  modified_base 16: mod_base = OTHER; note = 2'-O-methyladenosine-3'-phosphate
  modified_base 17: mod_base = OTHER; note = 2'-O-methyladenosine-3'-phosphate
  modified_base 18: mod_base = OTHER; note = 2'-O-methyladenosine-3'-phosphate
  modified_base 19: mod_base = OTHER; note = 2'-O-methylguanosine-3'-phosphate
  modified_base 20: mod_base = OTHER; note = 2'-O-methylcytidine-3'-phosphate
  modified_base 21: mod_base = OTHER; note = 2'-O-methyladenosine
actgttctataaagcaaagca

SEQ ID NO: 3812 - RNA, 21 nt, synthetic construct
  source 1..21: mol_type = other RNA
  modified_base 1: mod_base = OTHER; note = 2'-O-methylcytidine-3'-phosphate
  modified_base 2: mod_base = OTHER; note = 2'-O-methyluridine-3'-phosphate
  modified_base 3: mod_base = OTHER; note = 2'-O-methylguanosine-3'-phosphate
  modified_base 4: mod_base = OTHER; note = 2'-O-methyluridine-3'-phosphate
  modified_base 5: mod_base = OTHER; note = 2'-O-methyluridine-3'-phosphate
  modified_base 6: mod_base = OTHER; note = 2'-O-methylcytidine-3'-phosphate
  modified_base 7: mod_base = OTHER; note = 2'-deoxy-2'-fluorouridine-3'-phosphate
  modified_base 8: mod_base = OTHER; note = 2'-O-methyladenosine-3'-phosphate
  modified_base 9: mod_base = OTHER; note = 2'-deoxy-2'-fluorouridine-3'-phosphate
  modified_base 10: mod_base = OTHER; note = 2'-deoxy-2'-fluoroadenosine-3'-phosphate
  modified_base 11: mod_base = OTHER; note = 2'-deoxy-2'-fluoroadenosine-3'-phosphate
  modified_base 12: mod_base = OTHER; note = 2'-O-methyladenosine-3'-phosphate
  modified_base 13: mod_base = OTHER; note = 2'-O-methylguanosine-3'-phosphate
  modified_base 14: mod_base = OTHER; note = 2'-O-methylcytidine-3'-phosphate
  modified_base 15: mod_base = OTHER; note = 2'-O-methyladenosine-3'-phosphate
  modified_base 16: mod_base = OTHER; note = 2'-O-methyladenosine-3'-phosphate
  modified_base 17: mod_base = OTHER; note = 2'-O-methyladenosine-3'-phosphate
  modified_base 18: mod_base = OTHER; note = 2'-O-methylguanosine-3'-phosphate
  modified_base 19: mod_base = OTHER; note = 2'-O-methylcytidine-3'-phosphate
  modified_base 20: mod_base = OTHER; note = 2'-O-methyladenosine-3'-phosphate
  modified_base 21: mod_base = OTHER; note = 2'-O-methyladenosine
ctgttctataaagcaaagcaa

SEQ ID NO: 3813 - RNA, 21 nt, synthetic construct
  source 1..21: mol_type = other RNA
  modified_base 1: mod_base = OTHER; note = 2'-O-methyluridine-3'-phosphate
  modified_base 2: mod_base = OTHER; note = 2'-O-methylguanosine-3'-phosphate
  modified_base 3: mod_base = OTHER; note = 2'-O-methyluridine-3'-phosphate
  modified_base 4: mod_base = OTHER; note = 2'-O-methyluridine-3'-phosphate
  modified_base 5: mod_base = OTHER; note = 2'-O-methylcytidine-3'-phosphate
  modified_base 6: mod_base = OTHER; note = 2'-O-methyluridine-3'-phosphate
  modified_base 7: mod_base = OTHER; note = 2'-deoxy-2'-fluoroadenosine-3'-phosphate
  modified_base 8: mod_base = OTHER; note = 2'-O-methyluridine-3'-phosphate
  modified_base 9: mod_base = OTHER; note = 2'-deoxy-2'-fluoroadenosine-3'-phosphate
  modified_base 10: mod_base = OTHER; note = 2'-deoxy-2'-fluoroadenosine-3'-phosphate
  modified_base 11: mod_base = OTHER; note = 2'-deoxy-2'-fluoroadenosine-3'-phosphate
  modified_base 12: mod_base = OTHER; note = 2'-O-methylguanosine-3'-phosphate
  modified_base 13: mod_base = OTHER; note = 2'-O-methylcytidine-3'-phosphate
  modified_base 14: mod_base = OTHER; note = 2'-O-methyladenosine-3'-phosphate
  modified_base 15: mod_base = OTHER; note = 2'-O-methyladenosine-3'-phosphate
  modified_base 16: mod_base = OTHER; note = 2'-O-methyladenosine-3'-phosphate
  modified_base 17: mod_base = OTHER; note = 2'-O-methylguanosine-3'-phosphate
  modified_base 18: mod_base = OTHER; note = 2'-O-methylcytidine-3'-phosphate
  modified_base 19: mod_base = OTHER; note = 2'-O-methyladenosine-3'-phosphate
  modified_base 20: mod_base = OTHER; note = 2'-O-methylcytidine-3'-phosphate
  modified_base 21: mod_base = OTHER; note = 2'-O-methyladenosine
tgttctataaagcaaagcaca

SEQ ID NO: 3814 - RNA, 21 nt, synthetic construct
  source 1..21: mol_type = other RNA
  modified_base 1: mod_base = OTHER; note = 2'-O-methylguanosine-3'-phosphate
  modified_base 2: mod_base = OTHER; note = 2'-O-methyluridine-3'-phosphate
  modified_base 3: mod_base = OTHER; note = 2'-O-methyluridine-3'-phosphate
  modified_base 4: mod_base = OTHER; note = 2'-O-methylcytidine-3'-phosphate
  modified_base 5: mod_base = OTHER; note = 2'-O-methyluridine-3'-phosphate
  modified_base 6: mod_base = OTHER; note = 2'-O-methyladenosine-3'-phosphate
  modified_base 7: mod_base = OTHER; note = 2'-deoxy-2'-fluorouridine-3'-phosphate
  modified_base 8: mod_base = OTHER; note = 2'-O-methyladenosine-3'-phosphate
  modified_base 9: mod_base = OTHER; note = 2'-deoxy-2'-fluoroadenosine-3'-phosphate
  modified_base 10: mod_base = OTHER; note = 2'-deoxy-2'-fluoroadenosine-3'-phosphate
  modified_base 11: mod_base = OTHER; note = 2'-deoxy-2'-fluoroguanosine-3'-phosphate
  modified_base 12: mod_base = OTHER; note = 2'-O-methylcytidine-3'-phosphate
  modified_base 13: mod_base = OTHER; note = 2'-O-methyladenosine-3'-phosphate
  modified_base 14: mod_base = OTHER; note = 2'-O-methyladenosine-3'-phosphate
  modified_base 15: mod_base = OTHER; note = 2'-O-methyladenosine-3'-phosphate
  modified_base 16: mod_base = OTHER; note = 2'-O-methylguanosine-3'-phosphate
  modified_base 17: mod_base = OTHER; note = 2'-O-methylcytidine-3'-phosphate
  modified_base 18: mod_base = OTHER; note = 2'-O-methyladenosine-3'-phosphate
  modified_base 19: mod_base = OTHER; note = 2'-O-methylcytidine-3'-phosphate
  modified_base 20: mod_base = OTHER; note = 2'-O-methyladenosine-3'-phosphate
  modified_base 21: mod_base = OTHER; note = 2'-O-methyladenosine
gttctataaagcaaagcacaa

SEQ ID NO: 3815 - RNA, 21 nt, synthetic construct
  source 1..21: mol_type = other RNA
  modified_base 1: mod_base = OTHER; note = 2'-O-methyluridine-3'-phosphate
  modified_base 2: mod_base = OTHER; note = 2'-O-methyluridine-3'-phosphate
  modified_base 3: mod_base = OTHER; note = 2'-O-methylcytidine-3'-phosphate
  modified_base 4: mod_base = OTHER; note = 2'-O-methyluridine-3'-phosphate
  modified_base 5: mod_base = OTHER; note = 2'-O-methyladenosine-3'-phosphate
  modified_base 6: mod_base = OTHER; note = 2'-O-methyluridine-3'-phosphate
  modified_base 7: mod_base = OTHER; note = 2'-deoxy-2'-fluoroadenosine-3'-phosphate
  modified_base 8: mod_base = OTHER; note = 2'-O-methyladenosine-3'-phosphate
  modified_base 9: mod_base = OTHER; note = 2'-deoxy-2'-fluoroadenosine-3'-phosphate
  modified_base 10: mod_base = OTHER; note = 2'-deoxy-2'-fluoroguanosine-3'-phosphate
  modified_base 11: mod_base = OTHER; note = 2'-deoxy-2'-fluorocytidine-3'-phosphate
  modified_base 12: mod_base = OTHER; note = 2'-O-methyladenosine-3'-phosphate
  modified_base 13: mod_base = OTHER; note = 2'-O-methyladenosine-3'-phosphate
  modified_base 14: mod_base = OTHER; note = 2'-O-methyladenosine-3'-phosphate
  modified_base 15: mod_base = OTHER; note = 2'-O-methylguanosine-3'-phosphate
  modified_base 16: mod_base = OTHER; note = 2'-O-methylcytidine-3'-phosphate
  modified_base 17: mod_base = OTHER; note = 2'-O-methyladenosine-3'-phosphate
  modified_base 18: mod_base = OTHER; note = 2'-O-methylcytidine-3'-phosphate
  modified_base 19: mod_base = OTHER; note = 2'-O-methyladenosine-3'-phosphate
  modified_base 20: mod_base = OTHER; note = 2'-O-methylguanosine-3'-phosphate
  modified_base 21: mod_base = OTHER; note = 2'-O-methyladenosine
ttctataaagcaaagcacaga

SEQ ID NO: 3816 - RNA, 21 nt, synthetic construct
  source 1..21: mol_type = other RNA
  modified_base 1: mod_base = OTHER; note = 2'-O-methyluridine-3'-phosphate
  modified_base 2: mod_base = OTHER; note = 2'-O-methylcytidine-3'-phosphate
  modified_base 3: mod_base = OTHER; note = 2'-O-methyluridine-3'-phosphate
  modified_base 4: mod_base = OTHER; note = 2'-O-methyladenosine-3'-phosphate
  modified_base 5: mod_base = OTHER; note = 2'-O-methyluridine-3'-phosphate
  modified_base 6: mod_base = OTHER; note = 2'-O-methyladenosine-3'-phosphate
  modified_base 7: mod_base = OTHER; note = 2'-deoxy-2'-fluoroadenosine-3'-phosphate
  modified_base 8: mod_base = OTHER; note = 2'-O-methyladenosine-3'-phosphate
  modified_base 9: mod_base = OTHER; note = 2'-deoxy-2'-fluoroguanosine-3'-phosphate
  modified_base 10: mod_base = OTHER; note = 2'-deoxy-2'-fluorocytidine-3'-phosphate
  modified_base 11: mod_base = OTHER; note = 2'-deoxy-2'-fluoroadenosine-3'-phosphate
  modified_base 12: mod_base = OTHER; note = 2'-O-methyladenosine-3'-phosphate
  modified_base 13: mod_base = OTHER; note = 2'-O-methyladenosine-3'-phosphate
  modified_base 14: mod_base = OTHER; note = 2'-O-methylguanosine-3'-phosphate
  modified_base 15: mod_base = OTHER; note = 2'-O-methylcytidine-3'-phosphate
  modified_base 16: mod_base = OTHER; note = 2'-O-methyladenosine-3'-phosphate
  modified_base 17: mod_base = OTHER; note = 2'-O-methylcytidine-3'-phosphate
  modified_base 18: mod_base = OTHER; note = 2'-O-methyladenosine-3'-phosphate
  modified_base 19: mod_base = OTHER; note = 2'-O-methylguanosine-3'-phosphate
  modified_base 20: mod_base = OTHER; note = 2'-O-methylcytidine-3'-phosphate
  modified_base 21: mod_base = OTHER; note = 2'-O-methyladenosine
tctataaagcaaagcacagca

SEQ ID NO: 3817 - RNA, 21 nt, synthetic construct
  source 1..21: mol_type = other RNA
  modified_base 1: mod_base = OTHER; note = 2'-O-methylcytidine-3'-phosphate
  modified_base 2: mod_base = OTHER; note = 2'-O-methyluridine-3'-phosphate
  modified_base 3: mod_base = OTHER; note = 2'-O-methyladenosine-3'-phosphate
  modified_base 4: mod_base = OTHER; note = 2'-O-methyluridine-3'-phosphate
  modified_base 5: mod_base = OTHER; note = 2'-O-methyladenosine-3'-phosphate
  modified_base 6: mod_base = OTHER; note = 2'-O-methyladenosine-3'-phosphate
  modified_base 7: mod_base = OTHER; note = 2'-deoxy-2'-fluoroadenosine-3'-phosphate
  modified_base 8: mod_base = OTHER; note = 2'-O-methylguanosine-3'-phosphate
  modified_base 9: mod_base = OTHER; note = 2'-deoxy-2'-fluorocytidine-3'-phosphate
  modified_base 10: mod_base = OTHER; note = 2'-deoxy-2'-fluoroadenosine-3'-phosphate
  modified_base 11: mod_base = OTHER; note = 2'-deoxy-2'-fluoroadenosine-3'-phosphate
  modified_base 12: mod_base = OTHER; note = 2'-O-methyladenosine-3'-phosphate
  modified_base 13: mod_base = OTHER; note = 2'-O-methylguanosine-3'-phosphate
  modified_base 14: mod_base = OTHER; note = 2'-O-methylcytidine-3'-phosphate
  modified_base 15: mod_base = OTHER; note = 2'-O-methyladenosine-3'-phosphate
  modified_base 16: mod_base = OTHER; note = 2'-O-methylcytidine-3'-phosphate
  modified_base 17: mod_base = OTHER; note = 2'-O-methyladenosine-3'-phosphate
  modified_base 18: mod_base = OTHER; note = 2'-O-methylguanosine-3'-phosphate
  modified_base 19: mod_base = OTHER; note = 2'-O-methylcytidine-3'-phosphate
  modified_base 20: mod_base = OTHER; note = 2'-O-methyluridine-3'-phosphate
  modified_base 21: mod_base = OTHER; note = 2'-O-methyladenosine
ctataaagcaaagcacagcta

SEQ ID NO: 3818 - RNA, 21 nt, synthetic construct
  source 1..21: mol_type = other RNA
  modified_base 1: mod_base = OTHER; note = 2'-O-methyluridine-3'-phosphate
  modified_base 2: mod_base = OTHER; note = 2'-O-methyladenosine-3'-phosphate
  modified_base 3: mod_base = OTHER; note = 2'-O-methyluridine-3'-phosphate
  modified_base 4: mod_base = OTHER; note = 2'-O-methyladenosine-3'-phosphate
  modified_base 5: mod_base = OTHER; note = 2'-O-methyladenosine-3'-phosphate
  modified_base 6: mod_base = OTHER; note = 2'-O-methyladenosine-3'-phosphate
  modified_base 7: mod_base = OTHER; note = 2'-deoxy-2'-fluoroguanosine-3'-phosphate
  modified_base 8: mod_base = OTHER; note = 2'-O-methylcytidine-3'-phosphate
  modified_base 9: mod_base = OTHER; note = 2'-deoxy-2'-fluoroadenosine-3'-phosphate
  modified_base 10: mod_base = OTHER; note = 2'-deoxy-2'-fluoroadenosine-3'-phosphate
  modified_base 11: mod_base = OTHER; note = 2'-deoxy-2'-fluoroadenosine-3'-phosphate
  modified_base 12: mod_base = OTHER; note = 2'-O-methylguanosine-3'-phosphate
  modified_base 13: mod_base = OTHER; note = 2'-O-methylcytidine-3'-phosphate
  modified_base 14: mod_base = OTHER; note = 2'-O-methyladenosine-3'-phosphate
  modified_base 15: mod_base = OTHER; note = 2'-O-methylcytidine-3'-phosphate
  modified_base 16: mod_base = OTHER; note = 2'-O-methyladenosine-3'-phosphate
  modified_base 17: mod_base = OTHER; note = 2'-O-methylguanosine-3'-phosphate
  modified_base 18: mod_base = OTHER; note = 2'-O-methylcytidine-3'-phosphate
  modified_base 19: mod_base = OTHER; note = 2'-O-methyluridine-3'-phosphate
  modified_base 20: mod_base = OTHER; note = 2'-O-methyluridine-3'-phosphate
  modified_base 21: mod_base = OTHER; note = 2'-O-methyladenosine
tataaagcaaagcacagctta

SEQ ID NO: 3819 - RNA, 21 nt, synthetic construct
  source 1..21: mol_type = other RNA
  modified_base 1: mod_base = OTHER; note = 2'-O-methylcytidine-3'-phosphate
  modified_base 2: mod_base = OTHER; note = 2'-O-methyladenosine-3'-phosphate
  modified_base 3: mod_base = OTHER; note = 2'-O-methylguanosine-3'-phosphate
  modified_base 4: mod_base = OTHER; note = 2'-O-methylcytidine-3'-phosphate
  modified_base 5: mod_base = OTHER; note = 2'-O-methyluridine-3'-phosphate
  modified_base 6: mod_base = OTHER; note = 2'-O-methyluridine-3'-phosphate
  modified_base 7: mod_base = OTHER; note = 2'-deoxy-2'-fluoroguanosine-3'-phosphate
  modified_base 8: mod_base = OTHER; note = 2'-O-methylguanosine-3'-phosphate
  modified_base 9: mod_base = OTHER; note = 2'-deoxy-2'-fluoroguanosine-3'-phosphate
  modified_base 10: mod_base = OTHER; note = 2'-deoxy-2'-fluorouridine-3'-phosphate
  modified_base 11: mod_base = OTHER; note = 2'-deoxy-2'-fluoroadenosine-3'-phosphate
  modified_base 12: mod_base = OTHER; note = 2'-O-methyladenosine-3'-phosphate
  modified_base 13: mod_base = OTHER; note = 2'-O-methyluridine-3'-phosphate
  modified_base 14: mod_base = OTHER; note = 2'-O-methyladenosine-3'-phosphate
  modified_base 15: mod_base = OTHER; note = 2'-O-methylguanosine-3'-phosphate
  modified_base 16: mod_base = OTHER; note = 2'-O-methylcytidine-3'-phosphate
  modified_base 17: mod_base = OTHER; note = 2'-O-methylguanosine-3'-phosphate
  modified_base 18: mod_base = OTHER; note = 2'-O-methyluridine-3'-phosphate
  modified_base 19: mod_base = OTHER; note = 2'-O-methyluridine-3'-phosphate
  modified_base 20: mod_base = OTHER; note = 2'-O-methylcytidine-3'-phosphate
  modified_base 21: mod_base = OTHER; note = 2'-O-methyladenosine
cagcttgggtaatagcgttca

SEQ ID NO: 3820 - RNA, 21 nt, synthetic construct
  source 1..21: mol_type = other RNA
  modified_base 1: mod_base = OTHER; note = 2'-O-methyladenosine-3'-phosphate
  modified_base 2: mod_base = OTHER; note = 2'-O-methylguanosine-3'-phosphate
  modified_base 3: mod_base = OTHER; note = 2'-O-methylcytidine-3'-phosphate
  modified_base 4: mod_base = OTHER; note = 2'-O-methyluridine-3'-phosphate
  modified_base 5: mod_base = OTHER; note = 2'-O-methyluridine-3'-phosphate
  modified_base 6: mod_base = OTHER; note = 2'-O-methylguanosine-3'-phosphate
  modified_base 7: mod_base = OTHER; note = 2'-deoxy-2'-fluoroguanosine-3'-phosphate
  modified_base 8: mod_base = OTHER; note = 2'-O-methylguanosine-3'-phosphate
  modified_base 9: mod_base = OTHER; note = 2'-deoxy-2'-fluorouridine-3'-phosphate
  modified_base 10: mod_base = OTHER; note = 2'-deoxy-2'-fluoroadenosine-3'-phosphate
  modified_base 11: mod_base = OTHER; note = 2'-deoxy-2'-fluoroadenosine-3'-phosphate
  modified_base 12: mod_base = OTHER; note = 2'-O-methyluridine-3'-phosphate
  modified_base 13: mod_base = OTHER; note = 2'-O-methyladenosine-3'-phosphate
  modified_base 14: mod_base = OTHER; note = 2'-O-methylguanosine-3'-phosphate
  modified_base 15: mod_base = OTHER; note = 2'-O-methylcytidine-3'-phosphate
  modified_base 16: mod_base = OTHER; note = 2'-O-methylguanosine-3'-phosphate
  modified_base 17: mod_base = OTHER; note = 2'-O-methyluridine-3'-phosphate
  modified_base 18: mod_base = OTHER; note = 2'-O-methyluridine-3'-phosphate
  modified_base 19: mod_base = OTHER; note = 2'-O-methylcytidine-3'-phosphate
  modified_base 20: mod_base = OTHER; note = 2'-O-methyluridine-3'-phosphate
  modified_base 21: mod_base = OTHER; note = 2'-O-methyladenosine
agcttgggtaatagcgttcta

SEQ ID NO: 3821 - RNA, 21 nt, synthetic construct
  source 1..21: mol_type = other RNA
  modified_base 1: mod_base = OTHER; note = 2'-O-methylguanosine-3'-phosphate
  modified_base 2: mod_base = OTHER; note = 2'-O-methylcytidine-3'-phosphate
  modified_base 3: mod_base = OTHER; note = 2'-O-methyluridine-3'-phosphate
  modified_base 4: mod_base = OTHER; note = 2'-O-methyluridine-3'-phosphate
  modified_base 5: mod_base = OTHER; note = 2'-O-methylguanosine-3'-phosphate
  modified_base 6: mod_base = OTHER; note = 2'-O-methylguanosine-3'-phosphate
  modified_base 7: mod_base = OTHER; note = 2'-deoxy-2'-fluoroguanosine-3'-phosphate
  modified_base 8: mod_base = OTHER; note = 2'-O-methyluridine-3'-phosphate
  modified_base 9: mod_base = OTHER; note = 2'-deoxy-2'-fluoroadenosine-3'-phosphate
  modified_base 10: mod_base = OTHER; note = 2'-deoxy-2'-fluoroadenosine-3'-phosphate
  modified_base 11: mod_base = OTHER; note = 2'-deoxy-2'-fluorouridine-3'-phosphate
  modified_base 12: mod_base = OTHER; note = 2'-O-methyladenosine-3'-phosphate
  modified_base 13: mod_base = OTHER; note = 2'-O-methylguanosine-3'-phosphate
  modified_base 14: mod_base = OTHER; note = 2'-O-methylcytidine-3'-phosphate
  modified_base 15: mod_base = OTHER; note = 2'-O-methylguanosine-3'-phosphate
  modified_base 16: mod_base = OTHER; note = 2'-O-methyluridine-3'-phosphate
  modified_base 17: mod_base = OTHER; note = 2'-O-methyluridine-3'-phosphate
  modified_base 18: mod_base = OTHER; note = 2'-O-methylcytidine-3'-phosphate
  modified_base 19: mod_base = OTHER; note = 2'-O-methyluridine-3'-phosphate
  modified_base 20: mod_base = OTHER; note = 2'-O-methylguanosine-3'-phosphate
  modified_base 21: mod_base = OTHER; note = 2'-O-methyladenosine
gcttgggtaatagcgttctga

SEQ ID NO: 3822 - RNA, 21 nt, synthetic construct
  source 1..21: mol_type = other RNA
  modified_base 1: mod_base = OTHER; note = 2'-O-methylcytidine-3'-phosphate
  modified_base 2: mod_base = OTHER; note = 2'-O-methyluridine-3'-phosphate
  modified_base 3: mod_base = OTHER; note = 2'-O-methyluridine-3'-phosphate
  modified_base 4: mod_base = OTHER; note = 2'-O-methylguanosine-3'-phosphate
  modified_base 5: mod_base = OTHER; note = 2'-O-methylguanosine-3'-phosphate
  modified_base 6: mod_base = OTHER; note = 2'-O-methylguanosine-3'-phosphate
  modified_base 7: mod_base = OTHER; note = 2'-deoxy-2'-fluorouridine-3'-phosphate
  modified_base 8: mod_base = OTHER; note = 2'-O-methyladenosine-3'-phosphate
  modified_base 9: mod_base = OTHER; note = 2'-deoxy-2'-fluoroadenosine-3'-phosphate
  modified_base 10: mod_base = OTHER; note = 2'-deoxy-2'-fluorouridine-3'-phosphate
  modified_base 11: mod_base = OTHER; note = 2'-deoxy-2'-fluoroadenosine-3'-phosphate
  modified_base 12: mod_base = OTHER; note = 2'-O-methylguanosine-3'-phosphate
  modified_base 13: mod_base = OTHER; note = 2'-O-methylcytidine-3'-phosphate
  modified_base 14: mod_base = OTHER; note = 2'-O-methylguanosine-3'-phosphate
  modified_base 15: mod_base = OTHER; note = 2'-O-methyluridine-3'-phosphate
  modified_base 16: mod_base = OTHER; note = 2'-O-methyluridine-3'-phosphate
  modified_base 17: mod_base = OTHER; note = 2'-O-methylcytidine-3'-phosphate
  modified_base 18: mod_base = OTHER; note = 2'-O-methyluridine-3'-phosphate
  modified_base 19: mod_base = OTHER; note = 2'-O-methylguanosine-3'-phosphate
  modified_base 20: mod_base = OTHER; note = 2'-O-methyladenosine-3'-phosphate
  modified_base 21: mod_base = OTHER; note = 2'-O-methyladenosine
cttgggtaatagcgttctgaa

SEQ ID NO: 3823 - RNA, 21 nt, synthetic construct
  source 1..21: mol_type = other RNA
  modified_base 1: mod_base = OTHER; note = 2'-O-methyluridine-3'-phosphate
  modified_base 2: mod_base = OTHER; note = 2'-O-methyluridine-3'-phosphate
  modified_base 3: mod_base = OTHER; note = 2'-O-methylguanosine-3'-phosphate
  modified_base 4: mod_base = OTHER; note = 2'-O-methylguanosine-3'-phosphate
  modified_base 5: mod_base = OTHER; note = 2'-O-methylguanosine-3'-phosphate
  modified_base 6: mod_base = OTHER; note = 2'-O-methyluridine-3'-phosphate
  modified_base 7: mod_base = OTHER; note = 2'-deoxy-2'-fluoroadenosine-3'-phosphate
  modified_base 8: mod_base = OTHER; note = 2'-O-methyladenosine-3'-phosphate
  modified_base 9: mod_base = OTHER; note = 2'-deoxy-2'-fluorouridine-3'-phosphate
  modified_base 10: mod_base = OTHER; note = 2'-deoxy-2'-fluoroadenosine-3'-phosphate
  modified_base 11: mod_base = OTHER; note = 2'-deoxy-2'-fluoroguanosine-3'-phosphate
  modified_base 12: mod_base = OTHER; note = 2'-O-methylcytidine-3'-phosphate
  modified_base 13: mod_base = OTHER; note = 2'-O-methylguanosine-3'-phosphate
  modified_base 14: mod_base = OTHER; note = 2'-O-methyluridine-3'-phosphate
  modified_base 15: mod_base = OTHER; note = 2'-O-methyluridine-3'-phosphate
  modified_base 16: mod_base = OTHER; note = 2'-O-methylcytidine-3'-phosphate
  modified_base 17: mod_base = OTHER; note = 2'-O-methyluridine-3'-phosphate
  modified_base 18: mod_base = OTHER; note = 2'-O-methylguanosine-3'-phosphate
  modified_base 19: mod_base = OTHER; note = 2'-O-methyladenosine-3'-phosphate
  modified_base 20: mod_base = OTHER; note = 2'-O-methyladenosine-3'-phosphate
  modified_base 21: mod_base = OTHER; note = 2'-O-methyladenosine
ttgggtaatagcgttctgaaa

SEQ ID NO: 3824 - RNA, 21 nt, synthetic construct
  source 1..21: mol_type = other RNA
  modified_base 1: mod_base = OTHER; note = 2'-O-methyluridine-3'-phosphate
  modified_base 2: mod_base = OTHER; note = 2'-O-methylguanosine-3'-phosphate
  modified_base 3: mod_base = OTHER; note = 2'-O-methylguanosine-3'-phosphate
  modified_base 4: mod_base = OTHER; note = 2'-O-methylguanosine-3'-phosphate
  modified_base 5: mod_base = OTHER; note = 2'-O-methyluridine-3'-phosphate
  modified_base 6: mod_base = OTHER; note = 2'-O-methyladenosine-3'-phosphate
  modified_base 7: mod_base = OTHER; note = 2'-deoxy-2'-fluoroadenosine-3'-phosphate
  modified_base 8: mod_base = OTHER; note = 2'-O-methyluridine-3'-phosphate
  modified_base 9: mod_base = OTHER; note = 2'-deoxy-2'-fluoroadenosine-3'-phosphate
  modified_base 10: mod_base = OTHER; note = 2'-deoxy-2'-fluoroguanosine-3'-phosphate
  modified_base 11: mod_base = OTHER; note = 2'-deoxy-2'-fluorocytidine-3'-phosphate
  modified_base 12: mod_base = OTHER; note = 2'-O-methylguanosine-3'-phosphate
  modified_base 13: mod_base = OTHER; note = 2'-O-methyluridine-3'-phosphate
  modified_base 14: mod_base = OTHER; note = 2'-O-methyluridine-3'-phosphate
  modified_base 15: mod_base = OTHER; note = 2'-O-methylcytidine-3'-phosphate
  modified_base 16: mod_base = OTHER; note = 2'-O-methyluridine-3'-phosphate
  modified_base 17: mod_base = OTHER; note = 2'-O-methylguanosine-3'-phosphate
  modified_base 18: mod_base = OTHER; note = 2'-O-methyladenosine-3'-phosphate
  modified_base 19: mod_base = OTHER; note = 2'-O-methyladenosine-3'-phosphate
  modified_base 20: mod_base = OTHER; note = 2'-O-methylguanosine-3'-phosphate
  modified_base 21: mod_base = OTHER; note = 2'-O-methyladenosine
tgggtaatagcgttctgaaga

SEQ ID NO: 3825 - RNA, 21 nt, synthetic construct
  source 1..21: mol_type = other RNA
  modified_base 1: mod_base = OTHER; note = 2'-O-methylguanosine-3'-phosphate
  modified_base 2: mod_base = OTHER; note = 2'-O-methylguanosine-3'-phosphate
  modified_base 3: mod_base = OTHER; note = 2'-O-methylguanosine-3'-phosphate
  modified_base 4: mod_base = OTHER; note = 2'-O-methyluridine-3'-phosphate
  modified_base 5: mod_base = OTHER; note = 2'-O-methyladenosine-3'-phosphate
  modified_base 6: mod_base = OTHER; note = 2'-O-methyladenosine-3'-phosphate
  modified_base 7: mod_base = OTHER; note = 2'-deoxy-2'-fluorouridine-3'-phosphate
  modified_base 8: mod_base = OTHER; note = 2'-O-methyladenosine-3'-phosphate
  modified_base 9: mod_base = OTHER; note = 2'-deoxy-2'-fluoroguanosine-3'-phosphate
  modified_base 10: mod_base = OTHER; note = 2'-deoxy-2'-fluorocytidine-3'-phosphate
  modified_base 11: mod_base = OTHER; note = 2'-deoxy-2'-fluoroguanosine-3'-phosphate
  modified_base 12: mod_base = OTHER; note = 2'-O-methyluridine-3'-phosphate
  modified_base 13: mod_base = OTHER; note = 2'-O-methyluridine-3'-phosphate
  modified_base 14: mod_base = OTHER; note = 2'-O-methylcytidine-3'-phosphate
  modified_base 15: mod_base = OTHER; note = 2'-O-methyluridine-3'-phosphate
  modified_base 16: mod_base = OTHER; note = 2'-O-methylguanosine-3'-phosphate
  modified_base 17: mod_base = OTHER; note = 2'-O-methyladenosine-3'-phosphate
  modified_base 18: mod_base = OTHER; note = 2'-O-methyladenosine-3'-phosphate
  modified_base 19: mod_base = OTHER; note = 2'-O-methylguanosine-3'-phosphate
  modified_base 20: mod_base = OTHER; note = 2'-O-methylguanosine-3'-phosphate
  modified_base 21: mod_base = OTHER; note = 2'-O-methyladenosine
gggtaatagcgttctgaagga

SEQ ID NO: 3826 - RNA, 21 nt, synthetic construct
  source 1..21: mol_type = other RNA
  modified_base 1: mod_base = OTHER; note = 2'-O-methylguanosine-3'-phosphate
  modified_base 2: mod_base = OTHER; note = 2'-O-methylguanosine-3'-phosphate
  modified_base 3: mod_base = OTHER; note = 2'-O-methyluridine-3'-phosphate
  modified_base 4: mod_base = OTHER; note = 2'-O-methyladenosine-3'-phosphate
  modified_base 5: mod_base = OTHER; note = 2'-O-methyladenosine-3'-phosphate
  modified_base 6: mod_base = OTHER; note = 2'-O-methyluridine-3'-phosphate
  modified_base 7: mod_base = OTHER; note = 2'-deoxy-2'-fluoroadenosine-3'-phosphate
  modified_base 8: mod_base = OTHER; note = 2'-O-methylguanosine-3'-phosphate
  modified_base 9: mod_base = OTHER; note = 2'-deoxy-2'-fluorocytidine-3'-phosphate
  modified_base 10: mod_base = OTHER; note = 2'-deoxy-2'-fluoroguanosine-3'-phosphate
  modified_base 11: mod_base = OTHER; note = 2'-deoxy-2'-fluorouridine-3'-phosphate
  modified_base 12: mod_base = OTHER; note = 2'-O-methyluridine-3'-phosphate
  modified_base 13: mod_base = OTHER; note = 2'-O-methylcytidine-3'-phosphate
  modified_base 14: mod_base = OTHER; note = 2'-O-methyluridine-3'-phosphate
  modified_base 15: mod_base = OTHER; note = 2'-O-methylguanosine-3'-phosphate
  modified_base 16: mod_base = OTHER; note = 2'-O-methyladenosine-3'-phosphate
  modified_base 17: mod_base = OTHER; note = 2'-O-methyladenosine-3'-phosphate
  modified_base 18: mod_base = OTHER; note = 2'-O-methylguanosine-3'-phosphate
  modified_base 19: mod_base = OTHER; note = 2'-O-methylguanosine-3'-phosphate
  modified_base 20: mod_base = OTHER; note = 2'-O-methyladenosine-3'-phosphate
  modified_base 21: mod_base = OTHER; note = 2'-O-methyladenosine
ggtaatagcgttctgaaggaa

SEQ ID NO: 3827 - RNA, 21 nt, synthetic construct
  source 1..21: mol_type = other RNA
  modified_base 1: mod_base = OTHER; note = 2'-O-methylguanosine-3'-phosphate
  modified_base 2: mod_base = OTHER; note = 2'-O-methyluridine-3'-phosphate
  modified_base 3: mod_base = OTHER; note = 2'-O-methyladenosine-3'-phosphate
  modified_base 4: mod_base = OTHER; note = 2'-O-methyladenosine-3'-phosphate
  modified_base 5: mod_base = OTHER; note = 2'-O-methyluridine-3'-phosphate
  modified_base 6: mod_base = OTHER; note = 2'-O-methyladenosine-3'-phosphate
  modified_base 7: mod_base = OTHER; note = 2'-deoxy-2'-fluoroguanosine-3'-phosphate
  modified_base 8: mod_base = OTHER; note = 2'-O-methylcytidine-3'-phosphate
  modified_base 9: mod_base = OTHER; note = 2'-deoxy-2'-fluoroguanosine-3'-phosphate
  modified_base 10: mod_base = OTHER; note = 2'-deoxy-2'-fluorouridine-3'-phosphate
  modified_base 11: mod_base = OTHER; note = 2'-deoxy-2'-fluorouridine-3'-phosphate
  modified_base 12: mod_base = OTHER; note = 2'-O-methylcytidine-3'-phosphate
  modified_base 13: mod_base = OTHER; note = 2'-O-methyluridine-3'-phosphate
  modified_base 14: mod_base = OTHER; note = 2'-O-methylguanosine-3'-phosphate
  modified_base 15: mod_base = OTHER; note = 2'-O-methyladenosine-3'-phosphate
  modified_base 16: mod_base = OTHER; note = 2'-O-methyladenosine-3'-phosphate
  modified_base 17: mod_base = OTHER; note = 2'-O-methylguanosine-3'-phosphate
  modified_base 18: mod_base = OTHER; note = 2'-O-methylguanosine-3'-phosphate
  modified_base 19: mod_base = OTHER; note = 2'-O-methyladenosine-3'-phosphate
  modified_base 20: mod_base = OTHER; note = 2'-O-methyluridine-3'-phosphate
  modified_base 21: mod_base = OTHER; note = 2'-O-methyladenosine
gtaatagcgttctgaaggata

SEQ ID NO: 3828 - RNA, 21 nt, synthetic construct
  source 1..21: mol_type = other RNA
  modified_base 1: mod_base = OTHER; note = 2'-O-methyluridine-3'-phosphate
  modified_base 2: mod_base = OTHER; note = 2'-O-methyladenosine-3'-phosphate
  modified_base 3: mod_base = OTHER; note = 2'-O-methyladenosine-3'-phosphate
  modified_base 4: mod_base = OTHER; note = 2'-O-methyluridine-3'-phosphate
  modified_base 5: mod_base = OTHER; note = 2'-O-methyladenosine-3'-phosphate
  modified_base 6: mod_base = OTHER; note = 2'-O-methylguanosine-3'-phosphate
  modified_base 7: mod_base = OTHER; note = 2'-deoxy-2'-fluorocytidine-3'-phosphate
  modified_base 8: mod_base = OTHER; note = 2'-O-methylguanosine-3'-phosphate
  modified_base 9: mod_base = OTHER; note = 2'-deoxy-2'-fluorouridine-3'-phosphate
  modified_base 10: mod_base = OTHER; note = 2'-deoxy-2'-fluorouridine-3'-phosphate
  modified_base 11: mod_base = OTHER; note = 2'-deoxy-2'-fluorocytidine-3'-phosphate
  modified_base 12: mod_base = OTHER; note = 2'-O-methyluridine-3'-phosphate
  modified_base 13: mod_base = OTHER; note = 2'-O-methylguanosine-3'-phosphate
  modified_base 14: mod_base = OTHER; note = 2'-O-methyladenosine-3'-phosphate
  modified_base 15: mod_base = OTHER; note = 2'-O-methyladenosine-3'-phosphate
  modified_base 16: mod_base = OTHER; note = 2'-O-methylguanosine-3'-phosphate
  modified_base 17: mod_base = OTHER; note = 2'-O-methylguanosine-3'-phosphate
  modified_base 18: mod_base = OTHER; note = 2'-O-methyladenosine-3'-phosphate
  modified_base 19: mod_base = OTHER; note = 2'-O-methyluridine-3'-phosphate
  modified_base 20: mod_base = OTHER; note = 2'-O-methyladenosine-3'-phosphate
  modified_base 21: mod_base = OTHER; note = 2'-O-methyladenosine
taatagcgttctgaaggataa

SEQ ID NO: 3829 - RNA, 21 nt, synthetic construct
  source 1..21: mol_type = other RNA
  modified_base 1: mod_base = OTHER; note = 2'-O-methyladenosine-3'-phosphate
  modified_base 2: mod_base = OTHER; note = 2'-O-methyladenosine-3'-phosphate
  modified_base 3: mod_base = OTHER; note = 2'-O-methyluridine-3'-phosphate
  modified_base 4: mod_base = OTHER; note = 2'-O-methyladenosine-3'-phosphate
  modified_base 5: mod_base = OTHER; note = 2'-O-methylguanosine-3'-phosphate
  modified_base 6: mod_base = OTHER; note = 2'-O-methylcytidine-3'-phosphate
  modified_base 7: mod_base = OTHER; note = 2'-deoxy-2'-fluoroguanosine-3'-phosphate
  modified_base 8: mod_base = OTHER; note = 2'-O-methyluridine-3'-phosphate
  modified_base 9: mod_base = OTHER; note = 2'-deoxy-2'-fluorouridine-3'-phosphate
  modified_base 10: mod_base = OTHER; note = 2'-deoxy-2'-fluorocytidine-3'-phosphate
  modified_base 11: mod_base = OTHER; note = 2'-deoxy-2'-fluorouridine-3'-phosphate
  modified_base 12: mod_base = OTHER; note = 2'-O-methylguanosine-3'-phosphate
  modified_base 13: mod_base = OTHER; note = 2'-O-methyladenosine-3'-phosphate
  modified_base 14: mod_base = OTHER; note = 2'-O-methyladenosine-3'-phosphate
  modified_base 15: mod_base = OTHER; note = 2'-O-methylguanosine-3'-phosphate
  modified_base 16: mod_base = OTHER; note = 2'-O-methylguanosine-3'-phosphate
  modified_base 17: mod_base = OTHER; note = 2'-O-methyladenosine-3'-phosphate
  modified_base 18: mod_base = OTHER; note = 2'-O-methyluridine-3'-phosphate
  modified_base 19: mod_base = OTHER; note = 2'-O-methyladenosine-3'-phosphate
  modified_base 20: mod_base = OTHER; note = 2'-O-methyluridine-3'-phosphate
  modified_base 21: mod_base = OTHER; note = 2'-O-methyladenosine
aatagcgttctgaaggatata

SEQ ID NO: 3830 - RNA, 21 nt, synthetic construct
  source 1..21: mol_type = other RNA
  modified_base 1: mod_base = OTHER; note = 2'-O-methyladenosine-3'-phosphate
  modified_base 2: mod_base = OTHER; note = 2'-O-methyluridine-3'-phosphate
  modified_base 3: mod_base = OTHER; note = 2'-O-methyladenosine-3'-phosphate
  modified_base 4: mod_base = OTHER; note = 2'-O-methylguanosine-3'-phosphate
  modified_base 5: mod_base = OTHER; note = 2'-O-methylcytidine-3'-phosphate
  modified_base 6: mod_base = OTHER; note = 2'-O-methylguanosine-3'-phosphate
  modified_base 7: mod_base = OTHER; note = 2'-deoxy-2'-fluorouridine-3'-phosphate
  modified_base 8: mod_base = OTHER; note = 2'-O-methyluridine-3'-phosphate
  modified_base 9: mod_base = OTHER; note = 2'-deoxy-2'-fluorocytidine-3'-phosphate
  modified_base 10: mod_base = OTHER; note = 2'-deoxy-2'-fluorouridine-3'-phosphate
  modified_base 11: mod_base = OTHER; note = 2'-deoxy-2'-fluoroguanosine-3'-phosphate
  modified_base 12: mod_base = OTHER; note = 2'-O-methyladenosine-3'-phosphate
  modified_base 13: mod_base = OTHER; note = 2'-O-methyladenosine-3'-phosphate
  modified_base 14: mod_base = OTHER; note = 2'-O-methylguanosine-3'-phosphate
  modified_base 15: mod_base = OTHER; note = 2'-O-methylguanosine-3'-phosphate
  modified_base 16: mod_base = OTHER; note = 2'-O-methyladenosine-3'-phosphate
  modified_base 17: mod_base = OTHER; note = 2'-O-methyluridine-3'-phosphate
  modified_base 18: mod_base = OTHER; note = 2'-O-methyladenosine-3'-phosphate
  modified_base 19: mod_base = OTHER; note = 2'-O-methyluridine-3'-phosphate
  modified_base 20: mod_base = OTHER; note = 2'-O-methyladenosine-3'-phosphate
  modified_base 21: mod_base = OTHER; note = 2'-O-methyladenosine
atagcgttctgaaggatataa

SEQ ID NO: 3831 - RNA, 21 nt, synthetic construct
  source 1..21: mol_type = other RNA
  modified_base 1: mod_base = OTHER; note = 2'-O-methyluridine-3'-phosphate
  modified_base 2: mod_base = OTHER; note = 2'-O-methyladenosine-3'-phosphate
  modified_base 3: mod_base = OTHER; note = 2'-O-methylguanosine-3'-phosphate
  modified_base 4: mod_base = OTHER; note = 2'-O-methylcytidine-3'-phosphate
  modified_base 5: mod_base = OTHER; note = 2'-O-methylguanosine-3'-phosphate
  modified_base 6: mod_base = OTHER; note = 2'-O-methyluridine-3'-phosphate
  modified_base 7: mod_base = OTHER; note = 2'-deoxy-2'-fluorouridine-3'-phosphate
  modified_base 8: mod_base = OTHER; note = 2'-O-methylcytidine-3'-phosphate
  modified_base 9: mod_base = OTHER; note = 2'-deoxy-2'-fluorouridine-3'-phosphate
  modified_base 10: mod_base = OTHER; note = 2'-deoxy-2'-fluoroguanosine-3'-phosphate
  modified_base 11: mod_base = OTHER; note = 2'-deoxy-2'-fluoroadenosine-3'-phosphate
  modified_base 12: mod_base = OTHER; note = 2'-O-methyladenosine-3'-phosphate
  modified_base 13: mod_base = OTHER; note = 2'-O-methylguanosine-3'-phosphate
  modified_base 14: mod_base = OTHER; note = 2'-O-methylguanosine-3'-phosphate
  modified_base 15: mod_base = OTHER; note = 2'-O-methyladenosine-3'-phosphate
  modified_base 16: mod_base = OTHER; note = 2'-O-methyluridine-3'-phosphate
  modified_base 17: mod_base = OTHER; note = 2'-O-methyladenosine-3'-phosphate
  modified_base 18: mod_base = OTHER; note = 2'-O-methyluridine-3'-phosphate
  modified_base 19: mod_base = OTHER; note = 2'-O-methyladenosine-3'-phosphate
  modified_base 20: mod_base = OTHER; note = 2'-O-methylcytidine-3'-phosphate
  modified_base 21: mod_base = OTHER; note = 2'-O-methyladenosine
tagcgttctgaaggatataca

SEQ ID NO: 3832 - RNA, 21 nt, synthetic construct
  source 1..21: mol_type = other RNA
  modified_base 1: mod_base = OTHER; note = 2'-O-methyladenosine-3'-phosphate
  modified_base 2: mod_base = OTHER; note = 2'-O-methylguanosine-3'-phosphate
  modified_base 3: mod_base = OTHER; note = 2'-O-methylcytidine-3'-phosphate
  modified_base 4: mod_base = OTHER; note = 2'-O-methylguanosine-3'-phosphate
  modified_base 5: mod_base = OTHER; note = 2'-O-methyluridine-3'-phosphate
  modified_base 6: mod_base = OTHER; note = 2'-O-methyluridine-3'-phosphate
  modified_base 7: mod_base = OTHER; note = 2'-deoxy-2'-fluorocytidine-3'-phosphate
  modified_base 8: mod_base = OTHER; note = 2'-O-methyluridine-3'-phosphate
  modified_base 9: mod_base = OTHER; note = 2'-deoxy-2'-fluoroguanosine-3'-phosphate
  modified_base 10: mod_base = OTHER; note = 2'-deoxy-2'-fluoroadenosine-3'-phosphate
  modified_base 11: mod_base = OTHER; note = 2'-deoxy-2'-fluoroadenosine-3'-phosphate
  modified_base 12: mod_base = OTHER; note = 2'-O-methylguanosine-3'-phosphate
  modified_base 13: mod_base = OTHER; note = 2'-O-methylguanosine-3'-phosphate
  modified_base 14: mod_base = OTHER; note = 2'-O-methyladenosine-3'-phosphate
  modified_base 15: mod_base = OTHER; note = 2'-O-methyluridine-3'-phosphate
  modified_base 16: mod_base = OTHER; note = 2'-O-methyladenosine-3'-phosphate
  modified_base 17: mod_base = OTHER; note = 2'-O-methyluridine-3'-phosphate
  modified_base 18: mod_base = OTHER; note = 2'-O-methyladenosine-3'-phosphate
  modified_base 19: mod_base = OTHER; note = 2'-O-methylcytidine-3'-phosphate
  modified_base 20: mod_base = OTHER; note = 2'-O-methyluridine-3'-phosphate
  modified_base 21: mod_base = OTHER; note = 2'-O-methyladenosine
agcgttctgaaggatatacta

SEQ ID NO: 3833 - RNA, 21 nt, synthetic construct
  source 1..21: mol_type = other RNA
  modified_base 1: mod_base = OTHER; note = 2'-O-methylguanosine-3'-phosphate
  modified_base 2: mod_base = OTHER; note = 2'-O-methylcytidine-3'-phosphate
  modified_base 3: mod_base = OTHER; note = 2'-O-methylguanosine-3'-phosphate
  modified_base 4: mod_base = OTHER; note = 2'-O-methyluridine-3'-phosphate
  modified_base 5: mod_base = OTHER; note = 2'-O-methyluridine-3'-phosphate
  modified_base 6: mod_base = OTHER; note = 2'-O-methylcytidine-3'-phosphate
  modified_base 7: mod_base = OTHER; note = 2'-deoxy-2'-fluorouridine-3'-phosphate
  modified_base 8: mod_base = OTHER; note = 2'-O-methylguanosine-3'-phosphate
  modified_base 9: mod_base = OTHER; note = 2'-deoxy-2'-fluoroadenosine-3'-phosphate
  modified_base 10: mod_base = OTHER; note = 2'-deoxy-2'-fluoroadenosine-3'-phosphate
  modified_base 11: mod_base = OTHER; note = 2'-deoxy-2'-fluoroguanosine-3'-phosphate
  modified_base 12: mod_base = OTHER; note = 2'-O-methylguanosine-3'-phosphate
  modified_base 13: mod_base = OTHER; note = 2'-O-methyladenosine-3'-phosphate
  modified_base 14: mod_base = OTHER; note = 2'-O-methyluridine-3'-phosphate
  modified_base 15: mod_base = OTHER; note = 2'-O-methyladenosine-3'-phosphate
  modified_base 16: mod_base = OTHER; note = 2'-O-methyluridine-3'-phosphate
  modified_base 17: mod_base = OTHER; note = 2'-O-methyladenosine-3'-phosphate
  modified_base 18: mod_base = OTHER; note = 2'-O-methylcytidine-3'-phosphate
  modified_base 19: mod_base = OTHER; note = 2'-O-methyluridine-3'-phosphate
  modified_base 20: mod_base = OTHER; note = 2'-O-methyluridine-3'-phosphate
  modified_base 21: mod_base = OTHER; note = 2'-O-methyladenosine
gcgttctgaaggatatactta

SEQ ID NO: 3834 - RNA, 21 nt, synthetic construct
  source 1..21: mol_type = other RNA
  modified_base 1: mod_base = OTHER; note = 2'-O-methylcytidine-3'-phosphate
  modified_base 2: mod_base = OTHER; note = 2'-O-methylguanosine-3'-phosphate
  modified_base 3: mod_base = OTHER; note = 2'-O-methyluridine-3'-phosphate
  modified_base 4: mod_base = OTHER; note = 2'-O-methyluridine-3'-phosphate
  modified_base 5: mod_base = OTHER; note = 2'-O-methylcytidine-3'-phosphate
  modified_base 6: mod_base = OTHER; note = 2'-O-methyluridine-3'-phosphate
  modified_base 7: mod_base = OTHER; note = 2'-deoxy-2'-fluoroguanosine-3'-phosphate
  modified_base 8: mod_base = OTHER; note = 2'-O-methyladenosine-3'-phosphate
  modified_base 9: mod_base = OTHER; note = 2'-deoxy-2'-fluoroadenosine-3'-phosphate
  modified_base 10: mod_base = OTHER; note = 2'-deoxy-2'-fluoroguanosine-3'-phosphate
  modified_base 11: mod_base = OTHER; note = 2'-deoxy-2'-fluoroguanosine-3'-phosphate
  modified_base 12: mod_base = OTHER; note = 2'-O-methyladenosine-3'-phosphate
  modified_base 13: mod_base = OTHER; note = 2'-O-methyluridine-3'-phosphate
  modified_base 14: mod_base = OTHER; note = 2'-O-methyladenosine-3'-phosphate
  modified_base 15: mod_base = OTHER; note = 2'-O-methyluridine-3'-phosphate
  modified_base 16: mod_base = OTHER; note = 2'-O-methyladenosine-3'-phosphate
  modified_base 17: mod_base = OTHER; note = 2'-O-methylcytidine-3'-phosphate
  modified_base 18: mod_base = OTHER; note = 2'-O-methyluridine-3'-phosphate
  modified_base 19: mod_base = OTHER; note = 2'-O-methyluridine-3'-phosphate
  modified_base 20: mod_base = OTHER; note = 2'-O-methylcytidine-3'-phosphate
  modified_base 21: mod_base = OTHER; note = 2'-O-methyladenosine
cgttctgaaggatatacttca

SEQ ID NO: 3835 - RNA, 21 nt, synthetic construct
  source 1..21: mol_type = other RNA
  modified_base 1: mod_base = OTHER; note = 2'-O-methylguanosine-3'-phosphate
  modified_base 2: mod_base = OTHER; note = 2'-O-methyluridine-3'-phosphate
  modified_base 3: mod_base = OTHER; note = 2'-O-methyluridine-3'-phosphate
  modified_base 4: mod_base = OTHER; note = 2'-O-methylcytidine-3'-phosphate
  modified_base 5: mod_base = OTHER; note = 2'-O-methyluridine-3'-phosphate
  modified_base 6: mod_base = OTHER; note = 2'-O-methylguanosine-3'-phosphate
  modified_base 7: mod_base = OTHER; note = 2'-deoxy-2'-fluoroadenosine-3'-phosphate
  modified_base 8: mod_base = OTHER; note = 2'-O-methyladenosine-3'-phosphate
  modified_base 9: mod_base = OTHER; note = 2'-deoxy-2'-fluoroguanosine-3'-phosphate
  modified_base 10: mod_base = OTHER; note = 2'-deoxy-2'-fluoroguanosine-3'-phosphate
  modified_base 11: mod_base = OTHER; note = 2'-deoxy-2'-fluoroadenosine-3'-phosphate
  modified_base 12: mod_base = OTHER; note = 2'-O-methyluridine-3'-phosphate
  modified_base 13: mod_base = OTHER; note = 2'-O-methyladenosine-3'-phosphate
  modified_base 14: mod_base = OTHER; note = 2'-O-methyluridine-3'-phosphate
  modified_base 15: mod_base = OTHER; note = 2'-O-methyladenosine-3'-phosphate
  modified_base 16: mod_base = OTHER; note = 2'-O-methylcytidine-3'-phosphate
  modified_base 17: mod_base = OTHER; note = 2'-O-methyluridine-3'-phosphate
  modified_base 18: mod_base = OTHER; note = 2'-O-methyluridine-3'-phosphate
  modified_base 19: mod_base = OTHER; note = 2'-O-methylcytidine-3'-phosphate
  modified_base 20: mod_base = OTHER; note = 2'-O-methyluridine-3'-phosphate
  modified_base 21: mod_base = OTHER; note = 2'-O-methyladenosine
gttctgaaggatatacttcta

SEQ ID NO: 3836 - RNA, 21 nt, synthetic construct
  source 1..21: mol_type = other RNA
  modified_base 1: mod_base = OTHER; note = 2'-O-methyluridine-3'-phosphate
  modified_base 2: mod_base = OTHER; note = 2'-O-methyluridine-3'-phosphate
  modified_base 3: mod_base = OTHER; note = 2'-O-methylcytidine-3'-phosphate
  modified_base 4: mod_base = OTHER; note = 2'-O-methyluridine-3'-phosphate
  modified_base 5: mod_base = OTHER; note = 2'-O-methylguanosine-3'-phosphate
  modified_base 6: mod_base = OTHER; note = 2'-O-methyladenosine-3'-phosphate
  modified_base 7: mod_base = OTHER; note = 2'-deoxy-2'-fluoroadenosine-3'-phosphate
  modified_base 8: mod_base = OTHER; note = 2'-O-methylguanosine-3'-phosphate
  modified_base 9: mod_base = OTHER; note = 2'-deoxy-2'-fluoroguanosine-3'-phosphate
  modified_base 10: mod_base = OTHER; note = 2'-deoxy-2'-fluoroadenosine-3'-phosphate
  modified_base 11: mod_base = OTHER; note = 2'-deoxy-2'-fluorouridine-3'-phosphate
  modified_base 12: mod_base = OTHER; note = 2'-O-methyladenosine-3'-phosphate
  modified_base 13: mod_base = OTHER; note = 2'-O-methyluridine-3'-phosphate
  modified_base 14: mod_base = OTHER; note = 2'-O-methyladenosine-3'-phosphate
  modified_base 15: mod_base = OTHER; note = 2'-O-methylcytidine-3'-phosphate
  modified_base 16: mod_base = OTHER; note = 2'-O-methyluridine-3'-phosphate
  modified_base 17: mod_base = OTHER; note = 2'-O-methyluridine-3'-phosphate
  modified_base 18: mod_base = OTHER; note = 2'-O-methylcytidine-3'-phosphate
  modified_base 19: mod_base = OTHER; note = 2'-O-methyluridine-3'-phosphate
  modified_base 20: mod_base = OTHER; note = 2'-O-methylguanosine-3'-phosphate
  modified_base 21: mod_base = OTHER; note = 2'-O-methyladenosine
ttctgaaggatatacttctga

SEQ ID NO: 3837 - RNA, 21 nt, synthetic construct
  source 1..21: mol_type = other RNA
  modified_base 1: mod_base = OTHER; note = 2'-O-methyluridine-3'-phosphate
  modified_base 2: mod_base = OTHER; note = 2'-O-methylcytidine-3'-phosphate
  modified_base 3: mod_base = OTHER; note = 2'-O-methyluridine-3'-phosphate
  modified_base 4: mod_base = OTHER; note = 2'-O-methylguanosine-3'-phosphate
  modified_base 5: mod_base = OTHER; note = 2'-O-methyladenosine-3'-phosphate
  modified_base 6: mod_base = OTHER; note = 2'-O-methyladenosine-3'-phosphate
  modified_base 7: mod_base = OTHER; note = 2'-deoxy-2'-fluoroguanosine-3'-phosphate
  modified_base 8: mod_base = OTHER; note = 2'-O-methylguanosine-3'-phosphate
  modified_base 9: mod_base = OTHER; note = 2'-deoxy-2'-fluoroadenosine-3'-phosphate
  modified_base 10: mod_base = OTHER; note = 2'-deoxy-2'-fluorouridine-3'-phosphate
  modified_base 11: mod_base = OTHER; note = 2'-deoxy-2'-fluoroadenosine-3'-phosphate
  modified_base 12: mod_base = OTHER; note = 2'-O-methyluridine-3'-phosphate
  modified_base 13: mod_base = OTHER; note = 2'-O-methyladenosine-3'-phosphate
  modified_base 14: mod_base = OTHER; note = 2'-O-methylcytidine-3'-phosphate
  modified_base 15: mod_base = OTHER; note = 2'-O-methyluridine-3'-phosphate
  modified_base 16: mod_base = OTHER; note = 2'-O-methyluridine-3'-phosphate
  modified_base 17: mod_base = OTHER; note = 2'-O-methylcytidine-3'-phosphate
  modified_base 18: mod_base = OTHER; note = 2'-O-methyluridine-3'-phosphate
  modified_base 19: mod_base = OTHER; note = 2'-O-methylguanosine-3'-phosphate
  modified_base 20: mod_base = OTHER; note = 2'-O-methyluridine-3'-phosphate
  modified_base 21: mod_base = OTHER; note = 2'-O-methyladenosine
tctgaaggatatacttctgta

SEQ ID NO: 3838 - RNA, 21 nt, synthetic construct
  source 1..21: mol_type = other RNA
  modified_base 1: mod_base = OTHER; note = 2'-O-methylcytidine-3'-phosphate
  modified_base 2: mod_base = OTHER; note = 2'-O-methyluridine-3'-phosphate
  modified_base 3: mod_base = OTHER; note = 2'-O-methylguanosine-3'-phosphate
  modified_base 4: mod_base = OTHER; note = 2'-O-methyladenosine-3'-phosphate
  modified_base 5: mod_base = OTHER; note = 2'-O-methyladenosine-3'-phosphate
  modified_base 6: mod_base = OTHER; note = 2'-O-methylguanosine-3'-phosphate
  modified_base 7: mod_base = OTHER; note = 2'-deoxy-2'-fluoroguanosine-3'-phosphate
  modified_base 8: mod_base = OTHER; note = 2'-O-methyladenosine-3'-phosphate
  modified_base 9: mod_base = OTHER; note = 2'-deoxy-2'-fluorouridine-3'-phosphate
  modified_base 10: mod_base = OTHER; note = 2'-deoxy-2'-fluoroadenosine-3'-phosphate
  modified_base 11: mod_base = OTHER; note = 2'-deoxy-2'-fluorouridine-3'-phosphate
  modified_base 12: mod_base = OTHER; note = 2'-O-methyladenosine-3'-phosphate
  modified_base 13: mod_base = OTHER; note = 2'-O-methylcytidine-3'-phosphate
  modified_base 14: mod_base = OTHER; note = 2'-O-methyluridine-3'-phosphate
  modified_base 15: mod_base = OTHER; note = 2'-O-methyluridine-3'-phosphate
  modified_base 16: mod_base = OTHER; note = 2'-O-methylcytidine-3'-phosphate
  modified_base 17: mod_base = OTHER; note = 2'-O-methyluridine-3'-phosphate
  modified_base 18: mod_base = OTHER; note = 2'-O-methylguanosine-3'-phosphate
  modified_base 19: mod_base = OTHER; note = 2'-O-methyluridine-3'-phosphate
  modified_base 20: mod_base = OTHER; note = 2'-O-methyladenosine-3'-phosphate
  modified_base 21: mod_base = OTHER; note = 2'-O-methyladenosine
ctgaaggatatacttctgtaa

SEQ ID NO: 3839 - RNA, 21 nt, synthetic construct
  source 1..21: mol_type = other RNA
  modified_base 1: mod_base = OTHER; note = 2'-O-methyluridine-3'-phosphate
  modified_base 2: mod_base = OTHER; note = 2'-O-methylguanosine-3'-phosphate
  modified_base 3: mod_base = OTHER; note = 2'-O-methyladenosine-3'-phosphate
  modified_base 4: mod_base = OTHER; note = 2'-O-methyladenosine-3'-phosphate
  modified_base 5: mod_base = OTHER; note = 2'-O-methylguanosine-3'-phosphate
  modified_base 6: mod_base = OTHER; note = 2'-O-methylguanosine-3'-phosphate
  modified_base 7: mod_base = OTHER; note = 2'-deoxy-2'-fluoroadenosine-3'-phosphate
  modified_base 8: mod_base = OTHER; note = 2'-O-methyluridine-3'-phosphate
  modified_base 9: mod_base = OTHER; note = 2'-deoxy-2'-fluoroadenosine-3'-phosphate
  modified_base 10: mod_base = OTHER; note = 2'-deoxy-2'-fluorouridine-3'-phosphate
  modified_base 11: mod_base = OTHER; note = 2'-deoxy-2'-fluoroadenosine-3'-phosphate
  modified_base 12: mod_base = OTHER; note = 2'-O-methylcytidine-3'-phosphate
  modified_base 13: mod_base = OTHER; note = 2'-O-methyluridine-3'-phosphate
  modified_base 14: mod_base = OTHER; note = 2'-O-methyluridine-3'-phosphate
  modified_base 15: mod_base = OTHER; note = 2'-O-methylcytidine-3'-phosphate
  modified_base 16: mod_base = OTHER; note = 2'-O-methyluridine-3'-phosphate
  modified_base 17: mod_base = OTHER; note = 2'-O-methylguanosine-3'-phosphate
  modified_base 18: mod_base = OTHER; note = 2'-O-methyluridine-3'-phosphate
  modified_base 19: mod_base = OTHER; note = 2'-O-methyladenosine-3'-phosphate
  modified_base 20: mod_base = OTHER; note = 2'-O-methyluridine-3'-phosphate
  modified_base 21: mod_base = OTHER; note = 2'-O-methyladenosine
tgaaggatatacttctgtata

SEQ ID NO: 3840 - RNA, 21 nt, synthetic construct
  source 1..21: mol_type = other RNA
  modified_base 1: mod_base = OTHER; note = 2'-O-methylguanosine-3'-phosphate
  modified_base 2: mod_base = OTHER; note = 2'-O-methyladenosine-3'-phosphate
  modified_base 3: mod_base = OTHER; note = 2'-O-methyladenosine-3'-phosphate
  modified_base 4: mod_base = OTHER; note = 2'-O-methylguanosine-3'-phosphate
  modified_base 5: mod_base = OTHER; note = 2'-O-methylguanosine-3'-phosphate
  modified_base 6: mod_base = OTHER; note = 2'-O-methyladenosine-3'-phosphate
  modified_base 7: mod_base = OTHER; note = 2'-deoxy-2'-fluorouridine-3'-phosphate
  modified_base 8: mod_base = OTHER; note = 2'-O-methyladenosine-3'-phosphate
  modified_base 9: mod_base = OTHER; note = 2'-deoxy-2'-fluorouridine-3'-phosphate
  modified_base 10: mod_base = OTHER; note = 2'-deoxy-2'-fluoroadenosine-3'-phosphate
  modified_base 11: mod_base = OTHER; note = 2'-deoxy-2'-fluorocytidine-3'-phosphate
  modified_base 12: mod_base = OTHER; note = 2'-O-methyluridine-3'-phosphate
  modified_base 13: mod_base = OTHER; note = 2'-O-methyluridine-3'-phosphate
  modified_base 14: mod_base = OTHER; note = 2'-O-methylcytidine-3'-phosphate
  modified_base 15: mod_base = OTHER; note = 2'-O-methyluridine-3'-phosphate
  modified_base 16: mod_base = OTHER; note = 2'-O-methylguanosine-3'-phosphate
  modified_base 17: mod_base = OTHER; note = 2'-O-methyluridine-3'-phosphate
  modified_base 18: mod_base = OTHER; note = 2'-O-methyladenosine-3'-phosphate
  modified_base 19: mod_base = OTHER; note = 2'-O-methyluridine-3'-phosphate
  modified_base 20: mod_base = OTHER; note = 2'-O-methyluridine-3'-phosphate
  modified_base 21: mod_base = OTHER; note = 2'-O-methyladenosine
gaaggatatacttctgtatta

SEQ ID NO: 3841 - RNA, 21 nt, synthetic construct
  source 1..21: mol_type = other RNA
  modified_base 1: mod_base = OTHER; note = 2'-O-methyladenosine-3'-phosphate
  modified_base 2: mod_base = OTHER; note = 2'-O-methyladenosine-3'-phosphate
  modified_base 3: mod_base = OTHER; note = 2'-O-methylguanosine-3'-phosphate
  modified_base 4: mod_base = OTHER; note = 2'-O-methylguanosine-3'-phosphate
  modified_base 5: mod_base = OTHER; note = 2'-O-methyladenosine-3'-phosphate
  modified_base 6: mod_base = OTHER; note = 2'-O-methyluridine-3'-phosphate
  modified_base 7: mod_base = OTHER; note = 2'-deoxy-2'-fluoroadenosine-3'-phosphate
  modified_base 8: mod_base = OTHER; note = 2'-O-methyluridine-3'-phosphate
  modified_base 9: mod_base = OTHER; note = 2'-deoxy-2'-fluoroadenosine-3'-phosphate
  modified_base 10: mod_base = OTHER; note = 2'-deoxy-2'-fluorocytidine-3'-phosphate
  modified_base 11: mod_base = OTHER; note = 2'-deoxy-2'-fluorouridine-3'-phosphate
  modified_base 12: mod_base = OTHER; note = 2'-O-methyluridine-3'-phosphate
  modified_base 13: mod_base = OTHER; note = 2'-O-methylcytidine-3'-phosphate
  modified_base 14: mod_base = OTHER; note = 2'-O-methyluridine-3'-phosphate
  modified_base 15: mod_base = OTHER; note = 2'-O-methylguanosine-3'-phosphate
  modified_base 16: mod_base = OTHER; note = 2'-O-methyluridine-3'-phosphate
  modified_base 17: mod_base = OTHER; note = 2'-O-methyladenosine-3'-phosphate
  modified_base 18: mod_base = OTHER; note = 2'-O-methyluridine-3'-phosphate
  modified_base 19: mod_base = OTHER; note = 2'-O-methyluridine-3'-phosphate
  modified_base 20: mod_base = OTHER; note = 2'-O-methyluridine-3'-phosphate
  modified_base 21: mod_base = OTHER; note = 2'-O-methyladenosine
aaggatatacttctgtattta

SEQ ID NO: 3842 - RNA, 21 nt, synthetic construct
  source 1..21: mol_type = other RNA
  modified_base 1: mod_base = OTHER; note = 2'-O-methyladenosine-3'-phosphate
  modified_base 2: mod_base = OTHER; note = 2'-O-methylguanosine-3'-phosphate
  modified_base 3: mod_base = OTHER; note = 2'-O-methylguanosine-3'-phosphate
  modified_base 4: mod_base = OTHER; note = 2'-O-methyladenosine-3'-phosphate
  modified_base 5: mod_base = OTHER; note = 2'-O-methyluridine-3'-phosphate
  modified_base 6: mod_base = OTHER; note = 2'-O-methyladenosine-3'-phosphate
  modified_base 7: mod_base = OTHER; note = 2'-deoxy-2'-fluorouridine-3'-phosphate
  modified_base 8: mod_base = OTHER; note = 2'-O-methyladenosine-3'-phosphate
  modified_base 9: mod_base = OTHER; note = 2'-deoxy-2'-fluorocytidine-3'-phosphate
  modified_base 10: mod_base = OTHER; note = 2'-deoxy-2'-fluorouridine-3'-phosphate
  modified_base 11: mod_base = OTHER; note = 2'-deoxy-2'-fluorouridine-3'-phosphate
  modified_base 12: mod_base = OTHER; note = 2'-O-methylcytidine-3'-phosphate
  modified_base 13: mod_base = OTHER; note = 2'-O-methyluridine-3'-phosphate
  modified_base 14: mod_base = OTHER; note = 2'-O-methylguanosine-3'-phosphate
  modified_base 15: mod_base = OTHER; note = 2'-O-methyluridine-3'-phosphate
  modified_base 16: mod_base = OTHER; note = 2'-O-methyladenosine-3'-phosphate
  modified_base 17: mod_base = OTHER; note = 2'-O-methyluridine-3'-phosphate
  modified_base 18: mod_base = OTHER; note = 2'-O-methyluridine-3'-phosphate
  modified_base 19: mod_base = OTHER; note = 2'-O-methyluridine-3'-phosphate
  modified_base 20: mod_base = OTHER; note = 2'-O-methyluridine-3'-phosphate
  modified_base 21: mod_base = OTHER; note = 2'-O-methyladenosine
aggatatacttctgtatttta

SEQ ID NO: 3843 - RNA, 21 nt, synthetic construct
  source 1..21: mol_type = other RNA
  modified_base 1: mod_base = OTHER; note = 2'-O-methylguanosine-3'-phosphate
  modified_base 2: mod_base = OTHER; note = 2'-O-methylguanosine-3'-phosphate
  modified_base 3: mod_base = OTHER; note = 2'-O-methyladenosine-3'-phosphate
  modified_base 4: mod_base = OTHER; note = 2'-O-methyluridine-3'-phosphate
  modified_base 5: mod_base = OTHER; note = 2'-O-methyladenosine-3'-phosphate
  modified_base 6: mod_base = OTHER; note = 2'-O-methyluridine-3'-phosphate
  modified_base 7: mod_base = OTHER; note = 2'-deoxy-2'-fluoroadenosine-3'-phosphate
  modified_base 8: mod_base = OTHER; note = 2'-O-methylcytidine-3'-phosphate
  modified_base 9: mod_base = OTHER; note = 2'-deoxy-2'-fluorouridine-3'-phosphate
  modified_base 10: mod_base = OTHER; note = 2'-deoxy-2'-fluorouridine-3'-phosphate
  modified_base 11: mod_base = OTHER; note = 2'-deoxy-2'-fluorocytidine-3'-phosphate
  modified_base 12: mod_base = OTHER; note = 2'-O-methyluridine-3'-phosphate
  modified_base 13: mod_base = OTHER; note = 2'-O-methylguanosine-3'-phosphate
  modified_base 14: mod_base = OTHER; note = 2'-O-methyluridine-3'-phosphate
  modified_base 15: mod_base = OTHER; note = 2'-O-methyladenosine-3'-phosphate
  modified_base 16: mod_base = OTHER; note = 2'-O-methyluridine-3'-phosphate
  modified_base 17: mod_base = OTHER; note = 2'-O-methyluridine-3'-phosphate
  modified_base 18: mod_base = OTHER; note = 2'-O-methyluridine-3'-phosphate
  modified_base 19: mod_base = OTHER; note = 2'-O-methyluridine-3'-phosphate
  modified_base 20: mod_base = OTHER; note = 2'-O-methylcytidine-3'-phosphate
  modified_base 21: mod_base = OTHER; note = 2'-O-methyladenosine
ggatatacttctgtattttca

SEQ ID NO: 3844 - RNA, 21 nt, synthetic construct
  source 1..21: mol_type = other RNA
  modified_base 1: mod_base = OTHER; note = 2'-O-methylguanosine-3'-phosphate
  modified_base 2: mod_base = OTHER; note = 2'-O-methyladenosine-3'-phosphate
  modified_base 3: mod_base = OTHER; note = 2'-O-methyluridine-3'-phosphate
  modified_base 4: mod_base = OTHER; note = 2'-O-methyladenosine-3'-phosphate
  modified_base 5: mod_base = OTHER; note = 2'-O-methyluridine-3'-phosphate
  modified_base 6: mod_base = OTHER; note = 2'-O-methyladenosine-3'-phosphate
  modified_base 7: mod_base = OTHER; note = 2'-deoxy-2'-fluorocytidine-3'-phosphate
  modified_base 8: mod_base = OTHER; note = 2'-O-methyluridine-3'-phosphate
  modified_base 9: mod_base = OTHER; note = 2'-deoxy-2'-fluorouridine-3'-phosphate
  modified_base 10: mod_base = OTHER; note = 2'-deoxy-2'-fluorocytidine-3'-phosphate
  modified_base 11: mod_base = OTHER; note = 2'-deoxy-2'-fluorouridine-3'-phosphate
  modified_base 12: mod_base = OTHER; note = 2'-O-methylguanosine-3'-phosphate
  modified_base 13: mod_base = OTHER; note = 2'-O-methyluridine-3'-phosphate
  modified_base 14: mod_base = OTHER; note = 2'-O-methyladenosine-3'-phosphate
  modified_base 15: mod_base = OTHER; note = 2'-O-methyluridine-3'-phosphate
  modified_base 16: mod_base = OTHER; note = 2'-O-methyluridine-3'-phosphate
  modified_base 17: mod_base = OTHER; note = 2'-O-methyluridine-3'-phosphate
  modified_base 18: mod_base = OTHER; note = 2'-O-methyluridine-3'-phosphate
  modified_base 19: mod_base = OTHER; note = 2'-O-methylcytidine-3'-phosphate
  modified_base 20: mod_base = OTHER; note = 2'-O-methyluridine-3'-phosphate
  modified_base 21: mod_base = OTHER; note = 2'-O-methyladenosine
gatatacttctgtattttcta

SEQ ID NO: 3845 - RNA, 21 nt, synthetic construct
  source 1..21: mol_type = other RNA
  modified_base 1: mod_base = OTHER; note = 2'-O-methyladenosine-3'-phosphate
  modified_base 2: mod_base = OTHER; note = 2'-O-methyluridine-3'-phosphate
  modified_base 3: mod_base = OTHER; note = 2'-O-methyladenosine-3'-phosphate
  modified_base 4: mod_base = OTHER; note = 2'-O-methyluridine-3'-phosphate
  modified_base 5: mod_base = OTHER; note = 2'-O-methyladenosine-3'-phosphate
  modified_base 6: mod_base = OTHER; note = 2'-O-methylcytidine-3'-phosphate
  modified_base 7: mod_base = OTHER; note = 2'-deoxy-2'-fluorouridine-3'-phosphate
  modified_base 8: mod_base = OTHER; note = 2'-O-methyluridine-3'-phosphate
  modified_base 9: mod_base = OTHER; note = 2'-deoxy-2'-fluorocytidine-3'-phosphate
  modified_base 10: mod_base = OTHER; note = 2'-deoxy-2'-fluorouridine-3'-phosphate
  modified_base 11: mod_base = OTHER; note = 2'-deoxy-2'-fluoroguanosine-3'-phosphate
  modified_base 12: mod_base = OTHER; note = 2'-O-methyluridine-3'-phosphate
  modified_base 13: mod_base = OTHER; note = 2'-O-methyladenosine-3'-phosphate
  modified_base 14: mod_base = OTHER; note = 2'-O-methyluridine-3'-phosphate
  modified_base 15: mod_base = OTHER; note = 2'-O-methyluridine-3'-phosphate
  modified_base 16: mod_base = OTHER; note = 2'-O-methyluridine-3'-phosphate
  modified_base 17: mod_base = OTHER; note = 2'-O-methyluridine-3'-phosphate
  modified_base 18: mod_base = OTHER; note = 2'-O-methylcytidine-3'-phosphate
  modified_base 19: mod_base = OTHER; note = 2'-O-methyluridine-3'-phosphate
  modified_base 20: mod_base = OTHER; note = 2'-O-methylcytidine-3'-phosphate
  modified_base 21: mod_base = OTHER; note = 2'-O-methyladenosine
atatacttctgtattttctca

SEQ ID NO: 3846 - RNA, 21 nt, synthetic construct
  source 1..21: mol_type = other RNA
  modified_base 1: mod_base = OTHER; note = 2'-O-methyluridine-3'-phosphate
  modified_base 2: mod_base = OTHER; note = 2'-O-methyladenosine-3'-phosphate
  modified_base 3: mod_base = OTHER; note = 2'-O-methyluridine-3'-phosphate
  modified_base 4: mod_base = OTHER; note = 2'-O-methyladenosine-3'-phosphate
  modified_base 5: mod_base = OTHER; note = 2'-O-methylcytidine-3'-phosphate
  modified_base 6: mod_base = OTHER; note = 2'-O-methyluridine-3'-phosphate
  modified_base 7: mod_base = OTHER; note = 2'-deoxy-2'-fluorouridine-3'-phosphate
  modified_base 8: mod_base = OTHER; note = 2'-O-methylcytidine-3'-phosphate
  modified_base 9: mod_base = OTHER; note = 2'-deoxy-2'-fluorouridine-3'-phosphate
  modified_base 10: mod_base = OTHER; note = 2'-deoxy-2'-fluoroguanosine-3'-phosphate
  modified_base 11: mod_base = OTHER; note = 2'-deoxy-2'-fluorouridine-3'-phosphate
  modified_base 12: mod_base = OTHER; note = 2'-O-methyladenosine-3'-phosphate
  modified_base 13: mod_base = OTHER; note = 2'-O-methyluridine-3'-phosphate
  modified_base 14: mod_base = OTHER; note = 2'-O-methyluridine-3'-phosphate
  modified_base 15: mod_base = OTHER; note = 2'-O-methyluridine-3'-phosphate
  modified_base 16: mod_base = OTHER; note = 2'-O-methyluridine-3'-phosphate
  modified_base 17: mod_base = OTHER; note = 2'-O-methylcytidine-3'-phosphate
  modified_base 18: mod_base = OTHER; note = 2'-O-methyluridine-3'-phosphate
  modified_base 19: mod_base = OTHER; note = 2'-O-methylcytidine-3'-phosphate
  modified_base 20: mod_base = OTHER; note = 2'-O-methyladenosine-3'-phosphate
  modified_base 21: mod_base = OTHER; note = 2'-O-methyladenosine
tatacttctgtattttctcaa

SEQ ID NO: 3847 - RNA, 21 nt, synthetic construct
  source 1..21: mol_type = other RNA
  modified_base 1: mod_base = OTHER; note = 2'-O-methyladenosine-3'-phosphate
  modified_base 2: mod_base = OTHER; note = 2'-O-methylcytidine-3'-phosphate
  modified_base 3: mod_base = OTHER; note = 2'-O-methyluridine-3'-phosphate
  modified_base 4: mod_base = OTHER; note = 2'-O-methyluridine-3'-phosphate
  modified_base 5: mod_base = OTHER; note = 2'-O-methylcytidine-3'-phosphate
  modified_base 6: mod_base = OTHER; note = 2'-O-methyluridine-3'-phosphate
  modified_base 7: mod_base = OTHER; note = 2'-deoxy-2'-fluoroguanosine-3'-phosphate
  modified_base 8: mod_base = OTHER; note = 2'-O-methyluridine-3'-phosphate
  modified_base 9: mod_base = OTHER; note = 2'-deoxy-2'-fluoroadenosine-3'-phosphate
  modified_base 10: mod_base = OTHER; note = 2'-deoxy-2'-fluorouridine-3'-phosphate
  modified_base 11: mod_base = OTHER; note = 2'-deoxy-2'-fluorouridine-3'-phosphate
  modified_base 12: mod_base = OTHER; note = 2'-O-methyluridine-3'-phosphate
  modified_base 13: mod_base = OTHER; note = 2'-O-methyluridine-3'-phosphate
  modified_base 14: mod_base = OTHER; note = 2'-O-methylcytidine-3'-phosphate
  modified_base 15: mod_base = OTHER; note = 2'-O-methyluridine-3'-phosphate
  modified_base 16: mod_base = OTHER; note = 2'-O-methylcytidine-3'-phosphate
  modified_base 17: mod_base = OTHER; note = 2'-O-methyladenosine-3'-phosphate
  modified_base 18: mod_base = OTHER; note = 2'-O-methyluridine-3'-phosphate
  modified_base 19: mod_base = OTHER; note = 2'-O-methyladenosine-3'-phosphate
  modified_base 20: mod_base = OTHER; note = 2'-O-methylguanosine-3'-phosphate
  modified_base 21: mod_base = OTHER; note = 2'-O-methyladenosine
acttctgtattttctcataga

SEQ ID NO: 3848 - RNA, 21 nt, synthetic construct
  source 1..21: mol_type = other RNA
  modified_base 1: mod_base = OTHER; note = 2'-O-methylcytidine-3'-phosphate
  modified_base 2: mod_base = OTHER; note = 2'-O-methyluridine-3'-phosphate
  modified_base 3: mod_base = OTHER; note = 2'-O-methyluridine-3'-phosphate
  modified_base 4: mod_base = OTHER; note = 2'-O-methylcytidine-3'-phosphate
  modified_base 5: mod_base = OTHER; note = 2'-O-methyluridine-3'-phosphate
  modified_base 6: mod_base = OTHER; note = 2'-O-methylguanosine-3'-phosphate
  modified_base 7: mod_base = OTHER; note = 2'-deoxy-2'-fluorouridine-3'-phosphate
  modified_base 8: mod_base = OTHER; note = 2'-O-methyladenosine-3'-phosphate
  modified_base 9: mod_base = OTHER; note = 2'-deoxy-2'-fluorouridine-3'-phosphate
  modified_base 10: mod_base = OTHER; note = 2'-deoxy-2'-fluorouridine-3'-phosphate
  modified_base 11: mod_base = OTHER; note = 2'-deoxy-2'-fluorouridine-3'-phosphate
  modified_base 12: mod_base = OTHER; note = 2'-O-methyluridine-3'-phosphate
  modified_base 13: mod_base = OTHER; note = 2'-O-methylcytidine-3'-phosphate
  modified_base 14: mod_base = OTHER; note = 2'-O-methyluridine-3'-phosphate
  modified_base 15: mod_base = OTHER; note = 2'-O-methylcytidine-3'-phosphate
  modified_base 16: mod_base = OTHER; note = 2'-O-methyladenosine-3'-phosphate
  modified_base 17: mod_base = OTHER; note = 2'-O-methyluridine-3'-phosphate
  modified_base 18: mod_base = OTHER; note = 2'-O-methyladenosine-3'-phosphate
  modified_base 19: mod_base = OTHER; note = 2'-O-methylguanosine-3'-phosphate
  modified_base 20: mod_base = OTHER; note = 2'-O-methyladenosine-3'-phosphate
  modified_base 21: mod_base = OTHER; note = 2'-O-methyladenosine
cttctgtattttctcatagaa

SEQ ID NO: 3849 - RNA, 21 nt, synthetic construct
  source 1..21: mol_type = other RNA
  modified_base 1: mod_base = OTHER; note = 2'-O-methyluridine-3'-phosphate
  modified_base 2: mod_base = OTHER; note = 2'-O-methyluridine-3'-phosphate
  modified_base 3: mod_base = OTHER; note = 2'-O-methylcytidine-3'-phosphate
  modified_base 4: mod_base = OTHER; note = 2'-O-methyluridine-3'-phosphate
  modified_base 5: mod_base = OTHER; note = 2'-O-methylguanosine-3'-phosphate
  modified_base 6: mod_base = OTHER; note = 2'-O-methyluridine-3'-phosphate
  modified_base 7: mod_base = OTHER; note = 2'-deoxy-2'-fluoroadenosine-3'-phosphate
  modified_base 8: mod_base = OTHER; note = 2'-O-methyluridine-3'-phosphate
  modified_base 9: mod_base = OTHER; note = 2'-deoxy-2'-fluorouridine-3'-phosphate
  modified_base 10: mod_base = OTHER; note = 2'-deoxy-2'-fluorouridine-3'-phosphate
  modified_base 11: mod_base = OTHER; note = 2'-deoxy-2'-fluorouridine-3'-phosphate
  modified_base 12: mod_base = OTHER; note = 2'-O-methylcytidine-3'-phosphate
  modified_base 13: mod_base = OTHER; note = 2'-O-methyluridine-3'-phosphate
  modified_base 14: mod_base = OTHER; note = 2'-O-methylcytidine-3'-phosphate
  modified_base 15: mod_base = OTHER; note = 2'-O-methyladenosine-3'-phosphate
  modified_base 16: mod_base = OTHER; note = 2'-O-methyluridine-3'-phosphate
  modified_base 17: mod_base = OTHER; note = 2'-O-methyladenosine-3'-phosphate
  modified_base 18: mod_base = OTHER; note = 2'-O-methylguanosine-3'-phosphate
  modified_base 19: mod_base = OTHER; note = 2'-O-methyladenosine-3'-phosphate
  modified_base 20: mod_base = OTHER; note = 2'-O-methylguanosine-3'-phosphate
  modified_base 21: mod_base = OTHER; note = 2'-O-methyladenosine
ttctgtattttctcatagaga

SEQ ID NO: 3850 - RNA, 21 nt, synthetic construct
  source 1..21: mol_type = other RNA
  modified_base 1: mod_base = OTHER; note = 2'-O-methyluridine-3'-phosphate
  modified_base 2: mod_base = OTHER; note = 2'-O-methylcytidine-3'-phosphate
  modified_base 3: mod_base = OTHER; note = 2'-O-methyluridine-3'-phosphate
  modified_base 4: mod_base = OTHER; note = 2'-O-methylguanosine-3'-phosphate
  modified_base 5: mod_base = OTHER; note = 2'-O-methyluridine-3'-phosphate
  modified_base 6: mod_base = OTHER; note = 2'-O-methyladenosine-3'-phosphate
  modified_base 7: mod_base = OTHER; note = 2'-deoxy-2'-fluorouridine-3'-phosphate
  modified_base 8: mod_base = OTHER; note = 2'-O-methyluridine-3'-phosphate
  modified_base 9: mod_base = OTHER; note = 2'-deoxy-2'-fluorouridine-3'-phosphate
  modified_base 10: mod_base = OTHER; note = 2'-deoxy-2'-fluorouridine-3'-phosphate
  modified_base 11: mod_base = OTHER; note = 2'-deoxy-2'-fluorocytidine-3'-phosphate
  modified_base 12: mod_base = OTHER; note = 2'-O-methyluridine-3'-phosphate
  modified_base 13: mod_base = OTHER; note = 2'-O-methylcytidine-3'-phosphate
  modified_base 14: mod_base = OTHER; note = 2'-O-methyladenosine-3'-phosphate
  modified_base 15: mod_base = OTHER; note = 2'-O-methyluridine-3'-phosphate
  modified_base 16: mod_base = OTHER; note = 2'-O-methyladenosine-3'-phosphate
  modified_base 17: mod_base = OTHER; note = 2'-O-methylguanosine-3'-phosphate
  modified_base 18: mod_base = OTHER; note = 2'-O-methyladenosine-3'-phosphate
  modified_base 19: mod_base = OTHER; note = 2'-O-methylguanosine-3'-phosphate
  modified_base 20: mod_base = OTHER; note = 2'-O-methyluridine-3'-phosphate
  modified_base 21: mod_base = OTHER; note = 2'-O-methyladenosine
tctgtattttctcatagagta

SEQ ID NO: 3851 - RNA, 21 nt, synthetic construct
  source 1..21: mol_type = other RNA
  modified_base 1: mod_base = OTHER; note = 2'-O-methylcytidine-3'-phosphate
  modified_base 2: mod_base = OTHER; note = 2'-O-methyluridine-3'-phosphate
  modified_base 3: mod_base = OTHER; note = 2'-O-methylguanosine-3'-phosphate
  modified_base 4: mod_base = OTHER; note = 2'-O-methyluridine-3'-phosphate
  modified_base 5: mod_base = OTHER; note = 2'-O-methyladenosine-3'-phosphate
  modified_base 6: mod_base = OTHER; note = 2'-O-methyluridine-3'-phosphate
  modified_base 7: mod_base = OTHER; note = 2'-deoxy-2'-fluorouridine-3'-phosphate
  modified_base 8: mod_base = OTHER; note = 2'-O-methyluridine-3'-phosphate
  modified_base 9: mod_base = OTHER; note = 2'-deoxy-2'-fluorouridine-3'-phosphate
  modified_base 10: mod_base = OTHER; note = 2'-deoxy-2'-fluorocytidine-3'-phosphate
  modified_base 11: mod_base = OTHER; note = 2'-deoxy-2'-fluorouridine-3'-phosphate
  modified_base 12: mod_base = OTHER; note = 2'-O-methylcytidine-3'-phosphate
  modified_base 13: mod_base = OTHER; note = 2'-O-methyladenosine-3'-phosphate
  modified_base 14: mod_base = OTHER; note = 2'-O-methyluridine-3'-phosphate
  modified_base 15: mod_base = OTHER; note = 2'-O-methyladenosine-3'-phosphate
  modified_base 16: mod_base = OTHER; note = 2'-O-methylguanosine-3'-phosphate
  modified_base 17: mod_base = OTHER; note = 2'-O-methyladenosine-3'-phosphate
  modified_base 18: mod_base = OTHER; note = 2'-O-methylguanosine-3'-phosphate
  modified_base 19: mod_base = OTHER; note = 2'-O-methyluridine-3'-phosphate
  modified_base 20: mod_base = OTHER; note = 2'-O-methyladenosine-3'-phosphate
  modified_base 21: mod_base = OTHER; note = 2'-O-methyladenosine
ctgtattttctcatagagtaa

SEQ ID NO: 3852 - RNA, 21 nt, synthetic construct
  source 1..21: mol_type = other RNA
  modified_base 1: mod_base = OTHER; note = 2'-O-methylcytidine-3'-phosphate
  modified_base 2: mod_base = OTHER; note = 2'-O-methyluridine-3'-phosphate
  modified_base 3: mod_base = OTHER; note = 2'-O-methylcytidine-3'-phosphate
  modified_base 4: mod_base = OTHER; note = 2'-O-methyladenosine-3'-phosphate
  modified_base 5: mod_base = OTHER; note = 2'-O-methyluridine-3'-phosphate
  modified_base 6: mod_base = OTHER; note = 2'-O-methyladenosine-3'-phosphate
  modified_base 7: mod_base = OTHER; note = 2'-deoxy-2'-fluoroguanosine-3'-phosphate
  modified_base 8: mod_base = OTHER; note = 2'-O-methyladenosine-3'-phosphate
  modified_base 9: mod_base = OTHER; note = 2'-deoxy-2'-fluoroguanosine-3'-phosphate
  modified_base 10: mod_base = OTHER; note = 2'-deoxy-2'-fluorouridine-3'-phosphate
  modified_base 11: mod_base = OTHER; note = 2'-deoxy-2'-fluoroadenosine-3'-phosphate
  modified_base 12: mod_base = OTHER; note = 2'-O-methylcytidine-3'-phosphate
  modified_base 13: mod_base = OTHER; note = 2'-O-methyladenosine-3'-phosphate
  modified_base 14: mod_base = OTHER; note = 2'-O-methyladenosine-3'-phosphate
  modified_base 15: mod_base = OTHER; note = 2'-O-methyluridine-3'-phosphate
  modified_base 16: mod_base = OTHER; note = 2'-O-methyluridine-3'-phosphate
  modified_base 17: mod_base = OTHER; note = 2'-O-methyluridine-3'-phosphate
  modified_base 18: mod_base = OTHER; note = 2'-O-methyladenosine-3'-phosphate
  modified_base 19: mod_base = OTHER; note = 2'-O-methylguanosine-3'-phosphate
  modified_base 20: mod_base = OTHER; note = 2'-O-methyluridine-3'-phosphate
  modified_base 21: mod_base = OTHER; note = 2'-O-methyladenosine
ctcatagagtacaatttagta

SEQ ID NO: 3853 - RNA, 21 nt, synthetic construct
  source 1..21: mol_type = other RNA
  modified_base 1: mod_base = OTHER; note = 2'-O-methyluridine-3'-phosphate
  modified_base 2: mod_base = OTHER; note = 2'-O-methylcytidine-3'-phosphate
  modified_base 3: mod_base = OTHER; note = 2'-O-methyladenosine-3'-phosphate
  modified_base 4: mod_base = OTHER; note = 2'-O-methyluridine-3'-phosphate
  modified_base 5: mod_base = OTHER; note = 2'-O-methyladenosine-3'-phosphate
  modified_base 6: mod_base = OTHER; note = 2'-O-methylguanosine-3'-phosphate
  modified_base 7: mod_base = OTHER; note = 2'-deoxy-2'-fluoroadenosine-3'-phosphate
  modified_base 8: mod_base = OTHER; note = 2'-O-methylguanosine-3'-phosphate
  modified_base 9: mod_base = OTHER; note = 2'-deoxy-2'-fluorouridine-3'-phosphate
  modified_base 10: mod_base = OTHER; note = 2'-deoxy-2'-fluoroadenosine-3'-phosphate
  modified_base 11: mod_base = OTHER; note = 2'-deoxy-2'-fluorocytidine-3'-phosphate
  modified_base 12: mod_base = OTHER; note = 2'-O-methyladenosine-3'-phosphate
  modified_base 13: mod_base = OTHER; note = 2'-O-methyladenosine-3'-phosphate
  modified_base 14: mod_base = OTHER; note = 2'-O-methyluridine-3'-phosphate
  modified_base 15: mod_base = OTHER; note = 2'-O-methyluridine-3'-phosphate
  modified_base 16: mod_base = OTHER; note = 2'-O-methyluridine-3'-phosphate
  modified_base 17: mod_base = OTHER; note = 2'-O-methyladenosine-3'-phosphate
  modified_base 18: mod_base = OTHER; note = 2'-O-methylguanosine-3'-phosphate
  modified_base 19: mod_base = OTHER; note = 2'-O-methyluridine-3'-phosphate
  modified_base 20: mod_base = OTHER; note = 2'-O-methylguanosine-3'-phosphate
  modified_base 21: mod_base = OTHER; note = 2'-O-methyladenosine
tcatagagtacaatttagtga

SEQ ID NO: 3854 - RNA, 21 nt, synthetic construct
  source 1..21: mol_type = other RNA
  modified_base 1: mod_base = OTHER; note = 2'-O-methylcytidine-3'-phosphate
  modified_base 2: mod_base = OTHER; note = 2'-O-methyladenosine-3'-phosphate
  modified_base 3: mod_base = OTHER; note = 2'-O-methyluridine-3'-phosphate
  modified_base 4: mod_base = OTHER; note = 2'-O-methyladenosine-3'-phosphate
  modified_base 5: mod_base = OTHER; note = 2'-O-methylguanosine-3'-phosphate
  modified_base 6: mod_base = OTHER; note = 2'-O-methyladenosine-3'-phosphate
  modified_base 7: mod_base = OTHER; note = 2'-deoxy-2'-fluoroguanosine-3'-phosphate
  modified_base 8: mod_base = OTHER; note = 2'-O-methyluridine-3'-phosphate
  modified_base 9: mod_base = OTHER; note = 2'-deoxy-2'-fluoroadenosine-3'-phosphate
  modified_base 10: mod_base = OTHER; note = 2'-deoxy-2'-fluorocytidine-3'-phosphate
  modified_base 11: mod_base = OTHER; note = 2'-deoxy-2'-fluoroadenosine-3'-phosphate
  modified_base 12: mod_base = OTHER; note = 2'-O-methyladenosine-3'-phosphate
  modified_base 13: mod_base = OTHER; note = 2'-O-methyluridine-3'-phosphate
  modified_base 14: mod_base = OTHER; note = 2'-O-methyluridine-3'-phosphate
  modified_base 15: mod_base = OTHER; note = 2'-O-methyluridine-3'-phosphate
  modified_base 16: mod_base = OTHER; note = 2'-O-methyladenosine-3'-phosphate
  modified_base 17: mod_base = OTHER; note = 2'-O-methylguanosine-3'-phosphate
  modified_base 18: mod_base = OTHER; note = 2'-O-methyluridine-3'-phosphate
  modified_base 19: mod_base = OTHER; note = 2'-O-methylguanosine-3'-phosphate
  modified_base 20: mod_base = OTHER; note = 2'-O-methyladenosine-3'-phosphate
  modified_base 21: mod_base = OTHER; note = 2'-O-methyladenosine
catagagtacaatttagtgaa

SEQ ID NO: 3855 - RNA, 21 nt, synthetic construct
  source 1..21: mol_type = other RNA
  modified_base 1: mod_base = OTHER; note = 2'-O-methyladenosine-3'-phosphate
  modified_base 2: mod_base = OTHER; note = 2'-O-methyluridine-3'-phosphate
  modified_base 3: mod_base = OTHER; note = 2'-O-methyladenosine-3'-phosphate
  modified_base 4: mod_base = OTHER; note = 2'-O-methylguanosine-3'-phosphate
  modified_base 5: mod_base = OTHER; note = 2'-O-methyladenosine-3'-phosphate
  modified_base 6: mod_base = OTHER; note = 2'-O-methylguanosine-3'-phosphate
  modified_base 7: mod_base = OTHER; note = 2'-deoxy-2'-fluorouridine-3'-phosphate
  modified_base 8: mod_base = OTHER; note = 2'-O-methyladenosine-3'-phosphate
  modified_base 9: mod_base = OTHER; note = 2'-deoxy-2'-fluorocytidine-3'-phosphate
  modified_base 10: mod_base = OTHER; note = 2'-deoxy-2'-fluoroadenosine-3'-phosphate
  modified_base 11: mod_base = OTHER; note = 2'-deoxy-2'-fluoroadenosine-3'-phosphate
  modified_base 12: mod_base = OTHER; note = 2'-O-methyluridine-3'-phosphate
  modified_base 13: mod_base = OTHER; note = 2'-O-methyluridine-3'-phosphate
  modified_base 14: mod_base = OTHER; note = 2'-O-methyluridine-3'-phosphate
  modified_base 15: mod_base = OTHER; note = 2'-O-methyladenosine-3'-phosphate
  modified_base 16: mod_base = OTHER; note = 2'-O-methylguanosine-3'-phosphate
  modified_base 17: mod_base = OTHER; note = 2'-O-methyluridine-3'-phosphate
  modified_base 18: mod_base = OTHER; note = 2'-O-methylguanosine-3'-phosphate
  modified_base 19: mod_base = OTHER; note = 2'-O-methyladenosine-3'-phosphate
  modified_base 20: mod_base = OTHER; note = 2'-O-methyluridine-3'-phosphate
  modified_base 21: mod_base = OTHER; note = 2'-O-methyladenosine
atagagtacaatttagtgata

SEQ ID NO: 3856 - RNA, 21 nt, synthetic construct
  source 1..21: mol_type = other RNA
  modified_base 1: mod_base = OTHER; note = 2'-O-methyluridine-3'-phosphate
  modified_base 2: mod_base = OTHER; note = 2'-O-methyladenosine-3'-phosphate
  modified_base 3: mod_base = OTHER; note = 2'-O-methylguanosine-3'-phosphate
  modified_base 4: mod_base = OTHER; note = 2'-O-methyladenosine-3'-phosphate
  modified_base 5: mod_base = OTHER; note = 2'-O-methylguanosine-3'-phosphate
  modified_base 6: mod_base = OTHER; note = 2'-O-methyluridine-3'-phosphate
  modified_base 7: mod_base = OTHER; note = 2'-deoxy-2'-fluoroadenosine-3'-phosphate
  modified_base 8: mod_base = OTHER; note = 2'-O-methylcytidine-3'-phosphate
  modified_base 9: mod_base = OTHER; note = 2'-deoxy-2'-fluoroadenosine-3'-phosphate
  modified_base 10: mod_base = OTHER; note = 2'-deoxy-2'-fluoroadenosine-3'-phosphate
  modified_base 11: mod_base = OTHER; note = 2'-deoxy-2'-fluorouridine-3'-phosphate
  modified_base 12: mod_base = OTHER; note = 2'-O-methyluridine-3'-phosphate
  modified_base 13: mod_base = OTHER; note = 2'-O-methyluridine-3'-phosphate
  modified_base 14: mod_base = OTHER; note = 2'-O-methyladenosine-3'-phosphate
  modified_base 15: mod_base = OTHER; note = 2'-O-methylguanosine-3'-phosphate
  modified_base 16: mod_base = OTHER; note = 2'-O-methyluridine-3'-phosphate
  modified_base 17: mod_base = OTHER; note = 2'-O-methylguanosine-3'-phosphate
  modified_base 18: mod_base = OTHER; note = 2'-O-methyladenosine-3'-phosphate
  modified_base 19: mod_base = OTHER; note = 2'-O-methyluridine-3'-phosphate
  modified_base 20: mod_base = OTHER; note = 2'-O-methyluridine-3'-phosphate
  modified_base 21: mod_base = OTHER; note = 2'-O-methyladenosine
tagagtacaatttagtgatta

SEQ ID NO: 3857 - RNA, 21 nt, synthetic construct
  source 1..21: mol_type = other RNA
  modified_base 1: mod_base = OTHER; note = 2'-O-methyladenosine-3'-phosphate
  modified_base 2: mod_base = OTHER; note = 2'-O-methylguanosine-3'-phosphate
  modified_base 3: mod_base = OTHER; note = 2'-O-methyluridine-3'-phosphate
  modified_base 4: mod_base = OTHER; note = 2'-O-methyladenosine-3'-phosphate
  modified_base 5: mod_base = OTHER; note = 2'-O-methylcytidine-3'-phosphate
  modified_base 6: mod_base = OTHER; note = 2'-O-methyladenosine-3'-phosphate
  modified_base 7: mod_base = OTHER; note = 2'-deoxy-2'-fluoroadenosine-3'-phosphate
  modified_base 8: mod_base = OTHER; note = 2'-O-methyluridine-3'-phosphate
  modified_base 9: mod_base = OTHER; note = 2'-deoxy-2'-fluorouridine-3'-phosphate
  modified_base 10: mod_base = OTHER; note = 2'-deoxy-2'-fluorouridine-3'-phosphate
  modified_base 11: mod_base = OTHER; note = 2'-deoxy-2'-fluoroadenosine-3'-phosphate
  modified_base 12: mod_base = OTHER; note = 2'-O-methylguanosine-3'-phosphate
  modified_base 13: mod_base = OTHER; note = 2'-O-methyluridine-3'-phosphate
  modified_base 14: mod_base = OTHER; note = 2'-O-methylguanosine-3'-phosphate
  modified_base 15: mod_base = OTHER; note = 2'-O-methyladenosine-3'-phosphate
  modified_base 16: mod_base = OTHER; note = 2'-O-methyluridine-3'-phosphate
  modified_base 17: mod_base = OTHER; note = 2'-O-methyluridine-3'-phosphate
  modified_base 18: mod_base = OTHER; note = 2'-O-methyladenosine-3'-phosphate
  modified_base 19: mod_base = OTHER; note = 2'-O-methyluridine-3'-phosphate
  modified_base 20: mod_base = OTHER; note = 2'-O-methylguanosine-3'-phosphate
  modified_base 21: mod_base = OTHER; note = 2'-O-methyladenosine
agtacaatttagtgattatga

SEQ ID NO: 3858 - RNA, 21 nt, synthetic construct
  source 1..21: mol_type = other RNA
  modified_base 1: mod_base = OTHER; note = 2'-O-methylguanosine-3'-phosphate
  modified_base 2: mod_base = OTHER; note = 2'-O-methyluridine-3'-phosphate
  modified_base 3: mod_base = OTHER; note = 2'-O-methyladenosine-3'-phosphate
  modified_base 4: mod_base = OTHER; note = 2'-O-methylcytidine-3'-phosphate
  modified_base 5: mod_base = OTHER; note = 2'-O-methyladenosine-3'-phosphate
  modified_base 6: mod_base = OTHER; note = 2'-O-methyladenosine-3'-phosphate
  modified_base 7: mod_base = OTHER; note = 2'-deoxy-2'-fluorouridine-3'-phosphate
  modified_base 8: mod_base = OTHER; note = 2'-O-methyluridine-3'-phosphate
  modified_base 9: mod_base = OTHER; note = 2'-deoxy-2'-fluorouridine-3'-phosphate
  modified_base 10: mod_base = OTHER; note = 2'-deoxy-2'-fluoroadenosine-3'-phosphate
  modified_base 11: mod_base = OTHER; note = 2'-deoxy-2'-fluoroguanosine-3'-phosphate
  modified_base 12: mod_base = OTHER; note = 2'-O-methyluridine-3'-phosphate
  modified_base 13: mod_base = OTHER; note = 2'-O-methylguanosine-3'-phosphate
  modified_base 14: mod_base = OTHER; note = 2'-O-methyladenosine-3'-phosphate
  modified_base 15: mod_base = OTHER; note = 2'-O-methyluridine-3'-phosphate
  modified_base 16: mod_base = OTHER; note = 2'-O-methyluridine-3'-phosphate
  modified_base 17: mod_base = OTHER; note = 2'-O-methyladenosine-3'-phosphate
  modified_base 18: mod_base = OTHER; note = 2'-O-methyluridine-3'-phosphate
  modified_base 19: mod_base = OTHER; note = 2'-O-methylguanosine-3'-phosphate
  modified_base 20: mod_base = OTHER; note = 2'-O-methylcytidine-3'-phosphate
  modified_base 21: mod_base = OTHER; note = 2'-O-methyladenosine
gtacaatttagtgattatgca

SEQ ID NO: 3859 - RNA, 21 nt, synthetic construct
  source 1..21: mol_type = other RNA
  modified_base 1: mod_base = OTHER; note = 2'-O-methyluridine-3'-phosphate
  modified_base 2: mod_base = OTHER; note = 2'-O-methyladenosine-3'-phosphate
  modified_base 3: mod_base = OTHER; note = 2'-O-methylcytidine-3'-phosphate
  modified_base 4: mod_base = OTHER; note = 2'-O-methyladenosine-3'-phosphate
  modified_base 5: mod_base = OTHER; note = 2'-O-methyladenosine-3'-phosphate
  modified_base 6: mod_base = OTHER; note = 2'-O-methyluridine-3'-phosphate
  modified_base 7: mod_base = OTHER; note = 2'-deoxy-2'-fluorouridine-3'-phosphate
  modified_base 8: mod_base = OTHER; note = 2'-O-methyluridine-3'-phosphate
  modified_base 9: mod_base = OTHER; note = 2'-deoxy-2'-fluoroadenosine-3'-phosphate
  modified_base 10: mod_base = OTHER; note = 2'-deoxy-2'-fluoroguanosine-3'-phosphate
  modified_base 11: mod_base = OTHER; note = 2'-deoxy-2'-fluorouridine-3'-phosphate
  modified_base 12: mod_base = OTHER; note = 2'-O-methylguanosine-3'-phosphate
  modified_base 13: mod_base = OTHER; note = 2'-O-methyladenosine-3'-phosphate
  modified_base 14: mod_base = OTHER; note = 2'-O-methyluridine-3'-phosphate
  modified_base 15: mod_base = OTHER; note = 2'-O-methyluridine-3'-phosphate
  modified_base 16: mod_base = OTHER; note = 2'-O-methyladenosine-3'-phosphate
  modified_base 17: mod_base = OTHER; note = 2'-O-methyluridine-3'-phosphate
  modified_base 18: mod_base = OTHER; note = 2'-O-methylguanosine-3'-phosphate
  modified_base 19: mod_base = OTHER; note = 2'-O-methylcytidine-3'-phosphate
  modified_base 20: mod_base = OTHER; note = 2'-O-methyluridine-3'-phosphate
  modified_base 21: mod_base = OTHER; note = 2'-O-methyladenosine
tacaatttagtgattatgcta

SEQ ID NO: 3860 - RNA, 21 nt, synthetic construct
  source 1..21: mol_type = other RNA
  modified_base 1: mod_base = OTHER; note = 2'-O-methyladenosine-3'-phosphate
  modified_base 2: mod_base = OTHER; note = 2'-O-methylcytidine-3'-phosphate
  modified_base 3: mod_base = OTHER; note = 2'-O-methyladenosine-3'-phosphate
  modified_base 4: mod_base = OTHER; note = 2'-O-methyladenosine-3'-phosphate
  modified_base 5: mod_base = OTHER; note = 2'-O-methyluridine-3'-phosphate
  modified_base 6: mod_base = OTHER; note = 2'-O-methyluridine-3'-phosphate
  modified_base 7: mod_base = OTHER; note = 2'-deoxy-2'-fluorouridine-3'-phosphate
  modified_base 8: mod_base = OTHER; note = 2'-O-methyladenosine-3'-phosphate
  modified_base 9: mod_base = OTHER; note = 2'-deoxy-2'-fluoroguanosine-3'-phosphate
  modified_base 10: mod_base = OTHER; note = 2'-deoxy-2'-fluorouridine-3'-phosphate
  modified_base 11: mod_base = OTHER; note = 2'-deoxy-2'-fluoroguanosine-3'-phosphate
  modified_base 12: mod_base = OTHER; note = 2'-O-methyladenosine-3'-phosphate
  modified_base 13: mod_base = OTHER; note = 2'-O-methyluridine-3'-phosphate
  modified_base 14: mod_base = OTHER; note = 2'-O-methyluridine-3'-phosphate
  modified_base 15: mod_base = OTHER; note = 2'-O-methyladenosine-3'-phosphate
  modified_base 16: mod_base = OTHER; note = 2'-O-methyluridine-3'-phosphate
  modified_base 17: mod_base = OTHER; note = 2'-O-methylguanosine-3'-phosphate
  modified_base 18: mod_base = OTHER; note = 2'-O-methylcytidine-3'-phosphate
  modified_base 19: mod_base = OTHER; note = 2'-O-methyluridine-3'-phosphate
  modified_base 20: mod_base = OTHER; note = 2'-O-methyluridine-3'-phosphate
  modified_base 21: mod_base = OTHER; note = 2'-O-methyladenosine
acaatttagtgattatgctta

SEQ ID NO: 3861 - RNA, 21 nt, synthetic construct
  source 1..21: mol_type = other RNA
  modified_base 1: mod_base = OTHER; note = 2'-O-methyladenosine-3'-phosphate
  modified_base 2: mod_base = OTHER; note = 2'-O-methylguanosine-3'-phosphate
  modified_base 3: mod_base = OTHER; note = 2'-O-methyluridine-3'-phosphate
  modified_base 4: mod_base = OTHER; note = 2'-O-methylguanosine-3'-phosphate
  modified_base 5: mod_base = OTHER; note = 2'-O-methyladenosine-3'-phosphate
  modified_base 6: mod_base = OTHER; note = 2'-O-methyluridine-3'-phosphate
  modified_base 7: mod_base = OTHER; note = 2'-deoxy-2'-fluorouridine-3'-phosphate
  modified_base 8: mod_base = OTHER; note = 2'-O-methyladenosine-3'-phosphate
  modified_base 9: mod_base = OTHER; note = 2'-deoxy-2'-fluorouridine-3'-phosphate
  modified_base 10: mod_base = OTHER; note = 2'-deoxy-2'-fluoroguanosine-3'-phosphate
  modified_base 11: mod_base = OTHER; note = 2'-deoxy-2'-fluorocytidine-3'-phosphate
  modified_base 12: mod_base = OTHER; note = 2'-O-methyluridine-3'-phosphate
  modified_base 13: mod_base = OTHER; note = 2'-O-methyluridine-3'-phosphate
  modified_base 14: mod_base = OTHER; note = 2'-O-methylcytidine-3'-phosphate
  modified_base 15: mod_base = OTHER; note = 2'-O-methyladenosine-3'-phosphate
  modified_base 16: mod_base = OTHER; note = 2'-O-methyluridine-3'-phosphate
  modified_base 17: mod_base = OTHER; note = 2'-O-methyluridine-3'-phosphate
  modified_base 18: mod_base = OTHER; note = 2'-O-methyluridine-3'-phosphate
  modified_base 19: mod_base = OTHER; note = 2'-O-methylcytidine-3'-phosphate
  modified_base 20: mod_base = OTHER; note = 2'-O-methyladenosine-3'-phosphate
  modified_base 21: mod_base = OTHER; note = 2'-O-methyladenosine
agtgattatgcttcatttcaa

SEQ ID NO: 3862 - RNA, 21 nt, synthetic construct
  source 1..21: mol_type = other RNA
  modified_base 1: mod_base = OTHER; note = 2'-O-methylguanosine-3'-phosphate
  modified_base 2: mod_base = OTHER; note = 2'-O-methyluridine-3'-phosphate
  modified_base 3: mod_base = OTHER; note = 2'-O-methylguanosine-3'-phosphate
  modified_base 4: mod_base = OTHER; note = 2'-O-methyladenosine-3'-phosphate
  modified_base 5: mod_base = OTHER; note = 2'-O-methyluridine-3'-phosphate
  modified_base 6: mod_base = OTHER; note = 2'-O-methyluridine-3'-phosphate
  modified_base 7: mod_base = OTHER; note = 2'-deoxy-2'-fluoroadenosine-3'-phosphate
  modified_base 8: mod_base = OTHER; note = 2'-O-methyluridine-3'-phosphate
  modified_base 9: mod_base = OTHER; note = 2'-deoxy-2'-fluoroguanosine-3'-phosphate
  modified_base 10: mod_base = OTHER; note = 2'-deoxy-2'-fluorocytidine-3'-phosphate
  modified_base 11: mod_base = OTHER; note = 2'-deoxy-2'-fluorouridine-3'-phosphate
  modified_base 12: mod_base = OTHER; note = 2'-O-methyluridine-3'-phosphate
  modified_base 13: mod_base = OTHER; note = 2'-O-methylcytidine-3'-phosphate
  modified_base 14: mod_base = OTHER; note = 2'-O-methyladenosine-3'-phosphate
  modified_base 15: mod_base = OTHER; note = 2'-O-methyluridine-3'-phosphate
  modified_base 16: mod_base = OTHER; note = 2'-O-methyluridine-3'-phosphate
  modified_base 17: mod_base = OTHER; note = 2'-O-methyluridine-3'-phosphate
  modified_base 18: mod_base = OTHER; note = 2'-O-methylcytidine-3'-phosphate
  modified_base 19: mod_base = OTHER; note = 2'-O-methyladenosine-3'-phosphate
  modified_base 20: mod_base = OTHER; note = 2'-O-methylcytidine-3'-phosphate
  modified_base 21: mod_base = OTHER; note = 2'-O-methyladenosine
gtgattatgcttcatttcaca

SEQ ID NO: 3863 - RNA, 21 nt, synthetic construct
  source 1..21: mol_type = other RNA
  modified_base 1: mod_base = OTHER; note = 2'-O-methyluridine-3'-phosphate
  modified_base 2: mod_base = OTHER; note = 2'-O-methylguanosine-3'-phosphate
  modified_base 3: mod_base = OTHER; note = 2'-O-methyladenosine-3'-phosphate
  modified_base 4: mod_base = OTHER; note = 2'-O-methyluridine-3'-phosphate
  modified_base 5: mod_base = OTHER; note = 2'-O-methyluridine-3'-phosphate
  modified_base 6: mod_base = OTHER; note = 2'-O-methyladenosine-3'-phosphate
  modified_base 7: mod_base = OTHER; note = 2'-deoxy-2'-fluorouridine-3'-phosphate
  modified_base 8: mod_base = OTHER; note = 2'-O-methylguanosine-3'-phosphate
  modified_base 9: mod_base = OTHER; note = 2'-deoxy-2'-fluorocytidine-3'-phosphate
  modified_base 10: mod_base = OTHER; note = 2'-deoxy-2'-fluorouridine-3'-phosphate
  modified_base 11: mod_base = OTHER; note = 2'-deoxy-2'-fluorouridine-3'-phosphate
  modified_base 12: mod_base = OTHER; note = 2'-O-methylcytidine-3'-phosphate
  modified_base 13: mod_base = OTHER; note = 2'-O-methyladenosine-3'-phosphate
  modified_base 14: mod_base = OTHER; note = 2'-O-methyluridine-3'-phosphate
  modified_base 15: mod_base = OTHER; note = 2'-O-methyluridine-3'-phosphate
  modified_base 16: mod_base = OTHER; note = 2'-O-methyluridine-3'-phosphate
  modified_base 17: mod_base = OTHER; note = 2'-O-methylcytidine-3'-phosphate
  modified_base 18: mod_base = OTHER; note = 2'-O-methyladenosine-3'-phosphate
  modified_base 19: mod_base = OTHER; note = 2'-O-methylcytidine-3'-phosphate
  modified_base 20: mod_base = OTHER; note = 2'-O-methyluridine-3'-phosphate
  modified_base 21: mod_base = OTHER; note = 2'-O-methyladenosine
tgattatgcttcatttcacta

SEQ ID NO: 3864 - RNA, 21 nt, synthetic construct
  source 1..21: mol_type = other RNA
  modified_base 1: mod_base = OTHER; note = 2'-O-methylguanosine-3'-phosphate
  modified_base 2: mod_base = OTHER; note = 2'-O-methyladenosine-3'-phosphate
  modified_base 3: mod_base = OTHER; note = 2'-O-methyluridine-3'-phosphate
  modified_base 4: mod_base = OTHER; note = 2'-O-methyluridine-3'-phosphate
  modified_base 5: mod_base = OTHER; note = 2'-O-methyladenosine-3'-phosphate
  modified_base 6: mod_base = OTHER; note = 2'-O-methyluridine-3'-phosphate
  modified_base 7: mod_base = OTHER; note = 2'-deoxy-2'-fluoroguanosine-3'-phosphate
  modified_base 8: mod_base = OTHER; note = 2'-O-methylcytidine-3'-phosphate
  modified_base 9: mod_base = OTHER; note = 2'-deoxy-2'-fluorouridine-3'-phosphate
  modified_base 10: mod_base = OTHER; note = 2'-deoxy-2'-fluorouridine-3'-phosphate
  modified_base 11: mod_base = OTHER; note = 2'-deoxy-2'-fluorocytidine-3'-phosphate
  modified_base 12: mod_base = OTHER; note = 2'-O-methyladenosine-3'-phosphate
  modified_base 13: mod_base = OTHER; note = 2'-O-methyluridine-3'-phosphate
  modified_base 14: mod_base = OTHER; note = 2'-O-methyluridine-3'-phosphate
  modified_base 15: mod_base = OTHER; note = 2'-O-methyluridine-3'-phosphate
  modified_base 16: mod_base = OTHER; note = 2'-O-methylcytidine-3'-phosphate
  modified_base 17: mod_base = OTHER; note = 2'-O-methyladenosine-3'-phosphate
  modified_base 18: mod_base = OTHER; note = 2'-O-methylcytidine-3'-phosphate
  modified_base 19: mod_base = OTHER; note = 2'-O-methyluridine-3'-phosphate
  modified_base 20: mod_base = OTHER; note = 2'-O-methyladenosine-3'-phosphate
  modified_base 21: mod_base = OTHER; note = 2'-O-methyladenosine
gattatgcttcatttcactaa

SEQ ID NO: 3865 - RNA, 21 nt, synthetic construct
  source 1..21: mol_type = other RNA
  modified_base 1: mod_base = OTHER; note = 2'-O-methyladenosine-3'-phosphate
  modified_base 2: mod_base = OTHER; note = 2'-O-methyluridine-3'-phosphate
  modified_base 3: mod_base = OTHER; note = 2'-O-methyluridine-3'-phosphate
  modified_base 4: mod_base = OTHER; note = 2'-O-methyladenosine-3'-phosphate
  modified_base 5: mod_base = OTHER; note = 2'-O-methyluridine-3'-phosphate
  modified_base 6: mod_base = OTHER; note = 2'-O-methylguanosine-3'-phosphate
  modified_base 7: mod_base = OTHER; note = 2'-deoxy-2'-fluorocytidine-3'-phosphate
  modified_base 8: mod_base = OTHER; note = 2'-O-methyluridine-3'-phosphate
  modified_base 9: mod_base = OTHER; note = 2'-deoxy-2'-fluorouridine-3'-phosphate
  modified_base 10: mod_base = OTHER; note = 2'-deoxy-2'-fluorocytidine-3'-phosphate
  modified_base 11: mod_base = OTHER; note = 2'-deoxy-2'-fluoroadenosine-3'-phosphate
  modified_base 12: mod_base = OTHER; note = 2'-O-methyluridine-3'-phosphate
  modified_base 13: mod_base = OTHER; note = 2'-O-methyluridine-3'-phosphate
  modified_base 14: mod_base = OTHER; note = 2'-O-methyluridine-3'-phosphate
  modified_base 15: mod_base = OTHER; note = 2'-O-methylcytidine-3'-phosphate
  modified_base 16: mod_base = OTHER; note = 2'-O-methyladenosine-3'-phosphate
  modified_base 17: mod_base = OTHER; note = 2'-O-methylcytidine-3'-phosphate
  modified_base 18: mod_base = OTHER; note = 2'-O-methyluridine-3'-phosphate
  modified_base 19: mod_base = OTHER; note = 2'-O-methyladenosine-3'-phosphate
  modified_base 20: mod_base = OTHER; note = 2'-O-methyluridine-3'-phosphate
  modified_base 21: mod_base = OTHER; note = 2'-O-methyladenosine
attatgcttcatttcactata

SEQ ID NO: 3866 - RNA, 21 nt, synthetic construct
  source 1..21: mol_type = other RNA
  modified_base 1: mod_base = OTHER; note = 2'-O-methyluridine-3'-phosphate
  modified_base 2: mod_base = OTHER; note = 2'-O-methyluridine-3'-phosphate
  modified_base 3: mod_base = OTHER; note = 2'-O-methyladenosine-3'-phosphate
  modified_base 4: mod_base = OTHER; note = 2'-O-methyluridine-3'-phosphate
  modified_base 5: mod_base = OTHER; note = 2'-O-methylguanosine-3'-phosphate
  modified_base 6: mod_base = OTHER; note = 2'-O-methylcytidine-3'-phosphate
  modified_base 7: mod_base = OTHER; note = 2'-deoxy-2'-fluorouridine-3'-phosphate
  modified_base 8: mod_base = OTHER; note = 2'-O-methyluridine-3'-phosphate
  modified_base 9: mod_base = OTHER; note = 2'-deoxy-2'-fluorocytidine-3'-phosphate
  modified_base 10: mod_base = OTHER; note = 2'-deoxy-2'-fluoroadenosine-3'-phosphate
  modified_base 11: mod_base = OTHER; note = 2'-deoxy-2'-fluorouridine-3'-phosphate
  modified_base 12: mod_base = OTHER; note = 2'-O-methyluridine-3'-phosphate
  modified_base 13: mod_base = OTHER; note = 2'-O-methyluridine-3'-phosphate
  modified_base 14: mod_base = OTHER; note = 2'-O-methylcytidine-3'-phosphate
  modified_base 15: mod_base = OTHER; note = 2'-O-methyladenosine-3'-phosphate
  modified_base 16: mod_base = OTHER; note = 2'-O-methylcytidine-3'-phosphate
  modified_base 17: mod_base = OTHER; note = 2'-O-methyluridine-3'-phosphate
  modified_base 18: mod_base = OTHER; note = 2'-O-methyladenosine-3'-phosphate
  modified_base 19: mod_base = OTHER; note = 2'-O-methyluridine-3'-phosphate
  modified_base 20: mod_base = OTHER; note = 2'-O-methylguanosine-3'-phosphate
  modified_base 21: mod_base = OTHER; note = 2'-O-methyladenosine
ttatgcttcatttcactatga

SEQ ID NO: 3867 - RNA, 21 nt, synthetic construct
  source 1..21: mol_type = other RNA
  modified_base 1: mod_base = OTHER; note = 2'-O-methyluridine-3'-phosphate
  modified_base 2: mod_base = OTHER; note = 2'-O-methyladenosine-3'-phosphate
  modified_base 3: mod_base = OTHER; note = 2'-O-methyluridine-3'-phosphate
  modified_base 4: mod_base = OTHER; note = 2'-O-methylguanosine-3'-phosphate
  modified_base 5: mod_base = OTHER; note = 2'-O-methylcytidine-3'-phosphate
  modified_base 6: mod_base = OTHER; note = 2'-O-methyluridine-3'-phosphate
  modified_base 7: mod_base = OTHER; note = 2'-deoxy-2'-fluorouridine-3'-phosphate
  modified_base 8: mod_base = OTHER; note = 2'-O-methylcytidine-3'-phosphate
  modified_base 9: mod_base = OTHER; note = 2'-deoxy-2'-fluoroadenosine-3'-phosphate
  modified_base 10: mod_base = OTHER; note = 2'-deoxy-2'-fluorouridine-3'-phosphate
  modified_base 11: mod_base = OTHER; note = 2'-deoxy-2'-fluorouridine-3'-phosphate
  modified_base 12: mod_base = OTHER; note = 2'-O-methyluridine-3'-phosphate
  modified_base 13: mod_base = OTHER; note = 2'-O-methylcytidine-3'-phosphate
  modified_base 14: mod_base = OTHER; note = 2'-O-methyladenosine-3'-phosphate
  modified_base 15: mod_base = OTHER; note = 2'-O-methylcytidine-3'-phosphate
  modified_base 16: mod_base = OTHER; note = 2'-O-methyluridine-3'-phosphate
  modified_base 17: mod_base = OTHER; note = 2'-O-methyladenosine-3'-phosphate
  modified_base 18: mod_base = OTHER; note = 2'-O-methyluridine-3'-phosphate
  modified_base 19: mod_base = OTHER; note = 2'-O-methylguanosine-3'-phosphate
  modified_base 20: mod_base = OTHER; note = 2'-O-methylguanosine-3'-phosphate
  modified_base 21: mod_base = OTHER; note = 2'-O-methyladenosine
tatgcttcatttcactatgga

SEQ ID NO: 3868 - RNA, 21 nt, synthetic construct
  source 1..21: mol_type = other RNA
  modified_base 1: mod_base = OTHER; note = 2'-O-methyladenosine-3'-phosphate
  modified_base 2: mod_base = OTHER; note = 2'-O-methyluridine-3'-phosphate
  modified_base 3: mod_base = OTHER; note = 2'-O-methylguanosine-3'-phosphate
  modified_base 4: mod_base = OTHER; note = 2'-O-methylcytidine-3'-phosphate
  modified_base 5: mod_base = OTHER; note = 2'-O-methyluridine-3'-phosphate
  modified_base 6: mod_base = OTHER; note = 2'-O-methyluridine-3'-phosphate
  modified_base 7: mod_base = OTHER; note = 2'-deoxy-2'-fluorocytidine-3'-phosphate
  modified_base 8: mod_base = OTHER; note = 2'-O-methyladenosine-3'-phosphate
  modified_base 9: mod_base = OTHER; note = 2'-deoxy-2'-fluorouridine-3'-phosphate
  modified_base 10: mod_base = OTHER; note = 2'-deoxy-2'-fluorouridine-3'-phosphate
  modified_base 11: mod_base = OTHER; note = 2'-deoxy-2'-fluorouridine-3'-phosphate
  modified_base 12: mod_base = OTHER; note = 2'-O-methylcytidine-3'-phosphate
  modified_base 13: mod_base = OTHER; note = 2'-O-methyladenosine-3'-phosphate
  modified_base 14: mod_base = OTHER; note = 2'-O-methylcytidine-3'-phosphate
  modified_base 15: mod_base = OTHER; note = 2'-O-methyluridine-3'-phosphate
  modified_base 16: mod_base = OTHER; note = 2'-O-methyladenosine-3'-phosphate
  modified_base 17: mod_base = OTHER; note = 2'-O-methyluridine-3'-phosphate
  modified_base 18: mod_base = OTHER; note = 2'-O-methylguanosine-3'-phosphate
  modified_base 19: mod_base = OTHER; note = 2'-O-methylguanosine-3'-phosphate
  modified_base 20: mod_base = OTHER; note = 2'-O-methyladenosine-3'-phosphate
  modified_base 21: mod_base = OTHER; note = 2'-O-methyladenosine
atgcttcatttcactatggaa

SEQ ID NO: 3869 - RNA, 21 nt, synthetic construct
  source 1..21: mol_type = other RNA
  modified_base 1: mod_base = OTHER; note = 2'-O-methyluridine-3'-phosphate
  modified_base 2: mod_base = OTHER; note = 2'-O-methylguanosine-3'-phosphate
  modified_base 3: mod_base = OTHER; note = 2'-O-methylcytidine-3'-phosphate
  modified_base 4: mod_base = OTHER; note = 2'-O-methyluridine-3'-phosphate
  modified_base 5: mod_base = OTHER; note = 2'-O-methyluridine-3'-phosphate
  modified_base 6: mod_base = OTHER; note = 2'-O-methylcytidine-3'-phosphate
  modified_base 7: mod_base = OTHER; note = 2'-deoxy-2'-fluoroadenosine-3'-phosphate
  modified_base 8: mod_base = OTHER; note = 2'-O-methyluridine-3'-phosphate
  modified_base 9: mod_base = OTHER; note = 2'-deoxy-2'-fluorouridine-3'-phosphate
  modified_base 10: mod_base = OTHER; note = 2'-deoxy-2'-fluorouridine-3'-phosphate
  modified_base 11: mod_base = OTHER; note = 2'-deoxy-2'-fluorocytidine-3'-phosphate
  modified_base 12: mod_base = OTHER; note = 2'-O-methyladenosine-3'-phosphate
  modified_base 13: mod_base = OTHER; note = 2'-O-methylcytidine-3'-phosphate
  modified_base 14: mod_base = OTHER; note = 2'-O-methyluridine-3'-phosphate
  modified_base 15: mod_base = OTHER; note = 2'-O-methyladenosine-3'-phosphate
  modified_base 16: mod_base = OTHER; note = 2'-O-methyluridine-3'-phosphate
  modified_base 17: mod_base = OTHER; note = 2'-O-methylguanosine-3'-phosphate
  modified_base 18: mod_base = OTHER; note = 2'-O-methylguanosine-3'-phosphate
  modified_base 19: mod_base = OTHER; note = 2'-O-methyladenosine-3'-phosphate
  modified_base 20: mod_base = OTHER; note = 2'-O-methyladenosine-3'-phosphate
  modified_base 21: mod_base = OTHER; note = 2'-O-methyladenosine
tgcttcatttcactatggaaa

SEQ ID NO: 3870 - RNA, 21 nt, synthetic construct
  source 1..21: mol_type = other RNA
  modified_base 1: mod_base = OTHER; note = 2'-O-methylguanosine-3'-phosphate
  modified_base 2: mod_base = OTHER; note = 2'-O-methylcytidine-3'-phosphate
  modified_base 3: mod_base = OTHER; note = 2'-O-methyluridine-3'-phosphate
  modified_base 4: mod_base = OTHER; note = 2'-O-methyluridine-3'-phosphate
  modified_base 5: mod_base = OTHER; note = 2'-O-methylcytidine-3'-phosphate
  modified_base 6: mod_base = OTHER; note = 2'-O-methyladenosine-3'-phosphate
  modified_base 7: mod_base = OTHER; note = 2'-deoxy-2'-fluorouridine-3'-phosphate
  modified_base 8: mod_base = OTHER; note = 2'-O-methyluridine-3'-phosphate
  modified_base 9: mod_base = OTHER; note = 2'-deoxy-2'-fluorouridine-3'-phosphate
  modified_base 10: mod_base = OTHER; note = 2'-deoxy-2'-fluorocytidine-3'-phosphate
  modified_base 11: mod_base = OTHER; note = 2'-deoxy-2'-fluoroadenosine-3'-phosphate
  modified_base 12: mod_base = OTHER; note = 2'-O-methylcytidine-3'-phosphate
  modified_base 13: mod_base = OTHER; note = 2'-O-methyluridine-3'-phosphate
  modified_base 14: mod_base = OTHER; note = 2'-O-methyladenosine-3'-phosphate
  modified_base 15: mod_base = OTHER; note = 2'-O-methyluridine-3'-phosphate
  modified_base 16: mod_base = OTHER; note = 2'-O-methylguanosine-3'-phosphate
  modified_base 17: mod_base = OTHER; note = 2'-O-methylguanosine-3'-phosphate
  modified_base 18: mod_base = OTHER; note = 2'-O-methyladenosine-3'-phosphate
  modified_base 19: mod_base = OTHER; note = 2'-O-methyladenosine-3'-phosphate
  modified_base 20: mod_base = OTHER; note = 2'-O-methyladenosine-3'-phosphate
  modified_base 21: mod_base = OTHER; note = 2'-O-methyladenosine
gcttcatttcactatggaaaa

SEQ ID NO: 3871 - RNA, 21 nt, synthetic construct
  source 1..21: mol_type = other RNA
  modified_base 1: mod_base = OTHER; note = 2'-O-methylcytidine-3'-phosphate
  modified_base 2: mod_base = OTHER; note = 2'-O-methyluridine-3'-phosphate
  modified_base 3: mod_base = OTHER; note = 2'-O-methyluridine-3'-phosphate
  modified_base 4: mod_base = OTHER; note = 2'-O-methylcytidine-3'-phosphate
  modified_base 5: mod_base = OTHER; note = 2'-O-methyladenosine-3'-phosphate
  modified_base 6: mod_base = OTHER; note = 2'-O-methyluridine-3'-phosphate
  modified_base 7: mod_base = OTHER; note = 2'-deoxy-2'-fluorouridine-3'-phosphate
  modified_base 8: mod_base = OTHER; note = 2'-O-methyluridine-3'-phosphate
  modified_base 9: mod_base = OTHER; note = 2'-deoxy-2'-fluorocytidine-3'-phosphate
  modified_base 10: mod_base = OTHER; note = 2'-deoxy-2'-fluoroadenosine-3'-phosphate
  modified_base 11: mod_base = OTHER; note = 2'-deoxy-2'-fluorocytidine-3'-phosphate
  modified_base 12: mod_base = OTHER; note = 2'-O-methyluridine-3'-phosphate
  modified_base 13: mod_base = OTHER; note = 2'-O-methyladenosine-3'-phosphate
  modified_base 14: mod_base = OTHER; note = 2'-O-methyluridine-3'-phosphate
  modified_base 15: mod_base = OTHER; note = 2'-O-methylguanosine-3'-phosphate
  modified_base 16: mod_base = OTHER; note = 2'-O-methylguanosine-3'-phosphate
  modified_base 17: mod_base = OTHER; note = 2'-O-methyladenosine-3'-phosphate
  modified_base 18: mod_base = OTHER; note = 2'-O-methyladenosine-3'-phosphate
  modified_base 19: mod_base = OTHER; note = 2'-O-methyladenosine-3'-phosphate
  modified_base 20: mod_base = OTHER; note = 2'-O-methyluridine-3'-phosphate
  modified_base 21: mod_base = OTHER; note = 2'-O-methyladenosine
cttcatttcactatggaaata

SEQ ID NO: 3872 - RNA, 21 nt, synthetic construct
  source 1..21: mol_type = other RNA
  modified_base 1: mod_base = OTHER; note = 2'-O-methyluridine-3'-phosphate
  modified_base 2: mod_base = OTHER; note = 2'-O-methyluridine-3'-phosphate
  modified_base 3: mod_base = OTHER; note = 2'-O-methylcytidine-3'-phosphate
  modified_base 4: mod_base = OTHER; note = 2'-O-methyladenosine-3'-phosphate
  modified_base 5: mod_base = OTHER; note = 2'-O-methyluridine-3'-phosphate
  modified_base 6: mod_base = OTHER; note = 2'-O-methyluridine-3'-phosphate
  modified_base 7: mod_base = OTHER; note = 2'-deoxy-2'-fluorouridine-3'-phosphate
  modified_base 8: mod_base = OTHER; note = 2'-O-methylcytidine-3'-phosphate
  modified_base 9: mod_base = OTHER; note = 2'-deoxy-2'-fluoroadenosine-3'-phosphate
  modified_base 10: mod_base = OTHER; note = 2'-deoxy-2'-fluorocytidine-3'-phosphate
  modified_base 11: mod_base = OTHER; note = 2'-deoxy-2'-fluorouridine-3'-phosphate
  modified_base 12: mod_base = OTHER; note = 2'-O-methyladenosine-3'-phosphate
  modified_base 13: mod_base = OTHER; note = 2'-O-methyluridine-3'-phosphate
  modified_base 14: mod_base = OTHER; note = 2'-O-methylguanosine-3'-phosphate
  modified_base 15: mod_base = OTHER; note = 2'-O-methylguanosine-3'-phosphate
  modified_base 16: mod_base = OTHER; note = 2'-O-methyladenosine-3'-phosphate
  modified_base 17: mod_base = OTHER; note = 2'-O-methyladenosine-3'-phosphate
  modified_base 18: mod_base = OTHER; note = 2'-O-methyladenosine-3'-phosphate
  modified_base 19: mod_base = OTHER; note = 2'-O-methyluridine-3'-phosphate
  modified_base 20: mod_base = OTHER; note = 2'-O-methyladenosine-3'-phosphate
  modified_base 21: mod_base = OTHER; note = 2'-O-methyladenosine
ttcatttcactatggaaataa

SEQ ID NO: 3873 - RNA, 21 nt, synthetic construct
  source 1..21: mol_type = other RNA
  modified_base 1: mod_base = OTHER; note = 2'-O-methyluridine-3'-phosphate
  modified_base 2: mod_base = OTHER; note = 2'-O-methylcytidine-3'-phosphate
  modified_base 3: mod_base = OTHER; note = 2'-O-methyladenosine-3'-phosphate
  modified_base 4: mod_base = OTHER; note = 2'-O-methyluridine-3'-phosphate
  modified_base 5: mod_base = OTHER; note = 2'-O-methyluridine-3'-phosphate
  modified_base 6: mod_base = OTHER; note = 2'-O-methyluridine-3'-phosphate
  modified_base 7: mod_base = OTHER; note = 2'-deoxy-2'-fluorocytidine-3'-phosphate
  modified_base 8: mod_base = OTHER; note = 2'-O-methyladenosine-3'-phosphate
  modified_base 9: mod_base = OTHER; note = 2'-deoxy-2'-fluorocytidine-3'-phosphate
  modified_base 10: mod_base = OTHER; note = 2'-deoxy-2'-fluorouridine-3'-phosphate
  modified_base 11: mod_base = OTHER; note = 2'-deoxy-2'-fluoroadenosine-3'-phosphate
  modified_base 12: mod_base = OTHER; note = 2'-O-methyluridine-3'-phosphate
  modified_base 13: mod_base = OTHER; note = 2'-O-methylguanosine-3'-phosphate
  modified_base 14: mod_base = OTHER; note = 2'-O-methylguanosine-3'-phosphate
  modified_base 15: mod_base = OTHER; note = 2'-O-methyladenosine-3'-phosphate
  modified_base 16: mod_base = OTHER; note = 2'-O-methyladenosine-3'-phosphate
  modified_base 17: mod_base = OTHER; note = 2'-O-methyladenosine-3'-phosphate
  modified_base 18: mod_base = OTHER; note = 2'-O-methyluridine-3'-phosphate
  modified_base 19: mod_base = OTHER; note = 2'-O-methyladenosine-3'-phosphate
  modified_base 20: mod_base = OTHER; note = 2'-O-methyluridine-3'-phosphate
  modified_base 21: mod_base = OTHER; note = 2'-O-methyladenosine
tcatttcactatggaaatata

SEQ ID NO: 3874 - RNA, 21 nt, synthetic construct
  source 1..21: mol_type = other RNA
  modified_base 1: mod_base = OTHER; note = 2'-O-methyluridine-3'-phosphate
  modified_base 2: mod_base = OTHER; note = 2'-O-methyluridine-3'-phosphate
  modified_base 3: mod_base = OTHER; note = 2'-O-methyluridine-3'-phosphate
  modified_base 4: mod_base = OTHER; note = 2'-O-methylcytidine-3'-phosphate
  modified_base 5: mod_base = OTHER; note = 2'-O-methyladenosine-3'-phosphate
  modified_base 6: mod_base = OTHER; note = 2'-O-methylcytidine-3'-phosphate
  modified_base 7: mod_base = OTHER; note = 2'-deoxy-2'-fluorouridine-3'-phosphate
  modified_base 8: mod_base = OTHER; note = 2'-O-methyladenosine-3'-phosphate
  modified_base 9: mod_base = OTHER; note = 2'-deoxy-2'-fluorouridine-3'-phosphate
  modified_base 10: mod_base = OTHER; note = 2'-deoxy-2'-fluoroguanosine-3'-phosphate
  modified_base 11: mod_base = OTHER; note = 2'-deoxy-2'-fluoroguanosine-3'-phosphate
  modified_base 12: mod_base = OTHER; note = 2'-O-methyladenosine-3'-phosphate
  modified_base 13: mod_base = OTHER; note = 2'-O-methyladenosine-3'-phosphate
  modified_base 14: mod_base = OTHER; note = 2'-O-methyladenosine-3'-phosphate
  modified_base 15: mod_base = OTHER; note = 2'-O-methyluridine-3'-phosphate
  modified_base 16: mod_base = OTHER; note = 2'-O-methyladenosine-3'-phosphate
  modified_base 17: mod_base = OTHER; note = 2'-O-methyluridine-3'-phosphate
  modified_base 18: mod_base = OTHER; note = 2'-O-methylguanosine-3'-phosphate
  modified_base 19: mod_base = OTHER; note = 2'-O-methyluridine-3'-phosphate
  modified_base 20: mod_base = OTHER; note = 2'-O-methyluridine-3'-phosphate
  modified_base 21: mod_base = OTHER; note = 2'-O-methyladenosine
tttcactatggaaatatgtta

SEQ ID NO: 3875 - RNA, 21 nt, synthetic construct
  source 1..21: mol_type = other RNA
  modified_base 1: mod_base = OTHER; note = 2'-O-methyladenosine-3'-phosphate
  modified_base 2: mod_base = OTHER; note = 2'-O-methylcytidine-3'-phosphate
  modified_base 3: mod_base = OTHER; note = 2'-O-methyluridine-3'-phosphate
  modified_base 4: mod_base = OTHER; note = 2'-O-methyladenosine-3'-phosphate
  modified_base 5: mod_base = OTHER; note = 2'-O-methyluridine-3'-phosphate
  modified_base 6: mod_base = OTHER; note = 2'-O-methylguanosine-3'-phosphate
  modified_base 7: mod_base = OTHER; note = 2'-deoxy-2'-fluoroguanosine-3'-phosphate
  modified_base 8: mod_base = OTHER; note = 2'-O-methyladenosine-3'-phosphate
  modified_base 9: mod_base = OTHER; note = 2'-deoxy-2'-fluoroadenosine-3'-phosphate
  modified_base 10: mod_base = OTHER; note = 2'-deoxy-2'-fluoroadenosine-3'-phosphate
  modified_base 11: mod_base = OTHER; note = 2'-deoxy-2'-fluorouridine-3'-phosphate
  modified_base 12: mod_base = OTHER; note = 2'-O-methyladenosine-3'-phosphate
  modified_base 13: mod_base = OTHER; note = 2'-O-methyluridine-3'-phosphate
  modified_base 14: mod_base = OTHER; note = 2'-O-methylguanosine-3'-phosphate
  modified_base 15: mod_base = OTHER; note = 2'-O-methyluridine-3'-phosphate
  modified_base 16: mod_base = OTHER; note = 2'-O-methyluridine-3'-phosphate
  modified_base 17: mod_base = OTHER; note = 2'-O-methyladenosine-3'-phosphate
  modified_base 18: mod_base = OTHER; note = 2'-O-methylcytidine-3'-phosphate
  modified_base 19: mod_base = OTHER; note = 2'-O-methyluridine-3'-phosphate
  modified_base 20: mod_base = OTHER; note = 2'-O-methylguanosine-3'-phosphate
  modified_base 21: mod_base = OTHER; note = 2'-O-methyladenosine
actatggaaatatgttactga

SEQ ID NO: 3876 - RNA, 21 nt, synthetic construct
  source 1..21: mol_type = other RNA
  modified_base 1: mod_base = OTHER; note = 2'-O-methylcytidine-3'-phosphate
  modified_base 2: mod_base = OTHER; note = 2'-O-methyluridine-3'-phosphate
  modified_base 3: mod_base = OTHER; note = 2'-O-methyladenosine-3'-phosphate
  modified_base 4: mod_base = OTHER; note = 2'-O-methyluridine-3'-phosphate
  modified_base 5: mod_base = OTHER; note = 2'-O-methylguanosine-3'-phosphate
  modified_base 6: mod_base = OTHER; note = 2'-O-methylguanosine-3'-phosphate
  modified_base 7: mod_base = OTHER; note = 2'-deoxy-2'-fluoroadenosine-3'-phosphate
  modified_base 8: mod_base = OTHER; note = 2'-O-methyladenosine-3'-phosphate
  modified_base 9: mod_base = OTHER; note = 2'-deoxy-2'-fluoroadenosine-3'-phosphate
  modified_base 10: mod_base = OTHER; note = 2'-deoxy-2'-fluorouridine-3'-phosphate
  modified_base 11: mod_base = OTHER; note = 2'-deoxy-2'-fluoroadenosine-3'-phosphate
  modified_base 12: mod_base = OTHER; note = 2'-O-methyluridine-3'-phosphate
  modified_base 13: mod_base = OTHER; note = 2'-O-methylguanosine-3'-phosphate
  modified_base 14: mod_base = OTHER; note = 2'-O-methyluridine-3'-phosphate
  modified_base 15: mod_base = OTHER; note = 2'-O-methyluridine-3'-phosphate
  modified_base 16: mod_base = OTHER; note = 2'-O-methyladenosine-3'-phosphate
  modified_base 17: mod_base = OTHER; note = 2'-O-methylcytidine-3'-phosphate
  modified_base 18: mod_base = OTHER; note = 2'-O-methyluridine-3'-phosphate
  modified_base 19: mod_base = OTHER; note = 2'-O-methylguanosine-3'-phosphate
  modified_base 20: mod_base = OTHER; note = 2'-O-methyladenosine-3'-phosphate
  modified_base 21: mod_base = OTHER; note = 2'-O-methyladenosine
ctatggaaatatgttactgaa

SEQ ID NO: 3877 - RNA, 21 nt, synthetic construct
  source 1..21: mol_type = other RNA
  modified_base 1: mod_base = OTHER; note = 2'-O-methyluridine-3'-phosphate
  modified_base 2: mod_base = OTHER; note = 2'-O-methyladenosine-3'-phosphate
  modified_base 3: mod_base = OTHER; note = 2'-O-methyluridine-3'-phosphate
  modified_base 4: mod_base = OTHER; note = 2'-O-methylguanosine-3'-phosphate
  modified_base 5: mod_base = OTHER; note = 2'-O-methylguanosine-3'-phosphate
  modified_base 6: mod_base = OTHER; note = 2'-O-methyladenosine-3'-phosphate
  modified_base 7: mod_base = OTHER; note = 2'-deoxy-2'-fluoroadenosine-3'-phosphate
  modified_base 8: mod_base = OTHER; note = 2'-O-methyladenosine-3'-phosphate
  modified_base 9: mod_base = OTHER; note = 2'-deoxy-2'-fluorouridine-3'-phosphate
  modified_base 10: mod_base = OTHER; note = 2'-deoxy-2'-fluoroadenosine-3'-phosphate
  modified_base 11: mod_base = OTHER; note = 2'-deoxy-2'-fluorouridine-3'-phosphate
  modified_base 12: mod_base = OTHER; note = 2'-O-methylguanosine-3'-phosphate
  modified_base 13: mod_base = OTHER; note = 2'-O-methyluridine-3'-phosphate
  modified_base 14: mod_base = OTHER; note = 2'-O-methyluridine-3'-phosphate
  modified_base 15: mod_base = OTHER; note = 2'-O-methyladenosine-3'-phosphate
  modified_base 16: mod_base = OTHER; note = 2'-O-methylcytidine-3'-phosphate
  modified_base 17: mod_base = OTHER; note = 2'-O-methyluridine-3'-phosphate
  modified_base 18: mod_base = OTHER; note = 2'-O-methylguanosine-3'-phosphate
  modified_base 19: mod_base = OTHER; note = 2'-O-methyladenosine-3'-phosphate
  modified_base 20: mod_base = OTHER; note = 2'-O-methyladenosine-3'-phosphate
  modified_base 21: mod_base = OTHER; note = 2'-O-methyladenosine
tatggaaatatgttactgaaa

SEQ ID NO: 3878 - RNA, 21 nt, synthetic construct
  source 1..21: mol_type = other RNA
  modified_base 1: mod_base = OTHER; note = 2'-O-methyladenosine-3'-phosphate
  modified_base 2: mod_base = OTHER; note = 2'-O-methyluridine-3'-phosphate
  modified_base 3: mod_base = OTHER; note = 2'-O-methylguanosine-3'-phosphate
  modified_base 4: mod_base = OTHER; note = 2'-O-methylguanosine-3'-phosphate
  modified_base 5: mod_base = OTHER; note = 2'-O-methyladenosine-3'-phosphate
  modified_base 6: mod_base = OTHER; note = 2'-O-methyladenosine-3'-phosphate
  modified_base 7: mod_base = OTHER; note = 2'-deoxy-2'-fluoroadenosine-3'-phosphate
  modified_base 8: mod_base = OTHER; note = 2'-O-methyluridine-3'-phosphate
  modified_base 9: mod_base = OTHER; note = 2'-deoxy-2'-fluoroadenosine-3'-phosphate
  modified_base 10: mod_base = OTHER; note = 2'-deoxy-2'-fluorouridine-3'-phosphate
  modified_base 11: mod_base = OTHER; note = 2'-deoxy-2'-fluoroguanosine-3'-phosphate
  modified_base 12: mod_base = OTHER; note = 2'-O-methyluridine-3'-phosphate
  modified_base 13: mod_base = OTHER; note = 2'-O-methyluridine-3'-phosphate
  modified_base 14: mod_base = OTHER; note = 2'-O-methyladenosine-3'-phosphate
  modified_base 15: mod_base = OTHER; note = 2'-O-methylcytidine-3'-phosphate
  modified_base 16: mod_base = OTHER; note = 2'-O-methyluridine-3'-phosphate
  modified_base 17: mod_base = OTHER; note = 2'-O-methylguanosine-3'-phosphate
  modified_base 18: mod_base = OTHER; note = 2'-O-methyladenosine-3'-phosphate
  modified_base 19: mod_base = OTHER; note = 2'-O-methyladenosine-3'-phosphate
  modified_base 20: mod_base = OTHER; note = 2'-O-methyluridine-3'-phosphate
  modified_base 21: mod_base = OTHER; note = 2'-O-methyladenosine
atggaaatatgttactgaata

SEQ ID NO: 3879 - RNA, 21 nt, synthetic construct
  source 1..21: mol_type = other RNA
  modified_base 1: mod_base = OTHER; note = 2'-O-methyladenosine-3'-phosphate
  modified_base 2: mod_base = OTHER; note = 2'-O-methylcytidine-3'-phosphate
  modified_base 3: mod_base = OTHER; note = 2'-O-methyluridine-3'-phosphate
  modified_base 4: mod_base = OTHER; note = 2'-O-methylguanosine-3'-phosphate
  modified_base 5: mod_base = OTHER; note = 2'-O-methyladenosine-3'-phosphate
  modified_base 6: mod_base = OTHER; note = 2'-O-methylcytidine-3'-phosphate
  modified_base 7: mod_base = OTHER; note = 2'-deoxy-2'-fluoroadenosine-3'-phosphate
  modified_base 8: mod_base = OTHER; note = 2'-O-methylguanosine-3'-phosphate
  modified_base 9: mod_base = OTHER; note = 2'-deoxy-2'-fluorocytidine-3'-phosphate
  modified_base 10: mod_base = OTHER; note = 2'-deoxy-2'-fluorouridine-3'-phosphate
  modified_base 11: mod_base = OTHER; note = 2'-deoxy-2'-fluoroadenosine-3'-phosphate
  modified_base 12: mod_base = OTHER; note = 2'-O-methyluridine-3'-phosphate
  modified_base 13: mod_base = OTHER; note = 2'-O-methylguanosine-3'-phosphate
  modified_base 14: mod_base = OTHER; note = 2'-O-methylguanosine-3'-phosphate
  modified_base 15: mod_base = OTHER; note = 2'-O-methyladenosine-3'-phosphate
  modified_base 16: mod_base = OTHER; note = 2'-O-methylguanosine-3'-phosphate
  modified_base 17: mod_base = OTHER; note = 2'-O-methyluridine-3'-phosphate
  modified_base 18: mod_base = OTHER; note = 2'-O-methyluridine-3'-phosphate
  modified_base 19: mod_base = OTHER; note = 2'-O-methyluridine-3'-phosphate
  modified_base 20: mod_base = OTHER; note = 2'-O-methylguanosine-3'-phosphate
  modified_base 21: mod_base = OTHER; note = 2'-O-methyladenosine
actgacagctatggagtttga

SEQ ID NO: 3880 - RNA, 21 nt, synthetic construct
  source 1..21: mol_type = other RNA
  modified_base 1: mod_base = OTHER; note = 2'-O-methylcytidine-3'-phosphate
  modified_base 2: mod_base = OTHER; note = 2'-O-methyluridine-3'-phosphate
  modified_base 3: mod_base = OTHER; note = 2'-O-methylguanosine-3'-phosphate
  modified_base 4: mod_base = OTHER; note = 2'-O-methyladenosine-3'-phosphate
  modified_base 5: mod_base = OTHER; note = 2'-O-methylcytidine-3'-phosphate
  modified_base 6: mod_base = OTHER; note = 2'-O-methyladenosine-3'-phosphate
  modified_base 7: mod_base = OTHER; note = 2'-deoxy-2'-fluoroguanosine-3'-phosphate
  modified_base 8: mod_base = OTHER; note = 2'-O-methylcytidine-3'-phosphate
  modified_base 9: mod_base = OTHER; note = 2'-deoxy-2'-fluorouridine-3'-phosphate
  modified_base 10: mod_base = OTHER; note = 2'-deoxy-2'-fluoroadenosine-3'-phosphate
  modified_base 11: mod_base = OTHER; note = 2'-deoxy-2'-fluorouridine-3'-phosphate
  modified_base 12: mod_base = OTHER; note = 2'-O-methylguanosine-3'-phosphate
  modified_base 13: mod_base = OTHER; note = 2'-O-methylguanosine-3'-phosphate
  modified_base 14: mod_base = OTHER; note = 2'-O-methyladenosine-3'-phosphate
  modified_base 15: mod_base = OTHER; note = 2'-O-methylguanosine-3'-phosphate
  modified_base 16: mod_base = OTHER; note = 2'-O-methyluridine-3'-phosphate
  modified_base 17: mod_base = OTHER; note = 2'-O-methyluridine-3'-phosphate
  modified_base 18: mod_base = OTHER; note = 2'-O-methyluridine-3'-phosphate
  modified_base 19: mod_base = OTHER; note = 2'-O-methylguanosine-3'-phosphate
  modified_base 20: mod_base = OTHER; note = 2'-O-methylcytidine-3'-phosphate
  modified_base 21: mod_base = OTHER; note = 2'-O-methyladenosine
ctgacagctatggagtttgca

SEQ ID NO: 3881 - RNA, 21 nt, synthetic construct
  source 1..21: mol_type = other RNA
  modified_base 1: mod_base = OTHER; note = 2'-O-methyluridine-3'-phosphate
  modified_base 2: mod_base = OTHER; note = 2'-O-methylguanosine-3'-phosphate
  modified_base 3: mod_base = OTHER; note = 2'-O-methyladenosine-3'-phosphate
  modified_base 4: mod_base = OTHER; note = 2'-O-methylcytidine-3'-phosphate
  modified_base 5: mod_base = OTHER; note = 2'-O-methyladenosine-3'-phosphate
  modified_base 6: mod_base = OTHER; note = 2'-O-methylguanosine-3'-phosphate
  modified_base 7: mod_base = OTHER; note = 2'-deoxy-2'-fluorocytidine-3'-phosphate
  modified_base 8: mod_base = OTHER; note = 2'-O-methyluridine-3'-phosphate
  modified_base 9: mod_base = OTHER; note = 2'-deoxy-2'-fluoroadenosine-3'-phosphate
  modified_base 10: mod_base = OTHER; note = 2'-deoxy-2'-fluorouridine-3'-phosphate
  modified_base 11: mod_base = OTHER; note = 2'-deoxy-2'-fluoroguanosine-3'-phosphate
  modified_base 12: mod_base = OTHER; note = 2'-O-methylguanosine-3'-phosphate
  modified_base 13: mod_base = OTHER; note = 2'-O-methyladenosine-3'-phosphate
  modified_base 14: mod_base = OTHER; note = 2'-O-methylguanosine-3'-phosphate
  modified_base 15: mod_base = OTHER; note = 2'-O-methyluridine-3'-phosphate
  modified_base 16: mod_base = OTHER; note = 2'-O-methyluridine-3'-phosphate
  modified_base 17: mod_base = OTHER; note = 2'-O-methyluridine-3'-phosphate
  modified_base 18: mod_base = OTHER; note = 2'-O-methylguanosine-3'-phosphate
  modified_base 19: mod_base = OTHER; note = 2'-O-methylcytidine-3'-phosphate
  modified_base 20: mod_base = OTHER; note = 2'-O-methylguanosine-3'-phosphate
  modified_base 21: mod_base = OTHER; note = 2'-O-methyladenosine
tgacagctatggagtttgcga

SEQ ID NO: 3882 - RNA, 21 nt, synthetic construct
  source 1..21: mol_type = other RNA
  modified_base 1: mod_base = OTHER; note = 2'-O-methylguanosine-3'-phosphate
  modified_base 2: mod_base = OTHER; note = 2'-O-methyladenosine-3'-phosphate
  modified_base 3: mod_base = OTHER; note = 2'-O-methylcytidine-3'-phosphate
  modified_base 4: mod_base = OTHER; note = 2'-O-methyladenosine-3'-phosphate
  modified_base 5: mod_base = OTHER; note = 2'-O-methylguanosine-3'-phosphate
  modified_base 6: mod_base = OTHER; note = 2'-O-methylcytidine-3'-phosphate
  modified_base 7: mod_base = OTHER; note = 2'-deoxy-2'-fluorouridine-3'-phosphate
  modified_base 8: mod_base = OTHER; note = 2'-O-methyladenosine-3'-phosphate
  modified_base 9: mod_base = OTHER; note = 2'-deoxy-2'-fluorouridine-3'-phosphate
  modified_base 10: mod_base = OTHER; note = 2'-deoxy-2'-fluoroguanosine-3'-phosphate
  modified_base 11: mod_base = OTHER; note = 2'-deoxy-2'-fluoroguanosine-3'-phosphate
  modified_base 12: mod_base = OTHER; note = 2'-O-methyladenosine-3'-phosphate
  modified_base 13: mod_base = OTHER; note = 2'-O-methylguanosine-3'-phosphate
  modified_base 14: mod_base = OTHER; note = 2'-O-methyluridine-3'-phosphate
  modified_base 15: mod_base = OTHER; note = 2'-O-methyluridine-3'-phosphate
  modified_base 16: mod_base = OTHER; note = 2'-O-methyluridine-3'-phosphate
  modified_base 17: mod_base = OTHER; note = 2'-O-methylguanosine-3'-phosphate
  modified_base 18: mod_base = OTHER; note = 2'-O-methylcytidine-3'-phosphate
  modified_base 19: mod_base = OTHER; note = 2'-O-methylguanosine-3'-phosphate
  modified_base 20: mod_base = OTHER; note = 2'-O-methyluridine-3'-phosphate
  modified_base 21: mod_base = OTHER; note = 2'-O-methyladenosine
gacagctatggagtttgcgta

SEQ ID NO: 3883 - RNA, 21 nt, synthetic construct
  source 1..21: mol_type = other RNA
  modified_base 1: mod_base = OTHER; note = 2'-O-methyladenosine-3'-phosphate
  modified_base 2: mod_base = OTHER; note = 2'-O-methylcytidine-3'-phosphate
  modified_base 3: mod_base = OTHER; note = 2'-O-methyladenosine-3'-phosphate
  modified_base 4: mod_base = OTHER; note = 2'-O-methylguanosine-3'-phosphate
  modified_base 5: mod_base = OTHER; note = 2'-O-methylcytidine-3'-phosphate
  modified_base 6: mod_base = OTHER; note = 2'-O-methyluridine-3'-phosphate
  modified_base 7: mod_base = OTHER; note = 2'-deoxy-2'-fluoroadenosine-3'-phosphate
  modified_base 8: mod_base = OTHER; note = 2'-O-methyluridine-3'-phosphate
  modified_base 9: mod_base = OTHER; note = 2'-deoxy-2'-fluoroguanosine-3'-phosphate
  modified_base 10: mod_base = OTHER; note = 2'-deoxy-2'-fluoroguanosine-3'-phosphate
  modified_base 11: mod_base = OTHER; note = 2'-deoxy-2'-fluoroadenosine-3'-phosphate
  modified_base 12: mod_base = OTHER; note = 2'-O-methylguanosine-3'-phosphate
  modified_base 13: mod_base = OTHER; note = 2'-O-methyluridine-3'-phosphate
  modified_base 14: mod_base = OTHER; note = 2'-O-methyluridine-3'-phosphate
  modified_base 15: mod_base = OTHER; note = 2'-O-methyluridine-3'-phosphate
  modified_base 16: mod_base = OTHER; note = 2'-O-methylguanosine-3'-phosphate
  modified_base 17: mod_base = OTHER; note = 2'-O-methylcytidine-3'-phosphate
  modified_base 18: mod_base = OTHER; note = 2'-O-methylguanosine-3'-phosphate
  modified_base 19: mod_base = OTHER; note = 2'-O-methyluridine-3'-phosphate
  modified_base 20: mod_base = OTHER; note = 2'-O-methylguanosine-3'-phosphate
  modified_base 21: mod_base = OTHER; note = 2'-O-methyladenosine
acagctatggagtttgcgtga

SEQ ID NO: 3884 - RNA, 21 nt, synthetic construct
  source 1..21: mol_type = other RNA
  modified_base 1: mod_base = OTHER; note = 2'-O-methylcytidine-3'-phosphate
  modified_base 2: mod_base = OTHER; note = 2'-O-methyladenosine-3'-phosphate
  modified_base 3: mod_base = OTHER; note = 2'-O-methylguanosine-3'-phosphate
  modified_base 4: mod_base = OTHER; note = 2'-O-methylcytidine-3'-phosphate
  modified_base 5: mod_base = OTHER; note = 2'-O-methyluridine-3'-phosphate
  modified_base 6: mod_base = OTHER; note = 2'-O-methyladenosine-3'-phosphate
  modified_base 7: mod_base = OTHER; note = 2'-deoxy-2'-fluorouridine-3'-phosphate
  modified_base 8: mod_base = OTHER; note = 2'-O-methylguanosine-3'-phosphate
  modified_base 9: mod_base = OTHER; note = 2'-deoxy-2'-fluoroguanosine-3'-phosphate
  modified_base 10: mod_base = OTHER; note = 2'-deoxy-2'-fluoroadenosine-3'-phosphate
  modified_base 11: mod_base = OTHER; note = 2'-deoxy-2'-fluoroguanosine-3'-phosphate
  modified_base 12: mod_base = OTHER; note = 2'-O-methyluridine-3'-phosphate
  modified_base 13: mod_base = OTHER; note = 2'-O-methyluridine-3'-phosphate
  modified_base 14: mod_base = OTHER; note = 2'-O-methyluridine-3'-phosphate
  modified_base 15: mod_base = OTHER; note = 2'-O-methylguanosine-3'-phosphate
  modified_base 16: mod_base = OTHER; note = 2'-O-methylcytidine-3'-phosphate
  modified_base 17: mod_base = OTHER; note = 2'-O-methylguanosine-3'-phosphate
  modified_base 18: mod_base = OTHER; note = 2'-O-methyluridine-3'-phosphate
  modified_base 19: mod_base = OTHER; note = 2'-O-methylguanosine-3'-phosphate
  modified_base 20: mod_base = OTHER; note = 2'-O-methyluridine-3'-phosphate
  modified_base 21: mod_base = OTHER; note = 2'-O-methyladenosine
cagctatggagtttgcgtgta

SEQ ID NO: 3885 - RNA, 21 nt, synthetic construct
  source 1..21: mol_type = other RNA
  modified_base 1: mod_base = OTHER; note = 2'-O-methyladenosine-3'-phosphate
  modified_base 2: mod_base = OTHER; note = 2'-O-methylguanosine-3'-phosphate
  modified_base 3: mod_base = OTHER; note = 2'-O-methylcytidine-3'-phosphate
  modified_base 4: mod_base = OTHER; note = 2'-O-methyluridine-3'-phosphate
  modified_base 5: mod_base = OTHER; note = 2'-O-methyladenosine-3'-phosphate
  modified_base 6: mod_base = OTHER; note = 2'-O-methyluridine-3'-phosphate
  modified_base 7: mod_base = OTHER; note = 2'-deoxy-2'-fluoroguanosine-3'-phosphate
  modified_base 8: mod_base = OTHER; note = 2'-O-methylguanosine-3'-phosphate
  modified_base 9: mod_base = OTHER; note = 2'-deoxy-2'-fluoroadenosine-3'-phosphate
  modified_base 10: mod_base = OTHER; note = 2'-deoxy-2'-fluoroguanosine-3'-phosphate
  modified_base 11: mod_base = OTHER; note = 2'-deoxy-2'-fluorouridine-3'-phosphate
  modified_base 12: mod_base = OTHER; note = 2'-O-methyluridine-3'-phosphate
  modified_base 13: mod_base = OTHER; note = 2'-O-methyluridine-3'-phosphate
  modified_base 14: mod_base = OTHER; note = 2'-O-methylguanosine-3'-phosphate
  modified_base 15: mod_base = OTHER; note = 2'-O-methylcytidine-3'-phosphate
  modified_base 16: mod_base = OTHER; note = 2'-O-methylguanosine-3'-phosphate
  modified_base 17: mod_base = OTHER; note = 2'-O-methyluridine-3'-phosphate
  modified_base 18: mod_base = OTHER; note = 2'-O-methylguanosine-3'-phosphate
  modified_base 19: mod_base = OTHER; note = 2'-O-methyluridine-3'-phosphate
  modified_base 20: mod_base = OTHER; note = 2'-O-methyladenosine-3'-phosphate
  modified_base 21: mod_base = OTHER; note = 2'-O-methyladenosine
agctatggagtttgcgtgtaa

SEQ ID NO: 3886 - RNA, 21 nt, synthetic construct
  source 1..21: mol_type = other RNA
  modified_base 1: mod_base = OTHER; note = 2'-O-methylguanosine-3'-phosphate
  modified_base 2: mod_base = OTHER; note = 2'-O-methylcytidine-3'-phosphate
  modified_base 3: mod_base = OTHER; note = 2'-O-methyluridine-3'-phosphate
  modified_base 4: mod_base = OTHER; note = 2'-O-methyladenosine-3'-phosphate
  modified_base 5: mod_base = OTHER; note = 2'-O-methyluridine-3'-phosphate
  modified_base 6: mod_base = OTHER; note = 2'-O-methylguanosine-3'-phosphate
  modified_base 7: mod_base = OTHER; note = 2'-deoxy-2'-fluoroguanosine-3'-phosphate
  modified_base 8: mod_base = OTHER; note = 2'-O-methyladenosine-3'-phosphate
  modified_base 9: mod_base = OTHER; note = 2'-deoxy-2'-fluoroguanosine-3'-phosphate
  modified_base 10: mod_base = OTHER; note = 2'-deoxy-2'-fluorouridine-3'-phosphate
  modified_base 11: mod_base = OTHER; note = 2'-deoxy-2'-fluorouridine-3'-phosphate
  modified_base 12: mod_base = OTHER; note = 2'-O-methyluridine-3'-phosphate
  modified_base 13: mod_base = OTHER; note = 2'-O-methylguanosine-3'-phosphate
  modified_base 14: mod_base = OTHER; note = 2'-O-methylcytidine-3'-phosphate
  modified_base 15: mod_base = OTHER; note = 2'-O-methylguanosine-3'-phosphate
  modified_base 16: mod_base = OTHER; note = 2'-O-methyluridine-3'-phosphate
  modified_base 17: mod_base = OTHER; note = 2'-O-methylguanosine-3'-phosphate
  modified_base 18: mod_base = OTHER; note = 2'-O-methyluridine-3'-phosphate
  modified_base 19: mod_base = OTHER; note = 2'-O-methyladenosine-3'-phosphate
  modified_base 20: mod_base = OTHER; note = 2'-O-methylcytidine-3'-phosphate
  modified_base 21: mod_base = OTHER; note = 2'-O-methyladenosine
gctatggagtttgcgtgtaca

SEQ ID NO: 3887 - RNA, 21 nt, synthetic construct
  source 1..21: mol_type = other RNA
  modified_base 1: mod_base = OTHER; note = 2'-O-methylcytidine-3'-phosphate
  modified_base 2: mod_base = OTHER; note = 2'-O-methyluridine-3'-phosphate
  modified_base 3: mod_base = OTHER; note = 2'-O-methyladenosine-3'-phosphate
  modified_base 4: mod_base = OTHER; note = 2'-O-methyluridine-3'-phosphate
  modified_base 5: mod_base = OTHER; note = 2'-O-methylguanosine-3'-phosphate
  modified_base 6: mod_base = OTHER; note = 2'-O-methylguanosine-3'-phosphate
  modified_base 7: mod_base = OTHER; note = 2'-deoxy-2'-fluoroadenosine-3'-phosphate
  modified_base 8: mod_base = OTHER; note = 2'-O-methylguanosine-3'-phosphate
  modified_base 9: mod_base = OTHER; note = 2'-deoxy-2'-fluorouridine-3'-phosphate
  modified_base 10: mod_base = OTHER; note = 2'-deoxy-2'-fluorouridine-3'-phosphate
  modified_base 11: mod_base = OTHER; note = 2'-deoxy-2'-fluorouridine-3'-phosphate
  modified_base 12: mod_base = OTHER; note = 2'-O-methylguanosine-3'-phosphate
  modified_base 13: mod_base = OTHER; note = 2'-O-methylcytidine-3'-phosphate
  modified_base 14: mod_base = OTHER; note = 2'-O-methylguanosine-3'-phosphate
  modified_base 15: mod_base = OTHER; note = 2'-O-methyluridine-3'-phosphate
  modified_base 16: mod_base = OTHER; note = 2'-O-methylguanosine-3'-phosphate
  modified_base 17: mod_base = OTHER; note = 2'-O-methyluridine-3'-phosphate
  modified_base 18: mod_base = OTHER; note = 2'-O-methyladenosine-3'-phosphate
  modified_base 19: mod_base = OTHER; note = 2'-O-methylcytidine-3'-phosphate
  modified_base 20: mod_base = OTHER; note = 2'-O-methyluridine-3'-phosphate
  modified_base 21: mod_base = OTHER; note = 2'-O-methyladenosine
ctatggagtttgcgtgtacta

SEQ ID NO: 3888 - RNA, 21 nt, synthetic construct
  source 1..21: mol_type = other RNA
  modified_base 1: mod_base = OTHER; note = 2'-O-methyluridine-3'-phosphate
  modified_base 2: mod_base = OTHER; note = 2'-O-methyladenosine-3'-phosphate
  modified_base 3: mod_base = OTHER; note = 2'-O-methyluridine-3'-phosphate
  modified_base 4: mod_base = OTHER; note = 2'-O-methylguanosine-3'-phosphate
  modified_base 5: mod_base = OTHER; note = 2'-O-methylguanosine-3'-phosphate
  modified_base 6: mod_base = OTHER; note = 2'-O-methyladenosine-3'-phosphate
  modified_base 7: mod_base = OTHER; note = 2'-deoxy-2'-fluoroguanosine-3'-phosphate
  modified_base 8: mod_base = OTHER; note = 2'-O-methyluridine-3'-phosphate
  modified_base 9: mod_base = OTHER; note = 2'-deoxy-2'-fluorouridine-3'-phosphate
  modified_base 10: mod_base = OTHER; note = 2'-deoxy-2'-fluorouridine-3'-phosphate
  modified_base 11: mod_base = OTHER; note = 2'-deoxy-2'-fluoroguanosine-3'-phosphate
  modified_base 12: mod_base = OTHER; note = 2'-O-methylcytidine-3'-phosphate
  modified_base 13: mod_base = OTHER; note = 2'-O-methylguanosine-3'-phosphate
  modified_base 14: mod_base = OTHER; note = 2'-O-methyluridine-3'-phosphate
  modified_base 15: mod_base = OTHER; note = 2'-O-methylguanosine-3'-phosphate
  modified_base 16: mod_base = OTHER; note = 2'-O-methyluridine-3'-phosphate
  modified_base 17: mod_base = OTHER; note = 2'-O-methyladenosine-3'-phosphate
  modified_base 18: mod_base = OTHER; note = 2'-O-methylcytidine-3'-phosphate
  modified_base 19: mod_base = OTHER; note = 2'-O-methyluridine-3'-phosphate
  modified_base 20: mod_base = OTHER; note = 2'-O-methyluridine-3'-phosphate
  modified_base 21: mod_base = OTHER; note = 2'-O-methyladenosine
tatggagtttgcgtgtactta

SEQ ID NO: 3889 - RNA, 21 nt, synthetic construct
  source 1..21: mol_type = other RNA
  modified_base 1: mod_base = OTHER; note = 2'-O-methyladenosine-3'-phosphate
  modified_base 2: mod_base = OTHER; note = 2'-O-methyluridine-3'-phosphate
  modified_base 3: mod_base = OTHER; note = 2'-O-methylguanosine-3'-phosphate
  modified_base 4: mod_base = OTHER; note = 2'-O-methylguanosine-3'-phosphate
  modified_base 5: mod_base = OTHER; note = 2'-O-methyladenosine-3'-phosphate
  modified_base 6: mod_base = OTHER; note = 2'-O-methylguanosine-3'-phosphate
  modified_base 7: mod_base = OTHER; note = 2'-deoxy-2'-fluorouridine-3'-phosphate
  modified_base 8: mod_base = OTHER; note = 2'-O-methyluridine-3'-phosphate
  modified_base 9: mod_base = OTHER; note = 2'-deoxy-2'-fluorouridine-3'-phosphate
  modified_base 10: mod_base = OTHER; note = 2'-deoxy-2'-fluoroguanosine-3'-phosphate
  modified_base 11: mod_base = OTHER; note = 2'-deoxy-2'-fluorocytidine-3'-phosphate
  modified_base 12: mod_base = OTHER; note = 2'-O-methylguanosine-3'-phosphate
  modified_base 13: mod_base = OTHER; note = 2'-O-methyluridine-3'-phosphate
  modified_base 14: mod_base = OTHER; note = 2'-O-methylguanosine-3'-phosphate
  modified_base 15: mod_base = OTHER; note = 2'-O-methyluridine-3'-phosphate
  modified_base 16: mod_base = OTHER; note = 2'-O-methyladenosine-3'-phosphate
  modified_base 17: mod_base = OTHER; note = 2'-O-methylcytidine-3'-phosphate
  modified_base 18: mod_base = OTHER; note = 2'-O-methyluridine-3'-phosphate
  modified_base 19: mod_base = OTHER; note = 2'-O-methyluridine-3'-phosphate
  modified_base 20: mod_base = OTHER; note = 2'-O-methylcytidine-3'-phosphate
  modified_base 21: mod_base = OTHER; note = 2'-O-methyladenosine
atggagtttgcgtgtacttca

SEQ ID NO: 3890 - RNA, 21 nt, synthetic construct
  source 1..21: mol_type = other RNA
  modified_base 1: mod_base = OTHER; note = 2'-O-methyluridine-3'-phosphate
  modified_base 2: mod_base = OTHER; note = 2'-O-methyluridine-3'-phosphate
  modified_base 3: mod_base = OTHER; note = 2'-O-methyluridine-3'-phosphate
  modified_base 4: mod_base = OTHER; note = 2'-O-methylguanosine-3'-phosphate
  modified_base 5: mod_base = OTHER; note = 2'-O-methylcytidine-3'-phosphate
  modified_base 6: mod_base = OTHER; note = 2'-O-methylguanosine-3'-phosphate
  modified_base 7: mod_base = OTHER; note = 2'-deoxy-2'-fluorouridine-3'-phosphate
  modified_base 8: mod_base = OTHER; note = 2'-O-methylguanosine-3'-phosphate
  modified_base 9: mod_base = OTHER; note = 2'-deoxy-2'-fluorouridine-3'-phosphate
  modified_base 10: mod_base = OTHER; note = 2'-deoxy-2'-fluoroadenosine-3'-phosphate
  modified_base 11: mod_base = OTHER; note = 2'-deoxy-2'-fluorocytidine-3'-phosphate
  modified_base 12: mod_base = OTHER; note = 2'-O-methyluridine-3'-phosphate
  modified_base 13: mod_base = OTHER; note = 2'-O-methyluridine-3'-phosphate
  modified_base 14: mod_base = OTHER; note = 2'-O-methylcytidine-3'-phosphate
  modified_base 15: mod_base = OTHER; note = 2'-O-methylcytidine-3'-phosphate
  modified_base 16: mod_base = OTHER; note = 2'-O-methyladenosine-3'-phosphate
  modified_base 17: mod_base = OTHER; note = 2'-O-methyluridine-3'-phosphate
  modified_base 18: mod_base = OTHER; note = 2'-O-methyladenosine-3'-phosphate
  modified_base 19: mod_base = OTHER; note = 2'-O-methylcytidine-3'-phosphate
  modified_base 20: mod_base = OTHER; note = 2'-O-methyluridine-3'-phosphate
  modified_base 21: mod_base = OTHER; note = 2'-O-methyladenosine
tttgcgtgtacttccatacta

SEQ ID NO: 3891 - RNA, 21 nt, synthetic construct
  source 1..21: mol_type = other RNA
  modified_base 1: mod_base = OTHER; note = 2'-O-methyluridine-3'-phosphate
  modified_base 2: mod_base = OTHER; note = 2'-O-methylguanosine-3'-phosphate
  modified_base 3: mod_base = OTHER; note = 2'-O-methylcytidine-3'-phosphate
  modified_base 4: mod_base = OTHER; note = 2'-O-methylguanosine-3'-phosphate
  modified_base 5: mod_base = OTHER; note = 2'-O-methyluridine-3'-phosphate
  modified_base 6: mod_base = OTHER; note = 2'-O-methylguanosine-3'-phosphate
  modified_base 7: mod_base = OTHER; note = 2'-deoxy-2'-fluorouridine-3'-phosphate
  modified_base 8: mod_base = OTHER; note = 2'-O-methyladenosine-3'-phosphate
  modified_base 9: mod_base = OTHER; note = 2'-deoxy-2'-fluorocytidine-3'-phosphate
  modified_base 10: mod_base = OTHER; note = 2'-deoxy-2'-fluorouridine-3'-phosphate
  modified_base 11: mod_base = OTHER; note = 2'-deoxy-2'-fluorouridine-3'-phosphate
  modified_base 12: mod_base = OTHER; note = 2'-O-methylcytidine-3'-phosphate
  modified_base 13: mod_base = OTHER; note = 2'-O-methylcytidine-3'-phosphate
  modified_base 14: mod_base = OTHER; note = 2'-O-methyladenosine-3'-phosphate
  modified_base 15: mod_base = OTHER; note = 2'-O-methyluridine-3'-phosphate
  modified_base 16: mod_base = OTHER; note = 2'-O-methyladenosine-3'-phosphate
  modified_base 17: mod_base = OTHER; note = 2'-O-methylcytidine-3'-phosphate
  modified_base 18: mod_base = OTHER; note = 2'-O-methyluridine-3'-phosphate
  modified_base 19: mod_base = OTHER; note = 2'-O-methylcytidine-3'-phosphate
  modified_base 20: mod_base = OTHER; note = 2'-O-methylguanosine-3'-phosphate
  modified_base 21: mod_base = OTHER; note = 2'-O-methyladenosine
tgcgtgtacttccatactcga

SEQ ID NO: 3892 - RNA, 21 nt, synthetic construct
  source 1..21: mol_type = other RNA
  modified_base 1: mod_base = OTHER; note = 2'-O-methylguanosine-3'-phosphate
  modified_base 2: mod_base = OTHER; note = 2'-O-methylcytidine-3'-phosphate
  modified_base 3: mod_base = OTHER; note = 2'-O-methylguanosine-3'-phosphate
  modified_base 4: mod_base = OTHER; note = 2'-O-methyluridine-3'-phosphate
  modified_base 5: mod_base = OTHER; note = 2'-O-methylguanosine-3'-phosphate
  modified_base 6: mod_base = OTHER; note = 2'-O-methyluridine-3'-phosphate
  modified_base 7: mod_base = OTHER; note = 2'-deoxy-2'-fluoroadenosine-3'-phosphate
  modified_base 8: mod_base = OTHER; note = 2'-O-methylcytidine-3'-phosphate
  modified_base 9: mod_base = OTHER; note = 2'-deoxy-2'-fluorouridine-3'-phosphate
  modified_base 10: mod_base = OTHER; note = 2'-deoxy-2'-fluorouridine-3'-phosphate
  modified_base 11: mod_base = OTHER; note = 2'-deoxy-2'-fluorocytidine-3'-phosphate
  modified_base 12: mod_base = OTHER; note = 2'-O-methylcytidine-3'-phosphate
  modified_base 13: mod_base = OTHER; note = 2'-O-methyladenosine-3'-phosphate
  modified_base 14: mod_base = OTHER; note = 2'-O-methyluridine-3'-phosphate
  modified_base 15: mod_base = OTHER; note = 2'-O-methyladenosine-3'-phosphate
  modified_base 16: mod_base = OTHER; note = 2'-O-methylcytidine-3'-phosphate
  modified_base 17: mod_base = OTHER; note = 2'-O-methyluridine-3'-phosphate
  modified_base 18: mod_base = OTHER; note = 2'-O-methylcytidine-3'-phosphate
  modified_base 19: mod_base = OTHER; note = 2'-O-methylguanosine-3'-phosphate
  modified_base 20: mod_base = OTHER; note = 2'-O-methyluridine-3'-phosphate
  modified_base 21: mod_base = OTHER; note = 2'-O-methyladenosine
gcgtgtacttccatactcgta

SEQ ID NO: 3893 - RNA, 21 nt, synthetic construct
  source 1..21: mol_type = other RNA
  modified_base 1: mod_base = OTHER; note = 2'-O-methylcytidine-3'-phosphate
  modified_base 2: mod_base = OTHER; note = 2'-O-methylguanosine-3'-phosphate
  modified_base 3: mod_base = OTHER; note = 2'-O-methyluridine-3'-phosphate
  modified_base 4: mod_base = OTHER; note = 2'-O-methylguanosine-3'-phosphate
  modified_base 5: mod_base = OTHER; note = 2'-O-methyluridine-3'-phosphate
  modified_base 6: mod_base = OTHER; note = 2'-O-methyladenosine-3'-phosphate
  modified_base 7: mod_base = OTHER; note = 2'-deoxy-2'-fluorocytidine-3'-phosphate
  modified_base 8: mod_base = OTHER; note = 2'-O-methyluridine-3'-phosphate
  modified_base 9: mod_base = OTHER; note = 2'-deoxy-2'-fluorouridine-3'-phosphate
  modified_base 10: mod_base = OTHER; note = 2'-deoxy-2'-fluorocytidine-3'-phosphate
  modified_base 11: mod_base = OTHER; note = 2'-deoxy-2'-fluorocytidine-3'-phosphate
  modified_base 12: mod_base = OTHER; note = 2'-O-methyladenosine-3'-phosphate
  modified_base 13: mod_base = OTHER; note = 2'-O-methyluridine-3'-phosphate
  modified_base 14: mod_base = OTHER; note = 2'-O-methyladenosine-3'-phosphate
  modified_base 15: mod_base = OTHER; note = 2'-O-methylcytidine-3'-phosphate
  modified_base 16: mod_base = OTHER; note = 2'-O-methyluridine-3'-phosphate
  modified_base 17: mod_base = OTHER; note = 2'-O-methylcytidine-3'-phosphate
  modified_base 18: mod_base = OTHER; note = 2'-O-methylguanosine-3'-phosphate
  modified_base 19: mod_base = OTHER; note = 2'-O-methyluridine-3'-phosphate
  modified_base 20: mod_base = OTHER; note = 2'-O-methyluridine-3'-phosphate
  modified_base 21: mod_base = OTHER; note = 2'-O-methyladenosine
cgtgtacttccatactcgtta

SEQ ID NO: 3894 - RNA, 21 nt, synthetic construct
  source 1..21: mol_type = other RNA
  modified_base 1: mod_base = OTHER; note = 2'-O-methylguanosine-3'-phosphate
  modified_base 2: mod_base = OTHER; note = 2'-O-methyluridine-3'-phosphate
  modified_base 3: mod_base = OTHER; note = 2'-O-methylguanosine-3'-phosphate
  modified_base 4: mod_base = OTHER; note = 2'-O-methyluridine-3'-phosphate
  modified_base 5: mod_base = OTHER; note = 2'-O-methyladenosine-3'-phosphate
  modified_base 6: mod_base = OTHER; note = 2'-O-methylcytidine-3'-phosphate
  modified_base 7: mod_base = OTHER; note = 2'-deoxy-2'-fluorouridine-3'-phosphate
  modified_base 8: mod_base = OTHER; note = 2'-O-methyluridine-3'-phosphate
  modified_base 9: mod_base = OTHER; note = 2'-deoxy-2'-fluorocytidine-3'-phosphate
  modified_base 10: mod_base = OTHER; note = 2'-deoxy-2'-fluorocytidine-3'-phosphate
  modified_base 11: mod_base = OTHER; note = 2'-deoxy-2'-fluoroadenosine-3'-phosphate
  modified_base 12: mod_base = OTHER; note = 2'-O-methyluridine-3'-phosphate
  modified_base 13: mod_base = OTHER; note = 2'-O-methyladenosine-3'-phosphate
  modified_base 14: mod_base = OTHER; note = 2'-O-methylcytidine-3'-phosphate
  modified_base 15: mod_base = OTHER; note = 2'-O-methyluridine-3'-phosphate
  modified_base 16: mod_base = OTHER; note = 2'-O-methylcytidine-3'-phosphate
  modified_base 17: mod_base = OTHER; note = 2'-O-methylguanosine-3'-phosphate
  modified_base 18: mod_base = OTHER; note = 2'-O-methyluridine-3'-phosphate
  modified_base 19: mod_base = OTHER; note = 2'-O-methyluridine-3'-phosphate
  modified_base 20: mod_base = OTHER; note = 2'-O-methyladenosine-3'-phosphate
  modified_base 21: mod_base = OTHER; note = 2'-O-methyladenosine
gtgtacttccatactcgttaa

SEQ ID NO: 3895 - RNA, 21 nt, synthetic construct
  source 1..21: mol_type = other RNA
  modified_base 1: mod_base = OTHER; note = 2'-O-methyluridine-3'-phosphate
  modified_base 2: mod_base = OTHER; note = 2'-O-methylguanosine-3'-phosphate
  modified_base 3: mod_base = OTHER; note = 2'-O-methyluridine-3'-phosphate
  modified_base 4: mod_base = OTHER; note = 2'-O-methyladenosine-3'-phosphate
  modified_base 5: mod_base = OTHER; note = 2'-O-methylcytidine-3'-phosphate
  modified_base 6: mod_base = OTHER; note = 2'-O-methyluridine-3'-phosphate
  modified_base 7: mod_base = OTHER; note = 2'-deoxy-2'-fluorouridine-3'-phosphate
  modified_base 8: mod_base = OTHER; note = 2'-O-methylcytidine-3'-phosphate
  modified_base 9: mod_base = OTHER; note = 2'-deoxy-2'-fluorocytidine-3'-phosphate
  modified_base 10: mod_base = OTHER; note = 2'-deoxy-2'-fluoroadenosine-3'-phosphate
  modified_base 11: mod_base = OTHER; note = 2'-deoxy-2'-fluorouridine-3'-phosphate
  modified_base 12: mod_base = OTHER; note = 2'-O-methyladenosine-3'-phosphate
  modified_base 13: mod_base = OTHER; note = 2'-O-methylcytidine-3'-phosphate
  modified_base 14: mod_base = OTHER; note = 2'-O-methyluridine-3'-phosphate
  modified_base 15: mod_base = OTHER; note = 2'-O-methylcytidine-3'-phosphate
  modified_base 16: mod_base = OTHER; note = 2'-O-methylguanosine-3'-phosphate
  modified_base 17: mod_base = OTHER; note = 2'-O-methyluridine-3'-phosphate
  modified_base 18: mod_base = OTHER; note = 2'-O-methyluridine-3'-phosphate
  modified_base 19: mod_base = OTHER; note = 2'-O-methyladenosine-3'-phosphate
  modified_base 20: mod_base = OTHER; note = 2'-O-methyladenosine-3'-phosphate
  modified_base 21: mod_base = OTHER; note = 2'-O-methyladenosine
tgtacttccatactcgttaaa

SEQ ID NO: 3896 - RNA, 21 nt, synthetic construct
  source 1..21: mol_type = other RNA
  modified_base 1: mod_base = OTHER; note = 2'-O-methylguanosine-3'-phosphate
  modified_base 2: mod_base = OTHER; note = 2'-O-methyluridine-3'-phosphate
  modified_base 3: mod_base = OTHER; note = 2'-O-methyladenosine-3'-phosphate
  modified_base 4: mod_base = OTHER; note = 2'-O-methylcytidine-3'-phosphate
  modified_base 5: mod_base = OTHER; note = 2'-O-methyluridine-3'-phosphate
  modified_base 6: mod_base = OTHER; note = 2'-O-methyluridine-3'-phosphate
  modified_base 7: mod_base = OTHER; note = 2'-deoxy-2'-fluorocytidine-3'-phosphate
  modified_base 8: mod_base = OTHER; note = 2'-O-methylcytidine-3'-phosphate
  modified_base 9: mod_base = OTHER; note = 2'-deoxy-2'-fluoroadenosine-3'-phosphate
  modified_base 10: mod_base = OTHER; note = 2'-deoxy-2'-fluorouridine-3'-phosphate
  modified_base 11: mod_base = OTHER; note = 2'-deoxy-2'-fluoroadenosine-3'-phosphate
  modified_base 12: mod_base = OTHER; note = 2'-O-methylcytidine-3'-phosphate
  modified_base 13: mod_base = OTHER; note = 2'-O-methyluridine-3'-phosphate
  modified_base 14: mod_base = OTHER; note = 2'-O-methylcytidine-3'-phosphate
  modified_base 15: mod_base = OTHER; note = 2'-O-methylguanosine-3'-phosphate
  modified_base 16: mod_base = OTHER; note = 2'-O-methyluridine-3'-phosphate
  modified_base 17: mod_base = OTHER; note = 2'-O-methyluridine-3'-phosphate
  modified_base 18: mod_base = OTHER; note = 2'-O-methyladenosine-3'-phosphate
  modified_base 19: mod_base = OTHER; note = 2'-O-methyladenosine-3'-phosphate
  modified_base 20: mod_base = OTHER; note = 2'-O-methyluridine-3'-phosphate
  modified_base 21: mod_base = OTHER; note = 2'-O-methyladenosine
gtacttccatactcgttaata

SEQ ID NO: 3897 - RNA, 21 nt, synthetic construct
  source 1..21: mol_type = other RNA
  modified_base 1: mod_base = OTHER; note = 2'-O-methyluridine-3'-phosphate
  modified_base 2: mod_base = OTHER; note = 2'-O-methyladenosine-3'-phosphate
  modified_base 3: mod_base = OTHER; note = 2'-O-methylcytidine-3'-phosphate
  modified_base 4: mod_base = OTHER; note = 2'-O-methyluridine-3'-phosphate
  modified_base 5: mod_base = OTHER; note = 2'-O-methyluridine-3'-phosphate
  modified_base 6: mod_base = OTHER; note = 2'-O-methylcytidine-3'-phosphate
  modified_base 7: mod_base = OTHER; note = 2'-deoxy-2'-fluorocytidine-3'-phosphate
  modified_base 8: mod_base = OTHER; note = 2'-O-methyladenosine-3'-phosphate
  modified_base 9: mod_base = OTHER; note = 2'-deoxy-2'-fluorouridine-3'-phosphate
  modified_base 10: mod_base = OTHER; note = 2'-deoxy-2'-fluoroadenosine-3'-phosphate
  modified_base 11: mod_base = OTHER; note = 2'-deoxy-2'-fluorocytidine-3'-phosphate
  modified_base 12: mod_base = OTHER; note = 2'-O-methyluridine-3'-phosphate
  modified_base 13: mod_base = OTHER; note = 2'-O-methylcytidine-3'-phosphate
  modified_base 14: mod_base = OTHER; note = 2'-O-methylguanosine-3'-phosphate
  modified_base 15: mod_base = OTHER; note = 2'-O-methyluridine-3'-phosphate
  modified_base 16: mod_base = OTHER; note = 2'-O-methyluridine-3'-phosphate
  modified_base 17: mod_base = OTHER; note = 2'-O-methyladenosine-3'-phosphate
  modified_base 18: mod_base = OTHER; note = 2'-O-methyladenosine-3'-phosphate
  modified_base 19: mod_base = OTHER; note = 2'-O-methyluridine-3'-phosphate
  modified_base 20: mod_base = OTHER; note = 2'-O-methylguanosine-3'-phosphate
  modified_base 21: mod_base = OTHER; note = 2'-O-methyladenosine
tacttccatactcgttaatga

SEQ ID NO: 3898 - RNA, 21 nt, synthetic construct
  source 1..21: mol_type = other RNA
  modified_base 1: mod_base = OTHER; note = 2'-O-methyladenosine-3'-phosphate
  modified_base 2: mod_base = OTHER; note = 2'-O-methylcytidine-3'-phosphate
  modified_base 3: mod_base = OTHER; note = 2'-O-methyluridine-3'-phosphate
  modified_base 4: mod_base = OTHER; note = 2'-O-methyluridine-3'-phosphate
  modified_base 5: mod_base = OTHER; note = 2'-O-methylcytidine-3'-phosphate
  modified_base 6: mod_base = OTHER; note = 2'-O-methylcytidine-3'-phosphate
  modified_base 7: mod_base = OTHER; note = 2'-deoxy-2'-fluoroadenosine-3'-phosphate
  modified_base 8: mod_base = OTHER; note = 2'-O-methyluridine-3'-phosphate
  modified_base 9: mod_base = OTHER; note = 2'-deoxy-2'-fluoroadenosine-3'-phosphate
  modified_base 10: mod_base = OTHER; note = 2'-deoxy-2'-fluorocytidine-3'-phosphate
  modified_base 11: mod_base = OTHER; note = 2'-deoxy-2'-fluorouridine-3'-phosphate
  modified_base 12: mod_base = OTHER; note = 2'-O-methylcytidine-3'-phosphate
  modified_base 13: mod_base = OTHER; note = 2'-O-methylguanosine-3'-phosphate
  modified_base 14: mod_base = OTHER; note = 2'-O-methyluridine-3'-phosphate
  modified_base 15: mod_base = OTHER; note = 2'-O-methyluridine-3'-phosphate
  modified_base 16: mod_base = OTHER; note = 2'-O-methyladenosine-3'-phosphate
  modified_base 17: mod_base = OTHER; note = 2'-O-methyladenosine-3'-phosphate
  modified_base 18: mod_base = OTHER; note = 2'-O-methyluridine-3'-phosphate
  modified_base 19: mod_base = OTHER; note = 2'-O-methylguanosine-3'-phosphate
  modified_base 20: mod_base = OTHER; note = 2'-O-methylcytidine-3'-phosphate
  modified_base 21: mod_base = OTHER; note = 2'-O-methyladenosine
acttccatactcgttaatgca

SEQ ID NO: 3899 - RNA, 21 nt, synthetic construct
  source 1..21: mol_type = other RNA
  modified_base 1: mod_base = OTHER; note = 2'-O-methylcytidine-3'-phosphate
  modified_base 2: mod_base = OTHER; note = 2'-O-methyluridine-3'-phosphate
  modified_base 3: mod_base = OTHER; note = 2'-O-methyluridine-3'-phosphate
  modified_base 4: mod_base = OTHER; note = 2'-O-methylcytidine-3'-phosphate
  modified_base 5: mod_base = OTHER; note = 2'-O-methylcytidine-3'-phosphate
  modified_base 6: mod_base = OTHER; note = 2'-O-methyladenosine-3'-phosphate
  modified_base 7: mod_base = OTHER; note = 2'-deoxy-2'-fluorouridine-3'-phosphate
  modified_base 8: mod_base = OTHER; note = 2'-O-methyladenosine-3'-phosphate
  modified_base 9: mod_base = OTHER; note = 2'-deoxy-2'-fluorocytidine-3'-phosphate
  modified_base 10: mod_base = OTHER; note = 2'-deoxy-2'-fluorouridine-3'-phosphate
  modified_base 11: mod_base = OTHER; note = 2'-deoxy-2'-fluorocytidine-3'-phosphate
  modified_base 12: mod_base = OTHER; note = 2'-O-methylguanosine-3'-phosphate
  modified_base 13: mod_base = OTHER; note = 2'-O-methyluridine-3'-phosphate
  modified_base 14: mod_base = OTHER; note = 2'-O-methyluridine-3'-phosphate
  modified_base 15: mod_base = OTHER; note = 2'-O-methyladenosine-3'-phosphate
  modified_base 16: mod_base = OTHER; note = 2'-O-methyladenosine-3'-phosphate
  modified_base 17: mod_base = OTHER; note = 2'-O-methyluridine-3'-phosphate
  modified_base 18: mod_base = OTHER; note = 2'-O-methylguanosine-3'-phosphate
  modified_base 19: mod_base = OTHER; note = 2'-O-methylcytidine-3'-phosphate
  modified_base 20: mod_base = OTHER; note = 2'-O-methyluridine-3'-phosphate
  modified_base 21: mod_base = OTHER; note = 2'-O-methyladenosine
cttccatactcgttaatgcta

SEQ ID NO: 3900 - RNA, 21 nt, synthetic construct
  source 1..21: mol_type = other RNA
  modified_base 1: mod_base = OTHER; note = 2'-O-methyluridine-3'-phosphate
  modified_base 2: mod_base = OTHER; note = 2'-O-methyluridine-3'-phosphate
  modified_base 3: mod_base = OTHER; note = 2'-O-methylcytidine-3'-phosphate
  modified_base 4: mod_base = OTHER; note = 2'-O-methylcytidine-3'-phosphate
  modified_base 5: mod_base = OTHER; note = 2'-O-methyladenosine-3'-phosphate
  modified_base 6: mod_base = OTHER; note = 2'-O-methyluridine-3'-phosphate
  modified_base 7: mod_base = OTHER; note = 2'-deoxy-2'-fluoroadenosine-3'-phosphate
  modified_base 8: mod_base = OTHER; note = 2'-O-methylcytidine-3'-phosphate
  modified_base 9: mod_base = OTHER; note = 2'-deoxy-2'-fluorouridine-3'-phosphate
  modified_base 10: mod_base = OTHER; note = 2'-deoxy-2'-fluorocytidine-3'-phosphate
  modified_base 11: mod_base = OTHER; note = 2'-deoxy-2'-fluoroguanosine-3'-phosphate
  modified_base 12: mod_base = OTHER; note = 2'-O-methyluridine-3'-phosphate
  modified_base 13: mod_base = OTHER; note = 2'-O-methyluridine-3'-phosphate
  modified_base 14: mod_base = OTHER; note = 2'-O-methyladenosine-3'-phosphate
  modified_base 15: mod_base = OTHER; note = 2'-O-methyladenosine-3'-phosphate
  modified_base 16: mod_base = OTHER; note = 2'-O-methyluridine-3'-phosphate
  modified_base 17: mod_base = OTHER; note = 2'-O-methylguanosine-3'-phosphate
  modified_base 18: mod_base = OTHER; note = 2'-O-methylcytidine-3'-phosphate
  modified_base 19: mod_base = OTHER; note = 2'-O-methyluridine-3'-phosphate
  modified_base 20: mod_base = OTHER; note = 2'-O-methylcytidine-3'-phosphate
  modified_base 21: mod_base = OTHER; note = 2'-O-methyladenosine
ttccatactcgttaatgctca

SEQ ID NO: 3901 - RNA, 21 nt, synthetic construct
  source 1..21: mol_type = other RNA
  modified_base 1: mod_base = OTHER; note = 2'-O-methyluridine-3'-phosphate
  modified_base 2: mod_base = OTHER; note = 2'-O-methylcytidine-3'-phosphate
  modified_base 3: mod_base = OTHER; note = 2'-O-methylcytidine-3'-phosphate
  modified_base 4: mod_base = OTHER; note = 2'-O-methyladenosine-3'-phosphate
  modified_base 5: mod_base = OTHER; note = 2'-O-methyluridine-3'-phosphate
  modified_base 6: mod_base = OTHER; note = 2'-O-methyladenosine-3'-phosphate
  modified_base 7: mod_base = OTHER; note = 2'-deoxy-2'-fluorocytidine-3'-phosphate
  modified_base 8: mod_base = OTHER; note = 2'-O-methyluridine-3'-phosphate
  modified_base 9: mod_base = OTHER; note = 2'-deoxy-2'-fluorocytidine-3'-phosphate
  modified_base 10: mod_base = OTHER; note = 2'-deoxy-2'-fluoroguanosine-3'-phosphate
  modified_base 11: mod_base = OTHER; note = 2'-deoxy-2'-fluorouridine-3'-phosphate
  modified_base 12: mod_base = OTHER; note = 2'-O-methyluridine-3'-phosphate
  modified_base 13: mod_base = OTHER; note = 2'-O-methyladenosine-3'-phosphate
  modified_base 14: mod_base = OTHER; note = 2'-O-methyladenosine-3'-phosphate
  modified_base 15: mod_base = OTHER; note = 2'-O-methyluridine-3'-phosphate
  modified_base 16: mod_base = OTHER; note = 2'-O-methylguanosine-3'-phosphate
  modified_base 17: mod_base = OTHER; note = 2'-O-methylcytidine-3'-phosphate
  modified_base 18: mod_base = OTHER; note = 2'-O-methyluridine-3'-phosphate
  modified_base 19: mod_base = OTHER; note = 2'-O-methylcytidine-3'-phosphate
  modified_base 20: mod_base = OTHER; note = 2'-O-methyluridine-3'-phosphate
  modified_base 21: mod_base = OTHER; note = 2'-O-methyladenosine
tccatactcgttaatgctcta

SEQ ID NO: 3902 - RNA, 21 nt, synthetic construct
  source 1..21: mol_type = other RNA
  modified_base 1: mod_base = OTHER; note = 2'-O-methylcytidine-3'-phosphate
  modified_base 2: mod_base = OTHER; note = 2'-O-methylcytidine-3'-phosphate
  modified_base 3: mod_base = OTHER; note = 2'-O-methyladenosine-3'-phosphate
  modified_base 4: mod_base = OTHER; note = 2'-O-methyluridine-3'-phosphate
  modified_base 5: mod_base = OTHER; note = 2'-O-methyladenosine-3'-phosphate
  modified_base 6: mod_base = OTHER; note = 2'-O-methylcytidine-3'-phosphate
  modified_base 7: mod_base = OTHER; note = 2'-deoxy-2'-fluorouridine-3'-phosphate
  modified_base 8: mod_base = OTHER; note = 2'-O-methylcytidine-3'-phosphate
  modified_base 9: mod_base = OTHER; note = 2'-deoxy-2'-fluoroguanosine-3'-phosphate
  modified_base 10: mod_base = OTHER; note = 2'-deoxy-2'-fluorouridine-3'-phosphate
  modified_base 11: mod_base = OTHER; note = 2'-deoxy-2'-fluorouridine-3'-phosphate
  modified_base 12: mod_base = OTHER; note = 2'-O-methyladenosine-3'-phosphate
  modified_base 13: mod_base = OTHER; note = 2'-O-methyladenosine-3'-phosphate
  modified_base 14: mod_base = OTHER; note = 2'-O-methyluridine-3'-phosphate
  modified_base 15: mod_base = OTHER; note = 2'-O-methylguanosine-3'-phosphate
  modified_base 16: mod_base = OTHER; note = 2'-O-methylcytidine-3'-phosphate
  modified_base 17: mod_base = OTHER; note = 2'-O-methyluridine-3'-phosphate
  modified_base 18: mod_base = OTHER; note = 2'-O-methylcytidine-3'-phosphate
  modified_base 19: mod_base = OTHER; note = 2'-O-methyluridine-3'-phosphate
  modified_base 20: mod_base = OTHER; note = 2'-O-methylcytidine-3'-phosphate
  modified_base 21: mod_base = OTHER; note = 2'-O-methyladenosine
ccatactcgttaatgctctca

SEQ ID NO: 3903 - RNA, 21 nt, synthetic construct
  source 1..21: mol_type = other RNA
  modified_base 1: mod_base = OTHER; note = 2'-O-methylcytidine-3'-phosphate
  modified_base 2: mod_base = OTHER; note = 2'-O-methyladenosine-3'-phosphate
  modified_base 3: mod_base = OTHER; note = 2'-O-methyluridine-3'-phosphate
  modified_base 4: mod_base = OTHER; note = 2'-O-methyladenosine-3'-phosphate
  modified_base 5: mod_base = OTHER; note = 2'-O-methylcytidine-3'-phosphate
  modified_base 6: mod_base = OTHER; note = 2'-O-methyluridine-3'-phosphate
  modified_base 7: mod_base = OTHER; note = 2'-deoxy-2'-fluorocytidine-3'-phosphate
  modified_base 8: mod_base = OTHER; note = 2'-O-methylguanosine-3'-phosphate
  modified_base 9: mod_base = OTHER; note = 2'-deoxy-2'-fluorouridine-3'-phosphate
  modified_base 10: mod_base = OTHER; note = 2'-deoxy-2'-fluorouridine-3'-phosphate
  modified_base 11: mod_base = OTHER; note = 2'-deoxy-2'-fluoroadenosine-3'-phosphate
  modified_base 12: mod_base = OTHER; note = 2'-O-methyladenosine-3'-phosphate
  modified_base 13: mod_base = OTHER; note = 2'-O-methyluridine-3'-phosphate
  modified_base 14: mod_base = OTHER; note = 2'-O-methylguanosine-3'-phosphate
  modified_base 15: mod_base = OTHER; note = 2'-O-methylcytidine-3'-phosphate
  modified_base 16: mod_base = OTHER; note = 2'-O-methyluridine-3'-phosphate
  modified_base 17: mod_base = OTHER; note = 2'-O-methylcytidine-3'-phosphate
  modified_base 18: mod_base = OTHER; note = 2'-O-methyluridine-3'-phosphate
  modified_base 19: mod_base = OTHER; note = 2'-O-methylcytidine-3'-phosphate
  modified_base 20: mod_base = OTHER; note = 2'-O-methyladenosine-3'-phosphate
  modified_base 21: mod_base = OTHER; note = 2'-O-methyladenosine
catactcgttaatgctctcaa

SEQ ID NO: 3904 - RNA, 21 nt, synthetic construct
  source 1..21: mol_type = other RNA
  modified_base 1: mod_base = OTHER; note = 2'-O-methyladenosine-3'-phosphate
  modified_base 2: mod_base = OTHER; note = 2'-O-methyluridine-3'-phosphate
  modified_base 3: mod_base = OTHER; note = 2'-O-methyladenosine-3'-phosphate
  modified_base 4: mod_base = OTHER; note = 2'-O-methylcytidine-3'-phosphate
  modified_base 5: mod_base = OTHER; note = 2'-O-methyluridine-3'-phosphate
  modified_base 6: mod_base = OTHER; note = 2'-O-methylcytidine-3'-phosphate
  modified_base 7: mod_base = OTHER; note = 2'-deoxy-2'-fluoroguanosine-3'-phosphate
  modified_base 8: mod_base = OTHER; note = 2'-O-methyluridine-3'-phosphate
  modified_base 9: mod_base = OTHER; note = 2'-deoxy-2'-fluorouridine-3'-phosphate
  modified_base 10: mod_base = OTHER; note = 2'-deoxy-2'-fluoroadenosine-3'-phosphate
  modified_base 11: mod_base = OTHER; note = 2'-deoxy-2'-fluoroadenosine-3'-phosphate
  modified_base 12: mod_base = OTHER; note = 2'-O-methyluridine-3'-phosphate
  modified_base 13: mod_base = OTHER; note = 2'-O-methylguanosine-3'-phosphate
  modified_base 14: mod_base = OTHER; note = 2'-O-methylcytidine-3'-phosphate
  modified_base 15: mod_base = OTHER; note = 2'-O-methyluridine-3'-phosphate
  modified_base 16: mod_base = OTHER; note = 2'-O-methylcytidine-3'-phosphate
  modified_base 17: mod_base = OTHER; note = 2'-O-methyluridine-3'-phosphate
  modified_base 18: mod_base = OTHER; note = 2'-O-methylcytidine-3'-phosphate
  modified_base 19: mod_base = OTHER; note = 2'-O-methyladenosine-3'-phosphate
  modified_base 20: mod_base = OTHER; note = 2'-O-methyluridine-3'-phosphate
  modified_base 21: mod_base = OTHER; note = 2'-O-methyladenosine
atactcgttaatgctctcata

SEQ ID NO: 3905 - RNA, 21 nt, synthetic construct
  source 1..21: mol_type = other RNA
  modified_base 1: mod_base = OTHER; note = 2'-O-methylcytidine-3'-phosphate
  modified_base 2: mod_base = OTHER; note = 2'-O-methyluridine-3'-phosphate
  modified_base 3: mod_base = OTHER; note = 2'-O-methylcytidine-3'-phosphate
  modified_base 4: mod_base = OTHER; note = 2'-O-methylguanosine-3'-phosphate
  modified_base 5: mod_base = OTHER; note = 2'-O-methyluridine-3'-phosphate
  modified_base 6: mod_base = OTHER; note = 2'-O-methyluridine-3'-phosphate
  modified_base 7: mod_base = OTHER; note = 2'-deoxy-2'-fluoroadenosine-3'-phosphate
  modified_base 8: mod_base = OTHER; note = 2'-O-methyladenosine-3'-phosphate
  modified_base 9: mod_base = OTHER; note = 2'-deoxy-2'-fluorouridine-3'-phosphate
  modified_base 10: mod_base = OTHER; note = 2'-deoxy-2'-fluoroguanosine-3'-phosphate
  modified_base 11: mod_base = OTHER; note = 2'-deoxy-2'-fluorocytidine-3'-phosphate
  modified_base 12: mod_base = OTHER; note = 2'-O-methyluridine-3'-phosphate
  modified_base 13: mod_base = OTHER; note = 2'-O-methylcytidine-3'-phosphate
  modified_base 14: mod_base = OTHER; note = 2'-O-methyluridine-3'-phosphate
  modified_base 15: mod_base = OTHER; note = 2'-O-methylcytidine-3'-phosphate
  modified_base 16: mod_base = OTHER; note = 2'-O-methyladenosine-3'-phosphate
  modified_base 17: mod_base = OTHER; note = 2'-O-methyluridine-3'-phosphate
  modified_base 18: mod_base = OTHER; note = 2'-O-methylcytidine-3'-phosphate
  modified_base 19: mod_base = OTHER; note = 2'-O-methylcytidine-3'-phosphate
  modified_base 20: mod_base = OTHER; note = 2'-O-methyladenosine-3'-phosphate
  modified_base 21: mod_base = OTHER; note = 2'-O-methyladenosine
ctcgttaatgctctcatccaa

SEQ ID NO: 3906 - RNA, 21 nt, synthetic construct
  source 1..21: mol_type = other RNA
  modified_base 1: mod_base = OTHER; note = 2'-O-methyluridine-3'-phosphate
  modified_base 2: mod_base = OTHER; note = 2'-O-methylcytidine-3'-phosphate
  modified_base 3: mod_base = OTHER; note = 2'-O-methylguanosine-3'-phosphate
  modified_base 4: mod_base = OTHER; note = 2'-O-methyluridine-3'-phosphate
  modified_base 5: mod_base = OTHER; note = 2'-O-methyluridine-3'-phosphate
  modified_base 6: mod_base = OTHER; note = 2'-O-methyladenosine-3'-phosphate
  modified_base 7: mod_base = OTHER; note = 2'-deoxy-2'-fluoroadenosine-3'-phosphate
  modified_base 8: mod_base = OTHER; note = 2'-O-methyluridine-3'-phosphate
  modified_base 9: mod_base = OTHER; note = 2'-deoxy-2'-fluoroguanosine-3'-phosphate
  modified_base 10: mod_base = OTHER; note = 2'-deoxy-2'-fluorocytidine-3'-phosphate
  modified_base 11: mod_base = OTHER; note = 2'-deoxy-2'-fluorouridine-3'-phosphate
  modified_base 12: mod_base = OTHER; note = 2'-O-methylcytidine-3'-phosphate
  modified_base 13: mod_base = OTHER; note = 2'-O-methyluridine-3'-phosphate
  modified_base 14: mod_base = OTHER; note = 2'-O-methylcytidine-3'-phosphate
  modified_base 15: mod_base = OTHER; note = 2'-O-methyladenosine-3'-phosphate
  modified_base 16: mod_base = OTHER; note = 2'-O-methyluridine-3'-phosphate
  modified_base 17: mod_base = OTHER; note = 2'-O-methylcytidine-3'-phosphate
  modified_base 18: mod_base = OTHER; note = 2'-O-methylcytidine-3'-phosphate
  modified_base 19: mod_base = OTHER; note = 2'-O-methyladenosine-3'-phosphate
  modified_base 20: mod_base = OTHER; note = 2'-O-methylcytidine-3'-phosphate
  modified_base 21: mod_base = OTHER; note = 2'-O-methyladenosine
tcgttaatgctctcatccaca

SEQ ID NO: 3907 - RNA, 21 nt, synthetic construct
  source 1..21: mol_type = other RNA
  modified_base 1: mod_base = OTHER; note = 2'-O-methylcytidine-3'-phosphate
  modified_base 2: mod_base = OTHER; note = 2'-O-methylguanosine-3'-phosphate
  modified_base 3: mod_base = OTHER; note = 2'-O-methyluridine-3'-phosphate
  modified_base 4: mod_base = OTHER; note = 2'-O-methyluridine-3'-phosphate
  modified_base 5: mod_base = OTHER; note = 2'-O-methyladenosine-3'-phosphate
  modified_base 6: mod_base = OTHER; note = 2'-O-methyladenosine-3'-phosphate
  modified_base 7: mod_base = OTHER; note = 2'-deoxy-2'-fluorouridine-3'-phosphate
  modified_base 8: mod_base = OTHER; note = 2'-O-methylguanosine-3'-phosphate
  modified_base 9: mod_base = OTHER; note = 2'-deoxy-2'-fluorocytidine-3'-phosphate
  modified_base 10: mod_base = OTHER; note = 2'-deoxy-2'-fluorouridine-3'-phosphate
  modified_base 11: mod_base = OTHER; note = 2'-deoxy-2'-fluorocytidine-3'-phosphate
  modified_base 12: mod_base = OTHER; note = 2'-O-methyluridine-3'-phosphate
  modified_base 13: mod_base = OTHER; note = 2'-O-methylcytidine-3'-phosphate
  modified_base 14: mod_base = OTHER; note = 2'-O-methyladenosine-3'-phosphate
  modified_base 15: mod_base = OTHER; note = 2'-O-methyluridine-3'-phosphate
  modified_base 16: mod_base = OTHER; note = 2'-O-methylcytidine-3'-phosphate
  modified_base 17: mod_base = OTHER; note = 2'-O-methylcytidine-3'-phosphate
  modified_base 18: mod_base = OTHER; note = 2'-O-methyladenosine-3'-phosphate
  modified_base 19: mod_base = OTHER; note = 2'-O-methylcytidine-3'-phosphate
  modified_base 20: mod_base = OTHER; note = 2'-O-methyluridine-3'-phosphate
  modified_base 21: mod_base = OTHER; note = 2'-O-methyladenosine
cgttaatgctctcatccacta

SEQ ID NO: 3908 - RNA, 21 nt, synthetic construct
  source 1..21: mol_type = other RNA
  modified_base 1: mod_base = OTHER; note = 2'-O-methylguanosine-3'-phosphate
  modified_base 2: mod_base = OTHER; note = 2'-O-methyluridine-3'-phosphate
  modified_base 3: mod_base = OTHER; note = 2'-O-methyluridine-3'-phosphate
  modified_base 4: mod_base = OTHER; note = 2'-O-methyladenosine-3'-phosphate
  modified_base 5: mod_base = OTHER; note = 2'-O-methyladenosine-3'-phosphate
  modified_base 6: mod_base = OTHER; note = 2'-O-methyluridine-3'-phosphate
  modified_base 7: mod_base = OTHER; note = 2'-deoxy-2'-fluoroguanosine-3'-phosphate
  modified_base 8: mod_base = OTHER; note = 2'-O-methylcytidine-3'-phosphate
  modified_base 9: mod_base = OTHER; note = 2'-deoxy-2'-fluorouridine-3'-phosphate
  modified_base 10: mod_base = OTHER; note = 2'-deoxy-2'-fluorocytidine-3'-phosphate
  modified_base 11: mod_base = OTHER; note = 2'-deoxy-2'-fluorouridine-3'-phosphate
  modified_base 12: mod_base = OTHER; note = 2'-O-methylcytidine-3'-phosphate
  modified_base 13: mod_base = OTHER; note = 2'-O-methyladenosine-3'-phosphate
  modified_base 14: mod_base = OTHER; note = 2'-O-methyluridine-3'-phosphate
  modified_base 15: mod_base = OTHER; note = 2'-O-methylcytidine-3'-phosphate
  modified_base 16: mod_base = OTHER; note = 2'-O-methylcytidine-3'-phosphate
  modified_base 17: mod_base = OTHER; note = 2'-O-methyladenosine-3'-phosphate
  modified_base 18: mod_base = OTHER; note = 2'-O-methylcytidine-3'-phosphate
  modified_base 19: mod_base = OTHER; note = 2'-O-methyluridine-3'-phosphate
  modified_base 20: mod_base = OTHER; note = 2'-O-methyluridine-3'-phosphate
  modified_base 21: mod_base = OTHER; note = 2'-O-methyladenosine
gttaatgctctcatccactta

SEQ ID NO: 3909 - RNA, 21 nt, synthetic construct
  source 1..21: mol_type = other RNA
  modified_base 1: mod_base = OTHER; note = 2'-O-methyluridine-3'-phosphate
  modified_base 2: mod_base = OTHER; note = 2'-O-methyluridine-3'-phosphate
  modified_base 3: mod_base = OTHER; note = 2'-O-methyladenosine-3'-phosphate
  modified_base 4: mod_base = OTHER; note = 2'-O-methyladenosine-3'-phosphate
  modified_base 5: mod_base = OTHER; note = 2'-O-methyluridine-3'-phosphate
  modified_base 6: mod_base = OTHER; note = 2'-O-methylguanosine-3'-phosphate
  modified_base 7: mod_base = OTHER; note = 2'-deoxy-2'-fluorocytidine-3'-phosphate
  modified_base 8: mod_base = OTHER; note = 2'-O-methyluridine-3'-phosphate
  modified_base 9: mod_base = OTHER; note = 2'-deoxy-2'-fluorocytidine-3'-phosphate
  modified_base 10: mod_base = OTHER; note = 2'-deoxy-2'-fluorouridine-3'-phosphate
  modified_base 11: mod_base = OTHER; note = 2'-deoxy-2'-fluorocytidine-3'-phosphate
  modified_base 12: mod_base = OTHER; note = 2'-O-methyladenosine-3'-phosphate
  modified_base 13: mod_base = OTHER; note = 2'-O-methyluridine-3'-phosphate
  modified_base 14: mod_base = OTHER; note = 2'-O-methylcytidine-3'-phosphate
  modified_base 15: mod_base = OTHER; note = 2'-O-methylcytidine-3'-phosphate
  modified_base 16: mod_base = OTHER; note = 2'-O-methyladenosine-3'-phosphate
  modified_base 17: mod_base = OTHER; note = 2'-O-methylcytidine-3'-phosphate
  modified_base 18: mod_base = OTHER; note = 2'-O-methyluridine-3'-phosphate
  modified_base 19: mod_base = OTHER; note = 2'-O-methyluridine-3'-phosphate
  modified_base 20: mod_base = OTHER; note = 2'-O-methyladenosine-3'-phosphate
  modified_base 21: mod_base = OTHER; note = 2'-O-methyladenosine
ttaatgctctcatccacttaa

SEQ ID NO: 3910 - RNA, 21 nt, synthetic construct
  source 1..21: mol_type = other RNA
  modified_base 1: mod_base = OTHER; note = 2'-O-methyluridine-3'-phosphate
  modified_base 2: mod_base = OTHER; note = 2'-O-methyladenosine-3'-phosphate
  modified_base 3: mod_base = OTHER; note = 2'-O-methyladenosine-3'-phosphate
  modified_base 4: mod_base = OTHER; note = 2'-O-methyluridine-3'-phosphate
  modified_base 5: mod_base = OTHER; note = 2'-O-methylguanosine-3'-phosphate
  modified_base 6: mod_base = OTHER; note = 2'-O-methylcytidine-3'-phosphate
  modified_base 7: mod_base = OTHER; note = 2'-deoxy-2'-fluorouridine-3'-phosphate
  modified_base 8: mod_base = OTHER; note = 2'-O-methylcytidine-3'-phosphate
  modified_base 9: mod_base = OTHER; note = 2'-deoxy-2'-fluorouridine-3'-phosphate
  modified_base 10: mod_base = OTHER; note = 2'-deoxy-2'-fluorocytidine-3'-phosphate
  modified_base 11: mod_base = OTHER; note = 2'-deoxy-2'-fluoroadenosine-3'-phosphate
  modified_base 12: mod_base = OTHER; note = 2'-O-methyluridine-3'-phosphate
  modified_base 13: mod_base = OTHER; note = 2'-O-methylcytidine-3'-phosphate
  modified_base 14: mod_base = OTHER; note = 2'-O-methylcytidine-3'-phosphate
  modified_base 15: mod_base = OTHER; note = 2'-O-methyladenosine-3'-phosphate
  modified_base 16: mod_base = OTHER; note = 2'-O-methylcytidine-3'-phosphate
  modified_base 17: mod_base = OTHER; note = 2'-O-methyluridine-3'-phosphate
  modified_base 18: mod_base = OTHER; note = 2'-O-methyluridine-3'-phosphate
  modified_base 19: mod_base = OTHER; note = 2'-O-methyladenosine-3'-phosphate
  modified_base 20: mod_base = OTHER; note = 2'-O-methyluridine-3'-phosphate
  modified_base 21: mod_base = OTHER; note = 2'-O-methyladenosine
taatgctctcatccacttata

SEQ ID NO: 3911 - RNA, 21 nt, synthetic construct
  source 1..21: mol_type = other RNA
  modified_base 1: mod_base = OTHER; note = 2'-O-methyladenosine-3'-phosphate
  modified_base 2: mod_base = OTHER; note = 2'-O-methyladenosine-3'-phosphate
  modified_base 3: mod_base = OTHER; note = 2'-O-methyluridine-3'-phosphate
  modified_base 4: mod_base = OTHER; note = 2'-O-methylguanosine-3'-phosphate
  modified_base 5: mod_base = OTHER; note = 2'-O-methylcytidine-3'-phosphate
  modified_base 6: mod_base = OTHER; note = 2'-O-methyluridine-3'-phosphate
  modified_base 7: mod_base = OTHER; note = 2'-deoxy-2'-fluorocytidine-3'-phosphate
  modified_base 8: mod_base = OTHER; note = 2'-O-methyluridine-3'-phosphate
  modified_base 9: mod_base = OTHER; note = 2'-deoxy-2'-fluorocytidine-3'-phosphate
  modified_base 10: mod_base = OTHER; note = 2'-deoxy-2'-fluoroadenosine-3'-phosphate
  modified_base 11: mod_base = OTHER; note = 2'-deoxy-2'-fluorouridine-3'-phosphate
  modified_base 12: mod_base = OTHER; note = 2'-O-methylcytidine-3'-phosphate
  modified_base 13: mod_base = OTHER; note = 2'-O-methylcytidine-3'-phosphate
  modified_base 14: mod_base = OTHER; note = 2'-O-methyladenosine-3'-phosphate
  modified_base 15: mod_base = OTHER; note = 2'-O-methylcytidine-3'-phosphate
  modified_base 16: mod_base = OTHER; note = 2'-O-methyluridine-3'-phosphate
  modified_base 17: mod_base = OTHER; note = 2'-O-methyluridine-3'-phosphate
  modified_base 18: mod_base = OTHER; note = 2'-O-methyladenosine-3'-phosphate
  modified_base 19: mod_base = OTHER; note = 2'-O-methyluridine-3'-phosphate
  modified_base 20: mod_base = OTHER; note = 2'-O-methyluridine-3'-phosphate
  modified_base 21: mod_base = OTHER; note = 2'-O-methyladenosine
aatgctctcatccacttatta

SEQ ID NO: 3912 - RNA, 21 nt, synthetic construct
  source 1..21: mol_type = other RNA
  modified_base 1: mod_base = OTHER; note = 2'-O-methyladenosine-3'-phosphate
  modified_base 2: mod_base = OTHER; note = 2'-O-methyluridine-3'-phosphate
  modified_base 3: mod_base = OTHER; note = 2'-O-methylguanosine-3'-phosphate
  modified_base 4: mod_base = OTHER; note = 2'-O-methylcytidine-3'-phosphate
  modified_base 5: mod_base = OTHER; note = 2'-O-methyluridine-3'-phosphate
  modified_base 6: mod_base = OTHER; note = 2'-O-methylcytidine-3'-phosphate
  modified_base 7: mod_base = OTHER; note = 2'-deoxy-2'-fluorouridine-3'-phosphate
  modified_base 8: mod_base = OTHER; note = 2'-O-methylcytidine-3'-phosphate
  modified_base 9: mod_base = OTHER; note = 2'-deoxy-2'-fluoroadenosine-3'-phosphate
  modified_base 10: mod_base = OTHER; note = 2'-deoxy-2'-fluorouridine-3'-phosphate
  modified_base 11: mod_base = OTHER; note = 2'-deoxy-2'-fluorocytidine-3'-phosphate
  modified_base 12: mod_base = OTHER; note = 2'-O-methylcytidine-3'-phosphate
  modified_base 13: mod_base = OTHER; note = 2'-O-methyladenosine-3'-phosphate
  modified_base 14: mod_base = OTHER; note = 2'-O-methylcytidine-3'-phosphate
  modified_base 15: mod_base = OTHER; note = 2'-O-methyluridine-3'-phosphate
  modified_base 16: mod_base = OTHER; note = 2'-O-methyluridine-3'-phosphate
  modified_base 17: mod_base = OTHER; note = 2'-O-methyladenosine-3'-phosphate
  modified_base 18: mod_base = OTHER; note = 2'-O-methyluridine-3'-phosphate
  modified_base 19: mod_base = OTHER; note = 2'-O-methyluridine-3'-phosphate
  modified_base 20: mod_base = OTHER; note = 2'-O-methyladenosine-3'-phosphate
  modified_base 21: mod_base = OTHER; note = 2'-O-methyladenosine
atgctctcatccacttattaa

SEQ ID NO: 3913 - RNA, 21 nt, synthetic construct
  source 1..21: mol_type = other RNA
  modified_base 1: mod_base = OTHER; note = 2'-O-methyluridine-3'-phosphate
  modified_base 2: mod_base = OTHER; note = 2'-O-methylguanosine-3'-phosphate
  modified_base 3: mod_base = OTHER; note = 2'-O-methylcytidine-3'-phosphate
  modified_base 4: mod_base = OTHER; note = 2'-O-methyluridine-3'-phosphate
  modified_base 5: mod_base = OTHER; note = 2'-O-methylcytidine-3'-phosphate
  modified_base 6: mod_base = OTHER; note = 2'-O-methyluridine-3'-phosphate
  modified_base 7: mod_base = OTHER; note = 2'-deoxy-2'-fluorocytidine-3'-phosphate
  modified_base 8: mod_base = OTHER; note = 2'-O-methyladenosine-3'-phosphate
  modified_base 9: mod_base = OTHER; note = 2'-deoxy-2'-fluorouridine-3'-phosphate
  modified_base 10: mod_base = OTHER; note = 2'-deoxy-2'-fluorocytidine-3'-phosphate
  modified_base 11: mod_base = OTHER; note = 2'-deoxy-2'-fluorocytidine-3'-phosphate
  modified_base 12: mod_base = OTHER; note = 2'-O-methyladenosine-3'-phosphate
  modified_base 13: mod_base = OTHER; note = 2'-O-methylcytidine-3'-phosphate
  modified_base 14: mod_base = OTHER; note = 2'-O-methyluridine-3'-phosphate
  modified_base 15: mod_base = OTHER; note = 2'-O-methyluridine-3'-phosphate
  modified_base 16: mod_base = OTHER; note = 2'-O-methyladenosine-3'-phosphate
  modified_base 17: mod_base = OTHER; note = 2'-O-methyluridine-3'-phosphate
  modified_base 18: mod_base = OTHER; note = 2'-O-methyluridine-3'-phosphate
  modified_base 19: mod_base = OTHER; note = 2'-O-methyladenosine-3'-phosphate
  modified_base 20: mod_base = OTHER; note = 2'-O-methyladenosine-3'-phosphate
  modified_base 21: mod_base = OTHER; note = 2'-O-methyladenosine
tgctctcatccacttattaaa

SEQ ID NO: 3914 - RNA, 21 nt, synthetic construct
  source 1..21: mol_type = other RNA
  modified_base 1: mod_base = OTHER; note = 2'-O-methylguanosine-3'-phosphate
  modified_base 2: mod_base = OTHER; note = 2'-O-methylcytidine-3'-phosphate
  modified_base 3: mod_base = OTHER; note = 2'-O-methyluridine-3'-phosphate
  modified_base 4: mod_base = OTHER; note = 2'-O-methylcytidine-3'-phosphate
  modified_base 5: mod_base = OTHER; note = 2'-O-methyluridine-3'-phosphate
  modified_base 6: mod_base = OTHER; note = 2'-O-methylcytidine-3'-phosphate
  modified_base 7: mod_base = OTHER; note = 2'-deoxy-2'-fluoroadenosine-3'-phosphate
  modified_base 8: mod_base = OTHER; note = 2'-O-methyluridine-3'-phosphate
  modified_base 9: mod_base = OTHER; note = 2'-deoxy-2'-fluorocytidine-3'-phosphate
  modified_base 10: mod_base = OTHER; note = 2'-deoxy-2'-fluorocytidine-3'-phosphate
  modified_base 11: mod_base = OTHER; note = 2'-deoxy-2'-fluoroadenosine-3'-phosphate
  modified_base 12: mod_base = OTHER; note = 2'-O-methylcytidine-3'-phosphate
  modified_base 13: mod_base = OTHER; note = 2'-O-methyluridine-3'-phosphate
  modified_base 14: mod_base = OTHER; note = 2'-O-methyluridine-3'-phosphate
  modified_base 15: mod_base = OTHER; note = 2'-O-methyladenosine-3'-phosphate
  modified_base 16: mod_base = OTHER; note = 2'-O-methyluridine-3'-phosphate
  modified_base 17: mod_base = OTHER; note = 2'-O-methyluridine-3'-phosphate
  modified_base 18: mod_base = OTHER; note = 2'-O-methyladenosine-3'-phosphate
  modified_base 19: mod_base = OTHER; note = 2'-O-methyladenosine-3'-phosphate
  modified_base 20: mod_base = OTHER; note = 2'-O-methyladenosine-3'-phosphate
  modified_base 21: mod_base = OTHER; note = 2'-O-methyladenosine
gctctcatccacttattaaaa

SEQ ID NO: 3915 - RNA, 21 nt, synthetic construct
  source 1..21: mol_type = other RNA
  modified_base 1: mod_base = OTHER; note = 2'-O-methylcytidine-3'-phosphate
  modified_base 2: mod_base = OTHER; note = 2'-O-methyluridine-3'-phosphate
  modified_base 3: mod_base = OTHER; note = 2'-O-methylcytidine-3'-phosphate
  modified_base 4: mod_base = OTHER; note = 2'-O-methyluridine-3'-phosphate
  modified_base 5: mod_base = OTHER; note = 2'-O-methylcytidine-3'-phosphate
  modified_base 6: mod_base = OTHER; note = 2'-O-methyladenosine-3'-phosphate
  modified_base 7: mod_base = OTHER; note = 2'-deoxy-2'-fluorouridine-3'-phosphate
  modified_base 8: mod_base = OTHER; note = 2'-O-methylcytidine-3'-phosphate
  modified_base 9: mod_base = OTHER; note = 2'-deoxy-2'-fluorocytidine-3'-phosphate
  modified_base 10: mod_base = OTHER; note = 2'-deoxy-2'-fluoroadenosine-3'-phosphate
  modified_base 11: mod_base = OTHER; note = 2'-deoxy-2'-fluorocytidine-3'-phosphate
  modified_base 12: mod_base = OTHER; note = 2'-O-methyluridine-3'-phosphate
  modified_base 13: mod_base = OTHER; note = 2'-O-methyluridine-3'-phosphate
  modified_base 14: mod_base = OTHER; note = 2'-O-methyladenosine-3'-phosphate
  modified_base 15: mod_base = OTHER; note = 2'-O-methyluridine-3'-phosphate
  modified_base 16: mod_base = OTHER; note = 2'-O-methyluridine-3'-phosphate
  modified_base 17: mod_base = OTHER; note = 2'-O-methyladenosine-3'-phosphate
  modified_base 18: mod_base = OTHER; note = 2'-O-methyladenosine-3'-phosphate
  modified_base 19: mod_base = OTHER; note = 2'-O-methyladenosine-3'-phosphate
  modified_base 20: mod_base = OTHER; note = 2'-O-methyluridine-3'-phosphate
  modified_base 21: mod_base = OTHER; note = 2'-O-methyladenosine
ctctcatccacttattaaata

SEQ ID NO: 3916 - RNA, 21 nt, synthetic construct
  source 1..21: mol_type = other RNA
  modified_base 1: mod_base = OTHER; note = 2'-O-methyluridine-3'-phosphate
  modified_base 2: mod_base = OTHER; note = 2'-O-methylcytidine-3'-phosphate
  modified_base 3: mod_base = OTHER; note = 2'-O-methyluridine-3'-phosphate
  modified_base 4: mod_base = OTHER; note = 2'-O-methylcytidine-3'-phosphate
  modified_base 5: mod_base = OTHER; note = 2'-O-methyladenosine-3'-phosphate
  modified_base 6: mod_base = OTHER; note = 2'-O-methyluridine-3'-phosphate
  modified_base 7: mod_base = OTHER; note = 2'-deoxy-2'-fluorocytidine-3'-phosphate
  modified_base 8: mod_base = OTHER; note = 2'-O-methylcytidine-3'-phosphate
  modified_base 9: mod_base = OTHER; note = 2'-deoxy-2'-fluoroadenosine-3'-phosphate
  modified_base 10: mod_base = OTHER; note = 2'-deoxy-2'-fluorocytidine-3'-phosphate
  modified_base 11: mod_base = OTHER; note = 2'-deoxy-2'-fluorouridine-3'-phosphate
  modified_base 12: mod_base = OTHER; note = 2'-O-methyluridine-3'-phosphate
  modified_base 13: mod_base = OTHER; note = 2'-O-methyladenosine-3'-phosphate
  modified_base 14: mod_base = OTHER; note = 2'-O-methyluridine-3'-phosphate
  modified_base 15: mod_base = OTHER; note = 2'-O-methyluridine-3'-phosphate
  modified_base 16: mod_base = OTHER; note = 2'-O-methyladenosine-3'-phosphate
  modified_base 17: mod_base = OTHER; note = 2'-O-methyladenosine-3'-phosphate
  modified_base 18: mod_base = OTHER; note = 2'-O-methyladenosine-3'-phosphate
  modified_base 19: mod_base = OTHER; note = 2'-O-methyluridine-3'-phosphate
  modified_base 20: mod_base = OTHER; note = 2'-O-methyladenosine-3'-phosphate
  modified_base 21: mod_base = OTHER; note = 2'-O-methyladenosine
tctcatccacttattaaataa

SEQ ID NO: 3917 - RNA, 21 nt, synthetic construct
  source 1..21: mol_type = other RNA
  modified_base 1: mod_base = OTHER; note = 2'-O-methylcytidine-3'-phosphate
  modified_base 2: mod_base = OTHER; note = 2'-O-methyluridine-3'-phosphate
  modified_base 3: mod_base = OTHER; note = 2'-O-methylcytidine-3'-phosphate
  modified_base 4: mod_base = OTHER; note = 2'-O-methyladenosine-3'-phosphate
  modified_base 5: mod_base = OTHER; note = 2'-O-methyluridine-3'-phosphate
  modified_base 6: mod_base = OTHER; note = 2'-O-methylcytidine-3'-phosphate
  modified_base 7: mod_base = OTHER; note = 2'-deoxy-2'-fluorocytidine-3'-phosphate
  modified_base 8: mod_base = OTHER; note = 2'-O-methyladenosine-3'-phosphate
  modified_base 9: mod_base = OTHER; note = 2'-deoxy-2'-fluorocytidine-3'-phosphate
  modified_base 10: mod_base = OTHER; note = 2'-deoxy-2'-fluorouridine-3'-phosphate
  modified_base 11: mod_base = OTHER; note = 2'-deoxy-2'-fluorouridine-3'-phosphate
  modified_base 12: mod_base = OTHER; note = 2'-O-methyladenosine-3'-phosphate
  modified_base 13: mod_base = OTHER; note = 2'-O-methyluridine-3'-phosphate
  modified_base 14: mod_base = OTHER; note = 2'-O-methyluridine-3'-phosphate
  modified_base 15: mod_base = OTHER; note = 2'-O-methyladenosine-3'-phosphate
  modified_base 16: mod_base = OTHER; note = 2'-O-methyladenosine-3'-phosphate
  modified_base 17: mod_base = OTHER; note = 2'-O-methyladenosine-3'-phosphate
  modified_base 18: mod_base = OTHER; note = 2'-O-methyluridine-3'-phosphate
  modified_base 19: mod_base = OTHER; note = 2'-O-methyladenosine-3'-phosphate
  modified_base 20: mod_base = OTHER; note = 2'-O-methyladenosine-3'-phosphate
  modified_base 21: mod_base = OTHER; note = 2'-O-methyladenosine
ctcatccacttattaaataaa

SEQ ID NO: 3918 - RNA, 21 nt, synthetic construct
  source 1..21: mol_type = other RNA
  modified_base 1: mod_base = OTHER; note = 2'-O-methyluridine-3'-phosphate
  modified_base 2: mod_base = OTHER; note = 2'-O-methyluridine-3'-phosphate
  modified_base 3: mod_base = OTHER; note = 2'-O-methyladenosine-3'-phosphate
  modified_base 4: mod_base = OTHER; note = 2'-O-methyladenosine-3'-phosphate
  modified_base 5: mod_base = OTHER; note = 2'-O-methyladenosine-3'-phosphate
  modified_base 6: mod_base = OTHER; note = 2'-O-methyluridine-3'-phosphate
  modified_base 7: mod_base = OTHER; note = 2'-deoxy-2'-fluoroadenosine-3'-phosphate
  modified_base 8: mod_base = OTHER; note = 2'-O-methyladenosine-3'-phosphate
  modified_base 9: mod_base = OTHER; note = 2'-deoxy-2'-fluorouridine-3'-phosphate
  modified_base 10: mod_base = OTHER; note = 2'-deoxy-2'-fluorocytidine-3'-phosphate
  modified_base 11: mod_base = OTHER; note = 2'-deoxy-2'-fluoroadenosine-3'-phosphate
  modified_base 12: mod_base = OTHER; note = 2'-O-methyluridine-3'-phosphate
  modified_base 13: mod_base = OTHER; note = 2'-O-methyladenosine-3'-phosphate
  modified_base 14: mod_base = OTHER; note = 2'-O-methylguanosine-3'-phosphate
  modified_base 15: mod_base = OTHER; note = 2'-O-methyladenosine-3'-phosphate
  modified_base 16: mod_base = OTHER; note = 2'-O-methylguanosine-3'-phosphate
  modified_base 17: mod_base = OTHER; note = 2'-O-methylcytidine-3'-phosphate
  modified_base 18: mod_base = OTHER; note = 2'-O-methyladenosine-3'-phosphate
  modified_base 19: mod_base = OTHER; note = 2'-O-methylcytidine-3'-phosphate
  modified_base 20: mod_base = OTHER; note = 2'-O-methylcytidine-3'-phosphate
  modified_base 21: mod_base = OTHER; note = 2'-O-methyladenosine
ttaaataatcatagagcacca

SEQ ID NO: 3919 - RNA, 21 nt, synthetic construct
  source 1..21: mol_type = other RNA
  modified_base 1: mod_base = OTHER; note = 2'-O-methyluridine-3'-phosphate
  modified_base 2: mod_base = OTHER; note = 2'-O-methyladenosine-3'-phosphate
  modified_base 3: mod_base = OTHER; note = 2'-O-methyladenosine-3'-phosphate
  modified_base 4: mod_base = OTHER; note = 2'-O-methyladenosine-3'-phosphate
  modified_base 5: mod_base = OTHER; note = 2'-O-methyluridine-3'-phosphate
  modified_base 6: mod_base = OTHER; note = 2'-O-methyladenosine-3'-phosphate
  modified_base 7: mod_base = OTHER; note = 2'-deoxy-2'-fluoroadenosine-3'-phosphate
  modified_base 8: mod_base = OTHER; note = 2'-O-methyluridine-3'-phosphate
  modified_base 9: mod_base = OTHER; note = 2'-deoxy-2'-fluorocytidine-3'-phosphate
  modified_base 10: mod_base = OTHER; note = 2'-deoxy-2'-fluoroadenosine-3'-phosphate
  modified_base 11: mod_base = OTHER; note = 2'-deoxy-2'-fluorouridine-3'-phosphate
  modified_base 12: mod_base = OTHER; note = 2'-O-methyladenosine-3'-phosphate
  modified_base 13: mod_base = OTHER; note = 2'-O-methylguanosine-3'-phosphate
  modified_base 14: mod_base = OTHER; note = 2'-O-methyladenosine-3'-phosphate
  modified_base 15: mod_base = OTHER; note = 2'-O-methylguanosine-3'-phosphate
  modified_base 16: mod_base = OTHER; note = 2'-O-methylcytidine-3'-phosphate
  modified_base 17: mod_base = OTHER; note = 2'-O-methyladenosine-3'-phosphate
  modified_base 18: mod_base = OTHER; note = 2'-O-methylcytidine-3'-phosphate
  modified_base 19: mod_base = OTHER; note = 2'-O-methylcytidine-3'-phosphate
  modified_base 20: mod_base = OTHER; note = 2'-O-methylcytidine-3'-phosphate
  modified_base 21: mod_base = OTHER; note = 2'-O-methyladenosine
taaataatcatagagcaccca

SEQ ID NO: 3920 - RNA, 21 nt, synthetic construct
  source 1..21: mol_type = other RNA
  modified_base 1: mod_base = OTHER; note = 2'-O-methyladenosine-3'-phosphate
  modified_base 2: mod_base = OTHER; note = 2'-O-methyladenosine-3'-phosphate
  modified_base 3: mod_base = OTHER; note = 2'-O-methyladenosine-3'-phosphate
  modified_base 4: mod_base = OTHER; note = 2'-O-methyluridine-3'-phosphate
  modified_base 5: mod_base = OTHER; note = 2'-O-methyladenosine-3'-phosphate
  modified_base 6: mod_base = OTHER; note = 2'-O-methyladenosine-3'-phosphate
  modified_base 7: mod_base = OTHER; note = 2'-deoxy-2'-fluorouridine-3'-phosphate
  modified_base 8: mod_base = OTHER; note = 2'-O-methylcytidine-3'-phosphate
  modified_base 9: mod_base = OTHER; note = 2'-deoxy-2'-fluoroadenosine-3'-phosphate
  modified_base 10: mod_base = OTHER; note = 2'-deoxy-2'-fluorouridine-3'-phosphate
  modified_base 11: mod_base = OTHER; note = 2'-deoxy-2'-fluoroadenosine-3'-phosphate
  modified_base 12: mod_base = OTHER; note = 2'-O-methylguanosine-3'-phosphate
  modified_base 13: mod_base = OTHER; note = 2'-O-methyladenosine-3'-phosphate
  modified_base 14: mod_base = OTHER; note = 2'-O-methylguanosine-3'-phosphate
  modified_base 15: mod_base = OTHER; note = 2'-O-methylcytidine-3'-phosphate
  modified_base 16: mod_base = OTHER; note = 2'-O-methyladenosine-3'-phosphate
  modified_base 17: mod_base = OTHER; note = 2'-O-methylcytidine-3'-phosphate
  modified_base 18: mod_base = OTHER; note = 2'-O-methylcytidine-3'-phosphate
  modified_base 19: mod_base = OTHER; note = 2'-O-methylcytidine-3'-phosphate
  modified_base 20: mod_base = OTHER; note = 2'-O-methyladenosine-3'-phosphate
  modified_base 21: mod_base = OTHER; note = 2'-O-methyladenosine
aaataatcatagagcacccaa

SEQ ID NO: 3921 - RNA, 21 nt, synthetic construct
  source 1..21: mol_type = other RNA
  modified_base 1: mod_base = OTHER; note = 2'-O-methyladenosine-3'-phosphate
  modified_base 2: mod_base = OTHER; note = 2'-O-methyladenosine-3'-phosphate
  modified_base 3: mod_base = OTHER; note = 2'-O-methyluridine-3'-phosphate
  modified_base 4: mod_base = OTHER; note = 2'-O-methyladenosine-3'-phosphate
  modified_base 5: mod_base = OTHER; note = 2'-O-methyladenosine-3'-phosphate
  modified_base 6: mod_base = OTHER; note = 2'-O-methyluridine-3'-phosphate
  modified_base 7: mod_base = OTHER; note = 2'-deoxy-2'-fluorocytidine-3'-phosphate
  modified_base 8: mod_base = OTHER; note = 2'-O-methyladenosine-3'-phosphate
  modified_base 9: mod_base = OTHER; note = 2'-deoxy-2'-fluorouridine-3'-phosphate
  modified_base 10: mod_base = OTHER; note = 2'-deoxy-2'-fluoroadenosine-3'-phosphate
  modified_base 11: mod_base = OTHER; note = 2'-deoxy-2'-fluoroguanosine-3'-phosphate
  modified_base 12: mod_base = OTHER; note = 2'-O-methyladenosine-3'-phosphate
  modified_base 13: mod_base = OTHER; note = 2'-O-methylguanosine-3'-phosphate
  modified_base 14: mod_base = OTHER; note = 2'-O-methylcytidine-3'-phosphate
  modified_base 15: mod_base = OTHER; note = 2'-O-methyladenosine-3'-phosphate
  modified_base 16: mod_base = OTHER; note = 2'-O-methylcytidine-3'-phosphate
  modified_base 17: mod_base = OTHER; note = 2'-O-methylcytidine-3'-phosphate
  modified_base 18: mod_base = OTHER; note = 2'-O-methylcytidine-3'-phosphate
  modified_base 19: mod_base = OTHER; note = 2'-O-methyladenosine-3'-phosphate
  modified_base 20: mod_base = OTHER; note = 2'-O-methyluridine-3'-phosphate
  modified_base 21: mod_base = OTHER; note = 2'-O-methyladenosine
aataatcatagagcacccata

SEQ ID NO: 3922 - RNA, 21 nt, synthetic construct
  source 1..21: mol_type = other RNA
  modified_base 1: mod_base = OTHER; note = 2'-O-methyladenosine-3'-phosphate
  modified_base 2: mod_base = OTHER; note = 2'-O-methyluridine-3'-phosphate
  modified_base 3: mod_base = OTHER; note = 2'-O-methyladenosine-3'-phosphate
  modified_base 4: mod_base = OTHER; note = 2'-O-methyladenosine-3'-phosphate
  modified_base 5: mod_base = OTHER; note = 2'-O-methyluridine-3'-phosphate
  modified_base 6: mod_base = OTHER; note = 2'-O-methylcytidine-3'-phosphate
  modified_base 7: mod_base = OTHER; note = 2'-deoxy-2'-fluoroadenosine-3'-phosphate
  modified_base 8: mod_base = OTHER; note = 2'-O-methyluridine-3'-phosphate
  modified_base 9: mod_base = OTHER; note = 2'-deoxy-2'-fluoroadenosine-3'-phosphate
  modified_base 10: mod_base = OTHER; note = 2'-deoxy-2'-fluoroguanosine-3'-phosphate
  modified_base 11: mod_base = OTHER; note = 2'-deoxy-2'-fluoroadenosine-3'-phosphate
  modified_base 12: mod_base = OTHER; note = 2'-O-methylguanosine-3'-phosphate
  modified_base 13: mod_base = OTHER; note = 2'-O-methylcytidine-3'-phosphate
  modified_base 14: mod_base = OTHER; note = 2'-O-methyladenosine-3'-phosphate
  modified_base 15: mod_base = OTHER; note = 2'-O-methylcytidine-3'-phosphate
  modified_base 16: mod_base = OTHER; note = 2'-O-methylcytidine-3'-phosphate
  modified_base 17: mod_base = OTHER; note = 2'-O-methylcytidine-3'-phosphate
  modified_base 18: mod_base = OTHER; note = 2'-O-methyladenosine-3'-phosphate
  modified_base 19: mod_base = OTHER; note = 2'-O-methyluridine-3'-phosphate
  modified_base 20: mod_base = OTHER; note = 2'-O-methyladenosine-3'-phosphate
  modified_base 21: mod_base = OTHER; note = 2'-O-methyladenosine
ataatcatagagcacccataa

SEQ ID NO: 3923 - RNA, 21 nt, synthetic construct
  source 1..21: mol_type = other RNA
  modified_base 1: mod_base = OTHER; note = 2'-O-methyluridine-3'-phosphate
  modified_base 2: mod_base = OTHER; note = 2'-O-methyladenosine-3'-phosphate
  modified_base 3: mod_base = OTHER; note = 2'-O-methyladenosine-3'-phosphate
  modified_base 4: mod_base = OTHER; note = 2'-O-methyluridine-3'-phosphate
  modified_base 5: mod_base = OTHER; note = 2'-O-methylcytidine-3'-phosphate
  modified_base 6: mod_base = OTHER; note = 2'-O-methyladenosine-3'-phosphate
  modified_base 7: mod_base = OTHER; note = 2'-deoxy-2'-fluorouridine-3'-phosphate
  modified_base 8: mod_base = OTHER; note = 2'-O-methyladenosine-3'-phosphate
  modified_base 9: mod_base = OTHER; note = 2'-deoxy-2'-fluoroguanosine-3'-phosphate
  modified_base 10: mod_base = OTHER; note = 2'-deoxy-2'-fluoroadenosine-3'-phosphate
  modified_base 11: mod_base = OTHER; note = 2'-deoxy-2'-fluoroguanosine-3'-phosphate
  modified_base 12: mod_base = OTHER; note = 2'-O-methylcytidine-3'-phosphate
  modified_base 13: mod_base = OTHER; note = 2'-O-methyladenosine-3'-phosphate
  modified_base 14: mod_base = OTHER; note = 2'-O-methylcytidine-3'-phosphate
  modified_base 15: mod_base = OTHER; note = 2'-O-methylcytidine-3'-phosphate
  modified_base 16: mod_base = OTHER; note = 2'-O-methylcytidine-3'-phosphate
  modified_base 17: mod_base = OTHER; note = 2'-O-methyladenosine-3'-phosphate
  modified_base 18: mod_base = OTHER; note = 2'-O-methyluridine-3'-phosphate
  modified_base 19: mod_base = OTHER; note = 2'-O-methyladenosine-3'-phosphate
  modified_base 20: mod_base = OTHER; note = 2'-O-methyluridine-3'-phosphate
  modified_base 21: mod_base = OTHER; note = 2'-O-methyladenosine
taatcatagagcacccatata

SEQ ID NO: 3924 - RNA, 21 nt, synthetic construct
  source 1..21: mol_type = other RNA
  modified_base 1: mod_base = OTHER; note = 2'-O-methylguanosine-3'-phosphate
  modified_base 2: mod_base = OTHER; note = 2'-O-methyladenosine-3'-phosphate
  modified_base 3: mod_base = OTHER; note = 2'-O-methylguanosine-3'-phosphate
  modified_base 4: mod_base = OTHER; note = 2'-O-methylcytidine-3'-phosphate
  modified_base 5: mod_base = OTHER; note = 2'-O-methyladenosine-3'-phosphate
  modified_base 6: mod_base = OTHER; note = 2'-O-methylcytidine-3'-phosphate
  modified_base 7: mod_base = OTHER; note = 2'-deoxy-2'-fluorocytidine-3'-phosphate
  modified_base 8: mod_base = OTHER; note = 2'-O-methylcytidine-3'-phosphate
  modified_base 9: mod_base = OTHER; note = 2'-deoxy-2'-fluoroadenosine-3'-phosphate
  modified_base 10: mod_base = OTHER; note = 2'-deoxy-2'-fluorouridine-3'-phosphate
  modified_base 11: mod_base = OTHER; note = 2'-deoxy-2'-fluoroadenosine-3'-phosphate
  modified_base 12: mod_base = OTHER; note = 2'-O-methyluridine-3'-phosphate
  modified_base 13: mod_base = OTHER; note = 2'-O-methylcytidine-3'-phosphate
  modified_base 14: mod_base = OTHER; note = 2'-O-methyluridine-3'-phosphate
  modified_base 15: mod_base = OTHER; note = 2'-O-methyluridine-3'-phosphate
  modified_base 16: mod_base = OTHER; note = 2'-O-methylguanosine-3'-phosphate
  modified_base 17: mod_base = OTHER; note = 2'-O-methylcytidine-3'-phosphate
  modified_base 18: mod_base = OTHER; note = 2'-O-methyluridine-3'-phosphate
  modified_base 19: mod_base = OTHER; note = 2'-O-methyluridine-3'-phosphate
  modified_base 20: mod_base = OTHER; note = 2'-O-methylguanosine-3'-phosphate
  modified_base 21: mod_base = OTHER; note = 2'-O-methyladenosine
gagcacccatatcttgcttga

SEQ ID NO: 3925 - RNA, 21 nt, synthetic construct
  source 1..21: mol_type = other RNA
  modified_base 1: mod_base = OTHER; note = 2'-O-methyladenosine-3'-phosphate
  modified_base 2: mod_base = OTHER; note = 2'-O-methyluridine-3'-phosphate
  modified_base 3: mod_base = OTHER; note = 2'-O-methyladenosine-3'-phosphate
  modified_base 4: mod_base = OTHER; note = 2'-O-methyluridine-3'-phosphate
  modified_base 5: mod_base = OTHER; note = 2'-O-methylcytidine-3'-phosphate
  modified_base 6: mod_base = OTHER; note = 2'-O-methyluridine-3'-phosphate
  modified_base 7: mod_base = OTHER; note = 2'-deoxy-2'-fluorouridine-3'-phosphate
  modified_base 8: mod_base = OTHER; note = 2'-O-methylguanosine-3'-phosphate
  modified_base 9: mod_base = OTHER; note = 2'-deoxy-2'-fluorocytidine-3'-phosphate
  modified_base 10: mod_base = OTHER; note = 2'-deoxy-2'-fluorouridine-3'-phosphate
  modified_base 11: mod_base = OTHER; note = 2'-deoxy-2'-fluorouridine-3'-phosphate
  modified_base 12: mod_base = OTHER; note = 2'-O-methylguanosine-3'-phosphate
  modified_base 13: mod_base = OTHER; note = 2'-O-methylcytidine-3'-phosphate
  modified_base 14: mod_base = OTHER; note = 2'-O-methylcytidine-3'-phosphate
  modified_base 15: mod_base = OTHER; note = 2'-O-methyladenosine-3'-phosphate
  modified_base 16: mod_base = OTHER; note = 2'-O-methylcytidine-3'-phosphate
  modified_base 17: mod_base = OTHER; note = 2'-O-methyladenosine-3'-phosphate
  modified_base 18: mod_base = OTHER; note = 2'-O-methyladenosine-3'-phosphate
  modified_base 19: mod_base = OTHER; note = 2'-O-methyluridine-3'-phosphate
  modified_base 20: mod_base = OTHER; note = 2'-O-methyladenosine-3'-phosphate
  modified_base 21: mod_base = OTHER; note = 2'-O-methyladenosine
atatcttgcttgccacaataa

SEQ ID NO: 3926 - RNA, 21 nt, synthetic construct
  source 1..21: mol_type = other RNA
  modified_base 1: mod_base = OTHER; note = 2'-O-methyladenosine-3'-phosphate
  modified_base 2: mod_base = OTHER; note = 2'-O-methyluridine-3'-phosphate
  modified_base 3: mod_base = OTHER; note = 2'-O-methyladenosine-3'-phosphate
  modified_base 4: mod_base = OTHER; note = 2'-O-methylguanosine-3'-phosphate
  modified_base 5: mod_base = OTHER; note = 2'-O-methylguanosine-3'-phosphate
  modified_base 6: mod_base = OTHER; note = 2'-O-methyluridine-3'-phosphate
  modified_base 7: mod_base = OTHER; note = 2'-deoxy-2'-fluorocytidine-3'-phosphate
  modified_base 8: mod_base = OTHER; note = 2'-O-methylcytidine-3'-phosphate
  modified_base 9: mod_base = OTHER; note = 2'-deoxy-2'-fluorouridine-3'-phosphate
  modified_base 10: mod_base = OTHER; note = 2'-deoxy-2'-fluoroguanosine-3'-phosphate
  modified_base 11: mod_base = OTHER; note = 2'-deoxy-2'-fluorocytidine-3'-phosphate
  modified_base 12: mod_base = OTHER; note = 2'-O-methylcytidine-3'-phosphate
  modified_base 13: mod_base = OTHER; note = 2'-O-methylcytidine-3'-phosphate
  modified_base 14: mod_base = OTHER; note = 2'-O-methyluridine-3'-phosphate
  modified_base 15: mod_base = OTHER; note = 2'-O-methylcytidine-3'-phosphate
  modified_base 16: mod_base = OTHER; note = 2'-O-methyladenosine-3'-phosphate
  modified_base 17: mod_base = OTHER; note = 2'-O-methylguanosine-3'-phosphate
  modified_base 18: mod_base = OTHER; note = 2'-O-methylguanosine-3'-phosphate
  modified_base 19: mod_base = OTHER; note = 2'-O-methylguanosine-3'-phosphate
  modified_base 20: mod_base = OTHER; note = 2'-O-methyladenosine-3'-phosphate
  modified_base 21: mod_base = OTHER; note = 2'-O-methyladenosine
ataggtcctgccctcagggaa

SEQ ID NO: 3927 - RNA, 21 nt, synthetic construct
  source 1..21: mol_type = other RNA
  modified_base 1: mod_base = OTHER; note = 2'-O-methyluridine-3'-phosphate
  modified_base 2: mod_base = OTHER; note = 2'-O-methyladenosine-3'-phosphate
  modified_base 3: mod_base = OTHER; note = 2'-O-methylguanosine-3'-phosphate
  modified_base 4: mod_base = OTHER; note = 2'-O-methylguanosine-3'-phosphate
  modified_base 5: mod_base = OTHER; note = 2'-O-methyluridine-3'-phosphate
  modified_base 6: mod_base = OTHER; note = 2'-O-methylcytidine-3'-phosphate
  modified_base 7: mod_base = OTHER; note = 2'-deoxy-2'-fluorocytidine-3'-phosphate
  modified_base 8: mod_base = OTHER; note = 2'-O-methyluridine-3'-phosphate
  modified_base 9: mod_base = OTHER; note = 2'-deoxy-2'-fluoroguanosine-3'-phosphate
  modified_base 10: mod_base = OTHER; note = 2'-deoxy-2'-fluorocytidine-3'-phosphate
  modified_base 11: mod_base = OTHER; note = 2'-deoxy-2'-fluorocytidine-3'-phosphate
  modified_base 12: mod_base = OTHER; note = 2'-O-methylcytidine-3'-phosphate
  modified_base 13: mod_base = OTHER; note = 2'-O-methyluridine-3'-phosphate
  modified_base 14: mod_base = OTHER; note = 2'-O-methylcytidine-3'-phosphate
  modified_base 15: mod_base = OTHER; note = 2'-O-methyladenosine-3'-phosphate
  modified_base 16: mod_base = OTHER; note = 2'-O-methylguanosine-3'-phosphate
  modified_base 17: mod_base = OTHER; note = 2'-O-methylguanosine-3'-phosphate
  modified_base 18: mod_base = OTHER; note = 2'-O-methylguanosine-3'-phosphate
  modified_base 19: mod_base = OTHER; note = 2'-O-methyladenosine-3'-phosphate
  modified_base 20: mod_base = OTHER; note = 2'-O-methyluridine-3'-phosphate
  modified_base 21: mod_base = OTHER; note = 2'-O-methyladenosine
taggtcctgccctcagggata

SEQ ID NO: 3928 - RNA, 21 nt, synthetic construct
  source 1..21: mol_type = other RNA
  modified_base 1: mod_base = OTHER; note = 2'-O-methyladenosine-3'-phosphate
  modified_base 2: mod_base = OTHER; note = 2'-O-methylguanosine-3'-phosphate
  modified_base 3: mod_base = OTHER; note = 2'-O-methylguanosine-3'-phosphate
  modified_base 4: mod_base = OTHER; note = 2'-O-methyluridine-3'-phosphate
  modified_base 5: mod_base = OTHER; note = 2'-O-methylcytidine-3'-phosphate
  modified_base 6: mod_base = OTHER; note = 2'-O-methylcytidine-3'-phosphate
  modified_base 7: mod_base = OTHER; note = 2'-deoxy-2'-fluorouridine-3'-phosphate
  modified_base 8: mod_base = OTHER; note = 2'-O-methylguanosine-3'-phosphate
  modified_base 9: mod_base = OTHER; note = 2'-deoxy-2'-fluorocytidine-3'-phosphate
  modified_base 10: mod_base = OTHER; note = 2'-deoxy-2'-fluorocytidine-3'-phosphate
  modified_base 11: mod_base = OTHER; note = 2'-deoxy-2'-fluorocytidine-3'-phosphate
  modified_base 12: mod_base = OTHER; note = 2'-O-methyluridine-3'-phosphate
  modified_base 13: mod_base = OTHER; note = 2'-O-methylcytidine-3'-phosphate
  modified_base 14: mod_base = OTHER; note = 2'-O-methyladenosine-3'-phosphate
  modified_base 15: mod_base = OTHER; note = 2'-O-methylguanosine-3'-phosphate
  modified_base 16: mod_base = OTHER; note = 2'-O-methylguanosine-3'-phosphate
  modified_base 17: mod_base = OTHER; note = 2'-O-methylguanosine-3'-phosphate
  modified_base 18: mod_base = OTHER; note = 2'-O-methyladenosine-3'-phosphate
  modified_base 19: mod_base = OTHER; note = 2'-O-methyluridine-3'-phosphate
  modified_base 20: mod_base = OTHER; note = 2'-O-methyluridine-3'-phosphate
  modified_base 21: mod_base = OTHER; note = 2'-O-methyladenosine
aggtcctgccctcagggatta

SEQ ID NO: 3929 - RNA, 21 nt, synthetic construct
  source 1..21: mol_type = other RNA
  modified_base 1: mod_base = OTHER; note = 2'-O-methylguanosine-3'-phosphate
  modified_base 2: mod_base = OTHER; note = 2'-O-methylguanosine-3'-phosphate
  modified_base 3: mod_base = OTHER; note = 2'-O-methyluridine-3'-phosphate
  modified_base 4: mod_base = OTHER; note = 2'-O-methylcytidine-3'-phosphate
  modified_base 5: mod_base = OTHER; note = 2'-O-methylcytidine-3'-phosphate
  modified_base 6: mod_base = OTHER; note = 2'-O-methyluridine-3'-phosphate
  modified_base 7: mod_base = OTHER; note = 2'-deoxy-2'-fluoroguanosine-3'-phosphate
  modified_base 8: mod_base = OTHER; note = 2'-O-methylcytidine-3'-phosphate
  modified_base 9: mod_base = OTHER; note = 2'-deoxy-2'-fluorocytidine-3'-phosphate
  modified_base 10: mod_base = OTHER; note = 2'-deoxy-2'-fluorocytidine-3'-phosphate
  modified_base 11: mod_base = OTHER; note = 2'-deoxy-2'-fluorouridine-3'-phosphate
  modified_base 12: mod_base = OTHER; note = 2'-O-methylcytidine-3'-phosphate
  modified_base 13: mod_base = OTHER; note = 2'-O-methyladenosine-3'-phosphate
  modified_base 14: mod_base = OTHER; note = 2'-O-methylguanosine-3'-phosphate
  modified_base 15: mod_base = OTHER; note = 2'-O-methylguanosine-3'-phosphate
  modified_base 16: mod_base = OTHER; note = 2'-O-methylguanosine-3'-phosphate
  modified_base 17: mod_base = OTHER; note = 2'-O-methyladenosine-3'-phosphate
  modified_base 18: mod_base = OTHER; note = 2'-O-methyluridine-3'-phosphate
  modified_base 19: mod_base = OTHER; note = 2'-O-methyluridine-3'-phosphate
  modified_base 20: mod_base = OTHER; note = 2'-O-methyluridine-3'-phosphate
  modified_base 21: mod_base = OTHER; note = 2'-O-methyladenosine
ggtcctgccctcagggattta

SEQ ID NO: 3930 - RNA, 21 nt, synthetic construct
  source 1..21: mol_type = other RNA
  modified_base 1: mod_base = OTHER; note = 2'-O-methylguanosine-3'-phosphate
  modified_base 2: mod_base = OTHER; note = 2'-O-methyluridine-3'-phosphate
  modified_base 3: mod_base = OTHER; note = 2'-O-methylcytidine-3'-phosphate
  modified_base 4: mod_base = OTHER; note = 2'-O-methylcytidine-3'-phosphate
  modified_base 5: mod_base = OTHER; note = 2'-O-methyluridine-3'-phosphate
  modified_base 6: mod_base = OTHER; note = 2'-O-methylguanosine-3'-phosphate
  modified_base 7: mod_base = OTHER; note = 2'-deoxy-2'-fluorocytidine-3'-phosphate
  modified_base 8: mod_base = OTHER; note = 2'-O-methylcytidine-3'-phosphate
  modified_base 9: mod_base = OTHER; note = 2'-deoxy-2'-fluorocytidine-3'-phosphate
  modified_base 10: mod_base = OTHER; note = 2'-deoxy-2'-fluorouridine-3'-phosphate
  modified_base 11: mod_base = OTHER; note = 2'-deoxy-2'-fluorocytidine-3'-phosphate
  modified_base 12: mod_base = OTHER; note = 2'-O-methyladenosine-3'-phosphate
  modified_base 13: mod_base = OTHER; note = 2'-O-methylguanosine-3'-phosphate
  modified_base 14: mod_base = OTHER; note = 2'-O-methylguanosine-3'-phosphate
  modified_base 15: mod_base = OTHER; note = 2'-O-methylguanosine-3'-phosphate
  modified_base 16: mod_base = OTHER; note = 2'-O-methyladenosine-3'-phosphate
  modified_base 17: mod_base = OTHER; note = 2'-O-methyluridine-3'-phosphate
  modified_base 18: mod_base = OTHER; note = 2'-O-methyluridine-3'-phosphate
  modified_base 19: mod_base = OTHER; note = 2'-O-methyluridine-3'-phosphate
  modified_base 20: mod_base = OTHER; note = 2'-O-methyluridine-3'-phosphate
  modified_base 21: mod_base = OTHER; note = 2'-O-methyladenosine
gtcctgccctcagggatttta

SEQ ID NO: 3931 - RNA, 21 nt, synthetic construct
  source 1..21: mol_type = other RNA
  modified_base 1: mod_base = OTHER; note = 2'-O-methyluridine-3'-phosphate
  modified_base 2: mod_base = OTHER; note = 2'-O-methylcytidine-3'-phosphate
  modified_base 3: mod_base = OTHER; note = 2'-O-methylcytidine-3'-phosphate
  modified_base 4: mod_base = OTHER; note = 2'-O-methyluridine-3'-phosphate
  modified_base 5: mod_base = OTHER; note = 2'-O-methylguanosine-3'-phosphate
  modified_base 6: mod_base = OTHER; note = 2'-O-methylcytidine-3'-phosphate
  modified_base 7: mod_base = OTHER; note = 2'-deoxy-2'-fluorocytidine-3'-phosphate
  modified_base 8: mod_base = OTHER; note = 2'-O-methylcytidine-3'-phosphate
  modified_base 9: mod_base = OTHER; note = 2'-deoxy-2'-fluorouridine-3'-phosphate
  modified_base 10: mod_base = OTHER; note = 2'-deoxy-2'-fluorocytidine-3'-phosphate
  modified_base 11: mod_base = OTHER; note = 2'-deoxy-2'-fluoroadenosine-3'-phosphate
  modified_base 12: mod_base = OTHER; note = 2'-O-methylguanosine-3'-phosphate
  modified_base 13: mod_base = OTHER; note = 2'-O-methylguanosine-3'-phosphate
  modified_base 14: mod_base = OTHER; note = 2'-O-methylguanosine-3'-phosphate
  modified_base 15: mod_base = OTHER; note = 2'-O-methyladenosine-3'-phosphate
  modified_base 16: mod_base = OTHER; note = 2'-O-methyluridine-3'-phosphate
  modified_base 17: mod_base = OTHER; note = 2'-O-methyluridine-3'-phosphate
  modified_base 18: mod_base = OTHER; note = 2'-O-methyluridine-3'-phosphate
  modified_base 19: mod_base = OTHER; note = 2'-O-methyluridine-3'-phosphate
  modified_base 20: mod_base = OTHER; note = 2'-O-methyladenosine-3'-phosphate
  modified_base 21: mod_base = OTHER; note = 2'-O-methyladenosine
tcctgccctcagggattttaa

SEQ ID NO: 3932 - RNA, 21 nt, synthetic construct
  source 1..21: mol_type = other RNA
  modified_base 1: mod_base = OTHER; note = 2'-O-methylcytidine-3'-phosphate
  modified_base 2: mod_base = OTHER; note = 2'-O-methylcytidine-3'-phosphate
  modified_base 3: mod_base = OTHER; note = 2'-O-methyluridine-3'-phosphate
  modified_base 4: mod_base = OTHER; note = 2'-O-methylguanosine-3'-phosphate
  modified_base 5: mod_base = OTHER; note = 2'-O-methylcytidine-3'-phosphate
  modified_base 6: mod_base = OTHER; note = 2'-O-methylcytidine-3'-phosphate
  modified_base 7: mod_base = OTHER; note = 2'-deoxy-2'-fluorocytidine-3'-phosphate
  modified_base 8: mod_base = OTHER; note = 2'-O-methyluridine-3'-phosphate
  modified_base 9: mod_base = OTHER; note = 2'-deoxy-2'-fluorocytidine-3'-phosphate
  modified_base 10: mod_base = OTHER; note = 2'-deoxy-2'-fluoroadenosine-3'-phosphate
  modified_base 11: mod_base = OTHER; note = 2'-deoxy-2'-fluoroguanosine-3'-phosphate
  modified_base 12: mod_base = OTHER; note = 2'-O-methylguanosine-3'-phosphate
  modified_base 13: mod_base = OTHER; note = 2'-O-methylguanosine-3'-phosphate
  modified_base 14: mod_base = OTHER; note = 2'-O-methyladenosine-3'-phosphate
  modified_base 15: mod_base = OTHER; note = 2'-O-methyluridine-3'-phosphate
  modified_base 16: mod_base = OTHER; note = 2'-O-methyluridine-3'-phosphate
  modified_base 17: mod_base = OTHER; note = 2'-O-methyluridine-3'-phosphate
  modified_base 18: mod_base = OTHER; note = 2'-O-methyluridine-3'-phosphate
  modified_base 19: mod_base = OTHER; note = 2'-O-methyladenosine-3'-phosphate
  modified_base 20: mod_base = OTHER; note = 2'-O-methyladenosine-3'-phosphate
  modified_base 21: mod_base = OTHER; note = 2'-O-methyladenosine
cctgccctcagggattttaaa

SEQ ID NO: 3933 - RNA, 21 nt, synthetic construct
  source 1..21: mol_type = other RNA
  modified_base 1: mod_base = OTHER; note = 2'-O-methylcytidine-3'-phosphate
  modified_base 2: mod_base = OTHER; note = 2'-O-methyluridine-3'-phosphate
  modified_base 3: mod_base = OTHER; note = 2'-O-methylguanosine-3'-phosphate
  modified_base 4: mod_base = OTHER; note = 2'-O-methylcytidine-3'-phosphate
  modified_base 5: mod_base = OTHER; note = 2'-O-methylcytidine-3'-phosphate
  modified_base 6: mod_base = OTHER; note = 2'-O-methylcytidine-3'-phosphate
  modified_base 7: mod_base = OTHER; note = 2'-deoxy-2'-fluorouridine-3'-phosphate
  modified_base 8: mod_base = OTHER; note = 2'-O-methylcytidine-3'-phosphate
  modified_base 9: mod_base = OTHER; note = 2'-deoxy-2'-fluoroadenosine-3'-phosphate
  modified_base 10: mod_base = OTHER; note = 2'-deoxy-2'-fluoroguanosine-3'-phosphate
  modified_base 11: mod_base = OTHER; note = 2'-deoxy-2'-fluoroguanosine-3'-phosphate
  modified_base 12: mod_base = OTHER; note = 2'-O-methylguanosine-3'-phosphate
  modified_base 13: mod_base = OTHER; note = 2'-O-methyladenosine-3'-phosphate
  modified_base 14: mod_base = OTHER; note = 2'-O-methyluridine-3'-phosphate
  modified_base 15: mod_base = OTHER; note = 2'-O-methyluridine-3'-phosphate
  modified_base 16: mod_base = OTHER; note = 2'-O-methyluridine-3'-phosphate
  modified_base 17: mod_base = OTHER; note = 2'-O-methyluridine-3'-phosphate
  modified_base 18: mod_base = OTHER; note = 2'-O-methyladenosine-3'-phosphate
  modified_base 19: mod_base = OTHER; note = 2'-O-methyladenosine-3'-phosphate
  modified_base 20: mod_base = OTHER; note = 2'-O-methyladenosine-3'-phosphate
  modified_base 21: mod_base = OTHER; note = 2'-O-methyladenosine
ctgccctcagggattttaaaa

SEQ ID NO: 3934 - RNA, 21 nt, synthetic construct
  source 1..21: mol_type = other RNA
  modified_base 1: mod_base = OTHER; note = 2'-O-methyluridine-3'-phosphate
  modified_base 2: mod_base = OTHER; note = 2'-O-methylguanosine-3'-phosphate
  modified_base 3: mod_base = OTHER; note = 2'-O-methylcytidine-3'-phosphate
  modified_base 4: mod_base = OTHER; note = 2'-O-methylcytidine-3'-phosphate
  modified_base 5: mod_base = OTHER; note = 2'-O-methylcytidine-3'-phosphate
  modified_base 6: mod_base = OTHER; note = 2'-O-methyluridine-3'-phosphate
  modified_base 7: mod_base = OTHER; note = 2'-deoxy-2'-fluorocytidine-3'-phosphate
  modified_base 8: mod_base = OTHER; note = 2'-O-methyladenosine-3'-phosphate
  modified_base 9: mod_base = OTHER; note = 2'-deoxy-2'-fluoroguanosine-3'-phosphate
  modified_base 10: mod_base = OTHER; note = 2'-deoxy-2'-fluoroguanosine-3'-phosphate
  modified_base 11: mod_base = OTHER; note = 2'-deoxy-2'-fluoroguanosine-3'-phosphate
  modified_base 12: mod_base = OTHER; note = 2'-O-methyladenosine-3'-phosphate
  modified_base 13: mod_base = OTHER; note = 2'-O-methyluridine-3'-phosphate
  modified_base 14: mod_base = OTHER; note = 2'-O-methyluridine-3'-phosphate
  modified_base 15: mod_base = OTHER; note = 2'-O-methyluridine-3'-phosphate
  modified_base 16: mod_base = OTHER; note = 2'-O-methyluridine-3'-phosphate
  modified_base 17: mod_base = OTHER; note = 2'-O-methyladenosine-3'-phosphate
  modified_base 18: mod_base = OTHER; note = 2'-O-methyladenosine-3'-phosphate
  modified_base 19: mod_base = OTHER; note = 2'-O-methyladenosine-3'-phosphate
  modified_base 20: mod_base = OTHER; note = 2'-O-methylguanosine-3'-phosphate
  modified_base 21: mod_base = OTHER; note = 2'-O-methyladenosine
tgccctcagggattttaaaga

SEQ ID NO: 3935 - RNA, 21 nt, synthetic construct
  source 1..21: mol_type = other RNA
  modified_base 1: mod_base = OTHER; note = 2'-O-methylguanosine-3'-phosphate
  modified_base 2: mod_base = OTHER; note = 2'-O-methylcytidine-3'-phosphate
  modified_base 3: mod_base = OTHER; note = 2'-O-methylcytidine-3'-phosphate
  modified_base 4: mod_base = OTHER; note = 2'-O-methylcytidine-3'-phosphate
  modified_base 5: mod_base = OTHER; note = 2'-O-methyluridine-3'-phosphate
  modified_base 6: mod_base = OTHER; note = 2'-O-methylcytidine-3'-phosphate
  modified_base 7: mod_base = OTHER; note = 2'-deoxy-2'-fluoroadenosine-3'-phosphate
  modified_base 8: mod_base = OTHER; note = 2'-O-methylguanosine-3'-phosphate
  modified_base 9: mod_base = OTHER; note = 2'-deoxy-2'-fluoroguanosine-3'-phosphate
  modified_base 10: mod_base = OTHER; note = 2'-deoxy-2'-fluoroguanosine-3'-phosphate
  modified_base 11: mod_base = OTHER; note = 2'-deoxy-2'-fluoroadenosine-3'-phosphate
  modified_base 12: mod_base = OTHER; note = 2'-O-methyluridine-3'-phosphate
  modified_base 13: mod_base = OTHER; note = 2'-O-methyluridine-3'-phosphate
  modified_base 14: mod_base = OTHER; note = 2'-O-methyluridine-3'-phosphate
  modified_base 15: mod_base = OTHER; note = 2'-O-methyluridine-3'-phosphate
  modified_base 16: mod_base = OTHER; note = 2'-O-methyladenosine-3'-phosphate
  modified_base 17: mod_base = OTHER; note = 2'-O-methyladenosine-3'-phosphate
  modified_base 18: mod_base = OTHER; note = 2'-O-methyladenosine-3'-phosphate
  modified_base 19: mod_base = OTHER; note = 2'-O-methylguanosine-3'-phosphate
  modified_base 20: mod_base = OTHER; note = 2'-O-methyluridine-3'-phosphate
  modified_base 21: mod_base = OTHER; note = 2'-O-methyladenosine
gccctcagggattttaaagta

SEQ ID NO: 3936 - RNA, 21 nt, synthetic construct
  source 1..21: mol_type = other RNA
  modified_base 1: mod_base = OTHER; note = 2'-O-methylcytidine-3'-phosphate
  modified_base 2: mod_base = OTHER; note = 2'-O-methylcytidine-3'-phosphate
  modified_base 3: mod_base = OTHER; note = 2'-O-methylcytidine-3'-phosphate
  modified_base 4: mod_base = OTHER; note = 2'-O-methyluridine-3'-phosphate
  modified_base 5: mod_base = OTHER; note = 2'-O-methylcytidine-3'-phosphate
  modified_base 6: mod_base = OTHER; note = 2'-O-methyladenosine-3'-phosphate
  modified_base 7: mod_base = OTHER; note = 2'-deoxy-2'-fluoroguanosine-3'-phosphate
  modified_base 8: mod_base = OTHER; note = 2'-O-methylguanosine-3'-phosphate
  modified_base 9: mod_base = OTHER; note = 2'-deoxy-2'-fluoroguanosine-3'-phosphate
  modified_base 10: mod_base = OTHER; note = 2'-deoxy-2'-fluoroadenosine-3'-phosphate
  modified_base 11: mod_base = OTHER; note = 2'-deoxy-2'-fluorouridine-3'-phosphate
  modified_base 12: mod_base = OTHER; note = 2'-O-methyluridine-3'-phosphate
  modified_base 13: mod_base = OTHER; note = 2'-O-methyluridine-3'-phosphate
  modified_base 14: mod_base = OTHER; note = 2'-O-methyluridine-3'-phosphate
  modified_base 15: mod_base = OTHER; note = 2'-O-methyladenosine-3'-phosphate
  modified_base 16: mod_base = OTHER; note = 2'-O-methyladenosine-3'-phosphate
  modified_base 17: mod_base = OTHER; note = 2'-O-methyladenosine-3'-phosphate
  modified_base 18: mod_base = OTHER; note = 2'-O-methylguanosine-3'-phosphate
  modified_base 19: mod_base = OTHER; note = 2'-O-methyluridine-3'-phosphate
  modified_base 20: mod_base = OTHER; note = 2'-O-methylcytidine-3'-phosphate
  modified_base 21: mod_base = OTHER; note = 2'-O-methyladenosine
ccctcagggattttaaagtca

SEQ ID NO: 3937 - RNA, 21 nt, synthetic construct
  source 1..21: mol_type = other RNA
  modified_base 1: mod_base = OTHER; note = 2'-O-methyladenosine-3'-phosphate
  modified_base 2: mod_base = OTHER; note = 2'-O-methylguanosine-3'-phosphate
  modified_base 3: mod_base = OTHER; note = 2'-O-methylguanosine-3'-phosphate
  modified_base 4: mod_base = OTHER; note = 2'-O-methylguanosine-3'-phosphate
  modified_base 5: mod_base = OTHER; note = 2'-O-methyladenosine-3'-phosphate
  modified_base 6: mod_base = OTHER; note = 2'-O-methyluridine-3'-phosphate
  modified_base 7: mod_base = OTHER; note = 2'-deoxy-2'-fluorouridine-3'-phosphate
  modified_base 8: mod_base = OTHER; note = 2'-O-methyluridine-3'-phosphate
  modified_base 9: mod_base = OTHER; note = 2'-deoxy-2'-fluorouridine-3'-phosphate
  modified_base 10: mod_base = OTHER; note = 2'-deoxy-2'-fluoroadenosine-3'-phosphate
  modified_base 11: mod_base = OTHER; note = 2'-deoxy-2'-fluoroadenosine-3'-phosphate
  modified_base 12: mod_base = OTHER; note = 2'-O-methyladenosine-3'-phosphate
  modified_base 13: mod_base = OTHER; note = 2'-O-methylguanosine-3'-phosphate
  modified_base 14: mod_base = OTHER; note = 2'-O-methyluridine-3'-phosphate
  modified_base 15: mod_base = OTHER; note = 2'-O-methylcytidine-3'-phosphate
  modified_base 16: mod_base = OTHER; note = 2'-O-methyluridine-3'-phosphate
  modified_base 17: mod_base = OTHER; note = 2'-O-methyladenosine-3'-phosphate
  modified_base 18: mod_base = OTHER; note = 2'-O-methyladenosine-3'-phosphate
  modified_base 19: mod_base = OTHER; note = 2'-O-methyluridine-3'-phosphate
  modified_base 20: mod_base = OTHER; note = 2'-O-methyluridine-3'-phosphate
  modified_base 21: mod_base = OTHER; note = 2'-O-methyladenosine
agggattttaaagtctaatta

SEQ ID NO: 3938 - RNA, 21 nt, synthetic construct
  source 1..21: mol_type = other RNA
  modified_base 1: mod_base = OTHER; note = 2'-O-methylguanosine-3'-phosphate
  modified_base 2: mod_base = OTHER; note = 2'-O-methylguanosine-3'-phosphate
  modified_base 3: mod_base = OTHER; note = 2'-O-methylguanosine-3'-phosphate
  modified_base 4: mod_base = OTHER; note = 2'-O-methyladenosine-3'-phosphate
  modified_base 5: mod_base = OTHER; note = 2'-O-methyluridine-3'-phosphate
  modified_base 6: mod_base = OTHER; note = 2'-O-methyluridine-3'-phosphate
  modified_base 7: mod_base = OTHER; note = 2'-deoxy-2'-fluorouridine-3'-phosphate
  modified_base 8: mod_base = OTHER; note = 2'-O-methyluridine-3'-phosphate
  modified_base 9: mod_base = OTHER; note = 2'-deoxy-2'-fluoroadenosine-3'-phosphate
  modified_base 10: mod_base = OTHER; note = 2'-deoxy-2'-fluoroadenosine-3'-phosphate
  modified_base 11: mod_base = OTHER; note = 2'-deoxy-2'-fluoroadenosine-3'-phosphate
  modified_base 12: mod_base = OTHER; note = 2'-O-methylguanosine-3'-phosphate
  modified_base 13: mod_base = OTHER; note = 2'-O-methyluridine-3'-phosphate
  modified_base 14: mod_base = OTHER; note = 2'-O-methylcytidine-3'-phosphate
  modified_base 15: mod_base = OTHER; note = 2'-O-methyluridine-3'-phosphate
  modified_base 16: mod_base = OTHER; note = 2'-O-methyladenosine-3'-phosphate
  modified_base 17: mod_base = OTHER; note = 2'-O-methyladenosine-3'-phosphate
  modified_base 18: mod_base = OTHER; note = 2'-O-methyluridine-3'-phosphate
  modified_base 19: mod_base = OTHER; note = 2'-O-methyluridine-3'-phosphate
  modified_base 20: mod_base = OTHER; note = 2'-O-methyluridine-3'-phosphate
  modified_base 21: mod_base = OTHER; note = 2'-O-methyladenosine
gggattttaaagtctaattta

SEQ ID NO: 3939 - RNA, 21 nt, synthetic construct
  source 1..21: mol_type = other RNA
  modified_base 1: mod_base = OTHER; note = 2'-O-methylguanosine-3'-phosphate
  modified_base 2: mod_base = OTHER; note = 2'-O-methyladenosine-3'-phosphate
  modified_base 3: mod_base = OTHER; note = 2'-O-methyladenosine-3'-phosphate
  modified_base 4: mod_base = OTHER; note = 2'-O-methylguanosine-3'-phosphate
  modified_base 5: mod_base = OTHER; note = 2'-O-methyladenosine-3'-phosphate
  modified_base 6: mod_base = OTHER; note = 2'-O-methylguanosine-3'-phosphate
  modified_base 7: mod_base = OTHER; note = 2'-deoxy-2'-fluoroadenosine-3'-phosphate
  modified_base 8: mod_base = OTHER; note = 2'-O-methyluridine-3'-phosphate
  modified_base 9: mod_base = OTHER; note = 2'-deoxy-2'-fluorouridine-3'-phosphate
  modified_base 10: mod_base = OTHER; note = 2'-deoxy-2'-fluoroadenosine-3'-phosphate
  modified_base 11: mod_base = OTHER; note = 2'-deoxy-2'-fluoroadenosine-3'-phosphate
  modified_base 12: mod_base = OTHER; note = 2'-O-methyladenosine-3'-phosphate
  modified_base 13: mod_base = OTHER; note = 2'-O-methyluridine-3'-phosphate
  modified_base 14: mod_base = OTHER; note = 2'-O-methyluridine-3'-phosphate
  modified_base 15: mod_base = OTHER; note = 2'-O-methylguanosine-3'-phosphate
  modified_base 16: mod_base = OTHER; note = 2'-O-methyladenosine-3'-phosphate
  modified_base 17: mod_base = OTHER; note = 2'-O-methylcytidine-3'-phosphate
  modified_base 18: mod_base = OTHER; note = 2'-O-methyladenosine-3'-phosphate
  modified_base 19: mod_base = OTHER; note = 2'-O-methylguanosine-3'-phosphate
  modified_base 20: mod_base = OTHER; note = 2'-O-methyladenosine-3'-phosphate
  modified_base 21: mod_base = OTHER; note = 2'-O-methyladenosine
gaagagattaaattgacagaa

SEQ ID NO: 3940 - RNA, 21 nt, synthetic construct
  source 1..21: mol_type = other RNA
  modified_base 1: mod_base = OTHER; note = 2'-O-methyladenosine-3'-phosphate
  modified_base 2: mod_base = OTHER; note = 2'-O-methyladenosine-3'-phosphate
  modified_base 3: mod_base = OTHER; note = 2'-O-methylguanosine-3'-phosphate
  modified_base 4: mod_base = OTHER; note = 2'-O-methyladenosine-3'-phosphate
  modified_base 5: mod_base = OTHER; note = 2'-O-methylguanosine-3'-phosphate
  modified_base 6: mod_base = OTHER; note = 2'-O-methyladenosine-3'-phosphate
  modified_base 7: mod_base = OTHER; note = 2'-deoxy-2'-fluorouridine-3'-phosphate
  modified_base 8: mod_base = OTHER; note = 2'-O-methyluridine-3'-phosphate
  modified_base 9: mod_base = OTHER; note = 2'-deoxy-2'-fluoroadenosine-3'-phosphate
  modified_base 10: mod_base = OTHER; note = 2'-deoxy-2'-fluoroadenosine-3'-phosphate
  modified_base 11: mod_base = OTHER; note = 2'-deoxy-2'-fluoroadenosine-3'-phosphate
  modified_base 12: mod_base = OTHER; note = 2'-O-methyluridine-3'-phosphate
  modified_base 13: mod_base = OTHER; note = 2'-O-methyluridine-3'-phosphate
  modified_base 14: mod_base = OTHER; note = 2'-O-methylguanosine-3'-phosphate
  modified_base 15: mod_base = OTHER; note = 2'-O-methyladenosine-3'-phosphate
  modified_base 16: mod_base = OTHER; note = 2'-O-methylcytidine-3'-phosphate
  modified_base 17: mod_base = OTHER; note = 2'-O-methyladenosine-3'-phosphate
  modified_base 18: mod_base = OTHER; note = 2'-O-methylguanosine-3'-phosphate
  modified_base 19: mod_base = OTHER; note = 2'-O-methyladenosine-3'-phosphate
  modified_base 20: mod_base = OTHER; note = 2'-O-methyluridine-3'-phosphate
  modified_base 21: mod_base = OTHER; note = 2'-O-methyladenosine
aagagattaaattgacagata

SEQ ID NO: 3941 - RNA, 21 nt, synthetic construct
  source 1..21: mol_type = other RNA
  modified_base 1: mod_base = OTHER; note = 2'-O-methyladenosine-3'-phosphate
  modified_base 2: mod_base = OTHER; note = 2'-O-methylguanosine-3'-phosphate
  modified_base 3: mod_base = OTHER; note = 2'-O-methyladenosine-3'-phosphate
  modified_base 4: mod_base = OTHER; note = 2'-O-methylguanosine-3'-phosphate
  modified_base 5: mod_base = OTHER; note = 2'-O-methyladenosine-3'-phosphate
  modified_base 6: mod_base = OTHER; note = 2'-O-methyluridine-3'-phosphate
  modified_base 7: mod_base = OTHER; note = 2'-deoxy-2'-fluorouridine-3'-phosphate
  modified_base 8: mod_base = OTHER; note = 2'-O-methyladenosine-3'-phosphate
  modified_base 9: mod_base = OTHER; note = 2'-deoxy-2'-fluoroadenosine-3'-phosphate
  modified_base 10: mod_base = OTHER; note = 2'-deoxy-2'-fluoroadenosine-3'-phosphate
  modified_base 11: mod_base = OTHER; note = 2'-deoxy-2'-fluorouridine-3'-phosphate
  modified_base 12: mod_base = OTHER; note = 2'-O-methyluridine-3'-phosphate
  modified_base 13: mod_base = OTHER; note = 2'-O-methylguanosine-3'-phosphate
  modified_base 14: mod_base = OTHER; note = 2'-O-methyladenosine-3'-phosphate
  modified_base 15: mod_base = OTHER; note = 2'-O-methylcytidine-3'-phosphate
  modified_base 16: mod_base = OTHER; note = 2'-O-methyladenosine-3'-phosphate
  modified_base 17: mod_base = OTHER; note = 2'-O-methylguanosine-3'-phosphate
  modified_base 18: mod_base = OTHER; note = 2'-O-methyladenosine-3'-phosphate
  modified_base 19: mod_base = OTHER; note = 2'-O-methyluridine-3'-phosphate
  modified_base 20: mod_base = OTHER; note = 2'-O-methyladenosine-3'-phosphate
  modified_base 21: mod_base = OTHER; note = 2'-O-methyladenosine
agagattaaattgacagataa

SEQ ID NO: 3942 - RNA, 21 nt, synthetic construct
  source 1..21: mol_type = other RNA
  modified_base 1: mod_base = OTHER; note = 2'-O-methyluridine-3'-phosphate
  modified_base 2: mod_base = OTHER; note = 2'-O-methyluridine-3'-phosphate
  modified_base 3: mod_base = OTHER; note = 2'-O-methylguanosine-3'-phosphate
  modified_base 4: mod_base = OTHER; note = 2'-O-methyladenosine-3'-phosphate
  modified_base 5: mod_base = OTHER; note = 2'-O-methylcytidine-3'-phosphate
  modified_base 6: mod_base = OTHER; note = 2'-O-methyladenosine-3'-phosphate
  modified_base 7: mod_base = OTHER; note = 2'-deoxy-2'-fluoroguanosine-3'-phosphate
  modified_base 8: mod_base = OTHER; note = 2'-O-methyladenosine-3'-phosphate
  modified_base 9: mod_base = OTHER; note = 2'-deoxy-2'-fluorouridine-3'-phosphate
  modified_base 10: mod_base = OTHER; note = 2'-deoxy-2'-fluoroadenosine-3'-phosphate
  modified_base 11: mod_base = OTHER; note = 2'-deoxy-2'-fluoroadenosine-3'-phosphate
  modified_base 12: mod_base = OTHER; note = 2'-O-methyladenosine-3'-phosphate
  modified_base 13: mod_base = OTHER; note = 2'-O-methyladenosine-3'-phosphate
  modified_base 14: mod_base = OTHER; note = 2'-O-methyluridine-3'-phosphate
  modified_base 15: mod_base = OTHER; note = 2'-O-methyladenosine-3'-phosphate
  modified_base 16: mod_base = OTHER; note = 2'-O-methylcytidine-3'-phosphate
  modified_base 17: mod_base = OTHER; note = 2'-O-methylguanosine-3'-phosphate
  modified_base 18: mod_base = OTHER; note = 2'-O-methyladenosine-3'-phosphate
  modified_base 19: mod_base = OTHER; note = 2'-O-methyladenosine-3'-phosphate
  modified_base 20: mod_base = OTHER; note = 2'-O-methylguanosine-3'-phosphate
  modified_base 21: mod_base = OTHER; note = 2'-O-methyladenosine
ttgacagataaaatacgaaga

SEQ ID NO: 3943 - RNA, 21 nt, synthetic construct
  source 1..21: mol_type = other RNA
  modified_base 1: mod_base = OTHER; note = 2'-O-methyluridine-3'-phosphate
  modified_base 2: mod_base = OTHER; note = 2'-O-methylguanosine-3'-phosphate
  modified_base 3: mod_base = OTHER; note = 2'-O-methyladenosine-3'-phosphate
  modified_base 4: mod_base = OTHER; note = 2'-O-methylcytidine-3'-phosphate
  modified_base 5: mod_base = OTHER; note = 2'-O-methyladenosine-3'-phosphate
  modified_base 6: mod_base = OTHER; note = 2'-O-methylguanosine-3'-phosphate
  modified_base 7: mod_base = OTHER; note = 2'-deoxy-2'-fluoroadenosine-3'-phosphate
  modified_base 8: mod_base = OTHER; note = 2'-O-methyluridine-3'-phosphate
  modified_base 9: mod_base = OTHER; note = 2'-deoxy-2'-fluoroadenosine-3'-phosphate
  modified_base 10: mod_base = OTHER; note = 2'-deoxy-2'-fluoroadenosine-3'-phosphate
  modified_base 11: mod_base = OTHER; note = 2'-deoxy-2'-fluoroadenosine-3'-phosphate
  modified_base 12: mod_base = OTHER; note = 2'-O-methyladenosine-3'-phosphate
  modified_base 13: mod_base = OTHER; note = 2'-O-methyluridine-3'-phosphate
  modified_base 14: mod_base = OTHER; note = 2'-O-methyladenosine-3'-phosphate
  modified_base 15: mod_base = OTHER; note = 2'-O-methylcytidine-3'-phosphate
  modified_base 16: mod_base = OTHER; note = 2'-O-methylguanosine-3'-phosphate
  modified_base 17: mod_base = OTHER; note = 2'-O-methyladenosine-3'-phosphate
  modified_base 18: mod_base = OTHER; note = 2'-O-methyladenosine-3'-phosphate
  modified_base 19: mod_base = OTHER; note = 2'-O-methylguanosine-3'-phosphate
  modified_base 20: mod_base = OTHER; note = 2'-O-methyluridine-3'-phosphate
  modified_base 21: mod_base = OTHER; note = 2'-O-methyladenosine
tgacagataaaatacgaagta

SEQ ID NO: 3944 - RNA, 21 nt, synthetic construct
  source 1..21: mol_type = other RNA
  modified_base 1: mod_base = OTHER; note = 2'-O-methylguanosine-3'-phosphate
  modified_base 2: mod_base = OTHER; note = 2'-O-methyladenosine-3'-phosphate
  modified_base 3: mod_base = OTHER; note = 2'-O-methylcytidine-3'-phosphate
  modified_base 4: mod_base = OTHER; note = 2'-O-methyladenosine-3'-phosphate
  modified_base 5: mod_base = OTHER; note = 2'-O-methylguanosine-3'-phosphate
  modified_base 6: mod_base = OTHER; note = 2'-O-methyladenosine-3'-phosphate
  modified_base 7: mod_base = OTHER; note = 2'-deoxy-2'-fluorouridine-3'-phosphate
  modified_base 8: mod_base = OTHER; note = 2'-O-methyladenosine-3'-phosphate
  modified_base 9: mod_base = OTHER; note = 2'-deoxy-2'-fluoroadenosine-3'-phosphate
  modified_base 10: mod_base = OTHER; note = 2'-deoxy-2'-fluoroadenosine-3'-phosphate
  modified_base 11: mod_base = OTHER; note = 2'-deoxy-2'-fluoroadenosine-3'-phosphate
  modified_base 12: mod_base = OTHER; note = 2'-O-methyluridine-3'-phosphate
  modified_base 13: mod_base = OTHER; note = 2'-O-methyladenosine-3'-phosphate
  modified_base 14: mod_base = OTHER; note = 2'-O-methylcytidine-3'-phosphate
  modified_base 15: mod_base = OTHER; note = 2'-O-methylguanosine-3'-phosphate
  modified_base 16: mod_base = OTHER; note = 2'-O-methyladenosine-3'-phosphate
  modified_base 17: mod_base = OTHER; note = 2'-O-methyladenosine-3'-phosphate
  modified_base 18: mod_base = OTHER; note = 2'-O-methylguanosine-3'-phosphate
  modified_base 19: mod_base = OTHER; note = 2'-O-methyluridine-3'-phosphate
  modified_base 20: mod_base = OTHER; note = 2'-O-methylguanosine-3'-phosphate
  modified_base 21: mod_base = OTHER; note = 2'-O-methyladenosine
gacagataaaatacgaagtga

SEQ ID NO: 3945 - RNA, 21 nt, synthetic construct
  source 1..21: mol_type = other RNA
  modified_base 1: mod_base = OTHER; note = 2'-O-methyladenosine-3'-phosphate
  modified_base 2: mod_base = OTHER; note = 2'-O-methylcytidine-3'-phosphate
  modified_base 3: mod_base = OTHER; note = 2'-O-methyladenosine-3'-phosphate
  modified_base 4: mod_base = OTHER; note = 2'-O-methylguanosine-3'-phosphate
  modified_base 5: mod_base = OTHER; note = 2'-O-methyladenosine-3'-phosphate
  modified_base 6: mod_base = OTHER; note = 2'-O-methyluridine-3'-phosphate
  modified_base 7: mod_base = OTHER; note = 2'-deoxy-2'-fluoroadenosine-3'-phosphate
  modified_base 8: mod_base = OTHER; note = 2'-O-methyladenosine-3'-phosphate
  modified_base 9: mod_base = OTHER; note = 2'-deoxy-2'-fluoroadenosine-3'-phosphate
  modified_base 10: mod_base = OTHER; note = 2'-deoxy-2'-fluoroadenosine-3'-phosphate
  modified_base 11: mod_base = OTHER; note = 2'-deoxy-2'-fluorouridine-3'-phosphate
  modified_base 12: mod_base = OTHER; note = 2'-O-methyladenosine-3'-phosphate
  modified_base 13: mod_base = OTHER; note = 2'-O-methylcytidine-3'-phosphate
  modified_base 14: mod_base = OTHER; note = 2'-O-methylguanosine-3'-phosphate
  modified_base 15: mod_base = OTHER; note = 2'-O-methyladenosine-3'-phosphate
  modified_base 16: mod_base = OTHER; note = 2'-O-methyladenosine-3'-phosphate
  modified_base 17: mod_base = OTHER; note = 2'-O-methylguanosine-3'-phosphate
  modified_base 18: mod_base = OTHER; note = 2'-O-methyluridine-3'-phosphate
  modified_base 19: mod_base = OTHER; note = 2'-O-methylguanosine-3'-phosphate
  modified_base 20: mod_base = OTHER; note = 2'-O-methylguanosine-3'-phosphate
  modified_base 21: mod_base = OTHER; note = 2'-O-methyladenosine
acagataaaatacgaagtgga

SEQ ID NO: 3946 - RNA, 21 nt, synthetic construct
  source 1..21: mol_type = other RNA
  modified_base 1: mod_base = OTHER; note = 2'-O-methylguanosine-3'-phosphate
  modified_base 2: mod_base = OTHER; note = 2'-O-methyladenosine-3'-phosphate
  modified_base 3: mod_base = OTHER; note = 2'-O-methyladenosine-3'-phosphate
  modified_base 4: mod_base = OTHER; note = 2'-O-methylguanosine-3'-phosphate
  modified_base 5: mod_base = OTHER; note = 2'-O-methyluridine-3'-phosphate
  modified_base 6: mod_base = OTHER; note = 2'-O-methylguanosine-3'-phosphate
  modified_base 7: mod_base = OTHER; note = 2'-deoxy-2'-fluoroguanosine-3'-phosphate
  modified_base 8: mod_base = OTHER; note = 2'-O-methylguanosine-3'-phosphate
  modified_base 9: mod_base = OTHER; note = 2'-deoxy-2'-fluoroadenosine-3'-phosphate
  modified_base 10: mod_base = OTHER; note = 2'-deoxy-2'-fluorouridine-3'-phosphate
  modified_base 11: mod_base = OTHER; note = 2'-deoxy-2'-fluoroguanosine-3'-phosphate
  modified_base 12: mod_base = OTHER; note = 2'-O-methyluridine-3'-phosphate
  modified_base 13: mod_base = OTHER; note = 2'-O-methylcytidine-3'-phosphate
  modified_base 14: mod_base = OTHER; note = 2'-O-methyluridine-3'-phosphate
  modified_base 15: mod_base = OTHER; note = 2'-O-methyluridine-3'-phosphate
  modified_base 16: mod_base = OTHER; note = 2'-O-methylguanosine-3'-phosphate
  modified_base 17: mod_base = OTHER; note = 2'-O-methyladenosine-3'-phosphate
  modified_base 18: mod_base = OTHER; note = 2'-O-methylguanosine-3'-phosphate
  modified_base 19: mod_base = OTHER; note = 2'-O-methyluridine-3'-phosphate
  modified_base 20: mod_base = OTHER; note = 2'-O-methyluridine-3'-phosphate
  modified_base 21: mod_base = OTHER; note = 2'-O-methyladenosine
gaagtgggatgtcttgagtta

SEQ ID NO: 3947 - RNA, 21 nt, synthetic construct
  source 1..21: mol_type = other RNA
  modified_base 1: mod_base = OTHER; note = 2'-O-methyladenosine-3'-phosphate
  modified_base 2: mod_base = OTHER; note = 2'-O-methylguanosine-3'-phosphate
  modified_base 3: mod_base = OTHER; note = 2'-O-methyluridine-3'-phosphate
  modified_base 4: mod_base = OTHER; note = 2'-O-methylguanosine-3'-phosphate
  modified_base 5: mod_base = OTHER; note = 2'-O-methylguanosine-3'-phosphate
  modified_base 6: mod_base = OTHER; note = 2'-O-methylguanosine-3'-phosphate
  modified_base 7: mod_base = OTHER; note = 2'-deoxy-2'-fluoroadenosine-3'-phosphate
  modified_base 8: mod_base = OTHER; note = 2'-O-methyluridine-3'-phosphate
  modified_base 9: mod_base = OTHER; note = 2'-deoxy-2'-fluoroguanosine-3'-phosphate
  modified_base 10: mod_base = OTHER; note = 2'-deoxy-2'-fluorouridine-3'-phosphate
  modified_base 11: mod_base = OTHER; note = 2'-deoxy-2'-fluorocytidine-3'-phosphate
  modified_base 12: mod_base = OTHER; note = 2'-O-methyluridine-3'-phosphate
  modified_base 13: mod_base = OTHER; note = 2'-O-methyluridine-3'-phosphate
  modified_base 14: mod_base = OTHER; note = 2'-O-methylguanosine-3'-phosphate
  modified_base 15: mod_base = OTHER; note = 2'-O-methyladenosine-3'-phosphate
  modified_base 16: mod_base = OTHER; note = 2'-O-methylguanosine-3'-phosphate
  modified_base 17: mod_base = OTHER; note = 2'-O-methyluridine-3'-phosphate
  modified_base 18: mod_base = OTHER; note = 2'-O-methyluridine-3'-phosphate
  modified_base 19: mod_base = OTHER; note = 2'-O-methylcytidine-3'-phosphate
  modified_base 20: mod_base = OTHER; note = 2'-O-methyluridine-3'-phosphate
  modified_base 21: mod_base = OTHER; note = 2'-O-methyladenosine
agtgggatgtcttgagttcta

SEQ ID NO: 3948 - RNA, 21 nt, synthetic construct
  source 1..21: mol_type = other RNA
  modified_base 1: mod_base = OTHER; note = 2'-O-methylguanosine-3'-phosphate
  modified_base 2: mod_base = OTHER; note = 2'-O-methyladenosine-3'-phosphate
  modified_base 3: mod_base = OTHER; note = 2'-O-methyluridine-3'-phosphate
  modified_base 4: mod_base = OTHER; note = 2'-O-methylguanosine-3'-phosphate
  modified_base 5: mod_base = OTHER; note = 2'-O-methyluridine-3'-phosphate
  modified_base 6: mod_base = OTHER; note = 2'-O-methylcytidine-3'-phosphate
  modified_base 7: mod_base = OTHER; note = 2'-deoxy-2'-fluorouridine-3'-phosphate
  modified_base 8: mod_base = OTHER; note = 2'-O-methyluridine-3'-phosphate
  modified_base 9: mod_base = OTHER; note = 2'-deoxy-2'-fluoroguanosine-3'-phosphate
  modified_base 10: mod_base = OTHER; note = 2'-deoxy-2'-fluoroadenosine-3'-phosphate
  modified_base 11: mod_base = OTHER; note = 2'-deoxy-2'-fluoroguanosine-3'-phosphate
  modified_base 12: mod_base = OTHER; note = 2'-O-methyluridine-3'-phosphate
  modified_base 13: mod_base = OTHER; note = 2'-O-methyluridine-3'-phosphate
  modified_base 14: mod_base = OTHER; note = 2'-O-methylcytidine-3'-phosphate
  modified_base 15: mod_base = OTHER; note = 2'-O-methyluridine-3'-phosphate
  modified_base 16: mod_base = OTHER; note = 2'-O-methylguanosine-3'-phosphate
  modified_base 17: mod_base = OTHER; note = 2'-O-methylcytidine-3'-phosphate
  modified_base 18: mod_base = OTHER; note = 2'-O-methyladenosine-3'-phosphate
  modified_base 19: mod_base = OTHER; note = 2'-O-methyluridine-3'-phosphate
  modified_base 20: mod_base = OTHER; note = 2'-O-methylguanosine-3'-phosphate
  modified_base 21: mod_base = OTHER; note = 2'-O-methyladenosine
gatgtcttgagttctgcatga

SEQ ID NO: 3949 - RNA, 21 nt, synthetic construct
  source 1..21: mol_type = other RNA
  modified_base 1: mod_base = OTHER; note = 2'-O-methyladenosine-3'-phosphate
  modified_base 2: mod_base = OTHER; note = 2'-O-methylguanosine-3'-phosphate
  modified_base 3: mod_base = OTHER; note = 2'-O-methyluridine-3'-phosphate
  modified_base 4: mod_base = OTHER; note = 2'-O-methylguanosine-3'-phosphate
  modified_base 5: mod_base = OTHER; note = 2'-O-methylguanosine-3'-phosphate
  modified_base 6: mod_base = OTHER; note = 2'-O-methylguanosine-3'-phosphate
  modified_base 7: mod_base = OTHER; note = 2'-deoxy-2'-fluorouridine-3'-phosphate
  modified_base 8: mod_base = OTHER; note = 2'-O-methyluridine-3'-phosphate
  modified_base 9: mod_base = OTHER; note = 2'-deoxy-2'-fluorouridine-3'-phosphate
  modified_base 10: mod_base = OTHER; note = 2'-deoxy-2'-fluorocytidine-3'-phosphate
  modified_base 11: mod_base = OTHER; note = 2'-deoxy-2'-fluorouridine-3'-phosphate
  modified_base 12: mod_base = OTHER; note = 2'-O-methyladenosine-3'-phosphate
  modified_base 13: mod_base = OTHER; note = 2'-O-methylguanosine-3'-phosphate
  modified_base 14: mod_base = OTHER; note = 2'-O-methylguanosine-3'-phosphate
  modified_base 15: mod_base = OTHER; note = 2'-O-methyladenosine-3'-phosphate
  modified_base 16: mod_base = OTHER; note = 2'-O-methyluridine-3'-phosphate
  modified_base 17: mod_base = OTHER; note = 2'-O-methyladenosine-3'-phosphate
  modified_base 18: mod_base = OTHER; note = 2'-O-methylguanosine-3'-phosphate
  modified_base 19: mod_base = OTHER; note = 2'-O-methylguanosine-3'-phosphate
  modified_base 20: mod_base = OTHER; note = 2'-O-methyluridine-3'-phosphate
  modified_base 21: mod_base = OTHER; note = 2'-O-methyladenosine
agtgggtttctaggataggta

SEQ ID NO: 3950 - RNA, 21 nt, synthetic construct
  source 1..21: mol_type = other RNA
  modified_base 1: mod_base = OTHER; note = 2'-O-methylguanosine-3'-phosphate
  modified_base 2: mod_base = OTHER; note = 2'-O-methyluridine-3'-phosphate
  modified_base 3: mod_base = OTHER; note = 2'-O-methylguanosine-3'-phosphate
  modified_base 4: mod_base = OTHER; note = 2'-O-methylguanosine-3'-phosphate
  modified_base 5: mod_base = OTHER; note = 2'-O-methylguanosine-3'-phosphate
  modified_base 6: mod_base = OTHER; note = 2'-O-methyluridine-3'-phosphate
  modified_base 7: mod_base = OTHER; note = 2'-deoxy-2'-fluorouridine-3'-phosphate
  modified_base 8: mod_base = OTHER; note = 2'-O-methyluridine-3'-phosphate
  modified_base 9: mod_base = OTHER; note = 2'-deoxy-2'-fluorocytidine-3'-phosphate
  modified_base 10: mod_base = OTHER; note = 2'-deoxy-2'-fluorouridine-3'-phosphate
  modified_base 11: mod_base = OTHER; note = 2'-deoxy-2'-fluoroadenosine-3'-phosphate
  modified_base 12: mod_base = OTHER; note = 2'-O-methylguanosine-3'-phosphate
  modified_base 13: mod_base = OTHER; note = 2'-O-methylguanosine-3'-phosphate
  modified_base 14: mod_base = OTHER; note = 2'-O-methyladenosine-3'-phosphate
  modified_base 15: mod_base = OTHER; note = 2'-O-methyluridine-3'-phosphate
  modified_base 16: mod_base = OTHER; note = 2'-O-methyladenosine-3'-phosphate
  modified_base 17: mod_base = OTHER; note = 2'-O-methylguanosine-3'-phosphate
  modified_base 18: mod_base = OTHER; note = 2'-O-methylguanosine-3'-phosphate
  modified_base 19: mod_base = OTHER; note = 2'-O-methyluridine-3'-phosphate
  modified_base 20: mod_base = OTHER; note = 2'-O-methylcytidine-3'-phosphate
  modified_base 21: mod_base = OTHER; note = 2'-O-methyladenosine
gtgggtttctaggataggtca

SEQ ID NO: 3951 - RNA, 21 nt, synthetic construct
  source 1..21: mol_type = other RNA
  modified_base 1: mod_base = OTHER; note = 2'-O-methyluridine-3'-phosphate
  modified_base 2: mod_base = OTHER; note = 2'-O-methylguanosine-3'-phosphate
  modified_base 3: mod_base = OTHER; note = 2'-O-methylguanosine-3'-phosphate
  modified_base 4: mod_base = OTHER; note = 2'-O-methylguanosine-3'-phosphate
  modified_base 5: mod_base = OTHER; note = 2'-O-methyluridine-3'-phosphate
  modified_base 6: mod_base = OTHER; note = 2'-O-methyluridine-3'-phosphate
  modified_base 7: mod_base = OTHER; note = 2'-deoxy-2'-fluorouridine-3'-phosphate
  modified_base 8: mod_base = OTHER; note = 2'-O-methylcytidine-3'-phosphate
  modified_base 9: mod_base = OTHER; note = 2'-deoxy-2'-fluorouridine-3'-phosphate
  modified_base 10: mod_base = OTHER; note = 2'-deoxy-2'-fluoroadenosine-3'-phosphate
  modified_base 11: mod_base = OTHER; note = 2'-deoxy-2'-fluoroguanosine-3'-phosphate
  modified_base 12: mod_base = OTHER; note = 2'-O-methylguanosine-3'-phosphate
  modified_base 13: mod_base = OTHER; note = 2'-O-methyladenosine-3'-phosphate
  modified_base 14: mod_base = OTHER; note = 2'-O-methyluridine-3'-phosphate
  modified_base 15: mod_base = OTHER; note = 2'-O-methyladenosine-3'-phosphate
  modified_base 16: mod_base = OTHER; note = 2'-O-methylguanosine-3'-phosphate
  modified_base 17: mod_base = OTHER; note = 2'-O-methylguanosine-3'-phosphate
  modified_base 18: mod_base = OTHER; note = 2'-O-methyluridine-3'-phosphate
  modified_base 19: mod_base = OTHER; note = 2'-O-methylcytidine-3'-phosphate
  modified_base 20: mod_base = OTHER; note = 2'-O-methyluridine-3'-phosphate
  modified_base 21: mod_base = OTHER; note = 2'-O-methyladenosine
tgggtttctaggataggtcta

SEQ ID NO: 3952 - RNA, 21 nt, synthetic construct
  source 1..21: mol_type = other RNA
  modified_base 1: mod_base = OTHER; note = 2'-O-methylguanosine-3'-phosphate
  modified_base 2: mod_base = OTHER; note = 2'-O-methylguanosine-3'-phosphate
  modified_base 3: mod_base = OTHER; note = 2'-O-methylguanosine-3'-phosphate
  modified_base 4: mod_base = OTHER; note = 2'-O-methyluridine-3'-phosphate
  modified_base 5: mod_base = OTHER; note = 2'-O-methyluridine-3'-phosphate
  modified_base 6: mod_base = OTHER; note = 2'-O-methyluridine-3'-phosphate
  modified_base 7: mod_base = OTHER; note = 2'-deoxy-2'-fluorocytidine-3'-phosphate
  modified_base 8: mod_base = OTHER; note = 2'-O-methyluridine-3'-phosphate
  modified_base 9: mod_base = OTHER; note = 2'-deoxy-2'-fluoroadenosine-3'-phosphate
  modified_base 10: mod_base = OTHER; note = 2'-deoxy-2'-fluoroguanosine-3'-phosphate
  modified_base 11: mod_base = OTHER; note = 2'-deoxy-2'-fluoroguanosine-3'-phosphate
  modified_base 12: mod_base = OTHER; note = 2'-O-methyladenosine-3'-phosphate
  modified_base 13: mod_base = OTHER; note = 2'-O-methyluridine-3'-phosphate
  modified_base 14: mod_base = OTHER; note = 2'-O-methyladenosine-3'-phosphate
  modified_base 15: mod_base = OTHER; note = 2'-O-methylguanosine-3'-phosphate
  modified_base 16: mod_base = OTHER; note = 2'-O-methylguanosine-3'-phosphate
  modified_base 17: mod_base = OTHER; note = 2'-O-methyluridine-3'-phosphate
  modified_base 18: mod_base = OTHER; note = 2'-O-methylcytidine-3'-phosphate
  modified_base 19: mod_base = OTHER; note = 2'-O-methyluridine-3'-phosphate
  modified_base 20: mod_base = OTHER; note = 2'-O-methylguanosine-3'-phosphate
  modified_base 21: mod_base = OTHER; note = 2'-O-methyladenosine
gggtttctaggataggtctga

SEQ ID NO: 3953 - RNA, 21 nt, synthetic construct
  source 1..21: mol_type = other RNA
  modified_base 1: mod_base = OTHER; note = 2'-O-methylguanosine-3'-phosphate
  modified_base 2: mod_base = OTHER; note = 2'-O-methylguanosine-3'-phosphate
  modified_base 3: mod_base = OTHER; note = 2'-O-methyluridine-3'-phosphate
  modified_base 4: mod_base = OTHER; note = 2'-O-methyluridine-3'-phosphate
  modified_base 5: mod_base = OTHER; note = 2'-O-methyluridine-3'-phosphate
  modified_base 6: mod_base = OTHER; note = 2'-O-methylcytidine-3'-phosphate
  modified_base 7: mod_base = OTHER; note = 2'-deoxy-2'-fluorouridine-3'-phosphate
  modified_base 8: mod_base = OTHER; note = 2'-O-methyladenosine-3'-phosphate
  modified_base 9: mod_base = OTHER; note = 2'-deoxy-2'-fluoroguanosine-3'-phosphate
  modified_base 10: mod_base = OTHER; note = 2'-deoxy-2'-fluoroguanosine-3'-phosphate
  modified_base 11: mod_base = OTHER; note = 2'-deoxy-2'-fluoroadenosine-3'-phosphate
  modified_base 12: mod_base = OTHER; note = 2'-O-methyluridine-3'-phosphate
  modified_base 13: mod_base = OTHER; note = 2'-O-methyladenosine-3'-phosphate
  modified_base 14: mod_base = OTHER; note = 2'-O-methylguanosine-3'-phosphate
  modified_base 15: mod_base = OTHER; note = 2'-O-methylguanosine-3'-phosphate
  modified_base 16: mod_base = OTHER; note = 2'-O-methyluridine-3'-phosphate
  modified_base 17: mod_base = OTHER; note = 2'-O-methylcytidine-3'-phosphate
  modified_base 18: mod_base = OTHER; note = 2'-O-methyluridine-3'-phosphate
  modified_base 19: mod_base = OTHER; note = 2'-O-methylguanosine-3'-phosphate
  modified_base 20: mod_base = OTHER; note = 2'-O-methyladenosine-3'-phosphate
  modified_base 21: mod_base = OTHER; note = 2'-O-methyladenosine
ggtttctaggataggtctgaa

SEQ ID NO: 3954 - RNA, 21 nt, synthetic construct
  source 1..21: mol_type = other RNA
  modified_base 1: mod_base = OTHER; note = 2'-O-methylguanosine-3'-phosphate
  modified_base 2: mod_base = OTHER; note = 2'-O-methyluridine-3'-phosphate
  modified_base 3: mod_base = OTHER; note = 2'-O-methyluridine-3'-phosphate
  modified_base 4: mod_base = OTHER; note = 2'-O-methyluridine-3'-phosphate
  modified_base 5: mod_base = OTHER; note = 2'-O-methylcytidine-3'-phosphate
  modified_base 6: mod_base = OTHER; note = 2'-O-methyluridine-3'-phosphate
  modified_base 7: mod_base = OTHER; note = 2'-deoxy-2'-fluoroadenosine-3'-phosphate
  modified_base 8: mod_base = OTHER; note = 2'-O-methylguanosine-3'-phosphate
  modified_base 9: mod_base = OTHER; note = 2'-deoxy-2'-fluoroguanosine-3'-phosphate
  modified_base 10: mod_base = OTHER; note = 2'-deoxy-2'-fluoroadenosine-3'-phosphate
  modified_base 11: mod_base = OTHER; note = 2'-deoxy-2'-fluorouridine-3'-phosphate
  modified_base 12: mod_base = OTHER; note = 2'-O-methyladenosine-3'-phosphate
  modified_base 13: mod_base = OTHER; note = 2'-O-methylguanosine-3'-phosphate
  modified_base 14: mod_base = OTHER; note = 2'-O-methylguanosine-3'-phosphate
  modified_base 15: mod_base = OTHER; note = 2'-O-methyluridine-3'-phosphate
  modified_base 16: mod_base = OTHER; note = 2'-O-methylcytidine-3'-phosphate
  modified_base 17: mod_base = OTHER; note = 2'-O-methyluridine-3'-phosphate
  modified_base 18: mod_base = OTHER; note = 2'-O-methylguanosine-3'-phosphate
  modified_base 19: mod_base = OTHER; note = 2'-O-methyladenosine-3'-phosphate
  modified_base 20: mod_base = OTHER; note = 2'-O-methyladenosine-3'-phosphate
  modified_base 21: mod_base = OTHER; note = 2'-O-methyladenosine
gtttctaggataggtctgaaa

SEQ ID NO: 3955 - RNA, 21 nt, synthetic construct
  source 1..21: mol_type = other RNA
  modified_base 1: mod_base = OTHER; note = 2'-O-methyluridine-3'-phosphate
  modified_base 2: mod_base = OTHER; note = 2'-O-methyluridine-3'-phosphate
  modified_base 3: mod_base = OTHER; note = 2'-O-methyluridine-3'-phosphate
  modified_base 4: mod_base = OTHER; note = 2'-O-methylcytidine-3'-phosphate
  modified_base 5: mod_base = OTHER; note = 2'-O-methyluridine-3'-phosphate
  modified_base 6: mod_base = OTHER; note = 2'-O-methyladenosine-3'-phosphate
  modified_base 7: mod_base = OTHER; note = 2'-deoxy-2'-fluoroguanosine-3'-phosphate
  modified_base 8: mod_base = OTHER; note = 2'-O-methylguanosine-3'-phosphate
  modified_base 9: mod_base = OTHER; note = 2'-deoxy-2'-fluoroadenosine-3'-phosphate
  modified_base 10: mod_base = OTHER; note = 2'-deoxy-2'-fluorouridine-3'-phosphate
  modified_base 11: mod_base = OTHER; note = 2'-deoxy-2'-fluoroadenosine-3'-phosphate
  modified_base 12: mod_base = OTHER; note = 2'-O-methylguanosine-3'-phosphate
  modified_base 13: mod_base = OTHER; note = 2'-O-methylguanosine-3'-phosphate
  modified_base 14: mod_base = OTHER; note = 2'-O-methyluridine-3'-phosphate
  modified_base 15: mod_base = OTHER; note = 2'-O-methylcytidine-3'-phosphate
  modified_base 16: mod_base = OTHER; note = 2'-O-methyluridine-3'-phosphate
  modified_base 17: mod_base = OTHER; note = 2'-O-methylguanosine-3'-phosphate
  modified_base 18: mod_base = OTHER; note = 2'-O-methyladenosine-3'-phosphate
  modified_base 19: mod_base = OTHER; note = 2'-O-methyladenosine-3'-phosphate
  modified_base 20: mod_base = OTHER; note = 2'-O-methyladenosine-3'-phosphate
  modified_base 21: mod_base = OTHER; note = 2'-O-methyladenosine
tttctaggataggtctgaaaa

SEQ ID NO: 3956 - RNA, 21 nt, synthetic construct
  source 1..21: mol_type = other RNA
  modified_base 1: mod_base = OTHER; note = 2'-O-methyluridine-3'-phosphate
  modified_base 2: mod_base = OTHER; note = 2'-O-methyluridine-3'-phosphate
  modified_base 3: mod_base = OTHER; note = 2'-O-methylcytidine-3'-phosphate
  modified_base 4: mod_base = OTHER; note = 2'-O-methyluridine-3'-phosphate
  modified_base 5: mod_base = OTHER; note = 2'-O-methyladenosine-3'-phosphate
  modified_base 6: mod_base = OTHER; note = 2'-O-methylguanosine-3'-phosphate
  modified_base 7: mod_base = OTHER; note = 2'-deoxy-2'-fluoroguanosine-3'-phosphate
  modified_base 8: mod_base = OTHER; note = 2'-O-methyladenosine-3'-phosphate
  modified_base 9: mod_base = OTHER; note = 2'-deoxy-2'-fluorouridine-3'-phosphate
  modified_base 10: mod_base = OTHER; note = 2'-deoxy-2'-fluoroadenosine-3'-phosphate
  modified_base 11: mod_base = OTHER; note = 2'-deoxy-2'-fluoroguanosine-3'-phosphate
  modified_base 12: mod_base = OTHER; note = 2'-O-methylguanosine-3'-phosphate
  modified_base 13: mod_base = OTHER; note = 2'-O-methyluridine-3'-phosphate
  modified_base 14: mod_base = OTHER; note = 2'-O-methylcytidine-3'-phosphate
  modified_base 15: mod_base = OTHER; note = 2'-O-methyluridine-3'-phosphate
  modified_base 16: mod_base = OTHER; note = 2'-O-methylguanosine-3'-phosphate
  modified_base 17: mod_base = OTHER; note = 2'-O-methyladenosine-3'-phosphate
  modified_base 18: mod_base = OTHER; note = 2'-O-methyladenosine-3'-phosphate
  modified_base 19: mod_base = OTHER; note = 2'-O-methyladenosine-3'-phosphate
  modified_base 20: mod_base = OTHER; note = 2'-O-methyladenosine-3'-phosphate
  modified_base 21: mod_base = OTHER; note = 2'-O-methyladenosine
ttctaggataggtctgaaaaa

SEQ ID NO: 3957 - RNA, 21 nt, synthetic construct
  source 1..21: mol_type = other RNA
  modified_base 1: mod_base = OTHER; note = 2'-O-methyluridine-3'-phosphate
  modified_base 2: mod_base = OTHER; note = 2'-O-methylcytidine-3'-phosphate
  modified_base 3: mod_base = OTHER; note = 2'-O-methyluridine-3'-phosphate
  modified_base 4: mod_base = OTHER; note = 2'-O-methyladenosine-3'-phosphate
  modified_base 5: mod_base = OTHER; note = 2'-O-methylguanosine-3'-phosphate
  modified_base 6: mod_base = OTHER; note = 2'-O-methylguanosine-3'-phosphate
  modified_base 7: mod_base = OTHER; note = 2'-deoxy-2'-fluoroadenosine-3'-phosphate
  modified_base 8: mod_base = OTHER; note = 2'-O-methyluridine-3'-phosphate
  modified_base 9: mod_base = OTHER; note = 2'-deoxy-2'-fluoroadenosine-3'-phosphate
  modified_base 10: mod_base = OTHER; note = 2'-deoxy-2'-fluoroguanosine-3'-phosphate
  modified_base 11: mod_base = OTHER; note = 2'-deoxy-2'-fluoroguanosine-3'-phosphate
  modified_base 12: mod_base = OTHER; note = 2'-O-methyluridine-3'-phosphate
  modified_base 13: mod_base = OTHER; note = 2'-O-methylcytidine-3'-phosphate
  modified_base 14: mod_base = OTHER; note = 2'-O-methyluridine-3'-phosphate
  modified_base 15: mod_base = OTHER; note = 2'-O-methylguanosine-3'-phosphate
  modified_base 16: mod_base = OTHER; note = 2'-O-methyladenosine-3'-phosphate
  modified_base 17: mod_base = OTHER; note = 2'-O-methyladenosine-3'-phosphate
  modified_base 18: mod_base = OTHER; note = 2'-O-methyladenosine-3'-phosphate
  modified_base 19: mod_base = OTHER; note = 2'-O-methyladenosine-3'-phosphate
  modified_base 20: mod_base = OTHER; note = 2'-O-methyluridine-3'-phosphate
  modified_base 21: mod_base = OTHER; note = 2'-O-methyladenosine
tctaggataggtctgaaaata

SEQ ID NO: 3958 - RNA, 21 nt, synthetic construct
  source 1..21: mol_type = other RNA
  modified_base 1: mod_base = OTHER; note = 2'-O-methylcytidine-3'-phosphate
  modified_base 2: mod_base = OTHER; note = 2'-O-methyluridine-3'-phosphate
  modified_base 3: mod_base = OTHER; note = 2'-O-methyladenosine-3'-phosphate
  modified_base 4: mod_base = OTHER; note = 2'-O-methylguanosine-3'-phosphate
  modified_base 5: mod_base = OTHER; note = 2'-O-methylguanosine-3'-phosphate
  modified_base 6: mod_base = OTHER; note = 2'-O-methyladenosine-3'-phosphate
  modified_base 7: mod_base = OTHER; note = 2'-deoxy-2'-fluorouridine-3'-phosphate
  modified_base 8: mod_base = OTHER; note = 2'-O-methyladenosine-3'-phosphate
  modified_base 9: mod_base = OTHER; note = 2'-deoxy-2'-fluoroguanosine-3'-phosphate
  modified_base 10: mod_base = OTHER; note = 2'-deoxy-2'-fluoroguanosine-3'-phosphate
  modified_base 11: mod_base = OTHER; note = 2'-deoxy-2'-fluorouridine-3'-phosphate
  modified_base 12: mod_base = OTHER; note = 2'-O-methylcytidine-3'-phosphate
  modified_base 13: mod_base = OTHER; note = 2'-O-methyluridine-3'-phosphate
  modified_base 14: mod_base = OTHER; note = 2'-O-methylguanosine-3'-phosphate
  modified_base 15: mod_base = OTHER; note = 2'-O-methyladenosine-3'-phosphate
  modified_base 16: mod_base = OTHER; note = 2'-O-methyladenosine-3'-phosphate
  modified_base 17: mod_base = OTHER; note = 2'-O-methyladenosine-3'-phosphate
  modified_base 18: mod_base = OTHER; note = 2'-O-methyladenosine-3'-phosphate
  modified_base 19: mod_base = OTHER; note = 2'-O-methyluridine-3'-phosphate
  modified_base 20: mod_base = OTHER; note = 2'-O-methyluridine-3'-phosphate
  modified_base 21: mod_base = OTHER; note = 2'-O-methyladenosine
ctaggataggtctgaaaatta

SEQ ID NO: 3959 - RNA, 21 nt, synthetic construct
  source 1..21: mol_type = other RNA
  modified_base 1: mod_base = OTHER; note = 2'-O-methyluridine-3'-phosphate
  modified_base 2: mod_base = OTHER; note = 2'-O-methyladenosine-3'-phosphate
  modified_base 3: mod_base = OTHER; note = 2'-O-methylguanosine-3'-phosphate
  modified_base 4: mod_base = OTHER; note = 2'-O-methylguanosine-3'-phosphate
  modified_base 5: mod_base = OTHER; note = 2'-O-methyladenosine-3'-phosphate
  modified_base 6: mod_base = OTHER; note = 2'-O-methyluridine-3'-phosphate
  modified_base 7: mod_base = OTHER; note = 2'-deoxy-2'-fluoroadenosine-3'-phosphate
  modified_base 8: mod_base = OTHER; note = 2'-O-methylguanosine-3'-phosphate
  modified_base 9: mod_base = OTHER; note = 2'-deoxy-2'-fluoroguanosine-3'-phosphate
  modified_base 10: mod_base = OTHER; note = 2'-deoxy-2'-fluorouridine-3'-phosphate
  modified_base 11: mod_base = OTHER; note = 2'-deoxy-2'-fluorocytidine-3'-phosphate
  modified_base 12: mod_base = OTHER; note = 2'-O-methyluridine-3'-phosphate
  modified_base 13: mod_base = OTHER; note = 2'-O-methylguanosine-3'-phosphate
  modified_base 14: mod_base = OTHER; note = 2'-O-methyladenosine-3'-phosphate
  modified_base 15: mod_base = OTHER; note = 2'-O-methyladenosine-3'-phosphate
  modified_base 16: mod_base = OTHER; note = 2'-O-methyladenosine-3'-phosphate
  modified_base 17: mod_base = OTHER; note = 2'-O-methyladenosine-3'-phosphate
  modified_base 18: mod_base = OTHER; note = 2'-O-methyluridine-3'-phosphate
  modified_base 19: mod_base = OTHER; note = 2'-O-methyluridine-3'-phosphate
  modified_base 20: mod_base = OTHER; note = 2'-O-methylguanosine-3'-phosphate
  modified_base 21: mod_base = OTHER; note = 2'-O-methyladenosine
taggataggtctgaaaattga

SEQ ID NO: 3960 - RNA, 21 nt, synthetic construct
  source 1..21: mol_type = other RNA
  modified_base 1: mod_base = OTHER; note = 2'-O-methylcytidine-3'-phosphate
  modified_base 2: mod_base = OTHER; note = 2'-O-methyluridine-3'-phosphate
  modified_base 3: mod_base = OTHER; note = 2'-O-methylguanosine-3'-phosphate
  modified_base 4: mod_base = OTHER; note = 2'-O-methyladenosine-3'-phosphate
  modified_base 5: mod_base = OTHER; note = 2'-O-methyladenosine-3'-phosphate
  modified_base 6: mod_base = OTHER; note = 2'-O-methyladenosine-3'-phosphate
  modified_base 7: mod_base = OTHER; note = 2'-deoxy-2'-fluoroadenosine-3'-phosphate
  modified_base 8: mod_base = OTHER; note = 2'-O-methyluridine-3'-phosphate
  modified_base 9: mod_base = OTHER; note = 2'-deoxy-2'-fluorouridine-3'-phosphate
  modified_base 10: mod_base = OTHER; note = 2'-deoxy-2'-fluoroguanosine-3'-phosphate
  modified_base 11: mod_base = OTHER; note = 2'-deoxy-2'-fluorocytidine-3'-phosphate
  modified_base 12: mod_base = OTHER; note = 2'-O-methyluridine-3'-phosphate
  modified_base 13: mod_base = OTHER; note = 2'-O-methyluridine-3'-phosphate
  modified_base 14: mod_base = OTHER; note = 2'-O-methyluridine-3'-phosphate
  modified_base 15: mod_base = OTHER; note = 2'-O-methylcytidine-3'-phosphate
  modified_base 16: mod_base = OTHER; note = 2'-O-methyladenosine-3'-phosphate
  modified_base 17: mod_base = OTHER; note = 2'-O-methyluridine-3'-phosphate
  modified_base 18: mod_base = OTHER; note = 2'-O-methyluridine-3'-phosphate
  modified_base 19: mod_base = OTHER; note = 2'-O-methyluridine-3'-phosphate
  modified_base 20: mod_base = OTHER; note = 2'-O-methylguanosine-3'-phosphate
  modified_base 21: mod_base = OTHER; note = 2'-O-methyladenosine
ctgaaaattgctttcatttga

SEQ ID NO: 3961 - RNA, 21 nt, synthetic construct
  source 1..21: mol_type = other RNA
  modified_base 1: mod_base = OTHER; note = 2'-O-methyladenosine-3'-phosphate
  modified_base 2: mod_base = OTHER; note = 2'-O-methyluridine-3'-phosphate
  modified_base 3: mod_base = OTHER; note = 2'-O-methyluridine-3'-phosphate
  modified_base 4: mod_base = OTHER; note = 2'-O-methylguanosine-3'-phosphate
  modified_base 5: mod_base = OTHER; note = 2'-O-methylcytidine-3'-phosphate
  modified_base 6: mod_base = OTHER; note = 2'-O-methyluridine-3'-phosphate
  modified_base 7: mod_base = OTHER; note = 2'-deoxy-2'-fluorouridine-3'-phosphate
  modified_base 8: mod_base = OTHER; note = 2'-O-methyluridine-3'-phosphate
  modified_base 9: mod_base = OTHER; note = 2'-deoxy-2'-fluorocytidine-3'-phosphate
  modified_base 10: mod_base = OTHER; note = 2'-deoxy-2'-fluoroadenosine-3'-phosphate
  modified_base 11: mod_base = OTHER; note = 2'-deoxy-2'-fluorouridine-3'-phosphate
  modified_base 12: mod_base = OTHER; note = 2'-O-methyluridine-3'-phosphate
  modified_base 13: mod_base = OTHER; note = 2'-O-methyluridine-3'-phosphate
  modified_base 14: mod_base = OTHER; note = 2'-O-methylguanosine-3'-phosphate
  modified_base 15: mod_base = OTHER; note = 2'-O-methylcytidine-3'-phosphate
  modified_base 16: mod_base = OTHER; note = 2'-O-methyladenosine-3'-phosphate
  modified_base 17: mod_base = OTHER; note = 2'-O-methyladenosine-3'-phosphate
  modified_base 18: mod_base = OTHER; note = 2'-O-methylcytidine-3'-phosphate
  modified_base 19: mod_base = OTHER; note = 2'-O-methyladenosine-3'-phosphate
  modified_base 20: mod_base = OTHER; note = 2'-O-methylcytidine-3'-phosphate
  modified_base 21: mod_base = OTHER; note = 2'-O-methyladenosine
attgctttcatttgcaacaca

SEQ ID NO: 3962 - RNA, 21 nt, synthetic construct
  source 1..21: mol_type = other RNA
  modified_base 1: mod_base = OTHER; note = 2'-O-methyluridine-3'-phosphate
  modified_base 2: mod_base = OTHER; note = 2'-O-methyluridine-3'-phosphate
  modified_base 3: mod_base = OTHER; note = 2'-O-methylguanosine-3'-phosphate
  modified_base 4: mod_base = OTHER; note = 2'-O-methylcytidine-3'-phosphate
  modified_base 5: mod_base = OTHER; note = 2'-O-methyluridine-3'-phosphate
  modified_base 6: mod_base = OTHER; note = 2'-O-methyluridine-3'-phosphate
  modified_base 7: mod_base = OTHER; note = 2'-deoxy-2'-fluorouridine-3'-phosphate
  modified_base 8: mod_base = OTHER; note = 2'-O-methylcytidine-3'-phosphate
  modified_base 9: mod_base = OTHER; note = 2'-deoxy-2'-fluoroadenosine-3'-phosphate
  modified_base 10: mod_base = OTHER; note = 2'-deoxy-2'-fluorouridine-3'-phosphate
  modified_base 11: mod_base = OTHER; note = 2'-deoxy-2'-fluorouridine-3'-phosphate
  modified_base 12: mod_base = OTHER; note = 2'-O-methyluridine-3'-phosphate
  modified_base 13: mod_base = OTHER; note = 2'-O-methylguanosine-3'-phosphate
  modified_base 14: mod_base = OTHER; note = 2'-O-methylcytidine-3'-phosphate
  modified_base 15: mod_base = OTHER; note = 2'-O-methyladenosine-3'-phosphate
  modified_base 16: mod_base = OTHER; note = 2'-O-methyladenosine-3'-phosphate
  modified_base 17: mod_base = OTHER; note = 2'-O-methylcytidine-3'-phosphate
  modified_base 18: mod_base = OTHER; note = 2'-O-methyladenosine-3'-phosphate
  modified_base 19: mod_base = OTHER; note = 2'-O-methylcytidine-3'-phosphate
  modified_base 20: mod_base = OTHER; note = 2'-O-methyladenosine-3'-phosphate
  modified_base 21: mod_base = OTHER; note = 2'-O-methyladenosine
ttgctttcatttgcaacacaa

SEQ ID NO: 3963 - RNA, 21 nt, synthetic construct
  source 1..21: mol_type = other RNA
  modified_base 1: mod_base = OTHER; note = 2'-O-methyluridine-3'-phosphate
  modified_base 2: mod_base = OTHER; note = 2'-O-methylguanosine-3'-phosphate
  modified_base 3: mod_base = OTHER; note = 2'-O-methylcytidine-3'-phosphate
  modified_base 4: mod_base = OTHER; note = 2'-O-methyluridine-3'-phosphate
  modified_base 5: mod_base = OTHER; note = 2'-O-methyluridine-3'-phosphate
  modified_base 6: mod_base = OTHER; note = 2'-O-methyluridine-3'-phosphate
  modified_base 7: mod_base = OTHER; note = 2'-deoxy-2'-fluorocytidine-3'-phosphate
  modified_base 8: mod_base = OTHER; note = 2'-O-methyladenosine-3'-phosphate
  modified_base 9: mod_base = OTHER; note = 2'-deoxy-2'-fluorouridine-3'-phosphate
  modified_base 10: mod_base = OTHER; note = 2'-deoxy-2'-fluorouridine-3'-phosphate
  modified_base 11: mod_base = OTHER; note = 2'-deoxy-2'-fluorouridine-3'-phosphate
  modified_base 12: mod_base = OTHER; note = 2'-O-methylguanosine-3'-phosphate
  modified_base 13: mod_base = OTHER; note = 2'-O-methylcytidine-3'-phosphate
  modified_base 14: mod_base = OTHER; note = 2'-O-methyladenosine-3'-phosphate
  modified_base 15: mod_base = OTHER; note = 2'-O-methyladenosine-3'-phosphate
  modified_base 16: mod_base = OTHER; note = 2'-O-methylcytidine-3'-phosphate
  modified_base 17: mod_base = OTHER; note = 2'-O-methyladenosine-3'-phosphate
  modified_base 18: mod_base = OTHER; note = 2'-O-methylcytidine-3'-phosphate
  modified_base 19: mod_base = OTHER; note = 2'-O-methyladenosine-3'-phosphate
  modified_base 20: mod_base = OTHER; note = 2'-O-methyluridine-3'-phosphate
  modified_base 21: mod_base = OTHER; note = 2'-O-methyladenosine
tgctttcatttgcaacacata

SEQ ID NO: 3964 - RNA, 21 nt, synthetic construct
  source 1..21: mol_type = other RNA
  modified_base 1: mod_base = OTHER; note = 2'-O-methylguanosine-3'-phosphate
  modified_base 2: mod_base = OTHER; note = 2'-O-methylcytidine-3'-phosphate
  modified_base 3: mod_base = OTHER; note = 2'-O-methyluridine-3'-phosphate
  modified_base 4: mod_base = OTHER; note = 2'-O-methyluridine-3'-phosphate
  modified_base 5: mod_base = OTHER; note = 2'-O-methyluridine-3'-phosphate
  modified_base 6: mod_base = OTHER; note = 2'-O-methylcytidine-3'-phosphate
  modified_base 7: mod_base = OTHER; note = 2'-deoxy-2'-fluoroadenosine-3'-phosphate
  modified_base 8: mod_base = OTHER; note = 2'-O-methyluridine-3'-phosphate
  modified_base 9: mod_base = OTHER; note = 2'-deoxy-2'-fluorouridine-3'-phosphate
  modified_base 10: mod_base = OTHER; note = 2'-deoxy-2'-fluorouridine-3'-phosphate
  modified_base 11: mod_base = OTHER; note = 2'-deoxy-2'-fluoroguanosine-3'-phosphate
  modified_base 12: mod_base = OTHER; note = 2'-O-methylcytidine-3'-phosphate
  modified_base 13: mod_base = OTHER; note = 2'-O-methyladenosine-3'-phosphate
  modified_base 14: mod_base = OTHER; note = 2'-O-methyladenosine-3'-phosphate
  modified_base 15: mod_base = OTHER; note = 2'-O-methylcytidine-3'-phosphate
  modified_base 16: mod_base = OTHER; note = 2'-O-methyladenosine-3'-phosphate
  modified_base 17: mod_base = OTHER; note = 2'-O-methylcytidine-3'-phosphate
  modified_base 18: mod_base = OTHER; note = 2'-O-methyladenosine-3'-phosphate
  modified_base 19: mod_base = OTHER; note = 2'-O-methyluridine-3'-phosphate
  modified_base 20: mod_base = OTHER; note = 2'-O-methyluridine-3'-phosphate
  modified_base 21: mod_base = OTHER; note = 2'-O-methyladenosine
gctttcatttgcaacacatta

SEQ ID NO: 3965 - RNA, 21 nt, synthetic construct
  source 1..21: mol_type = other RNA
  modified_base 1: mod_base = OTHER; note = 2'-O-methylcytidine-3'-phosphate
  modified_base 2: mod_base = OTHER; note = 2'-O-methyluridine-3'-phosphate
  modified_base 3: mod_base = OTHER; note = 2'-O-methyluridine-3'-phosphate
  modified_base 4: mod_base = OTHER; note = 2'-O-methyluridine-3'-phosphate
  modified_base 5: mod_base = OTHER; note = 2'-O-methylcytidine-3'-phosphate
  modified_base 6: mod_base = OTHER; note = 2'-O-methyladenosine-3'-phosphate
  modified_base 7: mod_base = OTHER; note = 2'-deoxy-2'-fluorouridine-3'-phosphate
  modified_base 8: mod_base = OTHER; note = 2'-O-methyluridine-3'-phosphate
  modified_base 9: mod_base = OTHER; note = 2'-deoxy-2'-fluorouridine-3'-phosphate
  modified_base 10: mod_base = OTHER; note = 2'-deoxy-2'-fluoroguanosine-3'-phosphate
  modified_base 11: mod_base = OTHER; note = 2'-deoxy-2'-fluorocytidine-3'-phosphate
  modified_base 12: mod_base = OTHER; note = 2'-O-methyladenosine-3'-phosphate
  modified_base 13: mod_base = OTHER; note = 2'-O-methyladenosine-3'-phosphate
  modified_base 14: mod_base = OTHER; note = 2'-O-methylcytidine-3'-phosphate
  modified_base 15: mod_base = OTHER; note = 2'-O-methyladenosine-3'-phosphate
  modified_base 16: mod_base = OTHER; note = 2'-O-methylcytidine-3'-phosphate
  modified_base 17: mod_base = OTHER; note = 2'-O-methyladenosine-3'-phosphate
  modified_base 18: mod_base = OTHER; note = 2'-O-methyluridine-3'-phosphate
  modified_base 19: mod_base = OTHER; note = 2'-O-methyluridine-3'-phosphate
  modified_base 20: mod_base = OTHER; note = 2'-O-methyluridine-3'-phosphate
  modified_base 21: mod_base = OTHER; note = 2'-O-methyladenosine
ctttcatttgcaacacattta

SEQ ID NO: 3966 - RNA, 21 nt, synthetic construct
  source 1..21: mol_type = other RNA
  modified_base 1: mod_base = OTHER; note = 2'-O-methyladenosine-3'-phosphate
  modified_base 2: mod_base = OTHER; note = 2'-O-methylguanosine-3'-phosphate
  modified_base 3: mod_base = OTHER; note = 2'-O-methyladenosine-3'-phosphate
  modified_base 4: mod_base = OTHER; note = 2'-O-methyladenosine-3'-phosphate
  modified_base 5: mod_base = OTHER; note = 2'-O-methyladenosine-3'-phosphate
  modified_base 6: mod_base = OTHER; note = 2'-O-methylguanosine-3'-phosphate
  modified_base 7: mod_base = OTHER; note = 2'-deoxy-2'-fluorouridine-3'-phosphate
  modified_base 8: mod_base = OTHER; note = 2'-O-methyladenosine-3'-phosphate
  modified_base 9: mod_base = OTHER; note = 2'-deoxy-2'-fluoroguanosine-3'-phosphate
  modified_base 10: mod_base = OTHER; note = 2'-deoxy-2'-fluorocytidine-3'-phosphate
  modified_base 11: mod_base = OTHER; note = 2'-deoxy-2'-fluorouridine-3'-phosphate
  modified_base 12: mod_base = OTHER; note = 2'-O-methyluridine-3'-phosphate
  modified_base 13: mod_base = OTHER; note = 2'-O-methyluridine-3'-phosphate
  modified_base 14: mod_base = OTHER; note = 2'-O-methyladenosine-3'-phosphate
  modified_base 15: mod_base = OTHER; note = 2'-O-methyluridine-3'-phosphate
  modified_base 16: mod_base = OTHER; note = 2'-O-methyluridine-3'-phosphate
  modified_base 17: mod_base = OTHER; note = 2'-O-methyluridine-3'-phosphate
  modified_base 18: mod_base = OTHER; note = 2'-O-methylguanosine-3'-phosphate
  modified_base 19: mod_base = OTHER; note = 2'-O-methylguanosine-3'-phosphate
  modified_base 20: mod_base = OTHER; note = 2'-O-methyladenosine-3'-phosphate
  modified_base 21: mod_base = OTHER; note = 2'-O-methyladenosine
agaaagtagctttatttggaa

SEQ ID NO: 3967 - RNA, 21 nt, synthetic construct
  source 1..21: mol_type = other RNA
  modified_base 1: mod_base = OTHER; note = 2'-O-methyladenosine-3'-phosphate
  modified_base 2: mod_base = OTHER; note = 2'-O-methyladenosine-3'-phosphate
  modified_base 3: mod_base = OTHER; note = 2'-O-methylguanosine-3'-phosphate
  modified_base 4: mod_base = OTHER; note = 2'-O-methyluridine-3'-phosphate
  modified_base 5: mod_base = OTHER; note = 2'-O-methyladenosine-3'-phosphate
  modified_base 6: mod_base = OTHER; note = 2'-O-methylguanosine-3'-phosphate
  modified_base 7: mod_base = OTHER; note = 2'-deoxy-2'-fluorocytidine-3'-phosphate
  modified_base 8: mod_base = OTHER; note = 2'-O-methyluridine-3'-phosphate
  modified_base 9: mod_base = OTHER; note = 2'-deoxy-2'-fluorouridine-3'-phosphate
  modified_base 10: mod_base = OTHER; note = 2'-deoxy-2'-fluorouridine-3'-phosphate
  modified_base 11: mod_base = OTHER; note = 2'-deoxy-2'-fluoroadenosine-3'-phosphate
  modified_base 12: mod_base = OTHER; note = 2'-O-methyluridine-3'-phosphate
  modified_base 13: mod_base = OTHER; note = 2'-O-methyluridine-3'-phosphate
  modified_base 14: mod_base = OTHER; note = 2'-O-methyluridine-3'-phosphate
  modified_base 15: mod_base = OTHER; note = 2'-O-methylguanosine-3'-phosphate
  modified_base 16: mod_base = OTHER; note = 2'-O-methylguanosine-3'-phosphate
  modified_base 17: mod_base = OTHER; note = 2'-O-methyladenosine-3'-phosphate
  modified_base 18: mod_base = OTHER; note = 2'-O-methyluridine-3'-phosphate
  modified_base 19: mod_base = OTHER; note = 2'-O-methyladenosine-3'-phosphate
  modified_base 20: mod_base = OTHER; note = 2'-O-methyluridine-3'-phosphate
  modified_base 21: mod_base = OTHER; note = 2'-O-methyladenosine
aagtagctttatttggatata

SEQ ID NO: 3968 - RNA, 21 nt, synthetic construct
  source 1..21: mol_type = other RNA
  modified_base 1: mod_base = OTHER; note = 2'-O-methylguanosine-3'-phosphate
  modified_base 2: mod_base = OTHER; note = 2'-O-methyladenosine-3'-phosphate
  modified_base 3: mod_base = OTHER; note = 2'-O-methylcytidine-3'-phosphate
  modified_base 4: mod_base = OTHER; note = 2'-O-methyladenosine-3'-phosphate
  modified_base 5: mod_base = OTHER; note = 2'-O-methyladenosine-3'-phosphate
  modified_base 6: mod_base = OTHER; note = 2'-O-methyluridine-3'-phosphate
  modified_base 7: mod_base = OTHER; note = 2'-deoxy-2'-fluorocytidine-3'-phosphate
  modified_base 8: mod_base = OTHER; note = 2'-O-methyluridine-3'-phosphate
  modified_base 9: mod_base = OTHER; note = 2'-deoxy-2'-fluoroadenosine-3'-phosphate
  modified_base 10: mod_base = OTHER; note = 2'-deoxy-2'-fluoroadenosine-3'-phosphate
  modified_base 11: mod_base = OTHER; note = 2'-deoxy-2'-fluoroadenosine-3'-phosphate
  modified_base 12: mod_base = OTHER; note = 2'-O-methyluridine-3'-phosphate
  modified_base 13: mod_base = OTHER; note = 2'-O-methyladenosine-3'-phosphate
  modified_base 14: mod_base = OTHER; note = 2'-O-methyluridine-3'-phosphate
  modified_base 15: mod_base = OTHER; note = 2'-O-methyladenosine-3'-phosphate
  modified_base 16: mod_base = OTHER; note = 2'-O-methyluridine-3'-phosphate
  modified_base 17: mod_base = OTHER; note = 2'-O-methylcytidine-3'-phosphate
  modified_base 18: mod_base = OTHER; note = 2'-O-methyladenosine-3'-phosphate
  modified_base 19: mod_base = OTHER; note = 2'-O-methyluridine-3'-phosphate
  modified_base 20: mod_base = OTHER; note = 2'-O-methylcytidine-3'-phosphate
  modified_base 21: mod_base = OTHER; note = 2'-O-methyladenosine
gacaatctaaatatatcatca

SEQ ID NO: 3969 - RNA, 21 nt, synthetic construct
  source 1..21: mol_type = other RNA
  modified_base 1: mod_base = OTHER; note = 2'-O-methylcytidine-3'-phosphate
  modified_base 2: mod_base = OTHER; note = 2'-O-methyladenosine-3'-phosphate
  modified_base 3: mod_base = OTHER; note = 2'-O-methyladenosine-3'-phosphate
  modified_base 4: mod_base = OTHER; note = 2'-O-methyluridine-3'-phosphate
  modified_base 5: mod_base = OTHER; note = 2'-O-methylcytidine-3'-phosphate
  modified_base 6: mod_base = OTHER; note = 2'-O-methyluridine-3'-phosphate
  modified_base 7: mod_base = OTHER; note = 2'-deoxy-2'-fluoroadenosine-3'-phosphate
  modified_base 8: mod_base = OTHER; note = 2'-O-methyladenosine-3'-phosphate
  modified_base 9: mod_base = OTHER; note = 2'-deoxy-2'-fluoroadenosine-3'-phosphate
  modified_base 10: mod_base = OTHER; note = 2'-deoxy-2'-fluorouridine-3'-phosphate
  modified_base 11: mod_base = OTHER; note = 2'-deoxy-2'-fluoroadenosine-3'-phosphate
  modified_base 12: mod_base = OTHER; note = 2'-O-methyluridine-3'-phosphate
  modified_base 13: mod_base = OTHER; note = 2'-O-methyladenosine-3'-phosphate
  modified_base 14: mod_base = OTHER; note = 2'-O-methyluridine-3'-phosphate
  modified_base 15: mod_base = OTHER; note = 2'-O-methylcytidine-3'-phosphate
  modified_base 16: mod_base = OTHER; note = 2'-O-methyladenosine-3'-phosphate
  modified_base 17: mod_base = OTHER; note = 2'-O-methyluridine-3'-phosphate
  modified_base 18: mod_base = OTHER; note = 2'-O-methylcytidine-3'-phosphate
  modified_base 19: mod_base = OTHER; note = 2'-O-methyladenosine-3'-phosphate
  modified_base 20: mod_base = OTHER; note = 2'-O-methylguanosine-3'-phosphate
  modified_base 21: mod_base = OTHER; note = 2'-O-methyladenosine
caatctaaatatatcatcaga

SEQ ID NO: 3970 - RNA, 21 nt, synthetic construct
  source 1..21: mol_type = other RNA
  modified_base 1: mod_base = OTHER; note = 2'-O-methyluridine-3'-phosphate
  modified_base 2: mod_base = OTHER; note = 2'-O-methylcytidine-3'-phosphate
  modified_base 3: mod_base = OTHER; note = 2'-O-methyladenosine-3'-phosphate
  modified_base 4: mod_base = OTHER; note = 2'-O-methyluridine-3'-phosphate
  modified_base 5: mod_base = OTHER; note = 2'-O-methylcytidine-3'-phosphate
  modified_base 6: mod_base = OTHER; note = 2'-O-methyladenosine-3'-phosphate
  modified_base 7: mod_base = OTHER; note = 2'-deoxy-2'-fluoroguanosine-3'-phosphate
  modified_base 8: mod_base = OTHER; note = 2'-O-methyluridine-3'-phosphate
  modified_base 9: mod_base = OTHER; note = 2'-deoxy-2'-fluorouridine-3'-phosphate
  modified_base 10: mod_base = OTHER; note = 2'-deoxy-2'-fluorouridine-3'-phosphate
  modified_base 11: mod_base = OTHER; note = 2'-deoxy-2'-fluorouridine-3'-phosphate
  modified_base 12: mod_base = OTHER; note = 2'-O-methyluridine-3'-phosphate
  modified_base 13: mod_base = OTHER; note = 2'-O-methyladenosine-3'-phosphate
  modified_base 14: mod_base = OTHER; note = 2'-O-methyladenosine-3'-phosphate
  modified_base 15: mod_base = OTHER; note = 2'-O-methyladenosine-3'-phosphate
  modified_base 16: mod_base = OTHER; note = 2'-O-methyladenosine-3'-phosphate
  modified_base 17: mod_base = OTHER; note = 2'-O-methylguanosine-3'-phosphate
  modified_base 18: mod_base = OTHER; note = 2'-O-methyluridine-3'-phosphate
  modified_base 19: mod_base = OTHER; note = 2'-O-methylguanosine-3'-phosphate
  modified_base 20: mod_base = OTHER; note = 2'-O-methylcytidine-3'-phosphate
  modified_base 21: mod_base = OTHER; note = 2'-O-methyladenosine
tcatcagtttttaaaagtgca

SEQ ID NO: 3971 - RNA, 21 nt, synthetic construct
  source 1..21: mol_type = other RNA
  modified_base 1: mod_base = OTHER; note = 2'-O-methylcytidine-3'-phosphate
  modified_base 2: mod_base = OTHER; note = 2'-O-methyladenosine-3'-phosphate
  modified_base 3: mod_base = OTHER; note = 2'-O-methyluridine-3'-phosphate
  modified_base 4: mod_base = OTHER; note = 2'-O-methylcytidine-3'-phosphate
  modified_base 5: mod_base = OTHER; note = 2'-O-methyladenosine-3'-phosphate
  modified_base 6: mod_base = OTHER; note = 2'-O-methylguanosine-3'-phosphate
  modified_base 7: mod_base = OTHER; note = 2'-deoxy-2'-fluorouridine-3'-phosphate
  modified_base 8: mod_base = OTHER; note = 2'-O-methyluridine-3'-phosphate
  modified_base 9: mod_base = OTHER; note = 2'-deoxy-2'-fluorouridine-3'-phosphate
  modified_base 10: mod_base = OTHER; note = 2'-deoxy-2'-fluorouridine-3'-phosphate
  modified_base 11: mod_base = OTHER; note = 2'-deoxy-2'-fluorouridine-3'-phosphate
  modified_base 12: mod_base = OTHER; note = 2'-O-methyladenosine-3'-phosphate
  modified_base 13: mod_base = OTHER; note = 2'-O-methyladenosine-3'-phosphate
  modified_base 14: mod_base = OTHER; note = 2'-O-methyladenosine-3'-phosphate
  modified_base 15: mod_base = OTHER; note = 2'-O-methyladenosine-3'-phosphate
  modified_base 16: mod_base = OTHER; note = 2'-O-methylguanosine-3'-phosphate
  modified_base 17: mod_base = OTHER; note = 2'-O-methyluridine-3'-phosphate
  modified_base 18: mod_base = OTHER; note = 2'-O-methylguanosine-3'-phosphate
  modified_base 19: mod_base = OTHER; note = 2'-O-methylcytidine-3'-phosphate
  modified_base 20: mod_base = OTHER; note = 2'-O-methylcytidine-3'-phosphate
  modified_base 21: mod_base = OTHER; note = 2'-O-methyladenosine
catcagtttttaaaagtgcca

SEQ ID NO: 3972 - RNA, 21 nt, synthetic construct
  source 1..21: mol_type = other RNA
  modified_base 1: mod_base = OTHER; note = 2'-O-methyladenosine-3'-phosphate
  modified_base 2: mod_base = OTHER; note = 2'-O-methyluridine-3'-phosphate
  modified_base 3: mod_base = OTHER; note = 2'-O-methylcytidine-3'-phosphate
  modified_base 4: mod_base = OTHER; note = 2'-O-methyladenosine-3'-phosphate
  modified_base 5: mod_base = OTHER; note = 2'-O-methylguanosine-3'-phosphate
  modified_base 6: mod_base = OTHER; note = 2'-O-methyluridine-3'-phosphate
  modified_base 7: mod_base = OTHER; note = 2'-deoxy-2'-fluorouridine-3'-phosphate
  modified_base 8: mod_base = OTHER; note = 2'-O-methyluridine-3'-phosphate
  modified_base 9: mod_base = OTHER; note = 2'-deoxy-2'-fluorouridine-3'-phosphate
  modified_base 10: mod_base = OTHER; note = 2'-deoxy-2'-fluorouridine-3'-phosphate
  modified_base 11: mod_base = OTHER; note = 2'-deoxy-2'-fluoroadenosine-3'-phosphate
  modified_base 12: mod_base = OTHER; note = 2'-O-methyladenosine-3'-phosphate
  modified_base 13: mod_base = OTHER; note = 2'-O-methyladenosine-3'-phosphate
  modified_base 14: mod_base = OTHER; note = 2'-O-methyladenosine-3'-phosphate
  modified_base 15: mod_base = OTHER; note = 2'-O-methylguanosine-3'-phosphate
  modified_base 16: mod_base = OTHER; note = 2'-O-methyluridine-3'-phosphate
  modified_base 17: mod_base = OTHER; note = 2'-O-methylguanosine-3'-phosphate
  modified_base 18: mod_base = OTHER; note = 2'-O-methylcytidine-3'-phosphate
  modified_base 19: mod_base = OTHER; note = 2'-O-methylcytidine-3'-phosphate
  modified_base 20: mod_base = OTHER; note = 2'-O-methyluridine-3'-phosphate
  modified_base 21: mod_base = OTHER; note = 2'-O-methyladenosine
atcagtttttaaaagtgccta

SEQ ID NO: 3973 - RNA, 21 nt, synthetic construct
  source 1..21: mol_type = other RNA
  modified_base 1: mod_base = OTHER; note = 2'-O-methyluridine-3'-phosphate
  modified_base 2: mod_base = OTHER; note = 2'-O-methylcytidine-3'-phosphate
  modified_base 3: mod_base = OTHER; note = 2'-O-methyladenosine-3'-phosphate
  modified_base 4: mod_base = OTHER; note = 2'-O-methylguanosine-3'-phosphate
  modified_base 5: mod_base = OTHER; note = 2'-O-methyluridine-3'-phosphate
  modified_base 6: mod_base = OTHER; note = 2'-O-methyluridine-3'-phosphate
  modified_base 7: mod_base = OTHER; note = 2'-deoxy-2'-fluorouridine-3'-phosphate
  modified_base 8: mod_base = OTHER; note = 2'-O-methyluridine-3'-phosphate
  modified_base 9: mod_base = OTHER; note = 2'-deoxy-2'-fluorouridine-3'-phosphate
  modified_base 10: mod_base = OTHER; note = 2'-deoxy-2'-fluoroadenosine-3'-phosphate
  modified_base 11: mod_base = OTHER; note = 2'-deoxy-2'-fluoroadenosine-3'-phosphate
  modified_base 12: mod_base = OTHER; note = 2'-O-methyladenosine-3'-phosphate
  modified_base 13: mod_base = OTHER; note = 2'-O-methyladenosine-3'-phosphate
  modified_base 14: mod_base = OTHER; note = 2'-O-methylguanosine-3'-phosphate
  modified_base 15: mod_base = OTHER; note = 2'-O-methyluridine-3'-phosphate
  modified_base 16: mod_base = OTHER; note = 2'-O-methylguanosine-3'-phosphate
  modified_base 17: mod_base = OTHER; note = 2'-O-methylcytidine-3'-phosphate
  modified_base 18: mod_base = OTHER; note = 2'-O-methylcytidine-3'-phosphate
  modified_base 19: mod_base = OTHER; note = 2'-O-methyluridine-3'-phosphate
  modified_base 20: mod_base = OTHER; note = 2'-O-methyladenosine-3'-phosphate
  modified_base 21: mod_base = OTHER; note = 2'-O-methyladenosine
tcagtttttaaaagtgcctaa

SEQ ID NO: 3974 - RNA, 21 nt, synthetic construct
  source 1..21: mol_type = other RNA
  modified_base 1: mod_base = OTHER; note = 2'-O-methylcytidine-3'-phosphate
  modified_base 2: mod_base = OTHER; note = 2'-O-methyladenosine-3'-phosphate
  modified_base 3: mod_base = OTHER; note = 2'-O-methylguanosine-3'-phosphate
  modified_base 4: mod_base = OTHER; note = 2'-O-methyluridine-3'-phosphate
  modified_base 5: mod_base = OTHER; note = 2'-O-methyluridine-3'-phosphate
  modified_base 6: mod_base = OTHER; note = 2'-O-methyluridine-3'-phosphate
  modified_base 7: mod_base = OTHER; note = 2'-deoxy-2'-fluorouridine-3'-phosphate
  modified_base 8: mod_base = OTHER; note = 2'-O-methyluridine-3'-phosphate
  modified_base 9: mod_base = OTHER; note = 2'-deoxy-2'-fluoroadenosine-3'-phosphate
  modified_base 10: mod_base = OTHER; note = 2'-deoxy-2'-fluoroadenosine-3'-phosphate
  modified_base 11: mod_base = OTHER; note = 2'-deoxy-2'-fluoroadenosine-3'-phosphate
  modified_base 12: mod_base = OTHER; note = 2'-O-methyladenosine-3'-phosphate
  modified_base 13: mod_base = OTHER; note = 2'-O-methylguanosine-3'-phosphate
  modified_base 14: mod_base = OTHER; note = 2'-O-methyluridine-3'-phosphate
  modified_base 15: mod_base = OTHER; note = 2'-O-methylguanosine-3'-phosphate
  modified_base 16: mod_base = OTHER; note = 2'-O-methylcytidine-3'-phosphate
  modified_base 17: mod_base = OTHER; note = 2'-O-methylcytidine-3'-phosphate
  modified_base 18: mod_base = OTHER; note = 2'-O-methyluridine-3'-phosphate
  modified_base 19: mod_base = OTHER; note = 2'-O-methyladenosine-3'-phosphate
  modified_base 20: mod_base = OTHER; note = 2'-O-methyluridine-3'-phosphate
  modified_base 21: mod_base = OTHER; note = 2'-O-methyladenosine
cagtttttaaaagtgcctata

SEQ ID NO: 3975 - RNA, 21 nt, synthetic construct
  source 1..21: mol_type = other RNA
  modified_base 1: mod_base = OTHER; note = 2'-O-methyladenosine-3'-phosphate
  modified_base 2: mod_base = OTHER; note = 2'-O-methylguanosine-3'-phosphate
  modified_base 3: mod_base = OTHER; note = 2'-O-methyluridine-3'-phosphate
  modified_base 4: mod_base = OTHER; note = 2'-O-methyluridine-3'-phosphate
  modified_base 5: mod_base = OTHER; note = 2'-O-methyluridine-3'-phosphate
  modified_base 6: mod_base = OTHER; note = 2'-O-methyluridine-3'-phosphate
  modified_base 7: mod_base = OTHER; note = 2'-deoxy-2'-fluorouridine-3'-phosphate
  modified_base 8: mod_base = OTHER; note = 2'-O-methyladenosine-3'-phosphate
  modified_base 9: mod_base = OTHER; note = 2'-deoxy-2'-fluoroadenosine-3'-phosphate
  modified_base 10: mod_base = OTHER; note = 2'-deoxy-2'-fluoroadenosine-3'-phosphate
  modified_base 11: mod_base = OTHER; note = 2'-deoxy-2'-fluoroadenosine-3'-phosphate
  modified_base 12: mod_base = OTHER; note = 2'-O-methylguanosine-3'-phosphate
  modified_base 13: mod_base = OTHER; note = 2'-O-methyluridine-3'-phosphate
  modified_base 14: mod_base = OTHER; note = 2'-O-methylguanosine-3'-phosphate
  modified_base 15: mod_base = OTHER; note = 2'-O-methylcytidine-3'-phosphate
  modified_base 16: mod_base = OTHER; note = 2'-O-methylcytidine-3'-phosphate
  modified_base 17: mod_base = OTHER; note = 2'-O-methyluridine-3'-phosphate
  modified_base 18: mod_base = OTHER; note = 2'-O-methyladenosine-3'-phosphate
  modified_base 19: mod_base = OTHER; note = 2'-O-methyluridine-3'-phosphate
  modified_base 20: mod_base = OTHER; note = 2'-O-methylguanosine-3'-phosphate
  modified_base 21: mod_base = OTHER; note = 2'-O-methyladenosine
agtttttaaaagtgcctatga

SEQ ID NO: 3976 - RNA, 21 nt, synthetic construct
  source 1..21: mol_type = other RNA
  modified_base 1: mod_base = OTHER; note = 2'-O-methylguanosine-3'-phosphate
  modified_base 2: mod_base = OTHER; note = 2'-O-methyluridine-3'-phosphate
  modified_base 3: mod_base = OTHER; note = 2'-O-methyluridine-3'-phosphate
  modified_base 4: mod_base = OTHER; note = 2'-O-methyluridine-3'-phosphate
  modified_base 5: mod_base = OTHER; note = 2'-O-methyluridine-3'-phosphate
  modified_base 6: mod_base = OTHER; note = 2'-O-methyluridine-3'-phosphate
  modified_base 7: mod_base = OTHER; note = 2'-deoxy-2'-fluoroadenosine-3'-phosphate
  modified_base 8: mod_base = OTHER; note = 2'-O-methyladenosine-3'-phosphate
  modified_base 9: mod_base = OTHER; note = 2'-deoxy-2'-fluoroadenosine-3'-phosphate
  modified_base 10: mod_base = OTHER; note = 2'-deoxy-2'-fluoroadenosine-3'-phosphate
  modified_base 11: mod_base = OTHER; note = 2'-deoxy-2'-fluoroguanosine-3'-phosphate
  modified_base 12: mod_base = OTHER; note = 2'-O-methyluridine-3'-phosphate
  modified_base 13: mod_base = OTHER; note = 2'-O-methylguanosine-3'-phosphate
  modified_base 14: mod_base = OTHER; note = 2'-O-methylcytidine-3'-phosphate
  modified_base 15: mod_base = OTHER; note = 2'-O-methylcytidine-3'-phosphate
  modified_base 16: mod_base = OTHER; note = 2'-O-methyluridine-3'-phosphate
  modified_base 17: mod_base = OTHER; note = 2'-O-methyladenosine-3'-phosphate
  modified_base 18: mod_base = OTHER; note = 2'-O-methyluridine-3'-phosphate
  modified_base 19: mod_base = OTHER; note = 2'-O-methylguanosine-3'-phosphate
  modified_base 20: mod_base = OTHER; note = 2'-O-methyluridine-3'-phosphate
  modified_base 21: mod_base = OTHER; note = 2'-O-methyladenosine
gtttttaaaagtgcctatgta

SEQ ID NO: 3977 - RNA, 21 nt, synthetic construct
  source 1..21: mol_type = other RNA
  modified_base 1: mod_base = OTHER; note = 2'-O-methyluridine-3'-phosphate
  modified_base 2: mod_base = OTHER; note = 2'-O-methyluridine-3'-phosphate
  modified_base 3: mod_base = OTHER; note = 2'-O-methyluridine-3'-phosphate
  modified_base 4: mod_base = OTHER; note = 2'-O-methyluridine-3'-phosphate
  modified_base 5: mod_base = OTHER; note = 2'-O-methyluridine-3'-phosphate
  modified_base 6: mod_base = OTHER; note = 2'-O-methyladenosine-3'-phosphate
  modified_base 7: mod_base = OTHER; note = 2'-deoxy-2'-fluoroadenosine-3'-phosphate
  modified_base 8: mod_base = OTHER; note = 2'-O-methyladenosine-3'-phosphate
  modified_base 9: mod_base = OTHER; note = 2'-deoxy-2'-fluoroadenosine-3'-phosphate
  modified_base 10: mod_base = OTHER; note = 2'-deoxy-2'-fluoroguanosine-3'-phosphate
  modified_base 11: mod_base = OTHER; note = 2'-deoxy-2'-fluorouridine-3'-phosphate
  modified_base 12: mod_base = OTHER; note = 2'-O-methylguanosine-3'-phosphate
  modified_base 13: mod_base = OTHER; note = 2'-O-methylcytidine-3'-phosphate
  modified_base 14: mod_base = OTHER; note = 2'-O-methylcytidine-3'-phosphate
  modified_base 15: mod_base = OTHER; note = 2'-O-methyluridine-3'-phosphate
  modified_base 16: mod_base = OTHER; note = 2'-O-methyladenosine-3'-phosphate
  modified_base 17: mod_base = OTHER; note = 2'-O-methyluridine-3'-phosphate
  modified_base 18: mod_base = OTHER; note = 2'-O-methylguanosine-3'-phosphate
  modified_base 19: mod_base = OTHER; note = 2'-O-methyluridine-3'-phosphate
  modified_base 20: mod_base = OTHER; note = 2'-O-methylguanosine-3'-phosphate
  modified_base 21: mod_base = OTHER; note = 2'-O-methyladenosine
tttttaaaagtgcctatgtga

SEQ ID NO: 3978 - RNA, 21 nt, synthetic construct
  source 1..21: mol_type = other RNA
  modified_base 1: mod_base = OTHER; note = 2'-O-methyladenosine-3'-phosphate
  modified_base 2: mod_base = OTHER; note = 2'-O-methyladenosine-3'-phosphate
  modified_base 3: mod_base = OTHER; note = 2'-O-methylguanosine-3'-phosphate
  modified_base 4: mod_base = OTHER; note = 2'-O-methyluridine-3'-phosphate
  modified_base 5: mod_base = OTHER; note = 2'-O-methylguanosine-3'-phosphate
  modified_base 6: mod_base = OTHER; note = 2'-O-methylcytidine-3'-phosphate
  modified_base 7: mod_base = OTHER; note = 2'-deoxy-2'-fluorocytidine-3'-phosphate
  modified_base 8: mod_base = OTHER; note = 2'-O-methyluridine-3'-phosphate
  modified_base 9: mod_base = OTHER; note = 2'-deoxy-2'-fluoroadenosine-3'-phosphate
  modified_base 10: mod_base = OTHER; note = 2'-deoxy-2'-fluorouridine-3'-phosphate
  modified_base 11: mod_base = OTHER; note = 2'-deoxy-2'-fluoroguanosine-3'-phosphate
  modified_base 12: mod_base = OTHER; note = 2'-O-methyluridine-3'-phosphate
  modified_base 13: mod_base = OTHER; note = 2'-O-methylguanosine-3'-phosphate
  modified_base 14: mod_base = OTHER; note = 2'-O-methyladenosine-3'-phosphate
  modified_base 15: mod_base = OTHER; note = 2'-O-methyladenosine-3'-phosphate
  modified_base 16: mod_base = OTHER; note = 2'-O-methylguanosine-3'-phosphate
  modified_base 17: mod_base = OTHER; note = 2'-O-methyluridine-3'-phosphate
  modified_base 18: mod_base = OTHER; note = 2'-O-methylguanosine-3'-phosphate
  modified_base 19: mod_base = OTHER; note = 2'-O-methyladenosine-3'-phosphate
  modified_base 20: mod_base = OTHER; note = 2'-O-methyluridine-3'-phosphate
  modified_base 21: mod_base = OTHER; note = 2'-O-methyladenosine
aagtgcctatgtgaagtgata

SEQ ID NO: 3979 - RNA, 21 nt, synthetic construct
  source 1..21: mol_type = other RNA
  modified_base 1: mod_base = OTHER; note = 2'-O-methyladenosine-3'-phosphate
  modified_base 2: mod_base = OTHER; note = 2'-O-methylguanosine-3'-phosphate
  modified_base 3: mod_base = OTHER; note = 2'-O-methyluridine-3'-phosphate
  modified_base 4: mod_base = OTHER; note = 2'-O-methylguanosine-3'-phosphate
  modified_base 5: mod_base = OTHER; note = 2'-O-methylcytidine-3'-phosphate
  modified_base 6: mod_base = OTHER; note = 2'-O-methylcytidine-3'-phosphate
  modified_base 7: mod_base = OTHER; note = 2'-deoxy-2'-fluorouridine-3'-phosphate
  modified_base 8: mod_base = OTHER; note = 2'-O-methyladenosine-3'-phosphate
  modified_base 9: mod_base = OTHER; note = 2'-deoxy-2'-fluorouridine-3'-phosphate
  modified_base 10: mod_base = OTHER; note = 2'-deoxy-2'-fluoroguanosine-3'-phosphate
  modified_base 11: mod_base = OTHER; note = 2'-deoxy-2'-fluorouridine-3'-phosphate
  modified_base 12: mod_base = OTHER; note = 2'-O-methylguanosine-3'-phosphate
  modified_base 13: mod_base = OTHER; note = 2'-O-methyladenosine-3'-phosphate
  modified_base 14: mod_base = OTHER; note = 2'-O-methyladenosine-3'-phosphate
  modified_base 15: mod_base = OTHER; note = 2'-O-methylguanosine-3'-phosphate
  modified_base 16: mod_base = OTHER; note = 2'-O-methyluridine-3'-phosphate
  modified_base 17: mod_base = OTHER; note = 2'-O-methylguanosine-3'-phosphate
  modified_base 18: mod_base = OTHER; note = 2'-O-methyladenosine-3'-phosphate
  modified_base 19: mod_base = OTHER; note = 2'-O-methyluridine-3'-phosphate
  modified_base 20: mod_base = OTHER; note = 2'-O-methyluridine-3'-phosphate
  modified_base 21: mod_base = OTHER; note = 2'-O-methyladenosine
agtgcctatgtgaagtgatta

SEQ ID NO: 3980 - RNA, 21 nt, synthetic construct
  source 1..21: mol_type = other RNA
  modified_base 1: mod_base = OTHER; note = 2'-O-methylguanosine-3'-phosphate
  modified_base 2: mod_base = OTHER; note = 2'-O-methyluridine-3'-phosphate
  modified_base 3: mod_base = OTHER; note = 2'-O-methylguanosine-3'-phosphate
  modified_base 4: mod_base = OTHER; note = 2'-O-methylcytidine-3'-phosphate
  modified_base 5: mod_base = OTHER; note = 2'-O-methylcytidine-3'-phosphate
  modified_base 6: mod_base = OTHER; note = 2'-O-methyluridine-3'-phosphate
  modified_base 7: mod_base = OTHER; note = 2'-deoxy-2'-fluoroadenosine-3'-phosphate
  modified_base 8: mod_base = OTHER; note = 2'-O-methyluridine-3'-phosphate
  modified_base 9: mod_base = OTHER; note = 2'-deoxy-2'-fluoroguanosine-3'-phosphate
  modified_base 10: mod_base = OTHER; note = 2'-deoxy-2'-fluorouridine-3'-phosphate
  modified_base 11: mod_base = OTHER; note = 2'-deoxy-2'-fluoroguanosine-3'-phosphate
  modified_base 12: mod_base = OTHER; note = 2'-O-methyladenosine-3'-phosphate
  modified_base 13: mod_base = OTHER; note = 2'-O-methyladenosine-3'-phosphate
  modified_base 14: mod_base = OTHER; note = 2'-O-methylguanosine-3'-phosphate
  modified_base 15: mod_base = OTHER; note = 2'-O-methyluridine-3'-phosphate
  modified_base 16: mod_base = OTHER; note = 2'-O-methylguanosine-3'-phosphate
  modified_base 17: mod_base = OTHER; note = 2'-O-methyladenosine-3'-phosphate
  modified_base 18: mod_base = OTHER; note = 2'-O-methyluridine-3'-phosphate
  modified_base 19: mod_base = OTHER; note = 2'-O-methyluridine-3'-phosphate
  modified_base 20: mod_base = OTHER; note = 2'-O-methyluridine-3'-phosphate
  modified_base 21: mod_base = OTHER; note = 2'-O-methyladenosine
gtgcctatgtgaagtgattta

SEQ ID NO: 3981 - RNA, 21 nt, synthetic construct
  source 1..21: mol_type = other RNA
  modified_base 1: mod_base = OTHER; note = 2'-O-methyluridine-3'-phosphate
  modified_base 2: mod_base = OTHER; note = 2'-O-methylguanosine-3'-phosphate
  modified_base 3: mod_base = OTHER; note = 2'-O-methylcytidine-3'-phosphate
  modified_base 4: mod_base = OTHER; note = 2'-O-methylcytidine-3'-phosphate
  modified_base 5: mod_base = OTHER; note = 2'-O-methyluridine-3'-phosphate
  modified_base 6: mod_base = OTHER; note = 2'-O-methyladenosine-3'-phosphate
  modified_base 7: mod_base = OTHER; note = 2'-deoxy-2'-fluorouridine-3'-phosphate
  modified_base 8: mod_base = OTHER; note = 2'-O-methylguanosine-3'-phosphate
  modified_base 9: mod_base = OTHER; note = 2'-deoxy-2'-fluorouridine-3'-phosphate
  modified_base 10: mod_base = OTHER; note = 2'-deoxy-2'-fluoroguanosine-3'-phosphate
  modified_base 11: mod_base = OTHER; note = 2'-deoxy-2'-fluoroadenosine-3'-phosphate
  modified_base 12: mod_base = OTHER; note = 2'-O-methyladenosine-3'-phosphate
  modified_base 13: mod_base = OTHER; note = 2'-O-methylguanosine-3'-phosphate
  modified_base 14: mod_base = OTHER; note = 2'-O-methyluridine-3'-phosphate
  modified_base 15: mod_base = OTHER; note = 2'-O-methylguanosine-3'-phosphate
  modified_base 16: mod_base = OTHER; note = 2'-O-methyladenosine-3'-phosphate
  modified_base 17: mod_base = OTHER; note = 2'-O-methyluridine-3'-phosphate
  modified_base 18: mod_base = OTHER; note = 2'-O-methyluridine-3'-phosphate
  modified_base 19: mod_base = OTHER; note = 2'-O-methyluridine-3'-phosphate
  modified_base 20: mod_base = OTHER; note = 2'-O-methyluridine-3'-phosphate
  modified_base 21: mod_base = OTHER; note = 2'-O-methyladenosine
tgcctatgtgaagtgatttta

SEQ ID NO: 3982 - RNA, 21 nt, synthetic construct
  source 1..21: mol_type = other RNA
  modified_base 1: mod_base = OTHER; note = 2'-O-methylguanosine-3'-phosphate
  modified_base 2: mod_base = OTHER; note = 2'-O-methylcytidine-3'-phosphate
  modified_base 3: mod_base = OTHER; note = 2'-O-methylcytidine-3'-phosphate
  modified_base 4: mod_base = OTHER; note = 2'-O-methyluridine-3'-phosphate
  modified_base 5: mod_base = OTHER; note = 2'-O-methyladenosine-3'-phosphate
  modified_base 6: mod_base = OTHER; note = 2'-O-methyluridine-3'-phosphate
  modified_base 7: mod_base = OTHER; note = 2'-deoxy-2'-fluoroguanosine-3'-phosphate
  modified_base 8: mod_base = OTHER; note = 2'-O-methyluridine-3'-phosphate
  modified_base 9: mod_base = OTHER; note = 2'-deoxy-2'-fluoroguanosine-3'-phosphate
  modified_base 10: mod_base = OTHER; note = 2'-deoxy-2'-fluoroadenosine-3'-phosphate
  modified_base 11: mod_base = OTHER; note = 2'-deoxy-2'-fluoroadenosine-3'-phosphate
  modified_base 12: mod_base = OTHER; note = 2'-O-methylguanosine-3'-phosphate
  modified_base 13: mod_base = OTHER; note = 2'-O-methyluridine-3'-phosphate
  modified_base 14: mod_base = OTHER; note = 2'-O-methylguanosine-3'-phosphate
  modified_base 15: mod_base = OTHER; note = 2'-O-methyladenosine-3'-phosphate
  modified_base 16: mod_base = OTHER; note = 2'-O-methyluridine-3'-phosphate
  modified_base 17: mod_base = OTHER; note = 2'-O-methyluridine-3'-phosphate
  modified_base 18: mod_base = OTHER; note = 2'-O-methyluridine-3'-phosphate
  modified_base 19: mod_base = OTHER; note = 2'-O-methyluridine-3'-phosphate
  modified_base 20: mod_base = OTHER; note = 2'-O-methyluridine-3'-phosphate
  modified_base 21: mod_base = OTHER; note = 2'-O-methyladenosine
gcctatgtgaagtgattttta

SEQ ID NO: 3983 - RNA, 21 nt, synthetic construct
  source 1..21: mol_type = other RNA
  modified_base 1: mod_base = OTHER; note = 2'-O-methylcytidine-3'-phosphate
  modified_base 2: mod_base = OTHER; note = 2'-O-methylcytidine-3'-phosphate
  modified_base 3: mod_base = OTHER; note = 2'-O-methyluridine-3'-phosphate
  modified_base 4: mod_base = OTHER; note = 2'-O-methyladenosine-3'-phosphate
  modified_base 5: mod_base = OTHER; note = 2'-O-methyluridine-3'-phosphate
  modified_base 6: mod_base = OTHER; note = 2'-O-methylguanosine-3'-phosphate
  modified_base 7: mod_base = OTHER; note = 2'-deoxy-2'-fluorouridine-3'-phosphate
  modified_base 8: mod_base = OTHER; note = 2'-O-methylguanosine-3'-phosphate
  modified_base 9: mod_base = OTHER; note = 2'-deoxy-2'-fluoroadenosine-3'-phosphate
  modified_base 10: mod_base = OTHER; note = 2'-deoxy-2'-fluoroadenosine-3'-phosphate
  modified_base 11: mod_base = OTHER; note = 2'-deoxy-2'-fluoroguanosine-3'-phosphate
  modified_base 12: mod_base = OTHER; note = 2'-O-methyluridine-3'-phosphate
  modified_base 13: mod_base = OTHER; note = 2'-O-methylguanosine-3'-phosphate
  modified_base 14: mod_base = OTHER; note = 2'-O-methyladenosine-3'-phosphate
  modified_base 15: mod_base = OTHER; note = 2'-O-methyluridine-3'-phosphate
  modified_base 16: mod_base = OTHER; note = 2'-O-methyluridine-3'-phosphate
  modified_base 17: mod_base = OTHER; note = 2'-O-methyluridine-3'-phosphate
  modified_base 18: mod_base = OTHER; note = 2'-O-methyluridine-3'-phosphate
  modified_base 19: mod_base = OTHER; note = 2'-O-methyluridine-3'-phosphate
  modified_base 20: mod_base = OTHER; note = 2'-O-methyladenosine-3'-phosphate
  modified_base 21: mod_base = OTHER; note = 2'-O-methyladenosine
cctatgtgaagtgatttttaa

SEQ ID NO: 3984 - RNA, 21 nt, synthetic construct
  source 1..21: mol_type = other RNA
  modified_base 1: mod_base = OTHER; note = 2'-O-methylcytidine-3'-phosphate
  modified_base 2: mod_base = OTHER; note = 2'-O-methyluridine-3'-phosphate
  modified_base 3: mod_base = OTHER; note = 2'-O-methyladenosine-3'-phosphate
  modified_base 4: mod_base = OTHER; note = 2'-O-methyluridine-3'-phosphate
  modified_base 5: mod_base = OTHER; note = 2'-O-methylguanosine-3'-phosphate
  modified_base 6: mod_base = OTHER; note = 2'-O-methyluridine-3'-phosphate
  modified_base 7: mod_base = OTHER; note = 2'-deoxy-2'-fluoroguanosine-3'-phosphate
  modified_base 8: mod_base = OTHER; note = 2'-O-methyladenosine-3'-phosphate
  modified_base 9: mod_base = OTHER; note = 2'-deoxy-2'-fluoroadenosine-3'-phosphate
  modified_base 10: mod_base = OTHER; note = 2'-deoxy-2'-fluoroguanosine-3'-phosphate
  modified_base 11: mod_base = OTHER; note = 2'-deoxy-2'-fluorouridine-3'-phosphate
  modified_base 12: mod_base = OTHER; note = 2'-O-methylguanosine-3'-phosphate
  modified_base 13: mod_base = OTHER; note = 2'-O-methyladenosine-3'-phosphate
  modified_base 14: mod_base = OTHER; note = 2'-O-methyluridine-3'-phosphate
  modified_base 15: mod_base = OTHER; note = 2'-O-methyluridine-3'-phosphate
  modified_base 16: mod_base = OTHER; note = 2'-O-methyluridine-3'-phosphate
  modified_base 17: mod_base = OTHER; note = 2'-O-methyluridine-3'-phosphate
  modified_base 18: mod_base = OTHER; note = 2'-O-methyluridine-3'-phosphate
  modified_base 19: mod_base = OTHER; note = 2'-O-methyladenosine-3'-phosphate
  modified_base 20: mod_base = OTHER; note = 2'-O-methyladenosine-3'-phosphate
  modified_base 21: mod_base = OTHER; note = 2'-O-methyladenosine
ctatgtgaagtgatttttaaa

SEQ ID NO: 3985 - RNA, 21 nt, synthetic construct
  source 1..21: mol_type = other RNA
  modified_base 1: mod_base = OTHER; note = 2'-O-methyluridine-3'-phosphate
  modified_base 2: mod_base = OTHER; note = 2'-O-methyladenosine-3'-phosphate
  modified_base 3: mod_base = OTHER; note = 2'-O-methyluridine-3'-phosphate
  modified_base 4: mod_base = OTHER; note = 2'-O-methylguanosine-3'-phosphate
  modified_base 5: mod_base = OTHER; note = 2'-O-methyluridine-3'-phosphate
  modified_base 6: mod_base = OTHER; note = 2'-O-methylguanosine-3'-phosphate
  modified_base 7: mod_base = OTHER; note = 2'-deoxy-2'-fluoroadenosine-3'-phosphate
  modified_base 8: mod_base = OTHER; note = 2'-O-methyladenosine-3'-phosphate
  modified_base 9: mod_base = OTHER; note = 2'-deoxy-2'-fluoroguanosine-3'-phosphate
  modified_base 10: mod_base = OTHER; note = 2'-deoxy-2'-fluorouridine-3'-phosphate
  modified_base 11: mod_base = OTHER; note = 2'-deoxy-2'-fluoroguanosine-3'-phosphate
  modified_base 12: mod_base = OTHER; note = 2'-O-methyladenosine-3'-phosphate
  modified_base 13: mod_base = OTHER; note = 2'-O-methyluridine-3'-phosphate
  modified_base 14: mod_base = OTHER; note = 2'-O-methyluridine-3'-phosphate
  modified_base 15: mod_base = OTHER; note = 2'-O-methyluridine-3'-phosphate
  modified_base 16: mod_base = OTHER; note = 2'-O-methyluridine-3'-phosphate
  modified_base 17: mod_base = OTHER; note = 2'-O-methyluridine-3'-phosphate
  modified_base 18: mod_base = OTHER; note = 2'-O-methyladenosine-3'-phosphate
  modified_base 19: mod_base = OTHER; note = 2'-O-methyladenosine-3'-phosphate
  modified_base 20: mod_base = OTHER; note = 2'-O-methyladenosine-3'-phosphate
  modified_base 21: mod_base = OTHER; note = 2'-O-methyladenosine
tatgtgaagtgatttttaaaa

SEQ ID NO: 3986 - RNA, 21 nt, synthetic construct
  source 1..21: mol_type = other RNA
  modified_base 1: mod_base = OTHER; note = 2'-O-methylguanosine-3'-phosphate
  modified_base 2: mod_base = OTHER; note = 2'-O-methyladenosine-3'-phosphate
  modified_base 3: mod_base = OTHER; note = 2'-O-methyladenosine-3'-phosphate
  modified_base 4: mod_base = OTHER; note = 2'-O-methylguanosine-3'-phosphate
  modified_base 5: mod_base = OTHER; note = 2'-O-methyluridine-3'-phosphate
  modified_base 6: mod_base = OTHER; note = 2'-O-methylguanosine-3'-phosphate
  modified_base 7: mod_base = OTHER; note = 2'-deoxy-2'-fluoroadenosine-3'-phosphate
  modified_base 8: mod_base = OTHER; note = 2'-O-methyluridine-3'-phosphate
  modified_base 9: mod_base = OTHER; note = 2'-deoxy-2'-fluorouridine-3'-phosphate
  modified_base 10: mod_base = OTHER; note = 2'-deoxy-2'-fluorouridine-3'-phosphate
  modified_base 11: mod_base = OTHER; note = 2'-deoxy-2'-fluorouridine-3'-phosphate
  modified_base 12: mod_base = OTHER; note = 2'-O-methyluridine-3'-phosphate
  modified_base 13: mod_base = OTHER; note = 2'-O-methyladenosine-3'-phosphate
  modified_base 14: mod_base = OTHER; note = 2'-O-methyladenosine-3'-phosphate
  modified_base 15: mod_base = OTHER; note = 2'-O-methyladenosine-3'-phosphate
  modified_base 16: mod_base = OTHER; note = 2'-O-methyladenosine-3'-phosphate
  modified_base 17: mod_base = OTHER; note = 2'-O-methyladenosine-3'-phosphate
  modified_base 18: mod_base = OTHER; note = 2'-O-methylguanosine-3'-phosphate
  modified_base 19: mod_base = OTHER; note = 2'-O-methyladenosine-3'-phosphate
  modified_base 20: mod_base = OTHER; note = 2'-O-methylguanosine-3'-phosphate
  modified_base 21: mod_base = OTHER; note = 2'-O-methyladenosine
gaagtgatttttaaaaagaga

SEQ ID NO: 3987 - RNA, 21 nt, synthetic construct
  source 1..21: mol_type = other RNA
  modified_base 1: mod_base = OTHER; note = 2'-O-methyladenosine-3'-phosphate
  modified_base 2: mod_base = OTHER; note = 2'-O-methyladenosine-3'-phosphate
  modified_base 3: mod_base = OTHER; note = 2'-O-methylguanosine-3'-phosphate
  modified_base 4: mod_base = OTHER; note = 2'-O-methyluridine-3'-phosphate
  modified_base 5: mod_base = OTHER; note = 2'-O-methylguanosine-3'-phosphate
  modified_base 6: mod_base = OTHER; note = 2'-O-methyladenosine-3'-phosphate
  modified_base 7: mod_base = OTHER; note = 2'-deoxy-2'-fluorouridine-3'-phosphate
  modified_base 8: mod_base = OTHER; note = 2'-O-methyluridine-3'-phosphate
  modified_base 9: mod_base = OTHER; note = 2'-deoxy-2'-fluorouridine-3'-phosphate
  modified_base 10: mod_base = OTHER; note = 2'-deoxy-2'-fluorouridine-3'-phosphate
  modified_base 11: mod_base = OTHER; note = 2'-deoxy-2'-fluorouridine-3'-phosphate
  modified_base 12: mod_base = OTHER; note = 2'-O-methyladenosine-3'-phosphate
  modified_base 13: mod_base = OTHER; note = 2'-O-methyladenosine-3'-phosphate
  modified_base 14: mod_base = OTHER; note = 2'-O-methyladenosine-3'-phosphate
  modified_base 15: mod_base = OTHER; note = 2'-O-methyladenosine-3'-phosphate
  modified_base 16: mod_base = OTHER; note = 2'-O-methyladenosine-3'-phosphate
  modified_base 17: mod_base = OTHER; note = 2'-O-methylguanosine-3'-phosphate
  modified_base 18: mod_base = OTHER; note = 2'-O-methyladenosine-3'-phosphate
  modified_base 19: mod_base = OTHER; note = 2'-O-methylguanosine-3'-phosphate
  modified_base 20: mod_base = OTHER; note = 2'-O-methylcytidine-3'-phosphate
  modified_base 21: mod_base = OTHER; note = 2'-O-methyladenosine
aagtgatttttaaaaagagca

SEQ ID NO: 3988 - RNA, 21 nt, synthetic construct
  source 1..21: mol_type = other RNA
  modified_base 1: mod_base = OTHER; note = 2'-O-methyluridine-3'-phosphate
  modified_base 2: mod_base = OTHER; note = 2'-O-methylguanosine-3'-phosphate
  modified_base 3: mod_base = OTHER; note = 2'-O-methyladenosine-3'-phosphate
  modified_base 4: mod_base = OTHER; note = 2'-O-methyluridine-3'-phosphate
  modified_base 5: mod_base = OTHER; note = 2'-O-methyluridine-3'-phosphate
  modified_base 6: mod_base = OTHER; note = 2'-O-methyluridine-3'-phosphate
  modified_base 7: mod_base = OTHER; note = 2'-deoxy-2'-fluorouridine-3'-phosphate
  modified_base 8: mod_base = OTHER; note = 2'-O-methyluridine-3'-phosphate
  modified_base 9: mod_base = OTHER; note = 2'-deoxy-2'-fluoroadenosine-3'-phosphate
  modified_base 10: mod_base = OTHER; note = 2'-deoxy-2'-fluoroadenosine-3'-phosphate
  modified_base 11: mod_base = OTHER; note = 2'-deoxy-2'-fluoroadenosine-3'-phosphate
  modified_base 12: mod_base = OTHER; note = 2'-O-methyladenosine-3'-phosphate
  modified_base 13: mod_base = OTHER; note = 2'-O-methyladenosine-3'-phosphate
  modified_base 14: mod_base = OTHER; note = 2'-O-methylguanosine-3'-phosphate
  modified_base 15: mod_base = OTHER; note = 2'-O-methyladenosine-3'-phosphate
  modified_base 16: mod_base = OTHER; note = 2'-O-methylguanosine-3'-phosphate
  modified_base 17: mod_base = OTHER; note = 2'-O-methylcytidine-3'-phosphate
  modified_base 18: mod_base = OTHER; note = 2'-O-methylcytidine-3'-phosphate
  modified_base 19: mod_base = OTHER; note = 2'-O-methyluridine-3'-phosphate
  modified_base 20: mod_base = OTHER; note = 2'-O-methyladenosine-3'-phosphate
  modified_base 21: mod_base = OTHER; note = 2'-O-methyladenosine
tgatttttaaaaagagcctaa

SEQ ID NO: 3989 - RNA, 21 nt, synthetic construct
  source 1..21: mol_type = other RNA
  modified_base 1: mod_base = OTHER; note = 2'-O-methylguanosine-3'-phosphate
  modified_base 2: mod_base = OTHER; note = 2'-O-methyladenosine-3'-phosphate
  modified_base 3: mod_base = OTHER; note = 2'-O-methyluridine-3'-phosphate
  modified_base 4: mod_base = OTHER; note = 2'-O-methyluridine-3'-phosphate
  modified_base 5: mod_base = OTHER; note = 2'-O-methyluridine-3'-phosphate
  modified_base 6: mod_base = OTHER; note = 2'-O-methyluridine-3'-phosphate
  modified_base 7: mod_base = OTHER; note = 2'-deoxy-2'-fluorouridine-3'-phosphate
  modified_base 8: mod_base = OTHER; note = 2'-O-methyladenosine-3'-phosphate
  modified_base 9: mod_base = OTHER; note = 2'-deoxy-2'-fluoroadenosine-3'-phosphate
  modified_base 10: mod_base = OTHER; note = 2'-deoxy-2'-fluoroadenosine-3'-phosphate
  modified_base 11: mod_base = OTHER; note = 2'-deoxy-2'-fluoroadenosine-3'-phosphate
  modified_base 12: mod_base = OTHER; note = 2'-O-methyladenosine-3'-phosphate
  modified_base 13: mod_base = OTHER; note = 2'-O-methylguanosine-3'-phosphate
  modified_base 14: mod_base = OTHER; note = 2'-O-methyladenosine-3'-phosphate
  modified_base 15: mod_base = OTHER; note = 2'-O-methylguanosine-3'-phosphate
  modified_base 16: mod_base = OTHER; note = 2'-O-methylcytidine-3'-phosphate
  modified_base 17: mod_base = OTHER; note = 2'-O-methylcytidine-3'-phosphate
  modified_base 18: mod_base = OTHER; note = 2'-O-methyluridine-3'-phosphate
  modified_base 19: mod_base = OTHER; note = 2'-O-methyladenosine-3'-phosphate
  modified_base 20: mod_base = OTHER; note = 2'-O-methyluridine-3'-phosphate
  modified_base 21: mod_base = OTHER; note = 2'-O-methyladenosine
gatttttaaaaagagcctata

SEQ ID NO: 3990 - RNA, 21 nt, synthetic construct
  source 1..21: mol_type = other RNA
  modified_base 1: mod_base = OTHER; note = 2'-O-methyladenosine-3'-phosphate
  modified_base 2: mod_base = OTHER; note = 2'-O-methyluridine-3'-phosphate
  modified_base 3: mod_base = OTHER; note = 2'-O-methyluridine-3'-phosphate
  modified_base 4: mod_base = OTHER; note = 2'-O-methyluridine-3'-phosphate
  modified_base 5: mod_base = OTHER; note = 2'-O-methyluridine-3'-phosphate
  modified_base 6: mod_base = OTHER; note = 2'-O-methyluridine-3'-phosphate
  modified_base 7: mod_base = OTHER; note = 2'-deoxy-2'-fluoroadenosine-3'-phosphate
  modified_base 8: mod_base = OTHER; note = 2'-O-methyladenosine-3'-phosphate
  modified_base 9: mod_base = OTHER; note = 2'-deoxy-2'-fluoroadenosine-3'-phosphate
  modified_base 10: mod_base = OTHER; note = 2'-deoxy-2'-fluoroadenosine-3'-phosphate
  modified_base 11: mod_base = OTHER; note = 2'-deoxy-2'-fluoroadenosine-3'-phosphate
  modified_base 12: mod_base = OTHER; note = 2'-O-methylguanosine-3'-phosphate
  modified_base 13: mod_base = OTHER; note = 2'-O-methyladenosine-3'-phosphate
  modified_base 14: mod_base = OTHER; note = 2'-O-methylguanosine-3'-phosphate
  modified_base 15: mod_base = OTHER; note = 2'-O-methylcytidine-3'-phosphate
  modified_base 16: mod_base = OTHER; note = 2'-O-methylcytidine-3'-phosphate
  modified_base 17: mod_base = OTHER; note = 2'-O-methyluridine-3'-phosphate
  modified_base 18: mod_base = OTHER; note = 2'-O-methyladenosine-3'-phosphate
  modified_base 19: mod_base = OTHER; note = 2'-O-methyluridine-3'-phosphate
  modified_base 20: mod_base = OTHER; note = 2'-O-methylguanosine-3'-phosphate
  modified_base 21: mod_base = OTHER; note = 2'-O-methyladenosine
atttttaaaaagagcctatga

SEQ ID NO: 3991 - RNA, 21 nt, synthetic construct
  source 1..21: mol_type = other RNA
  modified_base 1: mod_base = OTHER; note = 2'-O-methyluridine-3'-phosphate
  modified_base 2: mod_base = OTHER; note = 2'-O-methyluridine-3'-phosphate
  modified_base 3: mod_base = OTHER; note = 2'-O-methyluridine-3'-phosphate
  modified_base 4: mod_base = OTHER; note = 2'-O-methyluridine-3'-phosphate
  modified_base 5: mod_base = OTHER; note = 2'-O-methyluridine-3'-phosphate
  modified_base 6: mod_base = OTHER; note = 2'-O-methyladenosine-3'-phosphate
  modified_base 7: mod_base = OTHER; note = 2'-deoxy-2'-fluoroadenosine-3'-phosphate
  modified_base 8: mod_base = OTHER; note = 2'-O-methyladenosine-3'-phosphate
  modified_base 9: mod_base = OTHER; note = 2'-deoxy-2'-fluoroadenosine-3'-phosphate
  modified_base 10: mod_base = OTHER; note = 2'-deoxy-2'-fluoroadenosine-3'-phosphate
  modified_base 11: mod_base = OTHER; note = 2'-deoxy-2'-fluoroguanosine-3'-phosphate
  modified_base 12: mod_base = OTHER; note = 2'-O-methyladenosine-3'-phosphate
  modified_base 13: mod_base = OTHER; note = 2'-O-methylguanosine-3'-phosphate
  modified_base 14: mod_base = OTHER; note = 2'-O-methylcytidine-3'-phosphate
  modified_base 15: mod_base = OTHER; note = 2'-O-methylcytidine-3'-phosphate
  modified_base 16: mod_base = OTHER; note = 2'-O-methyluridine-3'-phosphate
  modified_base 17: mod_base = OTHER; note = 2'-O-methyladenosine-3'-phosphate
  modified_base 18: mod_base = OTHER; note = 2'-O-methyluridine-3'-phosphate
  modified_base 19: mod_base = OTHER; note = 2'-O-methylguanosine-3'-phosphate
  modified_base 20: mod_base = OTHER; note = 2'-O-methyluridine-3'-phosphate
  modified_base 21: mod_base = OTHER; note = 2'-O-methyladenosine
tttttaaaaagagcctatgta

SEQ ID NO: 3992 - RNA, 21 nt, synthetic construct
  source 1..21: mol_type = other RNA
  modified_base 1: mod_base = OTHER; note = 2'-O-methyluridine-3'-phosphate
  modified_base 2: mod_base = OTHER; note = 2'-O-methyluridine-3'-phosphate
  modified_base 3: mod_base = OTHER; note = 2'-O-methyluridine-3'-phosphate
  modified_base 4: mod_base = OTHER; note = 2'-O-methyluridine-3'-phosphate
  modified_base 5: mod_base = OTHER; note = 2'-O-methyladenosine-3'-phosphate
  modified_base 6: mod_base = OTHER; note = 2'-O-methyladenosine-3'-phosphate
  modified_base 7: mod_base = OTHER; note = 2'-deoxy-2'-fluoroadenosine-3'-phosphate
  modified_base 8: mod_base = OTHER; note = 2'-O-methyladenosine-3'-phosphate
  modified_base 9: mod_base = OTHER; note = 2'-deoxy-2'-fluoroadenosine-3'-phosphate
  modified_base 10: mod_base = OTHER; note = 2'-deoxy-2'-fluoroguanosine-3'-phosphate
  modified_base 11: mod_base = OTHER; note = 2'-deoxy-2'-fluoroadenosine-3'-phosphate
  modified_base 12: mod_base = OTHER; note = 2'-O-methylguanosine-3'-phosphate
  modified_base 13: mod_base = OTHER; note = 2'-O-methylcytidine-3'-phosphate
  modified_base 14: mod_base = OTHER; note = 2'-O-methylcytidine-3'-phosphate
  modified_base 15: mod_base = OTHER; note = 2'-O-methyluridine-3'-phosphate
  modified_base 16: mod_base = OTHER; note = 2'-O-methyladenosine-3'-phosphate
  modified_base 17: mod_base = OTHER; note = 2'-O-methyluridine-3'-phosphate
  modified_base 18: mod_base = OTHER; note = 2'-O-methylguanosine-3'-phosphate
  modified_base 19: mod_base = OTHER; note = 2'-O-methyluridine-3'-phosphate
  modified_base 20: mod_base = OTHER; note = 2'-O-methylguanosine-3'-phosphate
  modified_base 21: mod_base = OTHER; note = 2'-O-methyladenosine
ttttaaaaagagcctatgtga

SEQ ID NO: 3993 - RNA, 21 nt, synthetic construct
  source 1..21: mol_type = other RNA
  modified_base 1: mod_base = OTHER; note = 2'-O-methyluridine-3'-phosphate
  modified_base 2: mod_base = OTHER; note = 2'-O-methyluridine-3'-phosphate
  modified_base 3: mod_base = OTHER; note = 2'-O-methyluridine-3'-phosphate
  modified_base 4: mod_base = OTHER; note = 2'-O-methyladenosine-3'-phosphate
  modified_base 5: mod_base = OTHER; note = 2'-O-methyladenosine-3'-phosphate
  modified_base 6: mod_base = OTHER; note = 2'-O-methyladenosine-3'-phosphate
  modified_base 7: mod_base = OTHER; note = 2'-deoxy-2'-fluoroadenosine-3'-phosphate
  modified_base 8: mod_base = OTHER; note = 2'-O-methyladenosine-3'-phosphate
  modified_base 9: mod_base = OTHER; note = 2'-deoxy-2'-fluoroguanosine-3'-phosphate
  modified_base 10: mod_base = OTHER; note = 2'-deoxy-2'-fluoroadenosine-3'-phosphate
  modified_base 11: mod_base = OTHER; note = 2'-deoxy-2'-fluoroguanosine-3'-phosphate
  modified_base 12: mod_base = OTHER; note = 2'-O-methylcytidine-3'-phosphate
  modified_base 13: mod_base = OTHER; note = 2'-O-methylcytidine-3'-phosphate
  modified_base 14: mod_base = OTHER; note = 2'-O-methyluridine-3'-phosphate
  modified_base 15: mod_base = OTHER; note = 2'-O-methyladenosine-3'-phosphate
  modified_base 16: mod_base = OTHER; note = 2'-O-methyluridine-3'-phosphate
  modified_base 17: mod_base = OTHER; note = 2'-O-methylguanosine-3'-phosphate
  modified_base 18: mod_base = OTHER; note = 2'-O-methyluridine-3'-phosphate
  modified_base 19: mod_base = OTHER; note = 2'-O-methylguanosine-3'-phosphate
  modified_base 20: mod_base = OTHER; note = 2'-O-methyladenosine-3'-phosphate
  modified_base 21: mod_base = OTHER; note = 2'-O-methyladenosine
tttaaaaagagcctatgtgaa

SEQ ID NO: 3994 - RNA, 21 nt, synthetic construct
  source 1..21: mol_type = other RNA
  modified_base 1: mod_base = OTHER; note = 2'-O-methyluridine-3'-phosphate
  modified_base 2: mod_base = OTHER; note = 2'-O-methyluridine-3'-phosphate
  modified_base 3: mod_base = OTHER; note = 2'-O-methyladenosine-3'-phosphate
  modified_base 4: mod_base = OTHER; note = 2'-O-methyladenosine-3'-phosphate
  modified_base 5: mod_base = OTHER; note = 2'-O-methyladenosine-3'-phosphate
  modified_base 6: mod_base = OTHER; note = 2'-O-methyladenosine-3'-phosphate
  modified_base 7: mod_base = OTHER; note = 2'-deoxy-2'-fluoroadenosine-3'-phosphate
  modified_base 8: mod_base = OTHER; note = 2'-O-methylguanosine-3'-phosphate
  modified_base 9: mod_base = OTHER; note = 2'-deoxy-2'-fluoroadenosine-3'-phosphate
  modified_base 10: mod_base = OTHER; note = 2'-deoxy-2'-fluoroguanosine-3'-phosphate
  modified_base 11: mod_base = OTHER; note = 2'-deoxy-2'-fluorocytidine-3'-phosphate
  modified_base 12: mod_base = OTHER; note = 2'-O-methylcytidine-3'-phosphate
  modified_base 13: mod_base = OTHER; note = 2'-O-methyluridine-3'-phosphate
  modified_base 14: mod_base = OTHER; note = 2'-O-methyladenosine-3'-phosphate
  modified_base 15: mod_base = OTHER; note = 2'-O-methyluridine-3'-phosphate
  modified_base 16: mod_base = OTHER; note = 2'-O-methylguanosine-3'-phosphate
  modified_base 17: mod_base = OTHER; note = 2'-O-methyluridine-3'-phosphate
  modified_base 18: mod_base = OTHER; note = 2'-O-methylguanosine-3'-phosphate
  modified_base 19: mod_base = OTHER; note = 2'-O-methyladenosine-3'-phosphate
  modified_base 20: mod_base = OTHER; note = 2'-O-methyladenosine-3'-phosphate
  modified_base 21: mod_base = OTHER; note = 2'-O-methyladenosine
ttaaaaagagcctatgtgaaa

SEQ ID NO: 3995 - RNA, 21 nt, synthetic construct
  source 1..21: mol_type = other RNA
  modified_base 1: mod_base = OTHER; note = 2'-O-methyluridine-3'-phosphate
  modified_base 2: mod_base = OTHER; note = 2'-O-methyladenosine-3'-phosphate
  modified_base 3: mod_base = OTHER; note = 2'-O-methyladenosine-3'-phosphate
  modified_base 4: mod_base = OTHER; note = 2'-O-methyladenosine-3'-phosphate
  modified_base 5: mod_base = OTHER; note = 2'-O-methyladenosine-3'-phosphate
  modified_base 6: mod_base = OTHER; note = 2'-O-methyladenosine-3'-phosphate
  modified_base 7: mod_base = OTHER; note = 2'-deoxy-2'-fluoroguanosine-3'-phosphate
  modified_base 8: mod_base = OTHER; note = 2'-O-methyladenosine-3'-phosphate
  modified_base 9: mod_base = OTHER; note = 2'-deoxy-2'-fluoroguanosine-3'-phosphate
  modified_base 10: mod_base = OTHER; note = 2'-deoxy-2'-fluorocytidine-3'-phosphate
  modified_base 11: mod_base = OTHER; note = 2'-deoxy-2'-fluorocytidine-3'-phosphate
  modified_base 12: mod_base = OTHER; note = 2'-O-methyluridine-3'-phosphate
  modified_base 13: mod_base = OTHER; note = 2'-O-methyladenosine-3'-phosphate
  modified_base 14: mod_base = OTHER; note = 2'-O-methyluridine-3'-phosphate
  modified_base 15: mod_base = OTHER; note = 2'-O-methylguanosine-3'-phosphate
  modified_base 16: mod_base = OTHER; note = 2'-O-methyluridine-3'-phosphate
  modified_base 17: mod_base = OTHER; note = 2'-O-methylguanosine-3'-phosphate
  modified_base 18: mod_base = OTHER; note = 2'-O-methyladenosine-3'-phosphate
  modified_base 19: mod_base = OTHER; note = 2'-O-methyladenosine-3'-phosphate
  modified_base 20: mod_base = OTHER; note = 2'-O-methylguanosine-3'-phosphate
  modified_base 21: mod_base = OTHER; note = 2'-O-methyladenosine
taaaaagagcctatgtgaaga

SEQ ID NO: 3996 - RNA, 21 nt, synthetic construct
  source 1..21: mol_type = other RNA
  modified_base 1: mod_base = OTHER; note = 2'-O-methyladenosine-3'-phosphate
  modified_base 2: mod_base = OTHER; note = 2'-O-methyladenosine-3'-phosphate
  modified_base 3: mod_base = OTHER; note = 2'-O-methyladenosine-3'-phosphate
  modified_base 4: mod_base = OTHER; note = 2'-O-methyladenosine-3'-phosphate
  modified_base 5: mod_base = OTHER; note = 2'-O-methyladenosine-3'-phosphate
  modified_base 6: mod_base = OTHER; note = 2'-O-methylguanosine-3'-phosphate
  modified_base 7: mod_base = OTHER; note = 2'-deoxy-2'-fluoroadenosine-3'-phosphate
  modified_base 8: mod_base = OTHER; note = 2'-O-methylguanosine-3'-phosphate
  modified_base 9: mod_base = OTHER; note = 2'-deoxy-2'-fluorocytidine-3'-phosphate
  modified_base 10: mod_base = OTHER; note = 2'-deoxy-2'-fluorocytidine-3'-phosphate
  modified_base 11: mod_base = OTHER; note = 2'-deoxy-2'-fluorouridine-3'-phosphate
  modified_base 12: mod_base = OTHER; note = 2'-O-methyladenosine-3'-phosphate
  modified_base 13: mod_base = OTHER; note = 2'-O-methyluridine-3'-phosphate
  modified_base 14: mod_base = OTHER; note = 2'-O-methylguanosine-3'-phosphate
  modified_base 15: mod_base = OTHER; note = 2'-O-methyluridine-3'-phosphate
  modified_base 16: mod_base = OTHER; note = 2'-O-methylguanosine-3'-phosphate
  modified_base 17: mod_base = OTHER; note = 2'-O-methyladenosine-3'-phosphate
  modified_base 18: mod_base = OTHER; note = 2'-O-methyladenosine-3'-phosphate
  modified_base 19: mod_base = OTHER; note = 2'-O-methylguanosine-3'-phosphate
  modified_base 20: mod_base = OTHER; note = 2'-O-methylguanosine-3'-phosphate
  modified_base 21: mod_base = OTHER; note = 2'-O-methyladenosine
aaaaagagcctatgtgaagga

SEQ ID NO: 3997 - RNA, 21 nt, synthetic construct
  source 1..21: mol_type = other RNA
  modified_base 1: mod_base = OTHER; note = 2'-O-methylguanosine-3'-phosphate
  modified_base 2: mod_base = OTHER; note = 2'-O-methyluridine-3'-phosphate
  modified_base 3: mod_base = OTHER; note = 2'-O-methyladenosine-3'-phosphate
  modified_base 4: mod_base = OTHER; note = 2'-O-methyladenosine-3'-phosphate
  modified_base 5: mod_base = OTHER; note = 2'-O-methyluridine-3'-phosphate
  modified_base 6: mod_base = OTHER; note = 2'-O-methylcytidine-3'-phosphate
  modified_base 7: mod_base = OTHER; note = 2'-deoxy-2'-fluorouridine-3'-phosphate
  modified_base 8: mod_base = OTHER; note = 2'-O-methyluridine-3'-phosphate
  modified_base 9: mod_base = OTHER; note = 2'-deoxy-2'-fluoroguanosine-3'-phosphate
  modified_base 10: mod_base = OTHER; note = 2'-deoxy-2'-fluorocytidine-3'-phosphate
  modified_base 11: mod_base = OTHER; note = 2'-deoxy-2'-fluorouridine-3'-phosphate
  modified_base 12: mod_base = OTHER; note = 2'-O-methyluridine-3'-phosphate
  modified_base 13: mod_base = OTHER; note = 2'-O-methylguanosine-3'-phosphate
  modified_base 14: mod_base = OTHER; note = 2'-O-methyluridine-3'-phosphate
  modified_base 15: mod_base = OTHER; note = 2'-O-methyluridine-3'-phosphate
  modified_base 16: mod_base = OTHER; note = 2'-O-methylcytidine-3'-phosphate
  modified_base 17: mod_base = OTHER; note = 2'-O-methyluridine-3'-phosphate
  modified_base 18: mod_base = OTHER; note = 2'-O-methyluridine-3'-phosphate
  modified_base 19: mod_base = OTHER; note = 2'-O-methylguanosine-3'-phosphate
  modified_base 20: mod_base = OTHER; note = 2'-O-methyluridine-3'-phosphate
  modified_base 21: mod_base = OTHER; note = 2'-O-methyladenosine
gtaatcttgcttgttcttgta

SEQ ID NO: 3998 - RNA, 21 nt, synthetic construct
  source 1..21: mol_type = other RNA
  modified_base 1: mod_base = OTHER; note = 2'-O-methyluridine-3'-phosphate
  modified_base 2: mod_base = OTHER; note = 2'-O-methyladenosine-3'-phosphate
  modified_base 3: mod_base = OTHER; note = 2'-O-methyladenosine-3'-phosphate
  modified_base 4: mod_base = OTHER; note = 2'-O-methyluridine-3'-phosphate
  modified_base 5: mod_base = OTHER; note = 2'-O-methylcytidine-3'-phosphate
  modified_base 6: mod_base = OTHER; note = 2'-O-methyluridine-3'-phosphate
  modified_base 7: mod_base = OTHER; note = 2'-deoxy-2'-fluorouridine-3'-phosphate
  modified_base 8: mod_base = OTHER; note = 2'-O-methylguanosine-3'-phosphate
  modified_base 9: mod_base = OTHER; note = 2'-deoxy-2'-fluorocytidine-3'-phosphate
  modified_base 10: mod_base = OTHER; note = 2'-deoxy-2'-fluorouridine-3'-phosphate
  modified_base 11: mod_base = OTHER; note = 2'-deoxy-2'-fluorouridine-3'-phosphate
  modified_base 12: mod_base = OTHER; note = 2'-O-methylguanosine-3'-phosphate
  modified_base 13: mod_base = OTHER; note = 2'-O-methyluridine-3'-phosphate
  modified_base 14: mod_base = OTHER; note = 2'-O-methyluridine-3'-phosphate
  modified_base 15: mod_base = OTHER; note = 2'-O-methylcytidine-3'-phosphate
  modified_base 16: mod_base = OTHER; note = 2'-O-methyluridine-3'-phosphate
  modified_base 17: mod_base = OTHER; note = 2'-O-methyluridine-3'-phosphate
  modified_base 18: mod_base = OTHER; note = 2'-O-methylguanosine-3'-phosphate
  modified_base 19: mod_base = OTHER; note = 2'-O-methyluridine-3'-phosphate
  modified_base 20: mod_base = OTHER; note = 2'-O-methyluridine-3'-phosphate
  modified_base 21: mod_base = OTHER; note = 2'-O-methyladenosine
taatcttgcttgttcttgtta

SEQ ID NO: 3999 - RNA, 21 nt, synthetic construct
  source 1..21: mol_type = other RNA
  modified_base 1: mod_base = OTHER; note = 2'-O-methyladenosine-3'-phosphate
  modified_base 2: mod_base = OTHER; note = 2'-O-methyladenosine-3'-phosphate
  modified_base 3: mod_base = OTHER; note = 2'-O-methyluridine-3'-phosphate
  modified_base 4: mod_base = OTHER; note = 2'-O-methylcytidine-3'-phosphate
  modified_base 5: mod_base = OTHER; note = 2'-O-methyluridine-3'-phosphate
  modified_base 6: mod_base = OTHER; note = 2'-O-methyluridine-3'-phosphate
  modified_base 7: mod_base = OTHER; note = 2'-deoxy-2'-fluoroguanosine-3'-phosphate
  modified_base 8: mod_base = OTHER; note = 2'-O-methylcytidine-3'-phosphate
  modified_base 9: mod_base = OTHER; note = 2'-deoxy-2'-fluorouridine-3'-phosphate
  modified_base 10: mod_base = OTHER; note = 2'-deoxy-2'-fluorouridine-3'-phosphate
  modified_base 11: mod_base = OTHER; note = 2'-deoxy-2'-fluoroguanosine-3'-phosphate
  modified_base 12: mod_base = OTHER; note = 2'-O-methyluridine-3'-phosphate
  modified_base 13: mod_base = OTHER; note = 2'-O-methyluridine-3'-phosphate
  modified_base 14: mod_base = OTHER; note = 2'-O-methylcytidine-3'-phosphate
  modified_base 15: mod_base = OTHER; note = 2'-O-methyluridine-3'-phosphate
  modified_base 16: mod_base = OTHER; note = 2'-O-methyluridine-3'-phosphate
  modified_base 17: mod_base = OTHER; note = 2'-O-methylguanosine-3'-phosphate
  modified_base 18: mod_base = OTHER; note = 2'-O-methyluridine-3'-phosphate
  modified_base 19: mod_base = OTHER; note = 2'-O-methyluridine-3'-phosphate
  modified_base 20: mod_base = OTHER; note = 2'-O-methyladenosine-3'-phosphate
  modified_base 21: mod_base = OTHER; note = 2'-O-methyladenosine
aatcttgcttgttcttgttaa

SEQ ID NO: 4000 - RNA, 21 nt, synthetic construct
  source 1..21: mol_type = other RNA
  modified_base 1: mod_base = OTHER; note = 2'-O-methyladenosine-3'-phosphate
  modified_base 2: mod_base = OTHER; note = 2'-O-methyluridine-3'-phosphate
  modified_base 3: mod_base = OTHER; note = 2'-O-methylcytidine-3'-phosphate
  modified_base 4: mod_base = OTHER; note = 2'-O-methyluridine-3'-phosphate
  modified_base 5: mod_base = OTHER; note = 2'-O-methyluridine-3'-phosphate
  modified_base 6: mod_base = OTHER; note = 2'-O-methylguanosine-3'-phosphate
  modified_base 7: mod_base = OTHER; note = 2'-deoxy-2'-fluorocytidine-3'-phosphate
  modified_base 8: mod_base = OTHER; note = 2'-O-methyluridine-3'-phosphate
  modified_base 9: mod_base = OTHER; note = 2'-deoxy-2'-fluorouridine-3'-phosphate
  modified_base 10: mod_base = OTHER; note = 2'-deoxy-2'-fluoroguanosine-3'-phosphate
  modified_base 11: mod_base = OTHER; note = 2'-deoxy-2'-fluorouridine-3'-phosphate
  modified_base 12: mod_base = OTHER; note = 2'-O-methyluridine-3'-phosphate
  modified_base 13: mod_base = OTHER; note = 2'-O-methylcytidine-3'-phosphate
  modified_base 14: mod_base = OTHER; note = 2'-O-methyluridine-3'-phosphate
  modified_base 15: mod_base = OTHER; note = 2'-O-methyluridine-3'-phosphate
  modified_base 16: mod_base = OTHER; note = 2'-O-methylguanosine-3'-phosphate
  modified_base 17: mod_base = OTHER; note = 2'-O-methyluridine-3'-phosphate
  modified_base 18: mod_base = OTHER; note = 2'-O-methyluridine-3'-phosphate
  modified_base 19: mod_base = OTHER; note = 2'-O-methyladenosine-3'-phosphate
  modified_base 20: mod_base = OTHER; note = 2'-O-methylcytidine-3'-phosphate
  modified_base 21: mod_base = OTHER; note = 2'-O-methyladenosine
atcttgcttgttcttgttaca

SEQ ID NO: 4001 - RNA, 21 nt, synthetic construct
  source 1..21: mol_type = other RNA
  modified_base 1: mod_base = OTHER; note = 2'-O-methyluridine-3'-phosphate
  modified_base 2: mod_base = OTHER; note = 2'-O-methylcytidine-3'-phosphate
  modified_base 3: mod_base = OTHER; note = 2'-O-methyluridine-3'-phosphate
  modified_base 4: mod_base = OTHER; note = 2'-O-methyluridine-3'-phosphate
  modified_base 5: mod_base = OTHER; note = 2'-O-methylguanosine-3'-phosphate
  modified_base 6: mod_base = OTHER; note = 2'-O-methylcytidine-3'-phosphate
  modified_base 7: mod_base = OTHER; note = 2'-deoxy-2'-fluorouridine-3'-phosphate
  modified_base 8: mod_base = OTHER; note = 2'-O-methyluridine-3'-phosphate
  modified_base 9: mod_base = OTHER; note = 2'-deoxy-2'-fluoroguanosine-3'-phosphate
  modified_base 10: mod_base = OTHER; note = 2'-deoxy-2'-fluorouridine-3'-phosphate
  modified_base 11: mod_base = OTHER; note = 2'-deoxy-2'-fluorouridine-3'-phosphate
  modified_base 12: mod_base = OTHER; note = 2'-O-methylcytidine-3'-phosphate
  modified_base 13: mod_base = OTHER; note = 2'-O-methyluridine-3'-phosphate
  modified_base 14: mod_base = OTHER; note = 2'-O-methyluridine-3'-phosphate
  modified_base 15: mod_base = OTHER; note = 2'-O-methylguanosine-3'-phosphate
  modified_base 16: mod_base = OTHER; note = 2'-O-methyluridine-3'-phosphate
  modified_base 17: mod_base = OTHER; note = 2'-O-methyluridine-3'-phosphate
  modified_base 18: mod_base = OTHER; note = 2'-O-methyladenosine-3'-phosphate
  modified_base 19: mod_base = OTHER; note = 2'-O-methylcytidine-3'-phosphate
  modified_base 20: mod_base = OTHER; note = 2'-O-methyluridine-3'-phosphate
  modified_base 21: mod_base = OTHER; note = 2'-O-methyladenosine
tcttgcttgttcttgttacta

SEQ ID NO: 4002 - RNA, 21 nt, synthetic construct
  source 1..21: mol_type = other RNA
  modified_base 1: mod_base = OTHER; note = 2'-O-methylcytidine-3'-phosphate
  modified_base 2: mod_base = OTHER; note = 2'-O-methyluridine-3'-phosphate
  modified_base 3: mod_base = OTHER; note = 2'-O-methyluridine-3'-phosphate
  modified_base 4: mod_base = OTHER; note = 2'-O-methylguanosine-3'-phosphate
  modified_base 5: mod_base = OTHER; note = 2'-O-methylcytidine-3'-phosphate
  modified_base 6: mod_base = OTHER; note = 2'-O-methyluridine-3'-phosphate
  modified_base 7: mod_base = OTHER; note = 2'-deoxy-2'-fluorouridine-3'-phosphate
  modified_base 8: mod_base = OTHER; note = 2'-O-methylguanosine-3'-phosphate
  modified_base 9: mod_base = OTHER; note = 2'-deoxy-2'-fluorouridine-3'-phosphate
  modified_base 10: mod_base = OTHER; note = 2'-deoxy-2'-fluorouridine-3'-phosphate
  modified_base 11: mod_base = OTHER; note = 2'-deoxy-2'-fluorocytidine-3'-phosphate
  modified_base 12: mod_base = OTHER; note = 2'-O-methyluridine-3'-phosphate
  modified_base 13: mod_base = OTHER; note = 2'-O-methyluridine-3'-phosphate
  modified_base 14: mod_base = OTHER; note = 2'-O-methylguanosine-3'-phosphate
  modified_base 15: mod_base = OTHER; note = 2'-O-methyluridine-3'-phosphate
  modified_base 16: mod_base = OTHER; note = 2'-O-methyluridine-3'-phosphate
  modified_base 17: mod_base = OTHER; note = 2'-O-methyladenosine-3'-phosphate
  modified_base 18: mod_base = OTHER; note = 2'-O-methylcytidine-3'-phosphate
  modified_base 19: mod_base = OTHER; note = 2'-O-methyluridine-3'-phosphate
  modified_base 20: mod_base = OTHER; note = 2'-O-methyladenosine-3'-phosphate
  modified_base 21: mod_base = OTHER; note = 2'-O-methyladenosine
cttgcttgttcttgttactaa

SEQ ID NO: 4003 - RNA, 21 nt, synthetic construct
  source 1..21: mol_type = other RNA
  modified_base 1: mod_base = OTHER; note = 2'-O-methyluridine-3'-phosphate
  modified_base 2: mod_base = OTHER; note = 2'-O-methyluridine-3'-phosphate
  modified_base 3: mod_base = OTHER; note = 2'-O-methylguanosine-3'-phosphate
  modified_base 4: mod_base = OTHER; note = 2'-O-methylcytidine-3'-phosphate
  modified_base 5: mod_base = OTHER; note = 2'-O-methyluridine-3'-phosphate
  modified_base 6: mod_base = OTHER; note = 2'-O-methyluridine-3'-phosphate
  modified_base 7: mod_base = OTHER; note = 2'-deoxy-2'-fluoroguanosine-3'-phosphate
  modified_base 8: mod_base = OTHER; note = 2'-O-methyluridine-3'-phosphate
  modified_base 9: mod_base = OTHER; note = 2'-deoxy-2'-fluorouridine-3'-phosphate
  modified_base 10: mod_base = OTHER; note = 2'-deoxy-2'-fluorocytidine-3'-phosphate
  modified_base 11: mod_base = OTHER; note = 2'-deoxy-2'-fluorouridine-3'-phosphate
  modified_base 12: mod_base = OTHER; note = 2'-O-methyluridine-3'-phosphate
  modified_base 13: mod_base = OTHER; note = 2'-O-methylguanosine-3'-phosphate
  modified_base 14: mod_base = OTHER; note = 2'-O-methyluridine-3'-phosphate
  modified_base 15: mod_base = OTHER; note = 2'-O-methyluridine-3'-phosphate
  modified_base 16: mod_base = OTHER; note = 2'-O-methyladenosine-3'-phosphate
  modified_base 17: mod_base = OTHER; note = 2'-O-methylcytidine-3'-phosphate
  modified_base 18: mod_base = OTHER; note = 2'-O-methyluridine-3'-phosphate
  modified_base 19: mod_base = OTHER; note = 2'-O-methyladenosine-3'-phosphate
  modified_base 20: mod_base = OTHER; note = 2'-O-methyladenosine-3'-phosphate
  modified_base 21: mod_base = OTHER; note = 2'-O-methyladenosine
ttgcttgttcttgttactaaa

SEQ ID NO: 4004 - RNA, 21 nt, synthetic construct
  source 1..21: mol_type = other RNA
  modified_base 1: mod_base = OTHER; note = 2'-O-methyluridine-3'-phosphate
  modified_base 2: mod_base = OTHER; note = 2'-O-methylguanosine-3'-phosphate
  modified_base 3: mod_base = OTHER; note = 2'-O-methylcytidine-3'-phosphate
  modified_base 4: mod_base = OTHER; note = 2'-O-methyluridine-3'-phosphate
  modified_base 5: mod_base = OTHER; note = 2'-O-methyluridine-3'-phosphate
  modified_base 6: mod_base = OTHER; note = 2'-O-methylguanosine-3'-phosphate
  modified_base 7: mod_base = OTHER; note = 2'-deoxy-2'-fluorouridine-3'-phosphate
  modified_base 8: mod_base = OTHER; note = 2'-O-methyluridine-3'-phosphate
  modified_base 9: mod_base = OTHER; note = 2'-deoxy-2'-fluorocytidine-3'-phosphate
  modified_base 10: mod_base = OTHER; note = 2'-deoxy-2'-fluorouridine-3'-phosphate
  modified_base 11: mod_base = OTHER; note = 2'-deoxy-2'-fluorouridine-3'-phosphate
  modified_base 12: mod_base = OTHER; note = 2'-O-methylguanosine-3'-phosphate
  modified_base 13: mod_base = OTHER; note = 2'-O-methyluridine-3'-phosphate
  modified_base 14: mod_base = OTHER; note = 2'-O-methyluridine-3'-phosphate
  modified_base 15: mod_base = OTHER; note = 2'-O-methyladenosine-3'-phosphate
  modified_base 16: mod_base = OTHER; note = 2'-O-methylcytidine-3'-phosphate
  modified_base 17: mod_base = OTHER; note = 2'-O-methyluridine-3'-phosphate
  modified_base 18: mod_base = OTHER; note = 2'-O-methyladenosine-3'-phosphate
  modified_base 19: mod_base = OTHER; note = 2'-O-methyladenosine-3'-phosphate
  modified_base 20: mod_base = OTHER; note = 2'-O-methyluridine-3'-phosphate
  modified_base 21: mod_base = OTHER; note = 2'-O-methyladenosine
tgcttgttcttgttactaata

SEQ ID NO: 4005 - RNA, 21 nt, synthetic construct
  source 1..21: mol_type = other RNA
  modified_base 1: mod_base = OTHER; note = 2'-O-methylguanosine-3'-phosphate
  modified_base 2: mod_base = OTHER; note = 2'-O-methylcytidine-3'-phosphate
  modified_base 3: mod_base = OTHER; note = 2'-O-methyluridine-3'-phosphate
  modified_base 4: mod_base = OTHER; note = 2'-O-methyluridine-3'-phosphate
  modified_base 5: mod_base = OTHER; note = 2'-O-methylguanosine-3'-phosphate
  modified_base 6: mod_base = OTHER; note = 2'-O-methyluridine-3'-phosphate
  modified_base 7: mod_base = OTHER; note = 2'-deoxy-2'-fluorouridine-3'-phosphate
  modified_base 8: mod_base = OTHER; note = 2'-O-methylcytidine-3'-phosphate
  modified_base 9: mod_base = OTHER; note = 2'-deoxy-2'-fluorouridine-3'-phosphate
  modified_base 10: mod_base = OTHER; note = 2'-deoxy-2'-fluorouridine-3'-phosphate
  modified_base 11: mod_base = OTHER; note = 2'-deoxy-2'-fluoroguanosine-3'-phosphate
  modified_base 12: mod_base = OTHER; note = 2'-O-methyluridine-3'-phosphate
  modified_base 13: mod_base = OTHER; note = 2'-O-methyluridine-3'-phosphate
  modified_base 14: mod_base = OTHER; note = 2'-O-methyladenosine-3'-phosphate
  modified_base 15: mod_base = OTHER; note = 2'-O-methylcytidine-3'-phosphate
  modified_base 16: mod_base = OTHER; note = 2'-O-methyluridine-3'-phosphate
  modified_base 17: mod_base = OTHER; note = 2'-O-methyladenosine-3'-phosphate
  modified_base 18: mod_base = OTHER; note = 2'-O-methyladenosine-3'-phosphate
  modified_base 19: mod_base = OTHER; note = 2'-O-methyluridine-3'-phosphate
  modified_base 20: mod_base = OTHER; note = 2'-O-methyluridine-3'-phosphate
  modified_base 21: mod_base = OTHER; note = 2'-O-methyladenosine
gcttgttcttgttactaatta

SEQ ID NO: 4006 - RNA, 21 nt, synthetic construct
  source 1..21: mol_type = other RNA
  modified_base 1: mod_base = OTHER; note = 2'-O-methylcytidine-3'-phosphate
  modified_base 2: mod_base = OTHER; note = 2'-O-methyluridine-3'-phosphate
  modified_base 3: mod_base = OTHER; note = 2'-O-methyluridine-3'-phosphate
  modified_base 4: mod_base = OTHER; note = 2'-O-methylguanosine-3'-phosphate
  modified_base 5: mod_base = OTHER; note = 2'-O-methyluridine-3'-phosphate
  modified_base 6: mod_base = OTHER; note = 2'-O-methyluridine-3'-phosphate
  modified_base 7: mod_base = OTHER; note = 2'-deoxy-2'-fluorocytidine-3'-phosphate
  modified_base 8: mod_base = OTHER; note = 2'-O-methyluridine-3'-phosphate
  modified_base 9: mod_base = OTHER; note = 2'-deoxy-2'-fluorouridine-3'-phosphate
  modified_base 10: mod_base = OTHER; note = 2'-deoxy-2'-fluoroguanosine-3'-phosphate
  modified_base 11: mod_base = OTHER; note = 2'-deoxy-2'-fluorouridine-3'-phosphate
  modified_base 12: mod_base = OTHER; note = 2'-O-methyluridine-3'-phosphate
  modified_base 13: mod_base = OTHER; note = 2'-O-methyladenosine-3'-phosphate
  modified_base 14: mod_base = OTHER; note = 2'-O-methylcytidine-3'-phosphate
  modified_base 15: mod_base = OTHER; note = 2'-O-methyluridine-3'-phosphate
  modified_base 16: mod_base = OTHER; note = 2'-O-methyladenosine-3'-phosphate
  modified_base 17: mod_base = OTHER; note = 2'-O-methyladenosine-3'-phosphate
  modified_base 18: mod_base = OTHER; note = 2'-O-methyluridine-3'-phosphate
  modified_base 19: mod_base = OTHER; note = 2'-O-methyluridine-3'-phosphate
  modified_base 20: mod_base = OTHER; note = 2'-O-methyluridine-3'-phosphate
  modified_base 21: mod_base = OTHER; note = 2'-O-methyladenosine
cttgttcttgttactaattta

SEQ ID NO: 4007 - RNA, 21 nt, synthetic construct
  source 1..21: mol_type = other RNA
  modified_base 1: mod_base = OTHER; note = 2'-O-methyluridine-3'-phosphate
  modified_base 2: mod_base = OTHER; note = 2'-O-methyluridine-3'-phosphate
  modified_base 3: mod_base = OTHER; note = 2'-O-methylguanosine-3'-phosphate
  modified_base 4: mod_base = OTHER; note = 2'-O-methyluridine-3'-phosphate
  modified_base 5: mod_base = OTHER; note = 2'-O-methyluridine-3'-phosphate
  modified_base 6: mod_base = OTHER; note = 2'-O-methylcytidine-3'-phosphate
  modified_base 7: mod_base = OTHER; note = 2'-deoxy-2'-fluorouridine-3'-phosphate
  modified_base 8: mod_base = OTHER; note = 2'-O-methyluridine-3'-phosphate
  modified_base 9: mod_base = OTHER; note = 2'-deoxy-2'-fluoroguanosine-3'-phosphate
  modified_base 10: mod_base = OTHER; note = 2'-deoxy-2'-fluorouridine-3'-phosphate
  modified_base 11: mod_base = OTHER; note = 2'-deoxy-2'-fluorouridine-3'-phosphate
  modified_base 12: mod_base = OTHER; note = 2'-O-methyladenosine-3'-phosphate
  modified_base 13: mod_base = OTHER; note = 2'-O-methylcytidine-3'-phosphate
  modified_base 14: mod_base = OTHER; note = 2'-O-methyluridine-3'-phosphate
  modified_base 15: mod_base = OTHER; note = 2'-O-methyladenosine-3'-phosphate
  modified_base 16: mod_base = OTHER; note = 2'-O-methyladenosine-3'-phosphate
  modified_base 17: mod_base = OTHER; note = 2'-O-methyluridine-3'-phosphate
  modified_base 18: mod_base = OTHER; note = 2'-O-methyluridine-3'-phosphate
  modified_base 19: mod_base = OTHER; note = 2'-O-methyluridine-3'-phosphate
  modified_base 20: mod_base = OTHER; note = 2'-O-methylcytidine-3'-phosphate
  modified_base 21: mod_base = OTHER; note = 2'-O-methyladenosine
ttgttcttgttactaatttca

SEQ ID NO: 4008 - RNA, 21 nt, synthetic construct
  source 1..21: mol_type = other RNA
  modified_base 1: mod_base = OTHER; note = 2'-O-methyluridine-3'-phosphate
  modified_base 2: mod_base = OTHER; note = 2'-O-methylcytidine-3'-phosphate
  modified_base 3: mod_base = OTHER; note = 2'-O-methyluridine-3'-phosphate
  modified_base 4: mod_base = OTHER; note = 2'-O-methylguanosine-3'-phosphate
  modified_base 5: mod_base = OTHER; note = 2'-O-methylcytidine-3'-phosphate
  modified_base 6: mod_base = OTHER; note = 2'-O-methyladenosine-3'-phosphate
  modified_base 7: mod_base = OTHER; note = 2'-deoxy-2'-fluorouridine-3'-phosphate
  modified_base 8: mod_base = OTHER; note = 2'-O-methyladenosine-3'-phosphate
  modified_base 9: mod_base = OTHER; note = 2'-deoxy-2'-fluorouridine-3'-phosphate
  modified_base 10: mod_base = OTHER; note = 2'-deoxy-2'-fluoroadenosine-3'-phosphate
  modified_base 11: mod_base = OTHER; note = 2'-deoxy-2'-fluorouridine-3'-phosphate
  modified_base 12: mod_base = OTHER; note = 2'-O-methyladenosine-3'-phosphate
  modified_base 13: mod_base = OTHER; note = 2'-O-methyladenosine-3'-phosphate
  modified_base 14: mod_base = OTHER; note = 2'-O-methylguanosine-3'-phosphate
  modified_base 15: mod_base = OTHER; note = 2'-O-methyladenosine-3'-phosphate
  modified_base 16: mod_base = OTHER; note = 2'-O-methyladenosine-3'-phosphate
  modified_base 17: mod_base = OTHER; note = 2'-O-methylcytidine-3'-phosphate
  modified_base 18: mod_base = OTHER; note = 2'-O-methylguanosine-3'-phosphate
  modified_base 19: mod_base = OTHER; note = 2'-O-methyladenosine-3'-phosphate
  modified_base 20: mod_base = OTHER; note = 2'-O-methyladenosine-3'-phosphate
  modified_base 21: mod_base = OTHER; note = 2'-O-methyladenosine
tctgcatatataagaacgaaa

SEQ ID NO: 4009 - RNA, 21 nt, synthetic construct
  source 1..21: mol_type = other RNA
  modified_base 1: mod_base = OTHER; note = 2'-O-methyluridine-3'-phosphate
  modified_base 2: mod_base = OTHER; note = 2'-O-methyluridine-3'-phosphate
  modified_base 3: mod_base = OTHER; note = 2'-O-methylguanosine-3'-phosphate
  modified_base 4: mod_base = OTHER; note = 2'-O-methyluridine-3'-phosphate
  modified_base 5: mod_base = OTHER; note = 2'-O-methyladenosine-3'-phosphate
  modified_base 6: mod_base = OTHER; note = 2'-O-methylcytidine-3'-phosphate
  modified_base 7: mod_base = OTHER; note = 2'-deoxy-2'-fluoroguanosine-3'-phosphate
  modified_base 8: mod_base = OTHER; note = 2'-O-methyluridine-3'-phosphate
  modified_base 9: mod_base = OTHER; note = 2'-deoxy-2'-fluoroguanosine-3'-phosphate
  modified_base 10: mod_base = OTHER; note = 2'-deoxy-2'-fluorocytidine-3'-phosphate
  modified_base 11: mod_base = OTHER; note = 2'-deoxy-2'-fluorocytidine-3'-phosphate
  modified_base 12: mod_base = OTHER; note = 2'-O-methyluridine-3'-phosphate
  modified_base 13: mod_base = OTHER; note = 2'-O-methylcytidine-3'-phosphate
  modified_base 14: mod_base = OTHER; note = 2'-O-methyladenosine-3'-phosphate
  modified_base 15: mod_base = OTHER; note = 2'-O-methyladenosine-3'-phosphate
  modified_base 16: mod_base = OTHER; note = 2'-O-methyladenosine-3'-phosphate
  modified_base 17: mod_base = OTHER; note = 2'-O-methyluridine-3'-phosphate
  modified_base 18: mod_base = OTHER; note = 2'-O-methyladenosine-3'-phosphate
  modified_base 19: mod_base = OTHER; note = 2'-O-methyladenosine-3'-phosphate
  modified_base 20: mod_base = OTHER; note = 2'-O-methyladenosine-3'-phosphate
  modified_base 21: mod_base = OTHER; note = 2'-O-methyladenosine
ttgtacgtgcctcaaataaaa

SEQ ID NO: 4010 - RNA, 21 nt, synthetic construct
  source 1..21: mol_type = other RNA
  modified_base 1: mod_base = OTHER; note = 2'-O-methyluridine-3'-phosphate
  modified_base 2: mod_base = OTHER; note = 2'-O-methylguanosine-3'-phosphate
  modified_base 3: mod_base = OTHER; note = 2'-O-methylcytidine-3'-phosphate
  modified_base 4: mod_base = OTHER; note = 2'-O-methylcytidine-3'-phosphate
  modified_base 5: mod_base = OTHER; note = 2'-O-methyluridine-3'-phosphate
  modified_base 6: mod_base = OTHER; note = 2'-O-methylcytidine-3'-phosphate
  modified_base 7: mod_base = OTHER; note = 2'-deoxy-2'-fluoroadenosine-3'-phosphate
  modified_base 8: mod_base = OTHER; note = 2'-O-methyladenosine-3'-phosphate
  modified_base 9: mod_base = OTHER; note = 2'-deoxy-2'-fluoroadenosine-3'-phosphate
  modified_base 10: mod_base = OTHER; note = 2'-deoxy-2'-fluorouridine-3'-phosphate
  modified_base 11: mod_base = OTHER; note = 2'-deoxy-2'-fluoroadenosine-3'-phosphate
  modified_base 12: mod_base = OTHER; note = 2'-O-methyladenosine-3'-phosphate
  modified_base 13: mod_base = OTHER; note = 2'-O-methyladenosine-3'-phosphate
  modified_base 14: mod_base = OTHER; note = 2'-O-methylcytidine-3'-phosphate
  modified_base 15: mod_base = OTHER; note = 2'-O-methyladenosine-3'-phosphate
  modified_base 16: mod_base = OTHER; note = 2'-O-methyladenosine-3'-phosphate
  modified_base 17: mod_base = OTHER; note = 2'-O-methylguanosine-3'-phosphate
  modified_base 18: mod_base = OTHER; note = 2'-O-methyladenosine-3'-phosphate
  modified_base 19: mod_base = OTHER; note = 2'-O-methyladenosine-3'-phosphate
  modified_base 20: mod_base = OTHER; note = 2'-O-methyluridine-3'-phosphate
  modified_base 21: mod_base = OTHER; note = 2'-O-methyladenosine
tgcctcaaataaacaagaata

SEQ ID NO: 4011 - RNA, 21 nt, synthetic construct
  source 1..21: mol_type = other RNA
  modified_base 1: mod_base = OTHER; note = 2'-O-methylguanosine-3'-phosphate
  modified_base 2: mod_base = OTHER; note = 2'-O-methylcytidine-3'-phosphate
  modified_base 3: mod_base = OTHER; note = 2'-O-methylcytidine-3'-phosphate
  modified_base 4: mod_base = OTHER; note = 2'-O-methyluridine-3'-phosphate
  modified_base 5: mod_base = OTHER; note = 2'-O-methylcytidine-3'-phosphate
  modified_base 6: mod_base = OTHER; note = 2'-O-methyladenosine-3'-phosphate
  modified_base 7: mod_base = OTHER; note = 2'-deoxy-2'-fluoroadenosine-3'-phosphate
  modified_base 8: mod_base = OTHER; note = 2'-O-methyladenosine-3'-phosphate
  modified_base 9: mod_base = OTHER; note = 2'-deoxy-2'-fluorouridine-3'-phosphate
  modified_base 10: mod_base = OTHER; note = 2'-deoxy-2'-fluoroadenosine-3'-phosphate
  modified_base 11: mod_base = OTHER; note = 2'-deoxy-2'-fluoroadenosine-3'-phosphate
  modified_base 12: mod_base = OTHER; note = 2'-O-methyladenosine-3'-phosphate
  modified_base 13: mod_base = OTHER; note = 2'-O-methylcytidine-3'-phosphate
  modified_base 14: mod_base = OTHER; note = 2'-O-methyladenosine-3'-phosphate
  modified_base 15: mod_base = OTHER; note = 2'-O-methyladenosine-3'-phosphate
  modified_base 16: mod_base = OTHER; note = 2'-O-methylguanosine-3'-phosphate
  modified_base 17: mod_base = OTHER; note = 2'-O-methyladenosine-3'-phosphate
  modified_base 18: mod_base = OTHER; note = 2'-O-methyladenosine-3'-phosphate
  modified_base 19: mod_base = OTHER; note = 2'-O-methyluridine-3'-phosphate
  modified_base 20: mod_base = OTHER; note = 2'-O-methylguanosine-3'-phosphate
  modified_base 21: mod_base = OTHER; note = 2'-O-methyladenosine
gcctcaaataaacaagaatga

SEQ ID NO: 4012 - RNA, 21 nt, synthetic construct
  source 1..21: mol_type = other RNA
  modified_base 1: mod_base = OTHER; note = 2'-O-methylcytidine-3'-phosphate
  modified_base 2: mod_base = OTHER; note = 2'-O-methylcytidine-3'-phosphate
  modified_base 3: mod_base = OTHER; note = 2'-O-methyluridine-3'-phosphate
  modified_base 4: mod_base = OTHER; note = 2'-O-methylcytidine-3'-phosphate
  modified_base 5: mod_base = OTHER; note = 2'-O-methyladenosine-3'-phosphate
  modified_base 6: mod_base = OTHER; note = 2'-O-methyladenosine-3'-phosphate
  modified_base 7: mod_base = OTHER; note = 2'-deoxy-2'-fluoroadenosine-3'-phosphate
  modified_base 8: mod_base = OTHER; note = 2'-O-methyluridine-3'-phosphate
  modified_base 9: mod_base = OTHER; note = 2'-deoxy-2'-fluoroadenosine-3'-phosphate
  modified_base 10: mod_base = OTHER; note = 2'-deoxy-2'-fluoroadenosine-3'-phosphate
  modified_base 11: mod_base = OTHER; note = 2'-deoxy-2'-fluoroadenosine-3'-phosphate
  modified_base 12: mod_base = OTHER; note = 2'-O-methylcytidine-3'-phosphate
  modified_base 13: mod_base = OTHER; note = 2'-O-methyladenosine-3'-phosphate
  modified_base 14: mod_base = OTHER; note = 2'-O-methyladenosine-3'-phosphate
  modified_base 15: mod_base = OTHER; note = 2'-O-methylguanosine-3'-phosphate
  modified_base 16: mod_base = OTHER; note = 2'-O-methyladenosine-3'-phosphate
  modified_base 17: mod_base = OTHER; note = 2'-O-methyladenosine-3'-phosphate
  modified_base 18: mod_base = OTHER; note = 2'-O-methyluridine-3'-phosphate
  modified_base 19: mod_base = OTHER; note = 2'-O-methylguanosine-3'-phosphate
  modified_base 20: mod_base = OTHER; note = 2'-O-methyladenosine-3'-phosphate
  modified_base 21: mod_base = OTHER; note = 2'-O-methyladenosine
cctcaaataaacaagaatgaa

SEQ ID NO: 4013 - RNA, 21 nt, synthetic construct
  source 1..21: mol_type = other RNA
  modified_base 1: mod_base = OTHER; note = 2'-O-methylcytidine-3'-phosphate
  modified_base 2: mod_base = OTHER; note = 2'-O-methyluridine-3'-phosphate
  modified_base 3: mod_base = OTHER; note = 2'-O-methylcytidine-3'-phosphate
  modified_base 4: mod_base = OTHER; note = 2'-O-methyladenosine-3'-phosphate
  modified_base 5: mod_base = OTHER; note = 2'-O-methyladenosine-3'-phosphate
  modified_base 6: mod_base = OTHER; note = 2'-O-methyladenosine-3'-phosphate
  modified_base 7: mod_base = OTHER; note = 2'-deoxy-2'-fluorouridine-3'-phosphate
  modified_base 8: mod_base = OTHER; note = 2'-O-methyladenosine-3'-phosphate
  modified_base 9: mod_base = OTHER; note = 2'-deoxy-2'-fluoroadenosine-3'-phosphate
  modified_base 10: mod_base = OTHER; note = 2'-deoxy-2'-fluoroadenosine-3'-phosphate
  modified_base 11: mod_base = OTHER; note = 2'-deoxy-2'-fluorocytidine-3'-phosphate
  modified_base 12: mod_base = OTHER; note = 2'-O-methyladenosine-3'-phosphate
  modified_base 13: mod_base = OTHER; note = 2'-O-methyladenosine-3'-phosphate
  modified_base 14: mod_base = OTHER; note = 2'-O-methylguanosine-3'-phosphate
  modified_base 15: mod_base = OTHER; note = 2'-O-methyladenosine-3'-phosphate
  modified_base 16: mod_base = OTHER; note = 2'-O-methyladenosine-3'-phosphate
  modified_base 17: mod_base = OTHER; note = 2'-O-methyluridine-3'-phosphate
  modified_base 18: mod_base = OTHER; note = 2'-O-methylguanosine-3'-phosphate
  modified_base 19: mod_base = OTHER; note = 2'-O-methyladenosine-3'-phosphate
  modified_base 20: mod_base = OTHER; note = 2'-O-methyluridine-3'-phosphate
  modified_base 21: mod_base = OTHER; note = 2'-O-methyladenosine
ctcaaataaacaagaatgata

SEQ ID NO: 4014 - RNA, 21 nt, synthetic construct
  source 1..21: mol_type = other RNA
  modified_base 1: mod_base = OTHER; note = 2'-O-methyluridine-3'-phosphate
  modified_base 2: mod_base = OTHER; note = 2'-O-methylcytidine-3'-phosphate
  modified_base 3: mod_base = OTHER; note = 2'-O-methyladenosine-3'-phosphate
  modified_base 4: mod_base = OTHER; note = 2'-O-methyladenosine-3'-phosphate
  modified_base 5: mod_base = OTHER; note = 2'-O-methyladenosine-3'-phosphate
  modified_base 6: mod_base = OTHER; note = 2'-O-methyluridine-3'-phosphate
  modified_base 7: mod_base = OTHER; note = 2'-deoxy-2'-fluoroadenosine-3'-phosphate
  modified_base 8: mod_base = OTHER; note = 2'-O-methyladenosine-3'-phosphate
  modified_base 9: mod_base = OTHER; note = 2'-deoxy-2'-fluoroadenosine-3'-phosphate
  modified_base 10: mod_base = OTHER; note = 2'-deoxy-2'-fluorocytidine-3'-phosphate
  modified_base 11: mod_base = OTHER; note = 2'-deoxy-2'-fluoroadenosine-3'-phosphate
  modified_base 12: mod_base = OTHER; note = 2'-O-methyladenosine-3'-phosphate
  modified_base 13: mod_base = OTHER; note = 2'-O-methylguanosine-3'-phosphate
  modified_base 14: mod_base = OTHER; note = 2'-O-methyladenosine-3'-phosphate
  modified_base 15: mod_base = OTHER; note = 2'-O-methyladenosine-3'-phosphate
  modified_base 16: mod_base = OTHER; note = 2'-O-methyluridine-3'-phosphate
  modified_base 17: mod_base = OTHER; note = 2'-O-methylguanosine-3'-phosphate
  modified_base 18: mod_base = OTHER; note = 2'-O-methyladenosine-3'-phosphate
  modified_base 19: mod_base = OTHER; note = 2'-O-methyluridine-3'-phosphate
  modified_base 20: mod_base = OTHER; note = 2'-O-methyladenosine-3'-phosphate
  modified_base 21: mod_base = OTHER; note = 2'-O-methyladenosine
tcaaataaacaagaatgataa

SEQ ID NO: 4015 - RNA, 21 nt, synthetic construct
  source 1..21: mol_type = other RNA
  modified_base 1: mod_base = OTHER; note = 2'-O-methyladenosine-3'-phosphate
  modified_base 2: mod_base = OTHER; note = 2'-O-methyladenosine-3'-phosphate
  modified_base 3: mod_base = OTHER; note = 2'-O-methylcytidine-3'-phosphate
  modified_base 4: mod_base = OTHER; note = 2'-O-methyladenosine-3'-phosphate
  modified_base 5: mod_base = OTHER; note = 2'-O-methyladenosine-3'-phosphate
  modified_base 6: mod_base = OTHER; note = 2'-O-methylguanosine-3'-phosphate
  modified_base 7: mod_base = OTHER; note = 2'-deoxy-2'-fluoroadenosine-3'-phosphate
  modified_base 8: mod_base = OTHER; note = 2'-O-methyladenosine-3'-phosphate
  modified_base 9: mod_base = OTHER; note = 2'-deoxy-2'-fluorouridine-3'-phosphate
  modified_base 10: mod_base = OTHER; note = 2'-deoxy-2'-fluoroguanosine-3'-phosphate
  modified_base 11: mod_base = OTHER; note = 2'-deoxy-2'-fluoroadenosine-3'-phosphate
  modified_base 12: mod_base = OTHER; note = 2'-O-methyluridine-3'-phosphate
  modified_base 13: mod_base = OTHER; note = 2'-O-methyladenosine-3'-phosphate
  modified_base 14: mod_base = OTHER; note = 2'-O-methyluridine-3'-phosphate
  modified_base 15: mod_base = OTHER; note = 2'-O-methyluridine-3'-phosphate
  modified_base 16: mod_base = OTHER; note = 2'-O-methyluridine-3'-phosphate
  modified_base 17: mod_base = OTHER; note = 2'-O-methylcytidine-3'-phosphate
  modified_base 18: mod_base = OTHER; note = 2'-O-methylcytidine-3'-phosphate
  modified_base 19: mod_base = OTHER; note = 2'-O-methyluridine-3'-phosphate
  modified_base 20: mod_base = OTHER; note = 2'-O-methylguanosine-3'-phosphate
  modified_base 21: mod_base = OTHER; note = 2'-O-methyladenosine
aacaagaatgatatttcctga

SEQ ID NO: 4016 - RNA, 21 nt, synthetic construct
  source 1..21: mol_type = other RNA
  modified_base 1: mod_base = OTHER; note = 2'-O-methyladenosine-3'-phosphate
  modified_base 2: mod_base = OTHER; note = 2'-O-methylcytidine-3'-phosphate
  modified_base 3: mod_base = OTHER; note = 2'-O-methyladenosine-3'-phosphate
  modified_base 4: mod_base = OTHER; note = 2'-O-methyladenosine-3'-phosphate
  modified_base 5: mod_base = OTHER; note = 2'-O-methylguanosine-3'-phosphate
  modified_base 6: mod_base = OTHER; note = 2'-O-methyladenosine-3'-phosphate
  modified_base 7: mod_base = OTHER; note = 2'-deoxy-2'-fluoroadenosine-3'-phosphate
  modified_base 8: mod_base = OTHER; note = 2'-O-methyluridine-3'-phosphate
  modified_base 9: mod_base = OTHER; note = 2'-deoxy-2'-fluoroguanosine-3'-phosphate
  modified_base 10: mod_base = OTHER; note = 2'-deoxy-2'-fluoroadenosine-3'-phosphate
  modified_base 11: mod_base = OTHER; note = 2'-deoxy-2'-fluorouridine-3'-phosphate
  modified_base 12: mod_base = OTHER; note = 2'-O-methyladenosine-3'-phosphate
  modified_base 13: mod_base = OTHER; note = 2'-O-methyluridine-3'-phosphate
  modified_base 14: mod_base = OTHER; note = 2'-O-methyluridine-3'-phosphate
  modified_base 15: mod_base = OTHER; note = 2'-O-methyluridine-3'-phosphate
  modified_base 16: mod_base = OTHER; note = 2'-O-methylcytidine-3'-phosphate
  modified_base 17: mod_base = OTHER; note = 2'-O-methylcytidine-3'-phosphate
  modified_base 18: mod_base = OTHER; note = 2'-O-methyluridine-3'-phosphate
  modified_base 19: mod_base = OTHER; note = 2'-O-methylguanosine-3'-phosphate
  modified_base 20: mod_base = OTHER; note = 2'-O-methyluridine-3'-phosphate
  modified_base 21: mod_base = OTHER; note = 2'-O-methyladenosine
acaagaatgatatttcctgta

SEQ ID NO: 4017 - RNA, 21 nt, synthetic construct
  source 1..21: mol_type = other RNA
  modified_base 1: mod_base = OTHER; note = 2'-O-methylcytidine-3'-phosphate
  modified_base 2: mod_base = OTHER; note = 2'-O-methyladenosine-3'-phosphate
  modified_base 3: mod_base = OTHER; note = 2'-O-methyladenosine-3'-phosphate
  modified_base 4: mod_base = OTHER; note = 2'-O-methylguanosine-3'-phosphate
  modified_base 5: mod_base = OTHER; note = 2'-O-methyladenosine-3'-phosphate
  modified_base 6: mod_base = OTHER; note = 2'-O-methyladenosine-3'-phosphate
  modified_base 7: mod_base = OTHER; note = 2'-deoxy-2'-fluorouridine-3'-phosphate
  modified_base 8: mod_base = OTHER; note = 2'-O-methylguanosine-3'-phosphate
  modified_base 9: mod_base = OTHER; note = 2'-deoxy-2'-fluoroadenosine-3'-phosphate
  modified_base 10: mod_base = OTHER; note = 2'-deoxy-2'-fluorouridine-3'-phosphate
  modified_base 11: mod_base = OTHER; note = 2'-deoxy-2'-fluoroadenosine-3'-phosphate
  modified_base 12: mod_base = OTHER; note = 2'-O-methyluridine-3'-phosphate
  modified_base 13: mod_base = OTHER; note = 2'-O-methyluridine-3'-phosphate
  modified_base 14: mod_base = OTHER; note = 2'-O-methyluridine-3'-phosphate
  modified_base 15: mod_base = OTHER; note = 2'-O-methylcytidine-3'-phosphate
  modified_base 16: mod_base = OTHER; note = 2'-O-methylcytidine-3'-phosphate
  modified_base 17: mod_base = OTHER; note = 2'-O-methyluridine-3'-phosphate
  modified_base 18: mod_base = OTHER; note = 2'-O-methylguanosine-3'-phosphate
  modified_base 19: mod_base = OTHER; note = 2'-O-methyluridine-3'-phosphate
  modified_base 20: mod_base = OTHER; note = 2'-O-methyluridine-3'-phosphate
  modified_base 21: mod_base = OTHER; note = 2'-O-methyladenosine
caagaatgatatttcctgtta

SEQ ID NO: 4018 - RNA, 21 nt, synthetic construct
  source 1..21: mol_type = other RNA
  modified_base 1: mod_base = OTHER; note = 2'-O-methyladenosine-3'-phosphate
  modified_base 2: mod_base = OTHER; note = 2'-O-methyladenosine-3'-phosphate
  modified_base 3: mod_base = OTHER; note = 2'-O-methylguanosine-3'-phosphate
  modified_base 4: mod_base = OTHER; note = 2'-O-methyladenosine-3'-phosphate
  modified_base 5: mod_base = OTHER; note = 2'-O-methyladenosine-3'-phosphate
  modified_base 6: mod_base = OTHER; note = 2'-O-methyluridine-3'-phosphate
  modified_base 7: mod_base = OTHER; note = 2'-deoxy-2'-fluoroguanosine-3'-phosphate
  modified_base 8: mod_base = OTHER; note = 2'-O-methyladenosine-3'-phosphate
  modified_base 9: mod_base = OTHER; note = 2'-deoxy-2'-fluorouridine-3'-phosphate
  modified_base 10: mod_base = OTHER; note = 2'-deoxy-2'-fluoroadenosine-3'-phosphate
  modified_base 11: mod_base = OTHER; note = 2'-deoxy-2'-fluorouridine-3'-phosphate
  modified_base 12: mod_base = OTHER; note = 2'-O-methyluridine-3'-phosphate
  modified_base 13: mod_base = OTHER; note = 2'-O-methyluridine-3'-phosphate
  modified_base 14: mod_base = OTHER; note = 2'-O-methylcytidine-3'-phosphate
  modified_base 15: mod_base = OTHER; note = 2'-O-methylcytidine-3'-phosphate
  modified_base 16: mod_base = OTHER; note = 2'-O-methyluridine-3'-phosphate
  modified_base 17: mod_base = OTHER; note = 2'-O-methylguanosine-3'-phosphate
  modified_base 18: mod_base = OTHER; note = 2'-O-methyluridine-3'-phosphate
  modified_base 19: mod_base = OTHER; note = 2'-O-methyluridine-3'-phosphate
  modified_base 20: mod_base = OTHER; note = 2'-O-methyluridine-3'-phosphate
  modified_base 21: mod_base = OTHER; note = 2'-O-methyladenosine
aagaatgatatttcctgttta

SEQ ID NO: 4019 - RNA, 21 nt, synthetic construct
  source 1..21: mol_type = other RNA
  modified_base 1: mod_base = OTHER; note = 2'-O-methyladenosine-3'-phosphate
  modified_base 2: mod_base = OTHER; note = 2'-O-methylguanosine-3'-phosphate
  modified_base 3: mod_base = OTHER; note = 2'-O-methyladenosine-3'-phosphate
  modified_base 4: mod_base = OTHER; note = 2'-O-methyladenosine-3'-phosphate
  modified_base 5: mod_base = OTHER; note = 2'-O-methyluridine-3'-phosphate
  modified_base 6: mod_base = OTHER; note = 2'-O-methylguanosine-3'-phosphate
  modified_base 7: mod_base = OTHER; note = 2'-deoxy-2'-fluoroadenosine-3'-phosphate
  modified_base 8: mod_base = OTHER; note = 2'-O-methyluridine-3'-phosphate
  modified_base 9: mod_base = OTHER; note = 2'-deoxy-2'-fluoroadenosine-3'-phosphate
  modified_base 10: mod_base = OTHER; note = 2'-deoxy-2'-fluorouridine-3'-phosphate
  modified_base 11: mod_base = OTHER; note = 2'-deoxy-2'-fluorouridine-3'-phosphate
  modified_base 12: mod_base = OTHER; note = 2'-O-methyluridine-3'-phosphate
  modified_base 13: mod_base = OTHER; note = 2'-O-methylcytidine-3'-phosphate
  modified_base 14: mod_base = OTHER; note = 2'-O-methylcytidine-3'-phosphate
  modified_base 15: mod_base = OTHER; note = 2'-O-methyluridine-3'-phosphate
  modified_base 16: mod_base = OTHER; note = 2'-O-methylguanosine-3'-phosphate
  modified_base 17: mod_base = OTHER; note = 2'-O-methyluridine-3'-phosphate
  modified_base 18: mod_base = OTHER; note = 2'-O-methyluridine-3'-phosphate
  modified_base 19: mod_base = OTHER; note = 2'-O-methyluridine-3'-phosphate
  modified_base 20: mod_base = OTHER; note = 2'-O-methyluridine-3'-phosphate
  modified_base 21: mod_base = OTHER; note = 2'-O-methyladenosine
agaatgatatttcctgtttta

SEQ ID NO: 4020 - RNA, 21 nt, synthetic construct
  source 1..21: mol_type = other RNA
  modified_base 1: mod_base = OTHER; note = 2'-O-methyladenosine-3'-phosphate
  modified_base 2: mod_base = OTHER; note = 2'-O-methylcytidine-3'-phosphate
  modified_base 3: mod_base = OTHER; note = 2'-O-methyluridine-3'-phosphate
  modified_base 4: mod_base = OTHER; note = 2'-O-methyluridine-3'-phosphate
  modified_base 5: mod_base = OTHER; note = 2'-O-methyladenosine-3'-phosphate
  modified_base 6: mod_base = OTHER; note = 2'-O-methyluridine-3'-phosphate
  modified_base 7: mod_base = OTHER; note = 2'-deoxy-2'-fluoroguanosine-3'-phosphate
  modified_base 8: mod_base = OTHER; note = 2'-O-methyluridine-3'-phosphate
  modified_base 9: mod_base = OTHER; note = 2'-deoxy-2'-fluorouridine-3'-phosphate
  modified_base 10: mod_base = OTHER; note = 2'-deoxy-2'-fluoroguanosine-3'-phosphate
  modified_base 11: mod_base = OTHER; note = 2'-deoxy-2'-fluoroguanosine-3'-phosphate
  modified_base 12: mod_base = OTHER; note = 2'-O-methylguanosine-3'-phosphate
  modified_base 13: mod_base = OTHER; note = 2'-O-methyluridine-3'-phosphate
  modified_base 14: mod_base = OTHER; note = 2'-O-methyladenosine-3'-phosphate
  modified_base 15: mod_base = OTHER; note = 2'-O-methyladenosine-3'-phosphate
  modified_base 16: mod_base = OTHER; note = 2'-O-methyladenosine-3'-phosphate
  modified_base 17: mod_base = OTHER; note = 2'-O-methyluridine-3'-phosphate
  modified_base 18: mod_base = OTHER; note = 2'-O-methyladenosine-3'-phosphate
  modified_base 19: mod_base = OTHER; note = 2'-O-methyluridine-3'-phosphate
  modified_base 20: mod_base = OTHER; note = 2'-O-methylguanosine-3'-phosphate
  modified_base 21: mod_base = OTHER; note = 2'-O-methyladenosine
acttatgttgggtaaatatga

SEQ ID NO: 4021 - RNA, 21 nt, synthetic construct
  source 1..21: mol_type = other RNA
  modified_base 1: mod_base = OTHER; note = 2'-O-methylcytidine-3'-phosphate
  modified_base 2: mod_base = OTHER; note = 2'-O-methyluridine-3'-phosphate
  modified_base 3: mod_base = OTHER; note = 2'-O-methyluridine-3'-phosphate
  modified_base 4: mod_base = OTHER; note = 2'-O-methyladenosine-3'-phosphate
  modified_base 5: mod_base = OTHER; note = 2'-O-methyluridine-3'-phosphate
  modified_base 6: mod_base = OTHER; note = 2'-O-methylguanosine-3'-phosphate
  modified_base 7: mod_base = OTHER; note = 2'-deoxy-2'-fluorouridine-3'-phosphate
  modified_base 8: mod_base = OTHER; note = 2'-O-methyluridine-3'-phosphate
  modified_base 9: mod_base = OTHER; note = 2'-deoxy-2'-fluoroguanosine-3'-phosphate
  modified_base 10: mod_base = OTHER; note = 2'-deoxy-2'-fluoroguanosine-3'-phosphate
  modified_base 11: mod_base = OTHER; note = 2'-deoxy-2'-fluoroguanosine-3'-phosphate
  modified_base 12: mod_base = OTHER; note = 2'-O-methyluridine-3'-phosphate
  modified_base 13: mod_base = OTHER; note = 2'-O-methyladenosine-3'-phosphate
  modified_base 14: mod_base = OTHER; note = 2'-O-methyladenosine-3'-phosphate
  modified_base 15: mod_base = OTHER; note = 2'-O-methyladenosine-3'-phosphate
  modified_base 16: mod_base = OTHER; note = 2'-O-methyluridine-3'-phosphate
  modified_base 17: mod_base = OTHER; note = 2'-O-methyladenosine-3'-phosphate
  modified_base 18: mod_base = OTHER; note = 2'-O-methyluridine-3'-phosphate
  modified_base 19: mod_base = OTHER; note = 2'-O-methylguanosine-3'-phosphate
  modified_base 20: mod_base = OTHER; note = 2'-O-methylcytidine-3'-phosphate
  modified_base 21: mod_base = OTHER; note = 2'-O-methyladenosine
cttatgttgggtaaatatgca

SEQ ID NO: 4022 - RNA, 21 nt, synthetic construct
  source 1..21: mol_type = other RNA
  modified_base 1: mod_base = OTHER; note = 2'-O-methyluridine-3'-phosphate
  modified_base 2: mod_base = OTHER; note = 2'-O-methyluridine-3'-phosphate
  modified_base 3: mod_base = OTHER; note = 2'-O-methyladenosine-3'-phosphate
  modified_base 4: mod_base = OTHER; note = 2'-O-methyluridine-3'-phosphate
  modified_base 5: mod_base = OTHER; note = 2'-O-methylguanosine-3'-phosphate
  modified_base 6: mod_base = OTHER; note = 2'-O-methyluridine-3'-phosphate
  modified_base 7: mod_base = OTHER; note = 2'-deoxy-2'-fluorouridine-3'-phosphate
  modified_base 8: mod_base = OTHER; note = 2'-O-methylguanosine-3'-phosphate
  modified_base 9: mod_base = OTHER; note = 2'-deoxy-2'-fluoroguanosine-3'-phosphate
  modified_base 10: mod_base = OTHER; note = 2'-deoxy-2'-fluoroguanosine-3'-phosphate
  modified_base 11: mod_base = OTHER; note = 2'-deoxy-2'-fluorouridine-3'-phosphate
  modified_base 12: mod_base = OTHER; note = 2'-O-methyladenosine-3'-phosphate
  modified_base 13: mod_base = OTHER; note = 2'-O-methyladenosine-3'-phosphate
  modified_base 14: mod_base = OTHER; note = 2'-O-methyladenosine-3'-phosphate
  modified_base 15: mod_base = OTHER; note = 2'-O-methyluridine-3'-phosphate
  modified_base 16: mod_base = OTHER; note = 2'-O-methyladenosine-3'-phosphate
  modified_base 17: mod_base = OTHER; note = 2'-O-methyluridine-3'-phosphate
  modified_base 18: mod_base = OTHER; note = 2'-O-methylguanosine-3'-phosphate
  modified_base 19: mod_base = OTHER; note = 2'-O-methylcytidine-3'-phosphate
  modified_base 20: mod_base = OTHER; note = 2'-O-methyluridine-3'-phosphate
  modified_base 21: mod_base = OTHER; note = 2'-O-methyladenosine
ttatgttgggtaaatatgcta

SEQ ID NO: 4023 - RNA, 21 nt, synthetic construct
  source 1..21: mol_type = other RNA
  modified_base 1: mod_base = OTHER; note = 2'-O-methyluridine-3'-phosphate
  modified_base 2: mod_base = OTHER; note = 2'-O-methyladenosine-3'-phosphate
  modified_base 3: mod_base = OTHER; note = 2'-O-methyluridine-3'-phosphate
  modified_base 4: mod_base = OTHER; note = 2'-O-methylguanosine-3'-phosphate
  modified_base 5: mod_base = OTHER; note = 2'-O-methyluridine-3'-phosphate
  modified_base 6: mod_base = OTHER; note = 2'-O-methyluridine-3'-phosphate
  modified_base 7: mod_base = OTHER; note = 2'-deoxy-2'-fluoroguanosine-3'-phosphate
  modified_base 8: mod_base = OTHER; note = 2'-O-methylguanosine-3'-phosphate
  modified_base 9: mod_base = OTHER; note = 2'-deoxy-2'-fluoroguanosine-3'-phosphate
  modified_base 10: mod_base = OTHER; note = 2'-deoxy-2'-fluorouridine-3'-phosphate
  modified_base 11: mod_base = OTHER; note = 2'-deoxy-2'-fluoroadenosine-3'-phosphate
  modified_base 12: mod_base = OTHER; note = 2'-O-methyladenosine-3'-phosphate
  modified_base 13: mod_base = OTHER; note = 2'-O-methyladenosine-3'-phosphate
  modified_base 14: mod_base = OTHER; note = 2'-O-methyluridine-3'-phosphate
  modified_base 15: mod_base = OTHER; note = 2'-O-methyladenosine-3'-phosphate
  modified_base 16: mod_base = OTHER; note = 2'-O-methyluridine-3'-phosphate
  modified_base 17: mod_base = OTHER; note = 2'-O-methylguanosine-3'-phosphate
  modified_base 18: mod_base = OTHER; note = 2'-O-methylcytidine-3'-phosphate
  modified_base 19: mod_base = OTHER; note = 2'-O-methyluridine-3'-phosphate
  modified_base 20: mod_base = OTHER; note = 2'-O-methyluridine-3'-phosphate
  modified_base 21: mod_base = OTHER; note = 2'-O-methyladenosine
tatgttgggtaaatatgctta

SEQ ID NO: 4024 - RNA, 21 nt, synthetic construct
  source 1..21: mol_type = other RNA
  modified_base 1: mod_base = OTHER; note = 2'-O-methyladenosine-3'-phosphate
  modified_base 2: mod_base = OTHER; note = 2'-O-methyluridine-3'-phosphate
  modified_base 3: mod_base = OTHER; note = 2'-O-methylguanosine-3'-phosphate
  modified_base 4: mod_base = OTHER; note = 2'-O-methyluridine-3'-phosphate
  modified_base 5: mod_base = OTHER; note = 2'-O-methyluridine-3'-phosphate
  modified_base 6: mod_base = OTHER; note = 2'-O-methylguanosine-3'-phosphate
  modified_base 7: mod_base = OTHER; note = 2'-deoxy-2'-fluoroguanosine-3'-phosphate
  modified_base 8: mod_base = OTHER; note = 2'-O-methylguanosine-3'-phosphate
  modified_base 9: mod_base = OTHER; note = 2'-deoxy-2'-fluorouridine-3'-phosphate
  modified_base 10: mod_base = OTHER; note = 2'-deoxy-2'-fluoroadenosine-3'-phosphate
  modified_base 11: mod_base = OTHER; note = 2'-deoxy-2'-fluoroadenosine-3'-phosphate
  modified_base 12: mod_base = OTHER; note = 2'-O-methyladenosine-3'-phosphate
  modified_base 13: mod_base = OTHER; note = 2'-O-methyluridine-3'-phosphate
  modified_base 14: mod_base = OTHER; note = 2'-O-methyladenosine-3'-phosphate
  modified_base 15: mod_base = OTHER; note = 2'-O-methyluridine-3'-phosphate
  modified_base 16: mod_base = OTHER; note = 2'-O-methylguanosine-3'-phosphate
  modified_base 17: mod_base = OTHER; note = 2'-O-methylcytidine-3'-phosphate
  modified_base 18: mod_base = OTHER; note = 2'-O-methyluridine-3'-phosphate
  modified_base 19: mod_base = OTHER; note = 2'-O-methyluridine-3'-phosphate
  modified_base 20: mod_base = OTHER; note = 2'-O-methyladenosine-3'-phosphate
  modified_base 21: mod_base = OTHER; note = 2'-O-methyladenosine
atgttgggtaaatatgcttaa

SEQ ID NO: 4025 - RNA, 21 nt, synthetic construct
  source 1..21: mol_type = other RNA
  modified_base 1: mod_base = OTHER; note = 2'-O-methyluridine-3'-phosphate
  modified_base 2: mod_base = OTHER; note = 2'-O-methylguanosine-3'-phosphate
  modified_base 3: mod_base = OTHER; note = 2'-O-methyluridine-3'-phosphate
  modified_base 4: mod_base = OTHER; note = 2'-O-methyluridine-3'-phosphate
  modified_base 5: mod_base = OTHER; note = 2'-O-methylguanosine-3'-phosphate
  modified_base 6: mod_base = OTHER; note = 2'-O-methylguanosine-3'-phosphate
  modified_base 7: mod_base = OTHER; note = 2'-deoxy-2'-fluoroguanosine-3'-phosphate
  modified_base 8: mod_base = OTHER; note = 2'-O-methyluridine-3'-phosphate
  modified_base 9: mod_base = OTHER; note = 2'-deoxy-2'-fluoroadenosine-3'-phosphate
  modified_base 10: mod_base = OTHER; note = 2'-deoxy-2'-fluoroadenosine-3'-phosphate
  modified_base 11: mod_base = OTHER; note = 2'-deoxy-2'-fluoroadenosine-3'-phosphate
  modified_base 12: mod_base = OTHER; note = 2'-O-methyluridine-3'-phosphate
  modified_base 13: mod_base = OTHER; note = 2'-O-methyladenosine-3'-phosphate
  modified_base 14: mod_base = OTHER; note = 2'-O-methyluridine-3'-phosphate
  modified_base 15: mod_base = OTHER; note = 2'-O-methylguanosine-3'-phosphate
  modified_base 16: mod_base = OTHER; note = 2'-O-methylcytidine-3'-phosphate
  modified_base 17: mod_base = OTHER; note = 2'-O-methyluridine-3'-phosphate
  modified_base 18: mod_base = OTHER; note = 2'-O-methyluridine-3'-phosphate
  modified_base 19: mod_base = OTHER; note = 2'-O-methyladenosine-3'-phosphate
  modified_base 20: mod_base = OTHER; note = 2'-O-methyluridine-3'-phosphate
  modified_base 21: mod_base = OTHER; note = 2'-O-methyladenosine
tgttgggtaaatatgcttata

SEQ ID NO: 4026 - RNA, 21 nt, synthetic construct
  source 1..21: mol_type = other RNA
  modified_base 1: mod_base = OTHER; note = 2'-O-methylguanosine-3'-phosphate
  modified_base 2: mod_base = OTHER; note = 2'-O-methyluridine-3'-phosphate
  modified_base 3: mod_base = OTHER; note = 2'-O-methyluridine-3'-phosphate
  modified_base 4: mod_base = OTHER; note = 2'-O-methylguanosine-3'-phosphate
  modified_base 5: mod_base = OTHER; note = 2'-O-methylguanosine-3'-phosphate
  modified_base 6: mod_base = OTHER; note = 2'-O-methylguanosine-3'-phosphate
  modified_base 7: mod_base = OTHER; note = 2'-deoxy-2'-fluorouridine-3'-phosphate
  modified_base 8: mod_base = OTHER; note = 2'-O-methyladenosine-3'-phosphate
  modified_base 9: mod_base = OTHER; note = 2'-deoxy-2'-fluoroadenosine-3'-phosphate
  modified_base 10: mod_base = OTHER; note = 2'-deoxy-2'-fluoroadenosine-3'-phosphate
  modified_base 11: mod_base = OTHER; note = 2'-deoxy-2'-fluorouridine-3'-phosphate
  modified_base 12: mod_base = OTHER; note = 2'-O-methyladenosine-3'-phosphate
  modified_base 13: mod_base = OTHER; note = 2'-O-methyluridine-3'-phosphate
  modified_base 14: mod_base = OTHER; note = 2'-O-methylguanosine-3'-phosphate
  modified_base 15: mod_base = OTHER; note = 2'-O-methylcytidine-3'-phosphate
  modified_base 16: mod_base = OTHER; note = 2'-O-methyluridine-3'-phosphate
  modified_base 17: mod_base = OTHER; note = 2'-O-methyluridine-3'-phosphate
  modified_base 18: mod_base = OTHER; note = 2'-O-methyladenosine-3'-phosphate
  modified_base 19: mod_base = OTHER; note = 2'-O-methyluridine-3'-phosphate
  modified_base 20: mod_base = OTHER; note = 2'-O-methyluridine-3'-phosphate
  modified_base 21: mod_base = OTHER; note = 2'-O-methyladenosine
gttgggtaaatatgcttatta

SEQ ID NO: 4027 - RNA, 21 nt, synthetic construct
  source 1..21: mol_type = other RNA
  modified_base 1: mod_base = OTHER; note = 2'-O-methyluridine-3'-phosphate
  modified_base 2: mod_base = OTHER; note = 2'-O-methyluridine-3'-phosphate
  modified_base 3: mod_base = OTHER; note = 2'-O-methylguanosine-3'-phosphate
  modified_base 4: mod_base = OTHER; note = 2'-O-methylguanosine-3'-phosphate
  modified_base 5: mod_base = OTHER; note = 2'-O-methyluridine-3'-phosphate
  modified_base 6: mod_base = OTHER; note = 2'-O-methyluridine-3'-phosphate
  modified_base 7: mod_base = OTHER; note = 2'-deoxy-2'-fluorocytidine-3'-phosphate
  modified_base 8: mod_base = OTHER; note = 2'-O-methyladenosine-3'-phosphate
  modified_base 9: mod_base = OTHER; note = 2'-deoxy-2'-fluoroadenosine-3'-phosphate
  modified_base 10: mod_base = OTHER; note = 2'-deoxy-2'-fluorocytidine-3'-phosphate
  modified_base 11: mod_base = OTHER; note = 2'-deoxy-2'-fluorouridine-3'-phosphate
  modified_base 12: mod_base = OTHER; note = 2'-O-methyluridine-3'-phosphate
  modified_base 13: mod_base = OTHER; note = 2'-O-methyluridine-3'-phosphate
  modified_base 14: mod_base = OTHER; note = 2'-O-methylcytidine-3'-phosphate
  modified_base 15: mod_base = OTHER; note = 2'-O-methyladenosine-3'-phosphate
  modified_base 16: mod_base = OTHER; note = 2'-O-methylcytidine-3'-phosphate
  modified_base 17: mod_base = OTHER; note = 2'-O-methyluridine-3'-phosphate
  modified_base 18: mod_base = OTHER; note = 2'-O-methylcytidine-3'-phosphate
  modified_base 19: mod_base = OTHER; note = 2'-O-methyluridine-3'-phosphate
  modified_base 20: mod_base = OTHER; note = 2'-O-methylguanosine-3'-phosphate
  modified_base 21: mod_base = OTHER; note = 2'-O-methyladenosine
ttggttcaactttcactctga

SEQ ID NO: 4028 - RNA, 21 nt, synthetic construct
  source 1..21: mol_type = other RNA
  modified_base 1: mod_base = OTHER; note = 2'-O-methyladenosine-3'-phosphate
  modified_base 2: mod_base = OTHER; note = 2'-O-methyladenosine-3'-phosphate
  modified_base 3: mod_base = OTHER; note = 2'-O-methylcytidine-3'-phosphate
  modified_base 4: mod_base = OTHER; note = 2'-O-methyluridine-3'-phosphate
  modified_base 5: mod_base = OTHER; note = 2'-O-methyluridine-3'-phosphate
  modified_base 6: mod_base = OTHER; note = 2'-O-methyluridine-3'-phosphate
  modified_base 7: mod_base = OTHER; note = 2'-deoxy-2'-fluorocytidine-3'-phosphate
  modified_base 8: mod_base = OTHER; note = 2'-O-methyladenosine-3'-phosphate
  modified_base 9: mod_base = OTHER; note = 2'-deoxy-2'-fluorocytidine-3'-phosphate
  modified_base 10: mod_base = OTHER; note = 2'-deoxy-2'-fluorouridine-3'-phosphate
  modified_base 11: mod_base = OTHER; note = 2'-deoxy-2'-fluorocytidine-3'-phosphate
  modified_base 12: mod_base = OTHER; note = 2'-O-methyluridine-3'-phosphate
  modified_base 13: mod_base = OTHER; note = 2'-O-methylguanosine-3'-phosphate
  modified_base 14: mod_base = OTHER; note = 2'-O-methyladenosine-3'-phosphate
  modified_base 15: mod_base = OTHER; note = 2'-O-methyladenosine-3'-phosphate
  modified_base 16: mod_base = OTHER; note = 2'-O-methylguanosine-3'-phosphate
  modified_base 17: mod_base = OTHER; note = 2'-O-methyladenosine-3'-phosphate
  modified_base 18: mod_base = OTHER; note = 2'-O-methyladenosine-3'-phosphate
  modified_base 19: mod_base = OTHER; note = 2'-O-methyladenosine-3'-phosphate
  modified_base 20: mod_base = OTHER; note = 2'-O-methyluridine-3'-phosphate
  modified_base 21: mod_base = OTHER; note = 2'-O-methyladenosine
aactttcactctgaagaaata

SEQ ID NO: 4029 - RNA, 21 nt, synthetic construct
  source 1..21: mol_type = other RNA
  modified_base 1: mod_base = OTHER; note = 2'-O-methylcytidine-3'-phosphate
  modified_base 2: mod_base = OTHER; note = 2'-O-methyluridine-3'-phosphate
  modified_base 3: mod_base = OTHER; note = 2'-O-methylcytidine-3'-phosphate
  modified_base 4: mod_base = OTHER; note = 2'-O-methyluridine-3'-phosphate
  modified_base 5: mod_base = OTHER; note = 2'-O-methylguanosine-3'-phosphate
  modified_base 6: mod_base = OTHER; note = 2'-O-methyladenosine-3'-phosphate
  modified_base 7: mod_base = OTHER; note = 2'-deoxy-2'-fluoroadenosine-3'-phosphate
  modified_base 8: mod_base = OTHER; note = 2'-O-methylguanosine-3'-phosphate
  modified_base 9: mod_base = OTHER; note = 2'-deoxy-2'-fluoroadenosine-3'-phosphate
  modified_base 10: mod_base = OTHER; note = 2'-deoxy-2'-fluoroadenosine-3'-phosphate
  modified_base 11: mod_base = OTHER; note = 2'-deoxy-2'-fluoroadenosine-3'-phosphate
  modified_base 12: mod_base = OTHER; note = 2'-O-methyluridine-3'-phosphate
  modified_base 13: mod_base = OTHER; note = 2'-O-methylcytidine-3'-phosphate
  modified_base 14: mod_base = OTHER; note = 2'-O-methylcytidine-3'-phosphate
  modified_base 15: mod_base = OTHER; note = 2'-O-methylguanosine-3'-phosphate
  modified_base 16: mod_base = OTHER; note = 2'-O-methyluridine-3'-phosphate
  modified_base 17: mod_base = OTHER; note = 2'-O-methyladenosine-3'-phosphate
  modified_base 18: mod_base = OTHER; note = 2'-O-methyluridine-3'-phosphate
  modified_base 19: mod_base = OTHER; note = 2'-O-methylguanosine-3'-phosphate
  modified_base 20: mod_base = OTHER; note = 2'-O-methyluridine-3'-phosphate
  modified_base 21: mod_base = OTHER; note = 2'-O-methyladenosine
ctctgaagaaatccgtatgta

SEQ ID NO: 4030 - RNA, 21 nt, synthetic construct
  source 1..21: mol_type = other RNA
  modified_base 1: mod_base = OTHER; note = 2'-O-methylcytidine-3'-phosphate
  modified_base 2: mod_base = OTHER; note = 2'-O-methyluridine-3'-phosphate
  modified_base 3: mod_base = OTHER; note = 2'-O-methylguanosine-3'-phosphate
  modified_base 4: mod_base = OTHER; note = 2'-O-methyladenosine-3'-phosphate
  modified_base 5: mod_base = OTHER; note = 2'-O-methyladenosine-3'-phosphate
  modified_base 6: mod_base = OTHER; note = 2'-O-methylguanosine-3'-phosphate
  modified_base 7: mod_base = OTHER; note = 2'-deoxy-2'-fluoroadenosine-3'-phosphate
  modified_base 8: mod_base = OTHER; note = 2'-O-methyladenosine-3'-phosphate
  modified_base 9: mod_base = OTHER; note = 2'-deoxy-2'-fluoroadenosine-3'-phosphate
  modified_base 10: mod_base = OTHER; note = 2'-deoxy-2'-fluorouridine-3'-phosphate
  modified_base 11: mod_base = OTHER; note = 2'-deoxy-2'-fluorocytidine-3'-phosphate
  modified_base 12: mod_base = OTHER; note = 2'-O-methylcytidine-3'-phosphate
  modified_base 13: mod_base = OTHER; note = 2'-O-methylguanosine-3'-phosphate
  modified_base 14: mod_base = OTHER; note = 2'-O-methyluridine-3'-phosphate
  modified_base 15: mod_base = OTHER; note = 2'-O-methyladenosine-3'-phosphate
  modified_base 16: mod_base = OTHER; note = 2'-O-methyluridine-3'-phosphate
  modified_base 17: mod_base = OTHER; note = 2'-O-methylguanosine-3'-phosphate
  modified_base 18: mod_base = OTHER; note = 2'-O-methyluridine-3'-phosphate
  modified_base 19: mod_base = OTHER; note = 2'-O-methyluridine-3'-phosphate
  modified_base 20: mod_base = OTHER; note = 2'-O-methyladenosine-3'-phosphate
  modified_base 21: mod_base = OTHER; note = 2'-O-methyladenosine
ctgaagaaatccgtatgttaa

SEQ ID NO: 4031 - RNA, 21 nt, synthetic construct
  source 1..21: mol_type = other RNA
  modified_base 1: mod_base = OTHER; note = 2'-O-methylguanosine-3'-phosphate
  modified_base 2: mod_base = OTHER; note = 2'-O-methyluridine-3'-phosphate
  modified_base 3: mod_base = OTHER; note = 2'-O-methylguanosine-3'-phosphate
  modified_base 4: mod_base = OTHER; note = 2'-O-methyluridine-3'-phosphate
  modified_base 5: mod_base = OTHER; note = 2'-O-methyluridine-3'-phosphate
  modified_base 6: mod_base = OTHER; note = 2'-O-methylguanosine-3'-phosphate
  modified_base 7: mod_base = OTHER; note = 2'-deoxy-2'-fluorouridine-3'-phosphate
  modified_base 8: mod_base = OTHER; note = 2'-O-methyluridine-3'-phosphate
  modified_base 9: mod_base = OTHER; note = 2'-deoxy-2'-fluorouridine-3'-phosphate
  modified_base 10: mod_base = OTHER; note = 2'-deoxy-2'-fluoroadenosine-3'-phosphate
  modified_base 11: mod_base = OTHER; note = 2'-deoxy-2'-fluoroadenosine-3'-phosphate
  modified_base 12: mod_base = OTHER; note = 2'-O-methylcytidine-3'-phosphate
  modified_base 13: mod_base = OTHER; note = 2'-O-methyluridine-3'-phosphate
  modified_base 14: mod_base = OTHER; note = 2'-O-methyladenosine-3'-phosphate
  modified_base 15: mod_base = OTHER; note = 2'-O-methyluridine-3'-phosphate
  modified_base 16: mod_base = OTHER; note = 2'-O-methylguanosine-3'-phosphate
  modified_base 17: mod_base = OTHER; note = 2'-O-methyladenosine-3'-phosphate
  modified_base 18: mod_base = OTHER; note = 2'-O-methylcytidine-3'-phosphate
  modified_base 19: mod_base = OTHER; note = 2'-O-methyluridine-3'-phosphate
  modified_base 20: mod_base = OTHER; note = 2'-O-methylcytidine-3'-phosphate
  modified_base 21: mod_base = OTHER; note = 2'-O-methyladenosine
gtgttgtttaactatgactca

SEQ ID NO: 4032 - RNA, 21 nt, synthetic construct
  source 1..21: mol_type = other RNA
  modified_base 1: mod_base = OTHER; note = 2'-O-methyluridine-3'-phosphate
  modified_base 2: mod_base = OTHER; note = 2'-O-methylguanosine-3'-phosphate
  modified_base 3: mod_base = OTHER; note = 2'-O-methyladenosine-3'-phosphate
  modified_base 4: mod_base = OTHER; note = 2'-O-methylcytidine-3'-phosphate
  modified_base 5: mod_base = OTHER; note = 2'-O-methyluridine-3'-phosphate
  modified_base 6: mod_base = OTHER; note = 2'-O-methylcytidine-3'-phosphate
  modified_base 7: mod_base = OTHER; note = 2'-deoxy-2'-fluorocytidine-3'-phosphate
  modified_base 8: mod_base = OTHER; note = 2'-O-methyluridine-3'-phosphate
  modified_base 9: mod_base = OTHER; note = 2'-deoxy-2'-fluoroadenosine-3'-phosphate
  modified_base 10: mod_base = OTHER; note = 2'-deoxy-2'-fluoroadenosine-3'-phosphate
  modified_base 11: mod_base = OTHER; note = 2'-deoxy-2'-fluorocytidine-3'-phosphate
  modified_base 12: mod_base = OTHER; note = 2'-O-methyluridine-3'-phosphate
  modified_base 13: mod_base = OTHER; note = 2'-O-methylguanosine-3'-phosphate
  modified_base 14: mod_base = OTHER; note = 2'-O-methyladenosine-3'-phosphate
  modified_base 15: mod_base = OTHER; note = 2'-O-methylguanosine-3'-phosphate
  modified_base 16: mod_base = OTHER; note = 2'-O-methyluridine-3'-phosphate
  modified_base 17: mod_base = OTHER; note = 2'-O-methyladenosine-3'-phosphate
  modified_base 18: mod_base = OTHER; note = 2'-O-methylguanosine-3'-phosphate
  modified_base 19: mod_base = OTHER; note = 2'-O-methyluridine-3'-phosphate
  modified_base 20: mod_base = OTHER; note = 2'-O-methylcytidine-3'-phosphate
  modified_base 21: mod_base = OTHER; note = 2'-O-methyladenosine
tgactcctaactgagtagtca

SEQ ID NO: 4033 - RNA, 21 nt, synthetic construct
  source 1..21: mol_type = other RNA
  modified_base 1: mod_base = OTHER; note = 2'-O-methylguanosine-3'-phosphate
  modified_base 2: mod_base = OTHER; note = 2'-O-methyladenosine-3'-phosphate
  modified_base 3: mod_base = OTHER; note = 2'-O-methylcytidine-3'-phosphate
  modified_base 4: mod_base = OTHER; note = 2'-O-methyluridine-3'-phosphate
  modified_base 5: mod_base = OTHER; note = 2'-O-methylcytidine-3'-phosphate
  modified_base 6: mod_base = OTHER; note = 2'-O-methylcytidine-3'-phosphate
  modified_base 7: mod_base = OTHER; note = 2'-deoxy-2'-fluorouridine-3'-phosphate
  modified_base 8: mod_base = OTHER; note = 2'-O-methyladenosine-3'-phosphate
  modified_base 9: mod_base = OTHER; note = 2'-deoxy-2'-fluoroadenosine-3'-phosphate
  modified_base 10: mod_base = OTHER; note = 2'-deoxy-2'-fluorocytidine-3'-phosphate
  modified_base 11: mod_base = OTHER; note = 2'-deoxy-2'-fluorouridine-3'-phosphate
  modified_base 12: mod_base = OTHER; note = 2'-O-methylguanosine-3'-phosphate
  modified_base 13: mod_base = OTHER; note = 2'-O-methyladenosine-3'-phosphate
  modified_base 14: mod_base = OTHER; note = 2'-O-methylguanosine-3'-phosphate
  modified_base 15: mod_base = OTHER; note = 2'-O-methyluridine-3'-phosphate
  modified_base 16: mod_base = OTHER; note = 2'-O-methyladenosine-3'-phosphate
  modified_base 17: mod_base = OTHER; note = 2'-O-methylguanosine-3'-phosphate
  modified_base 18: mod_base = OTHER; note = 2'-O-methyluridine-3'-phosphate
  modified_base 19: mod_base = OTHER; note = 2'-O-methylcytidine-3'-phosphate
  modified_base 20: mod_base = OTHER; note = 2'-O-methyluridine-3'-phosphate
  modified_base 21: mod_base = OTHER; note = 2'-O-methyladenosine
gactcctaactgagtagtcta

SEQ ID NO: 4034 - RNA, 21 nt, synthetic construct
  source 1..21: mol_type = other RNA
  modified_base 1: mod_base = OTHER; note = 2'-O-methyladenosine-3'-phosphate
  modified_base 2: mod_base = OTHER; note = 2'-O-methylcytidine-3'-phosphate
  modified_base 3: mod_base = OTHER; note = 2'-O-methyluridine-3'-phosphate
  modified_base 4: mod_base = OTHER; note = 2'-O-methylcytidine-3'-phosphate
  modified_base 5: mod_base = OTHER; note = 2'-O-methylcytidine-3'-phosphate
  modified_base 6: mod_base = OTHER; note = 2'-O-methyluridine-3'-phosphate
  modified_base 7: mod_base = OTHER; note = 2'-deoxy-2'-fluoroadenosine-3'-phosphate
  modified_base 8: mod_base = OTHER; note = 2'-O-methyladenosine-3'-phosphate
  modified_base 9: mod_base = OTHER; note = 2'-deoxy-2'-fluorocytidine-3'-phosphate
  modified_base 10: mod_base = OTHER; note = 2'-deoxy-2'-fluorouridine-3'-phosphate
  modified_base 11: mod_base = OTHER; note = 2'-deoxy-2'-fluoroguanosine-3'-phosphate
  modified_base 12: mod_base = OTHER; note = 2'-O-methyladenosine-3'-phosphate
  modified_base 13: mod_base = OTHER; note = 2'-O-methylguanosine-3'-phosphate
  modified_base 14: mod_base = OTHER; note = 2'-O-methyluridine-3'-phosphate
  modified_base 15: mod_base = OTHER; note = 2'-O-methyladenosine-3'-phosphate
  modified_base 16: mod_base = OTHER; note = 2'-O-methylguanosine-3'-phosphate
  modified_base 17: mod_base = OTHER; note = 2'-O-methyluridine-3'-phosphate
  modified_base 18: mod_base = OTHER; note = 2'-O-methylcytidine-3'-phosphate
  modified_base 19: mod_base = OTHER; note = 2'-O-methyluridine-3'-phosphate
  modified_base 20: mod_base = OTHER; note = 2'-O-methyluridine-3'-phosphate
  modified_base 21: mod_base = OTHER; note = 2'-O-methyladenosine
actcctaactgagtagtctta

SEQ ID NO: 4035 - RNA, 21 nt, synthetic construct
  source 1..21: mol_type = other RNA
  modified_base 1: mod_base = OTHER; note = 2'-O-methylcytidine-3'-phosphate
  modified_base 2: mod_base = OTHER; note = 2'-O-methyluridine-3'-phosphate
  modified_base 3: mod_base = OTHER; note = 2'-O-methylcytidine-3'-phosphate
  modified_base 4: mod_base = OTHER; note = 2'-O-methylcytidine-3'-phosphate
  modified_base 5: mod_base = OTHER; note = 2'-O-methyluridine-3'-phosphate
  modified_base 6: mod_base = OTHER; note = 2'-O-methyladenosine-3'-phosphate
  modified_base 7: mod_base = OTHER; note = 2'-deoxy-2'-fluoroadenosine-3'-phosphate
  modified_base 8: mod_base = OTHER; note = 2'-O-methylcytidine-3'-phosphate
  modified_base 9: mod_base = OTHER; note = 2'-deoxy-2'-fluorouridine-3'-phosphate
  modified_base 10: mod_base = OTHER; note = 2'-deoxy-2'-fluoroguanosine-3'-phosphate
  modified_base 11: mod_base = OTHER; note = 2'-deoxy-2'-fluoroadenosine-3'-phosphate
  modified_base 12: mod_base = OTHER; note = 2'-O-methylguanosine-3'-phosphate
  modified_base 13: mod_base = OTHER; note = 2'-O-methyluridine-3'-phosphate
  modified_base 14: mod_base = OTHER; note = 2'-O-methyladenosine-3'-phosphate
  modified_base 15: mod_base = OTHER; note = 2'-O-methylguanosine-3'-phosphate
  modified_base 16: mod_base = OTHER; note = 2'-O-methyluridine-3'-phosphate
  modified_base 17: mod_base = OTHER; note = 2'-O-methylcytidine-3'-phosphate
  modified_base 18: mod_base = OTHER; note = 2'-O-methyluridine-3'-phosphate
  modified_base 19: mod_base = OTHER; note = 2'-O-methyluridine-3'-phosphate
  modified_base 20: mod_base = OTHER; note = 2'-O-methyladenosine-3'-phosphate
  modified_base 21: mod_base = OTHER; note = 2'-O-methyladenosine
ctcctaactgagtagtcttaa

SEQ ID NO: 4036 - RNA, 21 nt, synthetic construct
  source 1..21: mol_type = other RNA
  modified_base 1: mod_base = OTHER; note = 2'-O-methyluridine-3'-phosphate
  modified_base 2: mod_base = OTHER; note = 2'-O-methylcytidine-3'-phosphate
  modified_base 3: mod_base = OTHER; note = 2'-O-methylcytidine-3'-phosphate
  modified_base 4: mod_base = OTHER; note = 2'-O-methyluridine-3'-phosphate
  modified_base 5: mod_base = OTHER; note = 2'-O-methyladenosine-3'-phosphate
  modified_base 6: mod_base = OTHER; note = 2'-O-methyladenosine-3'-phosphate
  modified_base 7: mod_base = OTHER; note = 2'-deoxy-2'-fluorocytidine-3'-phosphate
  modified_base 8: mod_base = OTHER; note = 2'-O-methyluridine-3'-phosphate
  modified_base 9: mod_base = OTHER; note = 2'-deoxy-2'-fluoroguanosine-3'-phosphate
  modified_base 10: mod_base = OTHER; note = 2'-deoxy-2'-fluoroadenosine-3'-phosphate
  modified_base 11: mod_base = OTHER; note = 2'-deoxy-2'-fluoroguanosine-3'-phosphate
  modified_base 12: mod_base = OTHER; note = 2'-O-methyluridine-3'-phosphate
  modified_base 13: mod_base = OTHER; note = 2'-O-methyladenosine-3'-phosphate
  modified_base 14: mod_base = OTHER; note = 2'-O-methylguanosine-3'-phosphate
  modified_base 15: mod_base = OTHER; note = 2'-O-methyluridine-3'-phosphate
  modified_base 16: mod_base = OTHER; note = 2'-O-methylcytidine-3'-phosphate
  modified_base 17: mod_base = OTHER; note = 2'-O-methyluridine-3'-phosphate
  modified_base 18: mod_base = OTHER; note = 2'-O-methyluridine-3'-phosphate
  modified_base 19: mod_base = OTHER; note = 2'-O-methyladenosine-3'-phosphate
  modified_base 20: mod_base = OTHER; note = 2'-O-methyluridine-3'-phosphate
  modified_base 21: mod_base = OTHER; note = 2'-O-methyladenosine
tcctaactgagtagtcttata

SEQ ID NO: 4037 - RNA, 21 nt, synthetic construct
  source 1..21: mol_type = other RNA
  modified_base 1: mod_base = OTHER; note = 2'-O-methylcytidine-3'-phosphate
  modified_base 2: mod_base = OTHER; note = 2'-O-methylcytidine-3'-phosphate
  modified_base 3: mod_base = OTHER; note = 2'-O-methyluridine-3'-phosphate
  modified_base 4: mod_base = OTHER; note = 2'-O-methyladenosine-3'-phosphate
  modified_base 5: mod_base = OTHER; note = 2'-O-methyladenosine-3'-phosphate
  modified_base 6: mod_base = OTHER; note = 2'-O-methylcytidine-3'-phosphate
  modified_base 7: mod_base = OTHER; note = 2'-deoxy-2'-fluorouridine-3'-phosphate
  modified_base 8: mod_base = OTHER; note = 2'-O-methylguanosine-3'-phosphate
  modified_base 9: mod_base = OTHER; note = 2'-deoxy-2'-fluoroadenosine-3'-phosphate
  modified_base 10: mod_base = OTHER; note = 2'-deoxy-2'-fluoroguanosine-3'-phosphate
  modified_base 11: mod_base = OTHER; note = 2'-deoxy-2'-fluorouridine-3'-phosphate
  modified_base 12: mod_base = OTHER; note = 2'-O-methyladenosine-3'-phosphate
  modified_base 13: mod_base = OTHER; note = 2'-O-methylguanosine-3'-phosphate
  modified_base 14: mod_base = OTHER; note = 2'-O-methyluridine-3'-phosphate
  modified_base 15: mod_base = OTHER; note = 2'-O-methylcytidine-3'-phosphate
  modified_base 16: mod_base = OTHER; note = 2'-O-methyluridine-3'-phosphate
  modified_base 17: mod_base = OTHER; note = 2'-O-methyluridine-3'-phosphate
  modified_base 18: mod_base = OTHER; note = 2'-O-methyladenosine-3'-phosphate
  modified_base 19: mod_base = OTHER; note = 2'-O-methyluridine-3'-phosphate
  modified_base 20: mod_base = OTHER; note = 2'-O-methyladenosine-3'-phosphate
  modified_base 21: mod_base = OTHER; note = 2'-O-methyladenosine
cctaactgagtagtcttataa

SEQ ID NO: 4038 - RNA, 21 nt, synthetic construct
  source 1..21: mol_type = other RNA
  modified_base 1: mod_base = OTHER; note = 2'-O-methylcytidine-3'-phosphate
  modified_base 2: mod_base = OTHER; note = 2'-O-methyluridine-3'-phosphate
  modified_base 3: mod_base = OTHER; note = 2'-O-methyladenosine-3'-phosphate
  modified_base 4: mod_base = OTHER; note = 2'-O-methyladenosine-3'-phosphate
  modified_base 5: mod_base = OTHER; note = 2'-O-methylcytidine-3'-phosphate
  modified_base 6: mod_base = OTHER; note = 2'-O-methyluridine-3'-phosphate
  modified_base 7: mod_base = OTHER; note = 2'-deoxy-2'-fluoroguanosine-3'-phosphate
  modified_base 8: mod_base = OTHER; note = 2'-O-methyladenosine-3'-phosphate
  modified_base 9: mod_base = OTHER; note = 2'-deoxy-2'-fluoroguanosine-3'-phosphate
  modified_base 10: mod_base = OTHER; note = 2'-deoxy-2'-fluorouridine-3'-phosphate
  modified_base 11: mod_base = OTHER; note = 2'-deoxy-2'-fluoroadenosine-3'-phosphate
  modified_base 12: mod_base = OTHER; note = 2'-O-methylguanosine-3'-phosphate
  modified_base 13: mod_base = OTHER; note = 2'-O-methyluridine-3'-phosphate
  modified_base 14: mod_base = OTHER; note = 2'-O-methylcytidine-3'-phosphate
  modified_base 15: mod_base = OTHER; note = 2'-O-methyluridine-3'-phosphate
  modified_base 16: mod_base = OTHER; note = 2'-O-methyluridine-3'-phosphate
  modified_base 17: mod_base = OTHER; note = 2'-O-methyladenosine-3'-phosphate
  modified_base 18: mod_base = OTHER; note = 2'-O-methyluridine-3'-phosphate
  modified_base 19: mod_base = OTHER; note = 2'-O-methyladenosine-3'-phosphate
  modified_base 20: mod_base = OTHER; note = 2'-O-methyluridine-3'-phosphate
  modified_base 21: mod_base = OTHER; note = 2'-O-methyladenosine
ctaactgagtagtcttatata

SEQ ID NO: 4039 - RNA, 21 nt, synthetic construct
  source 1..21: mol_type = other RNA
  modified_base 1: mod_base = OTHER; note = 2'-O-methyluridine-3'-phosphate
  modified_base 2: mod_base = OTHER; note = 2'-O-methyladenosine-3'-phosphate
  modified_base 3: mod_base = OTHER; note = 2'-O-methyladenosine-3'-phosphate
  modified_base 4: mod_base = OTHER; note = 2'-O-methylcytidine-3'-phosphate
  modified_base 5: mod_base = OTHER; note = 2'-O-methyluridine-3'-phosphate
  modified_base 6: mod_base = OTHER; note = 2'-O-methylguanosine-3'-phosphate
  modified_base 7: mod_base = OTHER; note = 2'-deoxy-2'-fluoroadenosine-3'-phosphate
  modified_base 8: mod_base = OTHER; note = 2'-O-methylguanosine-3'-phosphate
  modified_base 9: mod_base = OTHER; note = 2'-deoxy-2'-fluorouridine-3'-phosphate
  modified_base 10: mod_base = OTHER; note = 2'-deoxy-2'-fluoroadenosine-3'-phosphate
  modified_base 11: mod_base = OTHER; note = 2'-deoxy-2'-fluoroguanosine-3'-phosphate
  modified_base 12: mod_base = OTHER; note = 2'-O-methyluridine-3'-phosphate
  modified_base 13: mod_base = OTHER; note = 2'-O-methylcytidine-3'-phosphate
  modified_base 14: mod_base = OTHER; note = 2'-O-methyluridine-3'-phosphate
  modified_base 15: mod_base = OTHER; note = 2'-O-methyluridine-3'-phosphate
  modified_base 16: mod_base = OTHER; note = 2'-O-methyladenosine-3'-phosphate
  modified_base 17: mod_base = OTHER; note = 2'-O-methyluridine-3'-phosphate
  modified_base 18: mod_base = OTHER; note = 2'-O-methyladenosine-3'-phosphate
  modified_base 19: mod_base = OTHER; note = 2'-O-methyluridine-3'-phosphate
  modified_base 20: mod_base = OTHER; note = 2'-O-methyluridine-3'-phosphate
  modified_base 21: mod_base = OTHER; note = 2'-O-methyladenosine
taactgagtagtcttatatta

SEQ ID NO: 4040 - RNA, 21 nt, synthetic construct
  source 1..21: mol_type = other RNA
  modified_base 1: mod_base = OTHER; note = 2'-O-methyladenosine-3'-phosphate
  modified_base 2: mod_base = OTHER; note = 2'-O-methyladenosine-3'-phosphate
  modified_base 3: mod_base = OTHER; note = 2'-O-methylcytidine-3'-phosphate
  modified_base 4: mod_base = OTHER; note = 2'-O-methyluridine-3'-phosphate
  modified_base 5: mod_base = OTHER; note = 2'-O-methylguanosine-3'-phosphate
  modified_base 6: mod_base = OTHER; note = 2'-O-methyladenosine-3'-phosphate
  modified_base 7: mod_base = OTHER; note = 2'-deoxy-2'-fluoroguanosine-3'-phosphate
  modified_base 8: mod_base = OTHER; note = 2'-O-methyluridine-3'-phosphate
  modified_base 9: mod_base = OTHER; note = 2'-deoxy-2'-fluoroadenosine-3'-phosphate
  modified_base 10: mod_base = OTHER; note = 2'-deoxy-2'-fluoroguanosine-3'-phosphate
  modified_base 11: mod_base = OTHER; note = 2'-deoxy-2'-fluorouridine-3'-phosphate
  modified_base 12: mod_base = OTHER; note = 2'-O-methylcytidine-3'-phosphate
  modified_base 13: mod_base = OTHER; note = 2'-O-methyluridine-3'-phosphate
  modified_base 14: mod_base = OTHER; note = 2'-O-methyluridine-3'-phosphate
  modified_base 15: mod_base = OTHER; note = 2'-O-methyladenosine-3'-phosphate
  modified_base 16: mod_base = OTHER; note = 2'-O-methyluridine-3'-phosphate
  modified_base 17: mod_base = OTHER; note = 2'-O-methyladenosine-3'-phosphate
  modified_base 18: mod_base = OTHER; note = 2'-O-methyluridine-3'-phosphate
  modified_base 19: mod_base = OTHER; note = 2'-O-methyluridine-3'-phosphate
  modified_base 20: mod_base = OTHER; note = 2'-O-methyluridine-3'-phosphate
  modified_base 21: mod_base = OTHER; note = 2'-O-methyladenosine
aactgagtagtcttatattta

SEQ ID NO: 4041 - RNA, 21 nt, synthetic construct
  source 1..21: mol_type = other RNA
  modified_base 1: mod_base = OTHER; note = 2'-O-methyladenosine-3'-phosphate
  modified_base 2: mod_base = OTHER; note = 2'-O-methylcytidine-3'-phosphate
  modified_base 3: mod_base = OTHER; note = 2'-O-methyluridine-3'-phosphate
  modified_base 4: mod_base = OTHER; note = 2'-O-methylguanosine-3'-phosphate
  modified_base 5: mod_base = OTHER; note = 2'-O-methyladenosine-3'-phosphate
  modified_base 6: mod_base = OTHER; note = 2'-O-methylguanosine-3'-phosphate
  modified_base 7: mod_base = OTHER; note = 2'-deoxy-2'-fluorouridine-3'-phosphate
  modified_base 8: mod_base = OTHER; note = 2'-O-methyladenosine-3'-phosphate
  modified_base 9: mod_base = OTHER; note = 2'-deoxy-2'-fluoroguanosine-3'-phosphate
  modified_base 10: mod_base = OTHER; note = 2'-deoxy-2'-fluorouridine-3'-phosphate
  modified_base 11: mod_base = OTHER; note = 2'-deoxy-2'-fluorocytidine-3'-phosphate
  modified_base 12: mod_base = OTHER; note = 2'-O-methyluridine-3'-phosphate
  modified_base 13: mod_base = OTHER; note = 2'-O-methyluridine-3'-phosphate
  modified_base 14: mod_base = OTHER; note = 2'-O-methyladenosine-3'-phosphate
  modified_base 15: mod_base = OTHER; note = 2'-O-methyluridine-3'-phosphate
  modified_base 16: mod_base = OTHER; note = 2'-O-methyladenosine-3'-phosphate
  modified_base 17: mod_base = OTHER; note = 2'-O-methyluridine-3'-phosphate
  modified_base 18: mod_base = OTHER; note = 2'-O-methyluridine-3'-phosphate
  modified_base 19: mod_base = OTHER; note = 2'-O-methyluridine-3'-phosphate
  modified_base 20: mod_base = OTHER; note = 2'-O-methylcytidine-3'-phosphate
  modified_base 21: mod_base = OTHER; note = 2'-O-methyladenosine
actgagtagtcttatatttca

SEQ ID NO: 4042 - RNA, 21 nt, synthetic construct
  source 1..21: mol_type = other RNA
  modified_base 1: mod_base = OTHER; note = 2'-O-methylcytidine-3'-phosphate
  modified_base 2: mod_base = OTHER; note = 2'-O-methyluridine-3'-phosphate
  modified_base 3: mod_base = OTHER; note = 2'-O-methylguanosine-3'-phosphate
  modified_base 4: mod_base = OTHER; note = 2'-O-methyladenosine-3'-phosphate
  modified_base 5: mod_base = OTHER; note = 2'-O-methylguanosine-3'-phosphate
  modified_base 6: mod_base = OTHER; note = 2'-O-methyluridine-3'-phosphate
  modified_base 7: mod_base = OTHER; note = 2'-deoxy-2'-fluoroadenosine-3'-phosphate
  modified_base 8: mod_base = OTHER; note = 2'-O-methylguanosine-3'-phosphate
  modified_base 9: mod_base = OTHER; note = 2'-deoxy-2'-fluorouridine-3'-phosphate
  modified_base 10: mod_base = OTHER; note = 2'-deoxy-2'-fluorocytidine-3'-phosphate
  modified_base 11: mod_base = OTHER; note = 2'-deoxy-2'-fluorouridine-3'-phosphate
  modified_base 12: mod_base = OTHER; note = 2'-O-methyluridine-3'-phosphate
  modified_base 13: mod_base = OTHER; note = 2'-O-methyladenosine-3'-phosphate
  modified_base 14: mod_base = OTHER; note = 2'-O-methyluridine-3'-phosphate
  modified_base 15: mod_base = OTHER; note = 2'-O-methyladenosine-3'-phosphate
  modified_base 16: mod_base = OTHER; note = 2'-O-methyluridine-3'-phosphate
  modified_base 17: mod_base = OTHER; note = 2'-O-methyluridine-3'-phosphate
  modified_base 18: mod_base = OTHER; note = 2'-O-methyluridine-3'-phosphate
  modified_base 19: mod_base = OTHER; note = 2'-O-methylcytidine-3'-phosphate
  modified_base 20: mod_base = OTHER; note = 2'-O-methyladenosine-3'-phosphate
  modified_base 21: mod_base = OTHER; note = 2'-O-methyladenosine
ctgagtagtcttatatttcaa

SEQ ID NO: 4043 - RNA, 21 nt, synthetic construct
  source 1..21: mol_type = other RNA
  modified_base 1: mod_base = OTHER; note = 2'-O-methyluridine-3'-phosphate
  modified_base 2: mod_base = OTHER; note = 2'-O-methylguanosine-3'-phosphate
  modified_base 3: mod_base = OTHER; note = 2'-O-methyladenosine-3'-phosphate
  modified_base 4: mod_base = OTHER; note = 2'-O-methylguanosine-3'-phosphate
  modified_base 5: mod_base = OTHER; note = 2'-O-methyluridine-3'-phosphate
  modified_base 6: mod_base = OTHER; note = 2'-O-methyladenosine-3'-phosphate
  modified_base 7: mod_base = OTHER; note = 2'-deoxy-2'-fluoroguanosine-3'-phosphate
  modified_base 8: mod_base = OTHER; note = 2'-O-methyluridine-3'-phosphate
  modified_base 9: mod_base = OTHER; note = 2'-deoxy-2'-fluorocytidine-3'-phosphate
  modified_base 10: mod_base = OTHER; note = 2'-deoxy-2'-fluorouridine-3'-phosphate
  modified_base 11: mod_base = OTHER; note = 2'-deoxy-2'-fluorouridine-3'-phosphate
  modified_base 12: mod_base = OTHER; note = 2'-O-methyladenosine-3'-phosphate
  modified_base 13: mod_base = OTHER; note = 2'-O-methyluridine-3'-phosphate
  modified_base 14: mod_base = OTHER; note = 2'-O-methyladenosine-3'-phosphate
  modified_base 15: mod_base = OTHER; note = 2'-O-methyluridine-3'-phosphate
  modified_base 16: mod_base = OTHER; note = 2'-O-methyluridine-3'-phosphate
  modified_base 17: mod_base = OTHER; note = 2'-O-methyluridine-3'-phosphate
  modified_base 18: mod_base = OTHER; note = 2'-O-methylcytidine-3'-phosphate
  modified_base 19: mod_base = OTHER; note = 2'-O-methyladenosine-3'-phosphate
  modified_base 20: mod_base = OTHER; note = 2'-O-methyladenosine-3'-phosphate
  modified_base 21: mod_base = OTHER; note = 2'-O-methyladenosine
tgagtagtcttatatttcaaa

SEQ ID NO: 4044 - RNA, 21 nt, synthetic construct
  source 1..21: mol_type = other RNA
  modified_base 1: mod_base = OTHER; note = 2'-O-methylguanosine-3'-phosphate
  modified_base 2: mod_base = OTHER; note = 2'-O-methyladenosine-3'-phosphate
  modified_base 3: mod_base = OTHER; note = 2'-O-methylguanosine-3'-phosphate
  modified_base 4: mod_base = OTHER; note = 2'-O-methyluridine-3'-phosphate
  modified_base 5: mod_base = OTHER; note = 2'-O-methyladenosine-3'-phosphate
  modified_base 6: mod_base = OTHER; note = 2'-O-methylguanosine-3'-phosphate
  modified_base 7: mod_base = OTHER; note = 2'-deoxy-2'-fluorouridine-3'-phosphate
  modified_base 8: mod_base = OTHER; note = 2'-O-methylcytidine-3'-phosphate
  modified_base 9: mod_base = OTHER; note = 2'-deoxy-2'-fluorouridine-3'-phosphate
  modified_base 10: mod_base = OTHER; note = 2'-deoxy-2'-fluorouridine-3'-phosphate
  modified_base 11: mod_base = OTHER; note = 2'-deoxy-2'-fluoroadenosine-3'-phosphate
  modified_base 12: mod_base = OTHER; note = 2'-O-methyluridine-3'-phosphate
  modified_base 13: mod_base = OTHER; note = 2'-O-methyladenosine-3'-phosphate
  modified_base 14: mod_base = OTHER; note = 2'-O-methyluridine-3'-phosphate
  modified_base 15: mod_base = OTHER; note = 2'-O-methyluridine-3'-phosphate
  modified_base 16: mod_base = OTHER; note = 2'-O-methyluridine-3'-phosphate
  modified_base 17: mod_base = OTHER; note = 2'-O-methylcytidine-3'-phosphate
  modified_base 18: mod_base = OTHER; note = 2'-O-methyladenosine-3'-phosphate
  modified_base 19: mod_base = OTHER; note = 2'-O-methyladenosine-3'-phosphate
  modified_base 20: mod_base = OTHER; note = 2'-O-methyluridine-3'-phosphate
  modified_base 21: mod_base = OTHER; note = 2'-O-methyladenosine
gagtagtcttatatttcaata

SEQ ID NO: 4045 - RNA, 21 nt, synthetic construct
  source 1..21: mol_type = other RNA
  modified_base 1: mod_base = OTHER; note = 2'-O-methyluridine-3'-phosphate
  modified_base 2: mod_base = OTHER; note = 2'-O-methyluridine-3'-phosphate
  modified_base 3: mod_base = OTHER; note = 2'-O-methylcytidine-3'-phosphate
  modified_base 4: mod_base = OTHER; note = 2'-O-methylcytidine-3'-phosphate
  modified_base 5: mod_base = OTHER; note = 2'-O-methyluridine-3'-phosphate
  modified_base 6: mod_base = OTHER; note = 2'-O-methyluridine-3'-phosphate
  modified_base 7: mod_base = OTHER; note = 2'-deoxy-2'-fluorouridine-3'-phosphate
  modified_base 8: mod_base = OTHER; note = 2'-O-methyladenosine-3'-phosphate
  modified_base 9: mod_base = OTHER; note = 2'-deoxy-2'-fluorocytidine-3'-phosphate
  modified_base 10: mod_base = OTHER; note = 2'-deoxy-2'-fluorouridine-3'-phosphate
  modified_base 11: mod_base = OTHER; note = 2'-deoxy-2'-fluorocytidine-3'-phosphate
  modified_base 12: mod_base = OTHER; note = 2'-O-methyluridine-3'-phosphate
  modified_base 13: mod_base = OTHER; note = 2'-O-methyluridine-3'-phosphate
  modified_base 14: mod_base = OTHER; note = 2'-O-methyladenosine-3'-phosphate
  modified_base 15: mod_base = OTHER; note = 2'-O-methyladenosine-3'-phosphate
  modified_base 16: mod_base = OTHER; note = 2'-O-methylcytidine-3'-phosphate
  modified_base 17: mod_base = OTHER; note = 2'-O-methyladenosine-3'-phosphate
  modified_base 18: mod_base = OTHER; note = 2'-O-methylguanosine-3'-phosphate
  modified_base 19: mod_base = OTHER; note = 2'-O-methylguanosine-3'-phosphate
  modified_base 20: mod_base = OTHER; note = 2'-O-methyladenosine-3'-phosphate
  modified_base 21: mod_base = OTHER; note = 2'-O-methyladenosine
ttcctttactcttaacaggaa

SEQ ID NO: 4046 - RNA, 21 nt, synthetic construct
  source 1..21: mol_type = other RNA
  modified_base 1: mod_base = OTHER; note = 2'-O-methyluridine-3'-phosphate
  modified_base 2: mod_base = OTHER; note = 2'-O-methylcytidine-3'-phosphate
  modified_base 3: mod_base = OTHER; note = 2'-O-methylcytidine-3'-phosphate
  modified_base 4: mod_base = OTHER; note = 2'-O-methyluridine-3'-phosphate
  modified_base 5: mod_base = OTHER; note = 2'-O-methyluridine-3'-phosphate
  modified_base 6: mod_base = OTHER; note = 2'-O-methyluridine-3'-phosphate
  modified_base 7: mod_base = OTHER; note = 2'-deoxy-2'-fluoroadenosine-3'-phosphate
  modified_base 8: mod_base = OTHER; note = 2'-O-methylcytidine-3'-phosphate
  modified_base 9: mod_base = OTHER; note = 2'-deoxy-2'-fluorouridine-3'-phosphate
  modified_base 10: mod_base = OTHER; note = 2'-deoxy-2'-fluorocytidine-3'-phosphate
  modified_base 11: mod_base = OTHER; note = 2'-deoxy-2'-fluorouridine-3'-phosphate
  modified_base 12: mod_base = OTHER; note = 2'-O-methyluridine-3'-phosphate
  modified_base 13: mod_base = OTHER; note = 2'-O-methyladenosine-3'-phosphate
  modified_base 14: mod_base = OTHER; note = 2'-O-methyladenosine-3'-phosphate
  modified_base 15: mod_base = OTHER; note = 2'-O-methylcytidine-3'-phosphate
  modified_base 16: mod_base = OTHER; note = 2'-O-methyladenosine-3'-phosphate
  modified_base 17: mod_base = OTHER; note = 2'-O-methylguanosine-3'-phosphate
  modified_base 18: mod_base = OTHER; note = 2'-O-methylguanosine-3'-phosphate
  modified_base 19: mod_base = OTHER; note = 2'-O-methyladenosine-3'-phosphate
  modified_base 20: mod_base = OTHER; note = 2'-O-methyluridine-3'-phosphate
  modified_base 21: mod_base = OTHER; note = 2'-O-methyladenosine
tcctttactcttaacaggata

SEQ ID NO: 4047 - RNA, 21 nt, synthetic construct
  source 1..21: mol_type = other RNA
  modified_base 1: mod_base = OTHER; note = 2'-O-methylcytidine-3'-phosphate
  modified_base 2: mod_base = OTHER; note = 2'-O-methylcytidine-3'-phosphate
  modified_base 3: mod_base = OTHER; note = 2'-O-methyluridine-3'-phosphate
  modified_base 4: mod_base = OTHER; note = 2'-O-methyluridine-3'-phosphate
  modified_base 5: mod_base = OTHER; note = 2'-O-methyluridine-3'-phosphate
  modified_base 6: mod_base = OTHER; note = 2'-O-methyladenosine-3'-phosphate
  modified_base 7: mod_base = OTHER; note = 2'-deoxy-2'-fluorocytidine-3'-phosphate
  modified_base 8: mod_base = OTHER; note = 2'-O-methyluridine-3'-phosphate
  modified_base 9: mod_base = OTHER; note = 2'-deoxy-2'-fluorocytidine-3'-phosphate
  modified_base 10: mod_base = OTHER; note = 2'-deoxy-2'-fluorouridine-3'-phosphate
  modified_base 11: mod_base = OTHER; note = 2'-deoxy-2'-fluorouridine-3'-phosphate
  modified_base 12: mod_base = OTHER; note = 2'-O-methyladenosine-3'-phosphate
  modified_base 13: mod_base = OTHER; note = 2'-O-methyladenosine-3'-phosphate
  modified_base 14: mod_base = OTHER; note = 2'-O-methylcytidine-3'-phosphate
  modified_base 15: mod_base = OTHER; note = 2'-O-methyladenosine-3'-phosphate
  modified_base 16: mod_base = OTHER; note = 2'-O-methylguanosine-3'-phosphate
  modified_base 17: mod_base = OTHER; note = 2'-O-methylguanosine-3'-phosphate
  modified_base 18: mod_base = OTHER; note = 2'-O-methyladenosine-3'-phosphate
  modified_base 19: mod_base = OTHER; note = 2'-O-methyluridine-3'-phosphate
  modified_base 20: mod_base = OTHER; note = 2'-O-methyluridine-3'-phosphate
  modified_base 21: mod_base = OTHER; note = 2'-O-methyladenosine
cctttactcttaacaggatta

SEQ ID NO: 4048 - RNA, 21 nt, synthetic construct
  source 1..21: mol_type = other RNA
  modified_base 1: mod_base = OTHER; note = 2'-O-methylcytidine-3'-phosphate
  modified_base 2: mod_base = OTHER; note = 2'-O-methyluridine-3'-phosphate
  modified_base 3: mod_base = OTHER; note = 2'-O-methyluridine-3'-phosphate
  modified_base 4: mod_base = OTHER; note = 2'-O-methyluridine-3'-phosphate
  modified_base 5: mod_base = OTHER; note = 2'-O-methyladenosine-3'-phosphate
  modified_base 6: mod_base = OTHER; note = 2'-O-methylcytidine-3'-phosphate
  modified_base 7: mod_base = OTHER; note = 2'-deoxy-2'-fluorouridine-3'-phosphate
  modified_base 8: mod_base = OTHER; note = 2'-O-methylcytidine-3'-phosphate
  modified_base 9: mod_base = OTHER; note = 2'-deoxy-2'-fluorouridine-3'-phosphate
  modified_base 10: mod_base = OTHER; note = 2'-deoxy-2'-fluorouridine-3'-phosphate
  modified_base 11: mod_base = OTHER; note = 2'-deoxy-2'-fluoroadenosine-3'-phosphate
  modified_base 12: mod_base = OTHER; note = 2'-O-methyladenosine-3'-phosphate
  modified_base 13: mod_base = OTHER; note = 2'-O-methylcytidine-3'-phosphate
  modified_base 14: mod_base = OTHER; note = 2'-O-methyladenosine-3'-phosphate
  modified_base 15: mod_base = OTHER; note = 2'-O-methylguanosine-3'-phosphate
  modified_base 16: mod_base = OTHER; note = 2'-O-methylguanosine-3'-phosphate
  modified_base 17: mod_base = OTHER; note = 2'-O-methyladenosine-3'-phosphate
  modified_base 18: mod_base = OTHER; note = 2'-O-methyluridine-3'-phosphate
  modified_base 19: mod_base = OTHER; note = 2'-O-methyluridine-3'-phosphate
  modified_base 20: mod_base = OTHER; note = 2'-O-methyladenosine-3'-phosphate
  modified_base 21: mod_base = OTHER; note = 2'-O-methyladenosine
ctttactcttaacaggattaa

SEQ ID NO: 4049 - RNA, 21 nt, synthetic construct
  source 1..21: mol_type = other RNA
  modified_base 1: mod_base = OTHER; note = 2'-O-methyluridine-3'-phosphate
  modified_base 2: mod_base = OTHER; note = 2'-O-methyluridine-3'-phosphate
  modified_base 3: mod_base = OTHER; note = 2'-O-methyluridine-3'-phosphate
  modified_base 4: mod_base = OTHER; note = 2'-O-methyladenosine-3'-phosphate
  modified_base 5: mod_base = OTHER; note = 2'-O-methylcytidine-3'-phosphate
  modified_base 6: mod_base = OTHER; note = 2'-O-methyluridine-3'-phosphate
  modified_base 7: mod_base = OTHER; note = 2'-deoxy-2'-fluorocytidine-3'-phosphate
  modified_base 8: mod_base = OTHER; note = 2'-O-methyluridine-3'-phosphate
  modified_base 9: mod_base = OTHER; note = 2'-deoxy-2'-fluorouridine-3'-phosphate
  modified_base 10: mod_base = OTHER; note = 2'-deoxy-2'-fluoroadenosine-3'-phosphate
  modified_base 11: mod_base = OTHER; note = 2'-deoxy-2'-fluoroadenosine-3'-phosphate
  modified_base 12: mod_base = OTHER; note = 2'-O-methylcytidine-3'-phosphate
  modified_base 13: mod_base = OTHER; note = 2'-O-methyladenosine-3'-phosphate
  modified_base 14: mod_base = OTHER; note = 2'-O-methylguanosine-3'-phosphate
  modified_base 15: mod_base = OTHER; note = 2'-O-methylguanosine-3'-phosphate
  modified_base 16: mod_base = OTHER; note = 2'-O-methyladenosine-3'-phosphate
  modified_base 17: mod_base = OTHER; note = 2'-O-methyluridine-3'-phosphate
  modified_base 18: mod_base = OTHER; note = 2'-O-methyluridine-3'-phosphate
  modified_base 19: mod_base = OTHER; note = 2'-O-methyladenosine-3'-phosphate
  modified_base 20: mod_base = OTHER; note = 2'-O-methyluridine-3'-phosphate
  modified_base 21: mod_base = OTHER; note = 2'-O-methyladenosine
tttactcttaacaggattata

SEQ ID NO: 4050 - RNA, 21 nt, synthetic construct
  source 1..21: mol_type = other RNA
  modified_base 1: mod_base = OTHER; note = 2'-O-methyluridine-3'-phosphate
  modified_base 2: mod_base = OTHER; note = 2'-O-methyluridine-3'-phosphate
  modified_base 3: mod_base = OTHER; note = 2'-O-methyladenosine-3'-phosphate
  modified_base 4: mod_base = OTHER; note = 2'-O-methylcytidine-3'-phosphate
  modified_base 5: mod_base = OTHER; note = 2'-O-methyluridine-3'-phosphate
  modified_base 6: mod_base = OTHER; note = 2'-O-methylcytidine-3'-phosphate
  modified_base 7: mod_base = OTHER; note = 2'-deoxy-2'-fluorouridine-3'-phosphate
  modified_base 8: mod_base = OTHER; note = 2'-O-methyluridine-3'-phosphate
  modified_base 9: mod_base = OTHER; note = 2'-deoxy-2'-fluoroadenosine-3'-phosphate
  modified_base 10: mod_base = OTHER; note = 2'-deoxy-2'-fluoroadenosine-3'-phosphate
  modified_base 11: mod_base = OTHER; note = 2'-deoxy-2'-fluorocytidine-3'-phosphate
  modified_base 12: mod_base = OTHER; note = 2'-O-methyladenosine-3'-phosphate
  modified_base 13: mod_base = OTHER; note = 2'-O-methylguanosine-3'-phosphate
  modified_base 14: mod_base = OTHER; note = 2'-O-methylguanosine-3'-phosphate
  modified_base 15: mod_base = OTHER; note = 2'-O-methyladenosine-3'-phosphate
  modified_base 16: mod_base = OTHER; note = 2'-O-methyluridine-3'-phosphate
  modified_base 17: mod_base = OTHER; note = 2'-O-methyluridine-3'-phosphate
  modified_base 18: mod_base = OTHER; note = 2'-O-methyladenosine-3'-phosphate
  modified_base 19: mod_base = OTHER; note = 2'-O-methyluridine-3'-phosphate
  modified_base 20: mod_base = OTHER; note = 2'-O-methyladenosine-3'-phosphate
  modified_base 21: mod_base = OTHER; note = 2'-O-methyladenosine
ttactcttaacaggattataa

SEQ ID NO: 4051 - RNA, 21 nt, synthetic construct
  source 1..21: mol_type = other RNA
  modified_base 1: mod_base = OTHER; note = 2'-O-methylcytidine-3'-phosphate
  modified_base 2: mod_base = OTHER; note = 2'-O-methyluridine-3'-phosphate
  modified_base 3: mod_base = OTHER; note = 2'-O-methyluridine-3'-phosphate
  modified_base 4: mod_base = OTHER; note = 2'-O-methyladenosine-3'-phosphate
  modified_base 5: mod_base = OTHER; note = 2'-O-methyladenosine-3'-phosphate
  modified_base 6: mod_base = OTHER; note = 2'-O-methylcytidine-3'-phosphate
  modified_base 7: mod_base = OTHER; note = 2'-deoxy-2'-fluoroadenosine-3'-phosphate
  modified_base 8: mod_base = OTHER; note = 2'-O-methylguanosine-3'-phosphate
  modified_base 9: mod_base = OTHER; note = 2'-deoxy-2'-fluoroguanosine-3'-phosphate
  modified_base 10: mod_base = OTHER; note = 2'-deoxy-2'-fluoroadenosine-3'-phosphate
  modified_base 11: mod_base = OTHER; note = 2'-deoxy-2'-fluorouridine-3'-phosphate
  modified_base 12: mod_base = OTHER; note = 2'-O-methyluridine-3'-phosphate
  modified_base 13: mod_base = OTHER; note = 2'-O-methyladenosine-3'-phosphate
  modified_base 14: mod_base = OTHER; note = 2'-O-methyluridine-3'-phosphate
  modified_base 15: mod_base = OTHER; note = 2'-O-methyladenosine-3'-phosphate
  modified_base 16: mod_base = OTHER; note = 2'-O-methyluridine-3'-phosphate
  modified_base 17: mod_base = OTHER; note = 2'-O-methyladenosine-3'-phosphate
  modified_base 18: mod_base = OTHER; note = 2'-O-methyluridine-3'-phosphate
  modified_base 19: mod_base = OTHER; note = 2'-O-methyladenosine-3'-phosphate
  modified_base 20: mod_base = OTHER; note = 2'-O-methylguanosine-3'-phosphate
  modified_base 21: mod_base = OTHER; note = 2'-O-methyladenosine
cttaacaggattatatataga

SEQ ID NO: 4052 - RNA, 21 nt, synthetic construct
  source 1..21: mol_type = other RNA
  modified_base 1: mod_base = OTHER; note = 2'-O-methyladenosine-3'-phosphate
  modified_base 2: mod_base = OTHER; note = 2'-O-methylguanosine-3'-phosphate
  modified_base 3: mod_base = OTHER; note = 2'-O-methylguanosine-3'-phosphate
  modified_base 4: mod_base = OTHER; note = 2'-O-methyladenosine-3'-phosphate
  modified_base 5: mod_base = OTHER; note = 2'-O-methyluridine-3'-phosphate
  modified_base 6: mod_base = OTHER; note = 2'-O-methyluridine-3'-phosphate
  modified_base 7: mod_base = OTHER; note = 2'-deoxy-2'-fluoroadenosine-3'-phosphate
  modified_base 8: mod_base = OTHER; note = 2'-O-methyluridine-3'-phosphate
  modified_base 9: mod_base = OTHER; note = 2'-deoxy-2'-fluoroadenosine-3'-phosphate
  modified_base 10: mod_base = OTHER; note = 2'-deoxy-2'-fluorouridine-3'-phosphate
  modified_base 11: mod_base = OTHER; note = 2'-deoxy-2'-fluoroadenosine-3'-phosphate
  modified_base 12: mod_base = OTHER; note = 2'-O-methyluridine-3'-phosphate
  modified_base 13: mod_base = OTHER; note = 2'-O-methyladenosine-3'-phosphate
  modified_base 14: mod_base = OTHER; note = 2'-O-methylguanosine-3'-phosphate
  modified_base 15: mod_base = OTHER; note = 2'-O-methyladenosine-3'-phosphate
  modified_base 16: mod_base = OTHER; note = 2'-O-methyladenosine-3'-phosphate
  modified_base 17: mod_base = OTHER; note = 2'-O-methylcytidine-3'-phosphate
  modified_base 18: mod_base = OTHER; note = 2'-O-methyladenosine-3'-phosphate
  modified_base 19: mod_base = OTHER; note = 2'-O-methyluridine-3'-phosphate
  modified_base 20: mod_base = OTHER; note = 2'-O-methylguanosine-3'-phosphate
  modified_base 21: mod_base = OTHER; note = 2'-O-methyladenosine
aggattatatatagaacatga

SEQ ID NO: 4053 - RNA, 21 nt, synthetic construct
  source 1..21: mol_type = other RNA
  modified_base 1: mod_base = OTHER; note = 2'-O-methylcytidine-3'-phosphate
  modified_base 2: mod_base = OTHER; note = 2'-O-methyladenosine-3'-phosphate
  modified_base 3: mod_base = OTHER; note = 2'-O-methyluridine-3'-phosphate
  modified_base 4: mod_base = OTHER; note = 2'-O-methylguanosine-3'-phosphate
  modified_base 5: mod_base = OTHER; note = 2'-O-methylcytidine-3'-phosphate
  modified_base 6: mod_base = OTHER; note = 2'-O-methyluridine-3'-phosphate
  modified_base 7: mod_base = OTHER; note = 2'-deoxy-2'-fluorocytidine-3'-phosphate
  modified_base 8: mod_base = OTHER; note = 2'-O-methyladenosine-3'-phosphate
  modified_base 9: mod_base = OTHER; note = 2'-deoxy-2'-fluorocytidine-3'-phosphate
  modified_base 10: mod_base = OTHER; note = 2'-deoxy-2'-fluorouridine-3'-phosphate
  modified_base 11: mod_base = OTHER; note = 2'-deoxy-2'-fluorouridine-3'-phosphate
  modified_base 12: mod_base = OTHER; note = 2'-O-methyladenosine-3'-phosphate
  modified_base 13: mod_base = OTHER; note = 2'-O-methylcytidine-3'-phosphate
  modified_base 14: mod_base = OTHER; note = 2'-O-methyladenosine-3'-phosphate
  modified_base 15: mod_base = OTHER; note = 2'-O-methyladenosine-3'-phosphate
  modified_base 16: mod_base = OTHER; note = 2'-O-methyladenosine-3'-phosphate
  modified_base 17: mod_base = OTHER; note = 2'-O-methyladenosine-3'-phosphate
  modified_base 18: mod_base = OTHER; note = 2'-O-methyladenosine-3'-phosphate
  modified_base 19: mod_base = OTHER; note = 2'-O-methyluridine-3'-phosphate
  modified_base 20: mod_base = OTHER; note = 2'-O-methyladenosine-3'-phosphate
  modified_base 21: mod_base = OTHER; note = 2'-O-methyladenosine
catgctcacttacaaaaataa

SEQ ID NO: 4054 - RNA, 21 nt, synthetic construct
  source 1..21: mol_type = other RNA
  modified_base 1: mod_base = OTHER; note = 2'-O-methyladenosine-3'-phosphate
  modified_base 2: mod_base = OTHER; note = 2'-O-methylcytidine-3'-phosphate
  modified_base 3: mod_base = OTHER; note = 2'-O-methyluridine-3'-phosphate
  modified_base 4: mod_base = OTHER; note = 2'-O-methyluridine-3'-phosphate
  modified_base 5: mod_base = OTHER; note = 2'-O-methyladenosine-3'-phosphate
  modified_base 6: mod_base = OTHER; note = 2'-O-methylcytidine-3'-phosphate
  modified_base 7: mod_base = OTHER; note = 2'-deoxy-2'-fluoroadenosine-3'-phosphate
  modified_base 8: mod_base = OTHER; note = 2'-O-methyladenosine-3'-phosphate
  modified_base 9: mod_base = OTHER; note = 2'-deoxy-2'-fluoroadenosine-3'-phosphate
  modified_base 10: mod_base = OTHER; note = 2'-deoxy-2'-fluoroadenosine-3'-phosphate
  modified_base 11: mod_base = OTHER; note = 2'-deoxy-2'-fluoroadenosine-3'-phosphate
  modified_base 12: mod_base = OTHER; note = 2'-O-methyluridine-3'-phosphate
  modified_base 13: mod_base = OTHER; note = 2'-O-methyladenosine-3'-phosphate
  modified_base 14: mod_base = OTHER; note = 2'-O-methylguanosine-3'-phosphate
  modified_base 15: mod_base = OTHER; note = 2'-O-methylguanosine-3'-phosphate
  modified_base 16: mod_base = OTHER; note = 2'-O-methyladenosine-3'-phosphate
  modified_base 17: mod_base = OTHER; note = 2'-O-methyluridine-3'-phosphate
  modified_base 18: mod_base = OTHER; note = 2'-O-methylguanosine-3'-phosphate
  modified_base 19: mod_base = OTHER; note = 2'-O-methyladenosine-3'-phosphate
  modified_base 20: mod_base = OTHER; note = 2'-O-methyluridine-3'-phosphate
  modified_base 21: mod_base = OTHER; note = 2'-O-methyladenosine
acttacaaaaataggatgata

SEQ ID NO: 4055 - RNA, 21 nt, synthetic construct
  source 1..21: mol_type = other RNA
  modified_base 1: mod_base = OTHER; note = 2'-O-methyladenosine-3'-phosphate
  modified_base 2: mod_base = OTHER; note = 2'-O-methyluridine-3'-phosphate
  modified_base 3: mod_base = OTHER; note = 2'-O-methyladenosine-3'-phosphate
  modified_base 4: mod_base = OTHER; note = 2'-O-methyladenosine-3'-phosphate
  modified_base 5: mod_base = OTHER; note = 2'-O-methylguanosine-3'-phosphate
  modified_base 6: mod_base = OTHER; note = 2'-O-methylguanosine-3'-phosphate
  modified_base 7: mod_base = OTHER; note = 2'-deoxy-2'-fluorocytidine-3'-phosphate
  modified_base 8: mod_base = OTHER; note = 2'-O-methyladenosine-3'-phosphate
  modified_base 9: mod_base = OTHER; note = 2'-deoxy-2'-fluoroguanosine-3'-phosphate
  modified_base 10: mod_base = OTHER; note = 2'-deoxy-2'-fluoroguanosine-3'-phosphate
  modified_base 11: mod_base = OTHER; note = 2'-deoxy-2'-fluorocytidine-3'-phosphate
  modified_base 12: mod_base = OTHER; note = 2'-O-methyluridine-3'-phosphate
  modified_base 13: mod_base = OTHER; note = 2'-O-methyluridine-3'-phosphate
  modified_base 14: mod_base = OTHER; note = 2'-O-methylcytidine-3'-phosphate
  modified_base 15: mod_base = OTHER; note = 2'-O-methyluridine-3'-phosphate
  modified_base 16: mod_base = OTHER; note = 2'-O-methyluridine-3'-phosphate
  modified_base 17: mod_base = OTHER; note = 2'-O-methylguanosine-3'-phosphate
  modified_base 18: mod_base = OTHER; note = 2'-O-methyluridine-3'-phosphate
  modified_base 19: mod_base = OTHER; note = 2'-O-methyladenosine-3'-phosphate
  modified_base 20: mod_base = OTHER; note = 2'-O-methyluridine-3'-phosphate
  modified_base 21: mod_base = OTHER; note = 2'-O-methyladenosine
ataaggcaggcttcttgtata

SEQ ID NO: 4056 - RNA, 21 nt, synthetic construct
  source 1..21: mol_type = other RNA
  modified_base 1: mod_base = OTHER; note = 2'-O-methylcytidine-3'-phosphate
  modified_base 2: mod_base = OTHER; note = 2'-O-methyladenosine-3'-phosphate
  modified_base 3: mod_base = OTHER; note = 2'-O-methylguanosine-3'-phosphate
  modified_base 4: mod_base = OTHER; note = 2'-O-methylguanosine-3'-phosphate
  modified_base 5: mod_base = OTHER; note = 2'-O-methylcytidine-3'-phosphate
  modified_base 6: mod_base = OTHER; note = 2'-O-methyluridine-3'-phosphate
  modified_base 7: mod_base = OTHER; note = 2'-deoxy-2'-fluorouridine-3'-phosphate
  modified_base 8: mod_base = OTHER; note = 2'-O-methylcytidine-3'-phosphate
  modified_base 9: mod_base = OTHER; note = 2'-deoxy-2'-fluorouridine-3'-phosphate
  modified_base 10: mod_base = OTHER; note = 2'-deoxy-2'-fluorouridine-3'-phosphate
  modified_base 11: mod_base = OTHER; note = 2'-deoxy-2'-fluoroguanosine-3'-phosphate
  modified_base 12: mod_base = OTHER; note = 2'-O-methyluridine-3'-phosphate
  modified_base 13: mod_base = OTHER; note = 2'-O-methyladenosine-3'-phosphate
  modified_base 14: mod_base = OTHER; note = 2'-O-methyluridine-3'-phosphate
  modified_base 15: mod_base = OTHER; note = 2'-O-methyladenosine-3'-phosphate
  modified_base 16: mod_base = OTHER; note = 2'-O-methyluridine-3'-phosphate
  modified_base 17: mod_base = OTHER; note = 2'-O-methyladenosine-3'-phosphate
  modified_base 18: mod_base = OTHER; note = 2'-O-methylcytidine-3'-phosphate
  modified_base 19: mod_base = OTHER; note = 2'-O-methyluridine-3'-phosphate
  modified_base 20: mod_base = OTHER; note = 2'-O-methyluridine-3'-phosphate
  modified_base 21: mod_base = OTHER; note = 2'-O-methyladenosine
caggcttcttgtatatactta

SEQ ID NO: 4057 - RNA, 21 nt, synthetic construct
  source 1..21: mol_type = other RNA
  modified_base 1: mod_base = OTHER; note = 2'-O-methyluridine-3'-phosphate
  modified_base 2: mod_base = OTHER; note = 2'-O-methyladenosine-3'-phosphate
  modified_base 3: mod_base = OTHER; note = 2'-O-methyluridine-3'-phosphate
  modified_base 4: mod_base = OTHER; note = 2'-O-methyladenosine-3'-phosphate
  modified_base 5: mod_base = OTHER; note = 2'-O-methyluridine-3'-phosphate
  modified_base 6: mod_base = OTHER; note = 2'-O-methyladenosine-3'-phosphate
  modified_base 7: mod_base = OTHER; note = 2'-deoxy-2'-fluorocytidine-3'-phosphate
  modified_base 8: mod_base = OTHER; note = 2'-O-methyluridine-3'-phosphate
  modified_base 9: mod_base = OTHER; note = 2'-deoxy-2'-fluorouridine-3'-phosphate
  modified_base 10: mod_base = OTHER; note = 2'-deoxy-2'-fluoroadenosine-3'-phosphate
  modified_base 11: mod_base = OTHER; note = 2'-deoxy-2'-fluorouridine-3'-phosphate
  modified_base 12: mod_base = OTHER; note = 2'-O-methylguanosine-3'-phosphate
  modified_base 13: mod_base = OTHER; note = 2'-O-methylcytidine-3'-phosphate
  modified_base 14: mod_base = OTHER; note = 2'-O-methyluridine-3'-phosphate
  modified_base 15: mod_base = OTHER; note = 2'-O-methylguanosine-3'-phosphate
  modified_base 16: mod_base = OTHER; note = 2'-O-methyluridine-3'-phosphate
  modified_base 17: mod_base = OTHER; note = 2'-O-methylcytidine-3'-phosphate
  modified_base 18: mod_base = OTHER; note = 2'-O-methyladenosine-3'-phosphate
  modified_base 19: mod_base = OTHER; note = 2'-O-methyladenosine-3'-phosphate
  modified_base 20: mod_base = OTHER; note = 2'-O-methyladenosine-3'-phosphate
  modified_base 21: mod_base = OTHER; note = 2'-O-methyladenosine
tatatacttatgctgtcaaaa

SEQ ID NO: 4058 - RNA, 21 nt, synthetic construct
  source 1..21: mol_type = other RNA
  modified_base 1: mod_base = OTHER; note = 2'-O-methyladenosine-3'-phosphate
  modified_base 2: mod_base = OTHER; note = 2'-O-methyluridine-3'-phosphate
  modified_base 3: mod_base = OTHER; note = 2'-O-methyladenosine-3'-phosphate
  modified_base 4: mod_base = OTHER; note = 2'-O-methyluridine-3'-phosphate
  modified_base 5: mod_base = OTHER; note = 2'-O-methyladenosine-3'-phosphate
  modified_base 6: mod_base = OTHER; note = 2'-O-methylcytidine-3'-phosphate
  modified_base 7: mod_base = OTHER; note = 2'-deoxy-2'-fluorouridine-3'-phosphate
  modified_base 8: mod_base = OTHER; note = 2'-O-methyluridine-3'-phosphate
  modified_base 9: mod_base = OTHER; note = 2'-deoxy-2'-fluoroadenosine-3'-phosphate
  modified_base 10: mod_base = OTHER; note = 2'-deoxy-2'-fluorouridine-3'-phosphate
  modified_base 11: mod_base = OTHER; note = 2'-deoxy-2'-fluoroguanosine-3'-phosphate
  modified_base 12: mod_base = OTHER; note = 2'-O-methylcytidine-3'-phosphate
  modified_base 13: mod_base = OTHER; note = 2'-O-methyluridine-3'-phosphate
  modified_base 14: mod_base = OTHER; note = 2'-O-methylguanosine-3'-phosphate
  modified_base 15: mod_base = OTHER; note = 2'-O-methyluridine-3'-phosphate
  modified_base 16: mod_base = OTHER; note = 2'-O-methylcytidine-3'-phosphate
  modified_base 17: mod_base = OTHER; note = 2'-O-methyladenosine-3'-phosphate
  modified_base 18: mod_base = OTHER; note = 2'-O-methyladenosine-3'-phosphate
  modified_base 19: mod_base = OTHER; note = 2'-O-methyladenosine-3'-phosphate
  modified_base 20: mod_base = OTHER; note = 2'-O-methyluridine-3'-phosphate
  modified_base 21: mod_base = OTHER; note = 2'-O-methyladenosine
atatacttatgctgtcaaata

SEQ ID NO: 4059 - RNA, 21 nt, synthetic construct
  source 1..21: mol_type = other RNA
  modified_base 1: mod_base = OTHER; note = 2'-O-methyluridine-3'-phosphate
  modified_base 2: mod_base = OTHER; note = 2'-O-methyladenosine-3'-phosphate
  modified_base 3: mod_base = OTHER; note = 2'-O-methyluridine-3'-phosphate
  modified_base 4: mod_base = OTHER; note = 2'-O-methyladenosine-3'-phosphate
  modified_base 5: mod_base = OTHER; note = 2'-O-methylcytidine-3'-phosphate
  modified_base 6: mod_base = OTHER; note = 2'-O-methyluridine-3'-phosphate
  modified_base 7: mod_base = OTHER; note = 2'-deoxy-2'-fluorouridine-3'-phosphate
  modified_base 8: mod_base = OTHER; note = 2'-O-methyladenosine-3'-phosphate
  modified_base 9: mod_base = OTHER; note = 2'-deoxy-2'-fluorouridine-3'-phosphate
  modified_base 10: mod_base = OTHER; note = 2'-deoxy-2'-fluoroguanosine-3'-phosphate
  modified_base 11: mod_base = OTHER; note = 2'-deoxy-2'-fluorocytidine-3'-phosphate
  modified_base 12: mod_base = OTHER; note = 2'-O-methyluridine-3'-phosphate
  modified_base 13: mod_base = OTHER; note = 2'-O-methylguanosine-3'-phosphate
  modified_base 14: mod_base = OTHER; note = 2'-O-methyluridine-3'-phosphate
  modified_base 15: mod_base = OTHER; note = 2'-O-methylcytidine-3'-phosphate
  modified_base 16: mod_base = OTHER; note = 2'-O-methyladenosine-3'-phosphate
  modified_base 17: mod_base = OTHER; note = 2'-O-methyladenosine-3'-phosphate
  modified_base 18: mod_base = OTHER; note = 2'-O-methyladenosine-3'-phosphate
  modified_base 19: mod_base = OTHER; note = 2'-O-methyluridine-3'-phosphate
  modified_base 20: mod_base = OTHER; note = 2'-O-methylguanosine-3'-phosphate
  modified_base 21: mod_base = OTHER; note = 2'-O-methyladenosine
tatacttatgctgtcaaatga

SEQ ID NO: 4060 - RNA, 21 nt, synthetic construct
  source 1..21: mol_type = other RNA
  modified_base 1: mod_base = OTHER; note = 2'-O-methyladenosine-3'-phosphate
  modified_base 2: mod_base = OTHER; note = 2'-O-methyluridine-3'-phosphate
  modified_base 3: mod_base = OTHER; note = 2'-O-methyladenosine-3'-phosphate
  modified_base 4: mod_base = OTHER; note = 2'-O-methylcytidine-3'-phosphate
  modified_base 5: mod_base = OTHER; note = 2'-O-methyluridine-3'-phosphate
  modified_base 6: mod_base = OTHER; note = 2'-O-methyluridine-3'-phosphate
  modified_base 7: mod_base = OTHER; note = 2'-deoxy-2'-fluoroadenosine-3'-phosphate
  modified_base 8: mod_base = OTHER; note = 2'-O-methyluridine-3'-phosphate
  modified_base 9: mod_base = OTHER; note = 2'-deoxy-2'-fluoroguanosine-3'-phosphate
  modified_base 10: mod_base = OTHER; note = 2'-deoxy-2'-fluorocytidine-3'-phosphate
  modified_base 11: mod_base = OTHER; note = 2'-deoxy-2'-fluorouridine-3'-phosphate
  modified_base 12: mod_base = OTHER; note = 2'-O-methylguanosine-3'-phosphate
  modified_base 13: mod_base = OTHER; note = 2'-O-methyluridine-3'-phosphate
  modified_base 14: mod_base = OTHER; note = 2'-O-methylcytidine-3'-phosphate
  modified_base 15: mod_base = OTHER; note = 2'-O-methyladenosine-3'-phosphate
  modified_base 16: mod_base = OTHER; note = 2'-O-methyladenosine-3'-phosphate
  modified_base 17: mod_base = OTHER; note = 2'-O-methyladenosine-3'-phosphate
  modified_base 18: mod_base = OTHER; note = 2'-O-methyluridine-3'-phosphate
  modified_base 19: mod_base = OTHER; note = 2'-O-methylguanosine-3'-phosphate
  modified_base 20: mod_base = OTHER; note = 2'-O-methyluridine-3'-phosphate
  modified_base 21: mod_base = OTHER; note = 2'-O-methyladenosine
atacttatgctgtcaaatgta

SEQ ID NO: 4061 - RNA, 21 nt, synthetic construct
  source 1..21: mol_type = other RNA
  modified_base 1: mod_base = OTHER; note = 2'-O-methyluridine-3'-phosphate
  modified_base 2: mod_base = OTHER; note = 2'-O-methyladenosine-3'-phosphate
  modified_base 3: mod_base = OTHER; note = 2'-O-methylcytidine-3'-phosphate
  modified_base 4: mod_base = OTHER; note = 2'-O-methyluridine-3'-phosphate
  modified_base 5: mod_base = OTHER; note = 2'-O-methyluridine-3'-phosphate
  modified_base 6: mod_base = OTHER; note = 2'-O-methyladenosine-3'-phosphate
  modified_base 7: mod_base = OTHER; note = 2'-deoxy-2'-fluorouridine-3'-phosphate
  modified_base 8: mod_base = OTHER; note = 2'-O-methylguanosine-3'-phosphate
  modified_base 9: mod_base = OTHER; note = 2'-deoxy-2'-fluorocytidine-3'-phosphate
  modified_base 10: mod_base = OTHER; note = 2'-deoxy-2'-fluorouridine-3'-phosphate
  modified_base 11: mod_base = OTHER; note = 2'-deoxy-2'-fluoroguanosine-3'-phosphate
  modified_base 12: mod_base = OTHER; note = 2'-O-methyluridine-3'-phosphate
  modified_base 13: mod_base = OTHER; note = 2'-O-methylcytidine-3'-phosphate
  modified_base 14: mod_base = OTHER; note = 2'-O-methyladenosine-3'-phosphate
  modified_base 15: mod_base = OTHER; note = 2'-O-methyladenosine-3'-phosphate
  modified_base 16: mod_base = OTHER; note = 2'-O-methyladenosine-3'-phosphate
  modified_base 17: mod_base = OTHER; note = 2'-O-methyluridine-3'-phosphate
  modified_base 18: mod_base = OTHER; note = 2'-O-methylguanosine-3'-phosphate
  modified_base 19: mod_base = OTHER; note = 2'-O-methyluridine-3'-phosphate
  modified_base 20: mod_base = OTHER; note = 2'-O-methyluridine-3'-phosphate
  modified_base 21: mod_base = OTHER; note = 2'-O-methyladenosine
tacttatgctgtcaaatgtta

SEQ ID NO: 4062 - RNA, 21 nt, synthetic construct
  source 1..21: mol_type = other RNA
  modified_base 1: mod_base = OTHER; note = 2'-O-methyladenosine-3'-phosphate
  modified_base 2: mod_base = OTHER; note = 2'-O-methylcytidine-3'-phosphate
  modified_base 3: mod_base = OTHER; note = 2'-O-methyluridine-3'-phosphate
  modified_base 4: mod_base = OTHER; note = 2'-O-methyluridine-3'-phosphate
  modified_base 5: mod_base = OTHER; note = 2'-O-methyladenosine-3'-phosphate
  modified_base 6: mod_base = OTHER; note = 2'-O-methyluridine-3'-phosphate
  modified_base 7: mod_base = OTHER; note = 2'-deoxy-2'-fluoroguanosine-3'-phosphate
  modified_base 8: mod_base = OTHER; note = 2'-O-methylcytidine-3'-phosphate
  modified_base 9: mod_base = OTHER; note = 2'-deoxy-2'-fluorouridine-3'-phosphate
  modified_base 10: mod_base = OTHER; note = 2'-deoxy-2'-fluoroguanosine-3'-phosphate
  modified_base 11: mod_base = OTHER; note = 2'-deoxy-2'-fluorouridine-3'-phosphate
  modified_base 12: mod_base = OTHER; note = 2'-O-methylcytidine-3'-phosphate
  modified_base 13: mod_base = OTHER; note = 2'-O-methyladenosine-3'-phosphate
  modified_base 14: mod_base = OTHER; note = 2'-O-methyladenosine-3'-phosphate
  modified_base 15: mod_base = OTHER; note = 2'-O-methyladenosine-3'-phosphate
  modified_base 16: mod_base = OTHER; note = 2'-O-methyluridine-3'-phosphate
  modified_base 17: mod_base = OTHER; note = 2'-O-methylguanosine-3'-phosphate
  modified_base 18: mod_base = OTHER; note = 2'-O-methyluridine-3'-phosphate
  modified_base 19: mod_base = OTHER; note = 2'-O-methyluridine-3'-phosphate
  modified_base 20: mod_base = OTHER; note = 2'-O-methyladenosine-3'-phosphate
  modified_base 21: mod_base = OTHER; note = 2'-O-methyladenosine
acttatgctgtcaaatgttaa

SEQ ID NO: 4063 - RNA, 21 nt, synthetic construct
  source 1..21: mol_type = other RNA
  modified_base 1: mod_base = OTHER; note = 2'-O-methylcytidine-3'-phosphate
  modified_base 2: mod_base = OTHER; note = 2'-O-methyluridine-3'-phosphate
  modified_base 3: mod_base = OTHER; note = 2'-O-methyluridine-3'-phosphate
  modified_base 4: mod_base = OTHER; note = 2'-O-methyladenosine-3'-phosphate
  modified_base 5: mod_base = OTHER; note = 2'-O-methyluridine-3'-phosphate
  modified_base 6: mod_base = OTHER; note = 2'-O-methylguanosine-3'-phosphate
  modified_base 7: mod_base = OTHER; note = 2'-deoxy-2'-fluorocytidine-3'-phosphate
  modified_base 8: mod_base = OTHER; note = 2'-O-methyluridine-3'-phosphate
  modified_base 9: mod_base = OTHER; note = 2'-deoxy-2'-fluoroguanosine-3'-phosphate
  modified_base 10: mod_base = OTHER; note = 2'-deoxy-2'-fluorouridine-3'-phosphate
  modified_base 11: mod_base = OTHER; note = 2'-deoxy-2'-fluorocytidine-3'-phosphate
  modified_base 12: mod_base = OTHER; note = 2'-O-methyladenosine-3'-phosphate
  modified_base 13: mod_base = OTHER; note = 2'-O-methyladenosine-3'-phosphate
  modified_base 14: mod_base = OTHER; note = 2'-O-methyladenosine-3'-phosphate
  modified_base 15: mod_base = OTHER; note = 2'-O-methyluridine-3'-phosphate
  modified_base 16: mod_base = OTHER; note = 2'-O-methylguanosine-3'-phosphate
  modified_base 17: mod_base = OTHER; note = 2'-O-methyluridine-3'-phosphate
  modified_base 18: mod_base = OTHER; note = 2'-O-methyluridine-3'-phosphate
  modified_base 19: mod_base = OTHER; note = 2'-O-methyladenosine-3'-phosphate
  modified_base 20: mod_base = OTHER; note = 2'-O-methyluridine-3'-phosphate
  modified_base 21: mod_base = OTHER; note = 2'-O-methyladenosine
cttatgctgtcaaatgttata

SEQ ID NO: 4064 - RNA, 21 nt, synthetic construct
  source 1..21: mol_type = other RNA
  modified_base 1: mod_base = OTHER; note = 2'-O-methyluridine-3'-phosphate
  modified_base 2: mod_base = OTHER; note = 2'-O-methyluridine-3'-phosphate
  modified_base 3: mod_base = OTHER; note = 2'-O-methyladenosine-3'-phosphate
  modified_base 4: mod_base = OTHER; note = 2'-O-methyluridine-3'-phosphate
  modified_base 5: mod_base = OTHER; note = 2'-O-methylguanosine-3'-phosphate
  modified_base 6: mod_base = OTHER; note = 2'-O-methylcytidine-3'-phosphate
  modified_base 7: mod_base = OTHER; note = 2'-deoxy-2'-fluorouridine-3'-phosphate
  modified_base 8: mod_base = OTHER; note = 2'-O-methylguanosine-3'-phosphate
  modified_base 9: mod_base = OTHER; note = 2'-deoxy-2'-fluorouridine-3'-phosphate
  modified_base 10: mod_base = OTHER; note = 2'-deoxy-2'-fluorocytidine-3'-phosphate
  modified_base 11: mod_base = OTHER; note = 2'-deoxy-2'-fluoroadenosine-3'-phosphate
  modified_base 12: mod_base = OTHER; note = 2'-O-methyladenosine-3'-phosphate
  modified_base 13: mod_base = OTHER; note = 2'-O-methyladenosine-3'-phosphate
  modified_base 14: mod_base = OTHER; note = 2'-O-methyluridine-3'-phosphate
  modified_base 15: mod_base = OTHER; note = 2'-O-methylguanosine-3'-phosphate
  modified_base 16: mod_base = OTHER; note = 2'-O-methyluridine-3'-phosphate
  modified_base 17: mod_base = OTHER; note = 2'-O-methyluridine-3'-phosphate
  modified_base 18: mod_base = OTHER; note = 2'-O-methyladenosine-3'-phosphate
  modified_base 19: mod_base = OTHER; note = 2'-O-methyluridine-3'-phosphate
  modified_base 20: mod_base = OTHER; note = 2'-O-methyladenosine-3'-phosphate
  modified_base 21: mod_base = OTHER; note = 2'-O-methyladenosine
ttatgctgtcaaatgttataa

SEQ ID NO: 4065 - RNA, 21 nt, synthetic construct
  source 1..21: mol_type = other RNA
  modified_base 1: mod_base = OTHER; note = 2'-O-methyluridine-3'-phosphate
  modified_base 2: mod_base = OTHER; note = 2'-O-methyladenosine-3'-phosphate
  modified_base 3: mod_base = OTHER; note = 2'-O-methyluridine-3'-phosphate
  modified_base 4: mod_base = OTHER; note = 2'-O-methylguanosine-3'-phosphate
  modified_base 5: mod_base = OTHER; note = 2'-O-methylcytidine-3'-phosphate
  modified_base 6: mod_base = OTHER; note = 2'-O-methyluridine-3'-phosphate
  modified_base 7: mod_base = OTHER; note = 2'-deoxy-2'-fluoroguanosine-3'-phosphate
  modified_base 8: mod_base = OTHER; note = 2'-O-methyluridine-3'-phosphate
  modified_base 9: mod_base = OTHER; note = 2'-deoxy-2'-fluorocytidine-3'-phosphate
  modified_base 10: mod_base = OTHER; note = 2'-deoxy-2'-fluoroadenosine-3'-phosphate
  modified_base 11: mod_base = OTHER; note = 2'-deoxy-2'-fluoroadenosine-3'-phosphate
  modified_base 12: mod_base = OTHER; note = 2'-O-methyladenosine-3'-phosphate
  modified_base 13: mod_base = OTHER; note = 2'-O-methyluridine-3'-phosphate
  modified_base 14: mod_base = OTHER; note = 2'-O-methylguanosine-3'-phosphate
  modified_base 15: mod_base = OTHER; note = 2'-O-methyluridine-3'-phosphate
  modified_base 16: mod_base = OTHER; note = 2'-O-methyluridine-3'-phosphate
  modified_base 17: mod_base = OTHER; note = 2'-O-methyladenosine-3'-phosphate
  modified_base 18: mod_base = OTHER; note = 2'-O-methyluridine-3'-phosphate
  modified_base 19: mod_base = OTHER; note = 2'-O-methyladenosine-3'-phosphate
  modified_base 20: mod_base = OTHER; note = 2'-O-methyluridine-3'-phosphate
  modified_base 21: mod_base = OTHER; note = 2'-O-methyladenosine
tatgctgtcaaatgttatata

SEQ ID NO: 4066 - RNA, 21 nt, synthetic construct
  source 1..21: mol_type = other RNA
  modified_base 1: mod_base = OTHER; note = 2'-O-methyluridine-3'-phosphate
  modified_base 2: mod_base = OTHER; note = 2'-O-methylguanosine-3'-phosphate
  modified_base 3: mod_base = OTHER; note = 2'-O-methylcytidine-3'-phosphate
  modified_base 4: mod_base = OTHER; note = 2'-O-methyluridine-3'-phosphate
  modified_base 5: mod_base = OTHER; note = 2'-O-methylguanosine-3'-phosphate
  modified_base 6: mod_base = OTHER; note = 2'-O-methyluridine-3'-phosphate
  modified_base 7: mod_base = OTHER; note = 2'-deoxy-2'-fluorocytidine-3'-phosphate
  modified_base 8: mod_base = OTHER; note = 2'-O-methyladenosine-3'-phosphate
  modified_base 9: mod_base = OTHER; note = 2'-deoxy-2'-fluoroadenosine-3'-phosphate
  modified_base 10: mod_base = OTHER; note = 2'-deoxy-2'-fluoroadenosine-3'-phosphate
  modified_base 11: mod_base = OTHER; note = 2'-deoxy-2'-fluorouridine-3'-phosphate
  modified_base 12: mod_base = OTHER; note = 2'-O-methylguanosine-3'-phosphate
  modified_base 13: mod_base = OTHER; note = 2'-O-methyluridine-3'-phosphate
  modified_base 14: mod_base = OTHER; note = 2'-O-methyluridine-3'-phosphate
  modified_base 15: mod_base = OTHER; note = 2'-O-methyladenosine-3'-phosphate
  modified_base 16: mod_base = OTHER; note = 2'-O-methyluridine-3'-phosphate
  modified_base 17: mod_base = OTHER; note = 2'-O-methyladenosine-3'-phosphate
  modified_base 18: mod_base = OTHER; note = 2'-O-methyluridine-3'-phosphate
  modified_base 19: mod_base = OTHER; note = 2'-O-methyluridine-3'-phosphate
  modified_base 20: mod_base = OTHER; note = 2'-O-methylguanosine-3'-phosphate
  modified_base 21: mod_base = OTHER; note = 2'-O-methyladenosine
tgctgtcaaatgttatattga

SEQ ID NO: 4067 - RNA, 21 nt, synthetic construct
  source 1..21: mol_type = other RNA
  modified_base 1: mod_base = OTHER; note = 2'-O-methylguanosine-3'-phosphate
  modified_base 2: mod_base = OTHER; note = 2'-O-methylcytidine-3'-phosphate
  modified_base 3: mod_base = OTHER; note = 2'-O-methyluridine-3'-phosphate
  modified_base 4: mod_base = OTHER; note = 2'-O-methylguanosine-3'-phosphate
  modified_base 5: mod_base = OTHER; note = 2'-O-methyluridine-3'-phosphate
  modified_base 6: mod_base = OTHER; note = 2'-O-methylcytidine-3'-phosphate
  modified_base 7: mod_base = OTHER; note = 2'-deoxy-2'-fluoroadenosine-3'-phosphate
  modified_base 8: mod_base = OTHER; note = 2'-O-methyladenosine-3'-phosphate
  modified_base 9: mod_base = OTHER; note = 2'-deoxy-2'-fluoroadenosine-3'-phosphate
  modified_base 10: mod_base = OTHER; note = 2'-deoxy-2'-fluorouridine-3'-phosphate
  modified_base 11: mod_base = OTHER; note = 2'-deoxy-2'-fluoroguanosine-3'-phosphate
  modified_base 12: mod_base = OTHER; note = 2'-O-methyluridine-3'-phosphate
  modified_base 13: mod_base = OTHER; note = 2'-O-methyluridine-3'-phosphate
  modified_base 14: mod_base = OTHER; note = 2'-O-methyladenosine-3'-phosphate
  modified_base 15: mod_base = OTHER; note = 2'-O-methyluridine-3'-phosphate
  modified_base 16: mod_base = OTHER; note = 2'-O-methyladenosine-3'-phosphate
  modified_base 17: mod_base = OTHER; note = 2'-O-methyluridine-3'-phosphate
  modified_base 18: mod_base = OTHER; note = 2'-O-methyluridine-3'-phosphate
  modified_base 19: mod_base = OTHER; note = 2'-O-methylguanosine-3'-phosphate
  modified_base 20: mod_base = OTHER; note = 2'-O-methyluridine-3'-phosphate
  modified_base 21: mod_base = OTHER; note = 2'-O-methyladenosine
gctgtcaaatgttatattgta

SEQ ID NO: 4068 - RNA, 21 nt, synthetic construct
  source 1..21: mol_type = other RNA
  modified_base 1: mod_base = OTHER; note = 2'-O-methylcytidine-3'-phosphate
  modified_base 2: mod_base = OTHER; note = 2'-O-methyluridine-3'-phosphate
  modified_base 3: mod_base = OTHER; note = 2'-O-methylguanosine-3'-phosphate
  modified_base 4: mod_base = OTHER; note = 2'-O-methyluridine-3'-phosphate
  modified_base 5: mod_base = OTHER; note = 2'-O-methylcytidine-3'-phosphate
  modified_base 6: mod_base = OTHER; note = 2'-O-methyladenosine-3'-phosphate
  modified_base 7: mod_base = OTHER; note = 2'-deoxy-2'-fluoroadenosine-3'-phosphate
  modified_base 8: mod_base = OTHER; note = 2'-O-methyladenosine-3'-phosphate
  modified_base 9: mod_base = OTHER; note = 2'-deoxy-2'-fluorouridine-3'-phosphate
  modified_base 10: mod_base = OTHER; note = 2'-deoxy-2'-fluoroguanosine-3'-phosphate
  modified_base 11: mod_base = OTHER; note = 2'-deoxy-2'-fluorouridine-3'-phosphate
  modified_base 12: mod_base = OTHER; note = 2'-O-methyluridine-3'-phosphate
  modified_base 13: mod_base = OTHER; note = 2'-O-methyladenosine-3'-phosphate
  modified_base 14: mod_base = OTHER; note = 2'-O-methyluridine-3'-phosphate
  modified_base 15: mod_base = OTHER; note = 2'-O-methyladenosine-3'-phosphate
  modified_base 16: mod_base = OTHER; note = 2'-O-methyluridine-3'-phosphate
  modified_base 17: mod_base = OTHER; note = 2'-O-methyluridine-3'-phosphate
  modified_base 18: mod_base = OTHER; note = 2'-O-methylguanosine-3'-phosphate
  modified_base 19: mod_base = OTHER; note = 2'-O-methyluridine-3'-phosphate
  modified_base 20: mod_base = OTHER; note = 2'-O-methyluridine-3'-phosphate
  modified_base 21: mod_base = OTHER; note = 2'-O-methyladenosine
ctgtcaaatgttatattgtta

SEQ ID NO: 4069 - RNA, 21 nt, synthetic construct
  source 1..21: mol_type = other RNA
  modified_base 1: mod_base = OTHER; note = 2'-O-methyluridine-3'-phosphate
  modified_base 2: mod_base = OTHER; note = 2'-O-methylguanosine-3'-phosphate
  modified_base 3: mod_base = OTHER; note = 2'-O-methyluridine-3'-phosphate
  modified_base 4: mod_base = OTHER; note = 2'-O-methylcytidine-3'-phosphate
  modified_base 5: mod_base = OTHER; note = 2'-O-methyladenosine-3'-phosphate
  modified_base 6: mod_base = OTHER; note = 2'-O-methyladenosine-3'-phosphate
  modified_base 7: mod_base = OTHER; note = 2'-deoxy-2'-fluoroadenosine-3'-phosphate
  modified_base 8: mod_base = OTHER; note = 2'-O-methyluridine-3'-phosphate
  modified_base 9: mod_base = OTHER; note = 2'-deoxy-2'-fluoroguanosine-3'-phosphate
  modified_base 10: mod_base = OTHER; note = 2'-deoxy-2'-fluorouridine-3'-phosphate
  modified_base 11: mod_base = OTHER; note = 2'-deoxy-2'-fluorouridine-3'-phosphate
  modified_base 12: mod_base = OTHER; note = 2'-O-methyladenosine-3'-phosphate
  modified_base 13: mod_base = OTHER; note = 2'-O-methyluridine-3'-phosphate
  modified_base 14: mod_base = OTHER; note = 2'-O-methyladenosine-3'-phosphate
  modified_base 15: mod_base = OTHER; note = 2'-O-methyluridine-3'-phosphate
  modified_base 16: mod_base = OTHER; note = 2'-O-methyluridine-3'-phosphate
  modified_base 17: mod_base = OTHER; note = 2'-O-methylguanosine-3'-phosphate
  modified_base 18: mod_base = OTHER; note = 2'-O-methyluridine-3'-phosphate
  modified_base 19: mod_base = OTHER; note = 2'-O-methyluridine-3'-phosphate
  modified_base 20: mod_base = OTHER; note = 2'-O-methyluridine-3'-phosphate
  modified_base 21: mod_base = OTHER; note = 2'-O-methyladenosine
tgtcaaatgttatattgttta

SEQ ID NO: 4070 - RNA, 21 nt, synthetic construct
  source 1..21: mol_type = other RNA
  modified_base 1: mod_base = OTHER; note = 2'-O-methyluridine-3'-phosphate
  modified_base 2: mod_base = OTHER; note = 2'-O-methyladenosine-3'-phosphate
  modified_base 3: mod_base = OTHER; note = 2'-O-methyluridine-3'-phosphate
  modified_base 4: mod_base = OTHER; note = 2'-O-methylguanosine-3'-phosphate
  modified_base 5: mod_base = OTHER; note = 2'-O-methyluridine-3'-phosphate
  modified_base 6: mod_base = OTHER; note = 2'-O-methyluridine-3'-phosphate
  modified_base 7: mod_base = OTHER; note = 2'-deoxy-2'-fluorocytidine-3'-phosphate
  modified_base 8: mod_base = OTHER; note = 2'-O-methyladenosine-3'-phosphate
  modified_base 9: mod_base = OTHER; note = 2'-deoxy-2'-fluoroguanosine-3'-phosphate
  modified_base 10: mod_base = OTHER; note = 2'-deoxy-2'-fluoroadenosine-3'-phosphate
  modified_base 11: mod_base = OTHER; note = 2'-deoxy-2'-fluoroguanosine-3'-phosphate
  modified_base 12: mod_base = OTHER; note = 2'-O-methyluridine-3'-phosphate
  modified_base 13: mod_base = OTHER; note = 2'-O-methyladenosine-3'-phosphate
  modified_base 14: mod_base = OTHER; note = 2'-O-methyluridine-3'-phosphate
  modified_base 15: mod_base = OTHER; note = 2'-O-methylcytidine-3'-phosphate
  modified_base 16: mod_base = OTHER; note = 2'-O-methyladenosine-3'-phosphate
  modified_base 17: mod_base = OTHER; note = 2'-O-methylguanosine-3'-phosphate
  modified_base 18: mod_base = OTHER; note = 2'-O-methyluridine-3'-phosphate
  modified_base 19: mod_base = OTHER; note = 2'-O-methylguanosine-3'-phosphate
  modified_base 20: mod_base = OTHER; note = 2'-O-methyluridine-3'-phosphate
  modified_base 21: mod_base = OTHER; note = 2'-O-methyladenosine
tatgttcagagtatcagtgta

SEQ ID NO: 4071 - RNA, 21 nt, synthetic construct
  source 1..21: mol_type = other RNA
  modified_base 1: mod_base = OTHER; note = 2'-O-methyladenosine-3'-phosphate
  modified_base 2: mod_base = OTHER; note = 2'-O-methyluridine-3'-phosphate
  modified_base 3: mod_base = OTHER; note = 2'-O-methylguanosine-3'-phosphate
  modified_base 4: mod_base = OTHER; note = 2'-O-methyluridine-3'-phosphate
  modified_base 5: mod_base = OTHER; note = 2'-O-methyluridine-3'-phosphate
  modified_base 6: mod_base = OTHER; note = 2'-O-methylcytidine-3'-phosphate
  modified_base 7: mod_base = OTHER; note = 2'-deoxy-2'-fluoroadenosine-3'-phosphate
  modified_base 8: mod_base = OTHER; note = 2'-O-methylguanosine-3'-phosphate
  modified_base 9: mod_base = OTHER; note = 2'-deoxy-2'-fluoroadenosine-3'-phosphate
  modified_base 10: mod_base = OTHER; note = 2'-deoxy-2'-fluoroguanosine-3'-phosphate
  modified_base 11: mod_base = OTHER; note = 2'-deoxy-2'-fluorouridine-3'-phosphate
  modified_base 12: mod_base = OTHER; note = 2'-O-methyladenosine-3'-phosphate
  modified_base 13: mod_base = OTHER; note = 2'-O-methyluridine-3'-phosphate
  modified_base 14: mod_base = OTHER; note = 2'-O-methylcytidine-3'-phosphate
  modified_base 15: mod_base = OTHER; note = 2'-O-methyladenosine-3'-phosphate
  modified_base 16: mod_base = OTHER; note = 2'-O-methylguanosine-3'-phosphate
  modified_base 17: mod_base = OTHER; note = 2'-O-methyluridine-3'-phosphate
  modified_base 18: mod_base = OTHER; note = 2'-O-methylguanosine-3'-phosphate
  modified_base 19: mod_base = OTHER; note = 2'-O-methyluridine-3'-phosphate
  modified_base 20: mod_base = OTHER; note = 2'-O-methyluridine-3'-phosphate
  modified_base 21: mod_base = OTHER; note = 2'-O-methyladenosine
atgttcagagtatcagtgtta

SEQ ID NO: 4072 - RNA, 21 nt, synthetic construct
  source 1..21: mol_type = other RNA
  modified_base 1: mod_base = OTHER; note = 2'-O-methyluridine-3'-phosphate
  modified_base 2: mod_base = OTHER; note = 2'-O-methylguanosine-3'-phosphate
  modified_base 3: mod_base = OTHER; note = 2'-O-methyluridine-3'-phosphate
  modified_base 4: mod_base = OTHER; note = 2'-O-methyluridine-3'-phosphate
  modified_base 5: mod_base = OTHER; note = 2'-O-methylcytidine-3'-phosphate
  modified_base 6: mod_base = OTHER; note = 2'-O-methyladenosine-3'-phosphate
  modified_base 7: mod_base = OTHER; note = 2'-deoxy-2'-fluoroguanosine-3'-phosphate
  modified_base 8: mod_base = OTHER; note = 2'-O-methyladenosine-3'-phosphate
  modified_base 9: mod_base = OTHER; note = 2'-deoxy-2'-fluoroguanosine-3'-phosphate
  modified_base 10: mod_base = OTHER; note = 2'-deoxy-2'-fluorouridine-3'-phosphate
  modified_base 11: mod_base = OTHER; note = 2'-deoxy-2'-fluoroadenosine-3'-phosphate
  modified_base 12: mod_base = OTHER; note = 2'-O-methyluridine-3'-phosphate
  modified_base 13: mod_base = OTHER; note = 2'-O-methylcytidine-3'-phosphate
  modified_base 14: mod_base = OTHER; note = 2'-O-methyladenosine-3'-phosphate
  modified_base 15: mod_base = OTHER; note = 2'-O-methylguanosine-3'-phosphate
  modified_base 16: mod_base = OTHER; note = 2'-O-methyluridine-3'-phosphate
  modified_base 17: mod_base = OTHER; note = 2'-O-methylguanosine-3'-phosphate
  modified_base 18: mod_base = OTHER; note = 2'-O-methyluridine-3'-phosphate
  modified_base 19: mod_base = OTHER; note = 2'-O-methyluridine-3'-phosphate
  modified_base 20: mod_base = OTHER; note = 2'-O-methylcytidine-3'-phosphate
  modified_base 21: mod_base = OTHER; note = 2'-O-methyladenosine
tgttcagagtatcagtgttca

SEQ ID NO: 4073 - RNA, 21 nt, synthetic construct
  source 1..21: mol_type = other RNA
  modified_base 1: mod_base = OTHER; note = 2'-O-methylguanosine-3'-phosphate
  modified_base 2: mod_base = OTHER; note = 2'-O-methyluridine-3'-phosphate
  modified_base 3: mod_base = OTHER; note = 2'-O-methyluridine-3'-phosphate
  modified_base 4: mod_base = OTHER; note = 2'-O-methylcytidine-3'-phosphate
  modified_base 5: mod_base = OTHER; note = 2'-O-methyladenosine-3'-phosphate
  modified_base 6: mod_base = OTHER; note = 2'-O-methylguanosine-3'-phosphate
  modified_base 7: mod_base = OTHER; note = 2'-deoxy-2'-fluoroadenosine-3'-phosphate
  modified_base 8: mod_base = OTHER; note = 2'-O-methylguanosine-3'-phosphate
  modified_base 9: mod_base = OTHER; note = 2'-deoxy-2'-fluorouridine-3'-phosphate
  modified_base 10: mod_base = OTHER; note = 2'-deoxy-2'-fluoroadenosine-3'-phosphate
  modified_base 11: mod_base = OTHER; note = 2'-deoxy-2'-fluorouridine-3'-phosphate
  modified_base 12: mod_base = OTHER; note = 2'-O-methylcytidine-3'-phosphate
  modified_base 13: mod_base = OTHER; note = 2'-O-methyladenosine-3'-phosphate
  modified_base 14: mod_base = OTHER; note = 2'-O-methylguanosine-3'-phosphate
  modified_base 15: mod_base = OTHER; note = 2'-O-methyluridine-3'-phosphate
  modified_base 16: mod_base = OTHER; note = 2'-O-methylguanosine-3'-phosphate
  modified_base 17: mod_base = OTHER; note = 2'-O-methyluridine-3'-phosphate
  modified_base 18: mod_base = OTHER; note = 2'-O-methyluridine-3'-phosphate
  modified_base 19: mod_base = OTHER; note = 2'-O-methylcytidine-3'-phosphate
  modified_base 20: mod_base = OTHER; note = 2'-O-methyluridine-3'-phosphate
  modified_base 21: mod_base = OTHER; note = 2'-O-methyladenosine
gttcagagtatcagtgttcta

SEQ ID NO: 4074 - RNA, 21 nt, synthetic construct
  source 1..21: mol_type = other RNA
  modified_base 1: mod_base = OTHER; note = 2'-O-methyluridine-3'-phosphate
  modified_base 2: mod_base = OTHER; note = 2'-O-methyluridine-3'-phosphate
  modified_base 3: mod_base = OTHER; note = 2'-O-methylcytidine-3'-phosphate
  modified_base 4: mod_base = OTHER; note = 2'-O-methyladenosine-3'-phosphate
  modified_base 5: mod_base = OTHER; note = 2'-O-methylguanosine-3'-phosphate
  modified_base 6: mod_base = OTHER; note = 2'-O-methyladenosine-3'-phosphate
  modified_base 7: mod_base = OTHER; note = 2'-deoxy-2'-fluoroguanosine-3'-phosphate
  modified_base 8: mod_base = OTHER; note = 2'-O-methyluridine-3'-phosphate
  modified_base 9: mod_base = OTHER; note = 2'-deoxy-2'-fluoroadenosine-3'-phosphate
  modified_base 10: mod_base = OTHER; note = 2'-deoxy-2'-fluorouridine-3'-phosphate
  modified_base 11: mod_base = OTHER; note = 2'-deoxy-2'-fluorocytidine-3'-phosphate
  modified_base 12: mod_base = OTHER; note = 2'-O-methyladenosine-3'-phosphate
  modified_base 13: mod_base = OTHER; note = 2'-O-methylguanosine-3'-phosphate
  modified_base 14: mod_base = OTHER; note = 2'-O-methyluridine-3'-phosphate
  modified_base 15: mod_base = OTHER; note = 2'-O-methylguanosine-3'-phosphate
  modified_base 16: mod_base = OTHER; note = 2'-O-methyluridine-3'-phosphate
  modified_base 17: mod_base = OTHER; note = 2'-O-methyluridine-3'-phosphate
  modified_base 18: mod_base = OTHER; note = 2'-O-methylcytidine-3'-phosphate
  modified_base 19: mod_base = OTHER; note = 2'-O-methyluridine-3'-phosphate
  modified_base 20: mod_base = OTHER; note = 2'-O-methyluridine-3'-phosphate
  modified_base 21: mod_base = OTHER; note = 2'-O-methyladenosine
ttcagagtatcagtgttctta

SEQ ID NO: 4075 - RNA, 21 nt, synthetic construct
  source 1..21: mol_type = other RNA
  modified_base 1: mod_base = OTHER; note = 2'-O-methyluridine-3'-phosphate
  modified_base 2: mod_base = OTHER; note = 2'-O-methylcytidine-3'-phosphate
  modified_base 3: mod_base = OTHER; note = 2'-O-methyladenosine-3'-phosphate
  modified_base 4: mod_base = OTHER; note = 2'-O-methylguanosine-3'-phosphate
  modified_base 5: mod_base = OTHER; note = 2'-O-methyladenosine-3'-phosphate
  modified_base 6: mod_base = OTHER; note = 2'-O-methylguanosine-3'-phosphate
  modified_base 7: mod_base = OTHER; note = 2'-deoxy-2'-fluorouridine-3'-phosphate
  modified_base 8: mod_base = OTHER; note = 2'-O-methyladenosine-3'-phosphate
  modified_base 9: mod_base = OTHER; note = 2'-deoxy-2'-fluorouridine-3'-phosphate
  modified_base 10: mod_base = OTHER; note = 2'-deoxy-2'-fluorocytidine-3'-phosphate
  modified_base 11: mod_base = OTHER; note = 2'-deoxy-2'-fluoroadenosine-3'-phosphate
  modified_base 12: mod_base = OTHER; note = 2'-O-methylguanosine-3'-phosphate
  modified_base 13: mod_base = OTHER; note = 2'-O-methyluridine-3'-phosphate
  modified_base 14: mod_base = OTHER; note = 2'-O-methylguanosine-3'-phosphate
  modified_base 15: mod_base = OTHER; note = 2'-O-methyluridine-3'-phosphate
  modified_base 16: mod_base = OTHER; note = 2'-O-methyluridine-3'-phosphate
  modified_base 17: mod_base = OTHER; note = 2'-O-methylcytidine-3'-phosphate
  modified_base 18: mod_base = OTHER; note = 2'-O-methyluridine-3'-phosphate
  modified_base 19: mod_base = OTHER; note = 2'-O-methyluridine-3'-phosphate
  modified_base 20: mod_base = OTHER; note = 2'-O-methyluridine-3'-phosphate
  modified_base 21: mod_base = OTHER; note = 2'-O-methyladenosine
tcagagtatcagtgttcttta

SEQ ID NO: 4076 - RNA, 21 nt, synthetic construct
  source 1..21: mol_type = other RNA
  modified_base 1: mod_base = OTHER; note = 2'-O-methylcytidine-3'-phosphate
  modified_base 2: mod_base = OTHER; note = 2'-O-methyladenosine-3'-phosphate
  modified_base 3: mod_base = OTHER; note = 2'-O-methylguanosine-3'-phosphate
  modified_base 4: mod_base = OTHER; note = 2'-O-methyladenosine-3'-phosphate
  modified_base 5: mod_base = OTHER; note = 2'-O-methylguanosine-3'-phosphate
  modified_base 6: mod_base = OTHER; note = 2'-O-methyluridine-3'-phosphate
  modified_base 7: mod_base = OTHER; note = 2'-deoxy-2'-fluoroadenosine-3'-phosphate
  modified_base 8: mod_base = OTHER; note = 2'-O-methyluridine-3'-phosphate
  modified_base 9: mod_base = OTHER; note = 2'-deoxy-2'-fluorocytidine-3'-phosphate
  modified_base 10: mod_base = OTHER; note = 2'-deoxy-2'-fluoroadenosine-3'-phosphate
  modified_base 11: mod_base = OTHER; note = 2'-deoxy-2'-fluoroguanosine-3'-phosphate
  modified_base 12: mod_base = OTHER; note = 2'-O-methyluridine-3'-phosphate
  modified_base 13: mod_base = OTHER; note = 2'-O-methylguanosine-3'-phosphate
  modified_base 14: mod_base = OTHER; note = 2'-O-methyluridine-3'-phosphate
  modified_base 15: mod_base = OTHER; note = 2'-O-methyluridine-3'-phosphate
  modified_base 16: mod_base = OTHER; note = 2'-O-methylcytidine-3'-phosphate
  modified_base 17: mod_base = OTHER; note = 2'-O-methyluridine-3'-phosphate
  modified_base 18: mod_base = OTHER; note = 2'-O-methyluridine-3'-phosphate
  modified_base 19: mod_base = OTHER; note = 2'-O-methyluridine-3'-phosphate
  modified_base 20: mod_base = OTHER; note = 2'-O-methyladenosine-3'-phosphate
  modified_base 21: mod_base = OTHER; note = 2'-O-methyladenosine
cagagtatcagtgttctttaa

SEQ ID NO: 4077 - RNA, 21 nt, synthetic construct
  source 1..21: mol_type = other RNA
  modified_base 1: mod_base = OTHER; note = 2'-O-methyladenosine-3'-phosphate
  modified_base 2: mod_base = OTHER; note = 2'-O-methylguanosine-3'-phosphate
  modified_base 3: mod_base = OTHER; note = 2'-O-methyladenosine-3'-phosphate
  modified_base 4: mod_base = OTHER; note = 2'-O-methylguanosine-3'-phosphate
  modified_base 5: mod_base = OTHER; note = 2'-O-methyluridine-3'-phosphate
  modified_base 6: mod_base = OTHER; note = 2'-O-methyladenosine-3'-phosphate
  modified_base 7: mod_base = OTHER; note = 2'-deoxy-2'-fluorouridine-3'-phosphate
  modified_base 8: mod_base = OTHER; note = 2'-O-methylcytidine-3'-phosphate
  modified_base 9: mod_base = OTHER; note = 2'-deoxy-2'-fluoroadenosine-3'-phosphate
  modified_base 10: mod_base = OTHER; note = 2'-deoxy-2'-fluoroguanosine-3'-phosphate
  modified_base 11: mod_base = OTHER; note = 2'-deoxy-2'-fluorouridine-3'-phosphate
  modified_base 12: mod_base = OTHER; note = 2'-O-methylguanosine-3'-phosphate
  modified_base 13: mod_base = OTHER; note = 2'-O-methyluridine-3'-phosphate
  modified_base 14: mod_base = OTHER; note = 2'-O-methyluridine-3'-phosphate
  modified_base 15: mod_base = OTHER; note = 2'-O-methylcytidine-3'-phosphate
  modified_base 16: mod_base = OTHER; note = 2'-O-methyluridine-3'-phosphate
  modified_base 17: mod_base = OTHER; note = 2'-O-methyluridine-3'-phosphate
  modified_base 18: mod_base = OTHER; note = 2'-O-methyluridine-3'-phosphate
  modified_base 19: mod_base = OTHER; note = 2'-O-methyladenosine-3'-phosphate
  modified_base 20: mod_base = OTHER; note = 2'-O-methylcytidine-3'-phosphate
  modified_base 21: mod_base = OTHER; note = 2'-O-methyladenosine
agagtatcagtgttctttaca

SEQ ID NO: 4078 - RNA, 21 nt, synthetic construct
  source 1..21: mol_type = other RNA
  modified_base 1: mod_base = OTHER; note = 2'-O-methylguanosine-3'-phosphate
  modified_base 2: mod_base = OTHER; note = 2'-O-methyladenosine-3'-phosphate
  modified_base 3: mod_base = OTHER; note = 2'-O-methylguanosine-3'-phosphate
  modified_base 4: mod_base = OTHER; note = 2'-O-methyluridine-3'-phosphate
  modified_base 5: mod_base = OTHER; note = 2'-O-methyladenosine-3'-phosphate
  modified_base 6: mod_base = OTHER; note = 2'-O-methyluridine-3'-phosphate
  modified_base 7: mod_base = OTHER; note = 2'-deoxy-2'-fluorocytidine-3'-phosphate
  modified_base 8: mod_base = OTHER; note = 2'-O-methyladenosine-3'-phosphate
  modified_base 9: mod_base = OTHER; note = 2'-deoxy-2'-fluoroguanosine-3'-phosphate
  modified_base 10: mod_base = OTHER; note = 2'-deoxy-2'-fluorouridine-3'-phosphate
  modified_base 11: mod_base = OTHER; note = 2'-deoxy-2'-fluoroguanosine-3'-phosphate
  modified_base 12: mod_base = OTHER; note = 2'-O-methyluridine-3'-phosphate
  modified_base 13: mod_base = OTHER; note = 2'-O-methyluridine-3'-phosphate
  modified_base 14: mod_base = OTHER; note = 2'-O-methylcytidine-3'-phosphate
  modified_base 15: mod_base = OTHER; note = 2'-O-methyluridine-3'-phosphate
  modified_base 16: mod_base = OTHER; note = 2'-O-methyluridine-3'-phosphate
  modified_base 17: mod_base = OTHER; note = 2'-O-methyluridine-3'-phosphate
  modified_base 18: mod_base = OTHER; note = 2'-O-methyladenosine-3'-phosphate
  modified_base 19: mod_base = OTHER; note = 2'-O-methylcytidine-3'-phosphate
  modified_base 20: mod_base = OTHER; note = 2'-O-methyluridine-3'-phosphate
  modified_base 21: mod_base = OTHER; note = 2'-O-methyladenosine
gagtatcagtgttctttacta

SEQ ID NO: 4079 - RNA, 21 nt, synthetic construct
  source 1..21: mol_type = other RNA
  modified_base 1: mod_base = OTHER; note = 2'-O-methyladenosine-3'-phosphate
  modified_base 2: mod_base = OTHER; note = 2'-O-methylguanosine-3'-phosphate
  modified_base 3: mod_base = OTHER; note = 2'-O-methyluridine-3'-phosphate
  modified_base 4: mod_base = OTHER; note = 2'-O-methyladenosine-3'-phosphate
  modified_base 5: mod_base = OTHER; note = 2'-O-methyluridine-3'-phosphate
  modified_base 6: mod_base = OTHER; note = 2'-O-methylcytidine-3'-phosphate
  modified_base 7: mod_base = OTHER; note = 2'-deoxy-2'-fluoroadenosine-3'-phosphate
  modified_base 8: mod_base = OTHER; note = 2'-O-methylguanosine-3'-phosphate
  modified_base 9: mod_base = OTHER; note = 2'-deoxy-2'-fluorouridine-3'-phosphate
  modified_base 10: mod_base = OTHER; note = 2'-deoxy-2'-fluoroguanosine-3'-phosphate
  modified_base 11: mod_base = OTHER; note = 2'-deoxy-2'-fluorouridine-3'-phosphate
  modified_base 12: mod_base = OTHER; note = 2'-O-methyluridine-3'-phosphate
  modified_base 13: mod_base = OTHER; note = 2'-O-methylcytidine-3'-phosphate
  modified_base 14: mod_base = OTHER; note = 2'-O-methyluridine-3'-phosphate
  modified_base 15: mod_base = OTHER; note = 2'-O-methyluridine-3'-phosphate
  modified_base 16: mod_base = OTHER; note = 2'-O-methyluridine-3'-phosphate
  modified_base 17: mod_base = OTHER; note = 2'-O-methyladenosine-3'-phosphate
  modified_base 18: mod_base = OTHER; note = 2'-O-methylcytidine-3'-phosphate
  modified_base 19: mod_base = OTHER; note = 2'-O-methyluridine-3'-phosphate
  modified_base 20: mod_base = OTHER; note = 2'-O-methylcytidine-3'-phosphate
  modified_base 21: mod_base = OTHER; note = 2'-O-methyladenosine
agtatcagtgttctttactca

SEQ ID NO: 4080 - RNA, 21 nt, synthetic construct
  source 1..21: mol_type = other RNA
  modified_base 1: mod_base = OTHER; note = 2'-O-methylguanosine-3'-phosphate
  modified_base 2: mod_base = OTHER; note = 2'-O-methyluridine-3'-phosphate
  modified_base 3: mod_base = OTHER; note = 2'-O-methyladenosine-3'-phosphate
  modified_base 4: mod_base = OTHER; note = 2'-O-methyluridine-3'-phosphate
  modified_base 5: mod_base = OTHER; note = 2'-O-methylcytidine-3'-phosphate
  modified_base 6: mod_base = OTHER; note = 2'-O-methyladenosine-3'-phosphate
  modified_base 7: mod_base = OTHER; note = 2'-deoxy-2'-fluoroguanosine-3'-phosphate
  modified_base 8: mod_base = OTHER; note = 2'-O-methyluridine-3'-phosphate
  modified_base 9: mod_base = OTHER; note = 2'-deoxy-2'-fluoroguanosine-3'-phosphate
  modified_base 10: mod_base = OTHER; note = 2'-deoxy-2'-fluorouridine-3'-phosphate
  modified_base 11: mod_base = OTHER; note = 2'-deoxy-2'-fluorouridine-3'-phosphate
  modified_base 12: mod_base = OTHER; note = 2'-O-methylcytidine-3'-phosphate
  modified_base 13: mod_base = OTHER; note = 2'-O-methyluridine-3'-phosphate
  modified_base 14: mod_base = OTHER; note = 2'-O-methyluridine-3'-phosphate
  modified_base 15: mod_base = OTHER; note = 2'-O-methyluridine-3'-phosphate
  modified_base 16: mod_base = OTHER; note = 2'-O-methyladenosine-3'-phosphate
  modified_base 17: mod_base = OTHER; note = 2'-O-methylcytidine-3'-phosphate
  modified_base 18: mod_base = OTHER; note = 2'-O-methyluridine-3'-phosphate
  modified_base 19: mod_base = OTHER; note = 2'-O-methylcytidine-3'-phosphate
  modified_base 20: mod_base = OTHER; note = 2'-O-methylcytidine-3'-phosphate
  modified_base 21: mod_base = OTHER; note = 2'-O-methyladenosine
gtatcagtgttctttactcca

SEQ ID NO: 4081 - RNA, 21 nt, synthetic construct
  source 1..21: mol_type = other RNA
  modified_base 1: mod_base = OTHER; note = 2'-O-methyluridine-3'-phosphate
  modified_base 2: mod_base = OTHER; note = 2'-O-methylcytidine-3'-phosphate
  modified_base 3: mod_base = OTHER; note = 2'-O-methyluridine-3'-phosphate
  modified_base 4: mod_base = OTHER; note = 2'-O-methyluridine-3'-phosphate
  modified_base 5: mod_base = OTHER; note = 2'-O-methyluridine-3'-phosphate
  modified_base 6: mod_base = OTHER; note = 2'-O-methyladenosine-3'-phosphate
  modified_base 7: mod_base = OTHER; note = 2'-deoxy-2'-fluorocytidine-3'-phosphate
  modified_base 8: mod_base = OTHER; note = 2'-O-methyluridine-3'-phosphate
  modified_base 9: mod_base = OTHER; note = 2'-deoxy-2'-fluorocytidine-3'-phosphate
  modified_base 10: mod_base = OTHER; note = 2'-deoxy-2'-fluorocytidine-3'-phosphate
  modified_base 11: mod_base = OTHER; note = 2'-deoxy-2'-fluorouridine-3'-phosphate
  modified_base 12: mod_base = OTHER; note = 2'-O-methyluridine-3'-phosphate
  modified_base 13: mod_base = OTHER; note = 2'-O-methyladenosine-3'-phosphate
  modified_base 14: mod_base = OTHER; note = 2'-O-methylcytidine-3'-phosphate
  modified_base 15: mod_base = OTHER; note = 2'-O-methyladenosine-3'-phosphate
  modified_base 16: mod_base = OTHER; note = 2'-O-methylguanosine-3'-phosphate
  modified_base 17: mod_base = OTHER; note = 2'-O-methyladenosine-3'-phosphate
  modified_base 18: mod_base = OTHER; note = 2'-O-methyluridine-3'-phosphate
  modified_base 19: mod_base = OTHER; note = 2'-O-methyladenosine-3'-phosphate
  modified_base 20: mod_base = OTHER; note = 2'-O-methyluridine-3'-phosphate
  modified_base 21: mod_base = OTHER; note = 2'-O-methyladenosine
tctttactccttacagatata

SEQ ID NO: 4082 - RNA, 21 nt, synthetic construct
  source 1..21: mol_type = other RNA
  modified_base 1: mod_base = OTHER; note = 2'-O-methyluridine-3'-phosphate
  modified_base 2: mod_base = OTHER; note = 2'-O-methyluridine-3'-phosphate
  modified_base 3: mod_base = OTHER; note = 2'-O-methyladenosine-3'-phosphate
  modified_base 4: mod_base = OTHER; note = 2'-O-methylcytidine-3'-phosphate
  modified_base 5: mod_base = OTHER; note = 2'-O-methyluridine-3'-phosphate
  modified_base 6: mod_base = OTHER; note = 2'-O-methylcytidine-3'-phosphate
  modified_base 7: mod_base = OTHER; note = 2'-deoxy-2'-fluorocytidine-3'-phosphate
  modified_base 8: mod_base = OTHER; note = 2'-O-methyluridine-3'-phosphate
  modified_base 9: mod_base = OTHER; note = 2'-deoxy-2'-fluorouridine-3'-phosphate
  modified_base 10: mod_base = OTHER; note = 2'-deoxy-2'-fluoroadenosine-3'-phosphate
  modified_base 11: mod_base = OTHER; note = 2'-deoxy-2'-fluorocytidine-3'-phosphate
  modified_base 12: mod_base = OTHER; note = 2'-O-methyladenosine-3'-phosphate
  modified_base 13: mod_base = OTHER; note = 2'-O-methylguanosine-3'-phosphate
  modified_base 14: mod_base = OTHER; note = 2'-O-methyladenosine-3'-phosphate
  modified_base 15: mod_base = OTHER; note = 2'-O-methyluridine-3'-phosphate
  modified_base 16: mod_base = OTHER; note = 2'-O-methyladenosine-3'-phosphate
  modified_base 17: mod_base = OTHER; note = 2'-O-methyluridine-3'-phosphate
  modified_base 18: mod_base = OTHER; note = 2'-O-methyluridine-3'-phosphate
  modified_base 19: mod_base = OTHER; note = 2'-O-methyluridine-3'-phosphate
  modified_base 20: mod_base = OTHER; note = 2'-O-methyluridine-3'-phosphate
  modified_base 21: mod_base = OTHER; note = 2'-O-methyladenosine
ttactccttacagatatttta

SEQ ID NO: 4083 - RNA, 21 nt, synthetic construct
  source 1..21: mol_type = other RNA
  modified_base 1: mod_base = OTHER; note = 2'-O-methyluridine-3'-phosphate
  modified_base 2: mod_base = OTHER; note = 2'-O-methyladenosine-3'-phosphate
  modified_base 3: mod_base = OTHER; note = 2'-O-methyladenosine-3'-phosphate
  modified_base 4: mod_base = OTHER; note = 2'-O-methyladenosine-3'-phosphate
  modified_base 5: mod_base = OTHER; note = 2'-O-methyluridine-3'-phosphate
  modified_base 6: mod_base = OTHER; note = 2'-O-methylguanosine-3'-phosphate
  modified_base 7: mod_base = OTHER; note = 2'-deoxy-2'-fluorocytidine-3'-phosphate
  modified_base 8: mod_base = OTHER; note = 2'-O-methyladenosine-3'-phosphate
  modified_base 9: mod_base = OTHER; note = 2'-deoxy-2'-fluoroguanosine-3'-phosphate
  modified_base 10: mod_base = OTHER; note = 2'-deoxy-2'-fluorocytidine-3'-phosphate
  modified_base 11: mod_base = OTHER; note = 2'-deoxy-2'-fluoroadenosine-3'-phosphate
  modified_base 12: mod_base = OTHER; note = 2'-O-methyluridine-3'-phosphate
  modified_base 13: mod_base = OTHER; note = 2'-O-methylcytidine-3'-phosphate
  modified_base 14: mod_base = OTHER; note = 2'-O-methyladenosine-3'-phosphate
  modified_base 15: mod_base = OTHER; note = 2'-O-methylcytidine-3'-phosphate
  modified_base 16: mod_base = OTHER; note = 2'-O-methyluridine-3'-phosphate
  modified_base 17: mod_base = OTHER; note = 2'-O-methyluridine-3'-phosphate
  modified_base 18: mod_base = OTHER; note = 2'-O-methyluridine-3'-phosphate
  modified_base 19: mod_base = OTHER; note = 2'-O-methylcytidine-3'-phosphate
  modified_base 20: mod_base = OTHER; note = 2'-O-methyluridine-3'-phosphate
  modified_base 21: mod_base = OTHER; note = 2'-O-methyladenosine
taaatgcagcatcactttcta

SEQ ID NO: 4084 - RNA, 21 nt, synthetic construct
  source 1..21: mol_type = other RNA
  modified_base 1: mod_base = OTHER; note = 2'-O-methylguanosine-3'-phosphate
  modified_base 2: mod_base = OTHER; note = 2'-O-methylcytidine-3'-phosphate
  modified_base 3: mod_base = OTHER; note = 2'-O-methyladenosine-3'-phosphate
  modified_base 4: mod_base = OTHER; note = 2'-O-methyluridine-3'-phosphate
  modified_base 5: mod_base = OTHER; note = 2'-O-methylcytidine-3'-phosphate
  modified_base 6: mod_base = OTHER; note = 2'-O-methyladenosine-3'-phosphate
  modified_base 7: mod_base = OTHER; note = 2'-deoxy-2'-fluorocytidine-3'-phosphate
  modified_base 8: mod_base = OTHER; note = 2'-O-methyluridine-3'-phosphate
  modified_base 9: mod_base = OTHER; note = 2'-deoxy-2'-fluorouridine-3'-phosphate
  modified_base 10: mod_base = OTHER; note = 2'-deoxy-2'-fluorouridine-3'-phosphate
  modified_base 11: mod_base = OTHER; note = 2'-deoxy-2'-fluorocytidine-3'-phosphate
  modified_base 12: mod_base = OTHER; note = 2'-O-methyluridine-3'-phosphate
  modified_base 13: mod_base = OTHER; note = 2'-O-methylguanosine-3'-phosphate
  modified_base 14: mod_base = OTHER; note = 2'-O-methyladenosine-3'-phosphate
  modified_base 15: mod_base = OTHER; note = 2'-O-methyladenosine-3'-phosphate
  modified_base 16: mod_base = OTHER; note = 2'-O-methyladenosine-3'-phosphate
  modified_base 17: mod_base = OTHER; note = 2'-O-methyladenosine-3'-phosphate
  modified_base 18: mod_base = OTHER; note = 2'-O-methyluridine-3'-phosphate
  modified_base 19: mod_base = OTHER; note = 2'-O-methyladenosine-3'-phosphate
  modified_base 20: mod_base = OTHER; note = 2'-O-methyladenosine-3'-phosphate
  modified_base 21: mod_base = OTHER; note = 2'-O-methyladenosine
gcatcactttctgaaaataaa

SEQ ID NO: 4085 - RNA, 21 nt, synthetic construct
  source 1..21: mol_type = other RNA
  modified_base 1: mod_base = OTHER; note = 2'-O-methylguanosine-3'-phosphate
  modified_base 2: mod_base = OTHER; note = 2'-O-methyladenosine-3'-phosphate
  modified_base 3: mod_base = OTHER; note = 2'-O-methylguanosine-3'-phosphate
  modified_base 4: mod_base = OTHER; note = 2'-O-methyladenosine-3'-phosphate
  modified_base 5: mod_base = OTHER; note = 2'-O-methyladenosine-3'-phosphate
  modified_base 6: mod_base = OTHER; note = 2'-O-methyladenosine-3'-phosphate
  modified_base 7: mod_base = OTHER; note = 2'-deoxy-2'-fluorocytidine-3'-phosphate
  modified_base 8: mod_base = OTHER; note = 2'-O-methyladenosine-3'-phosphate
  modified_base 9: mod_base = OTHER; note = 2'-deoxy-2'-fluorouridine-3'-phosphate
  modified_base 10: mod_base = OTHER; note = 2'-deoxy-2'-fluorouridine-3'-phosphate
  modified_base 11: mod_base = OTHER; note = 2'-deoxy-2'-fluoroadenosine-3'-phosphate
  modified_base 12: mod_base = OTHER; note = 2'-O-methyluridine-3'-phosphate
  modified_base 13: mod_base = OTHER; note = 2'-O-methyluridine-3'-phosphate
  modified_base 14: mod_base = OTHER; note = 2'-O-methyluridine-3'-phosphate
  modified_base 15: mod_base = OTHER; note = 2'-O-methylguanosine-3'-phosphate
  modified_base 16: mod_base = OTHER; note = 2'-O-methyluridine-3'-phosphate
  modified_base 17: mod_base = OTHER; note = 2'-O-methyluridine-3'-phosphate
  modified_base 18: mod_base = OTHER; note = 2'-O-methylguanosine-3'-phosphate
  modified_base 19: mod_base = OTHER; note = 2'-O-methyluridine-3'-phosphate
  modified_base 20: mod_base = OTHER; note = 2'-O-methylcytidine-3'-phosphate
  modified_base 21: mod_base = OTHER; note = 2'-O-methyladenosine
gagaaacattatttgttgtca

SEQ ID NO: 4086 - RNA, 21 nt, synthetic construct
  source 1..21: mol_type = other RNA
  modified_base 1: mod_base = OTHER; note = 2'-O-methyluridine-3'-phosphate
  modified_base 2: mod_base = OTHER; note = 2'-O-methylguanosine-3'-phosphate
  modified_base 3: mod_base = OTHER; note = 2'-O-methyluridine-3'-phosphate
  modified_base 4: mod_base = OTHER; note = 2'-O-methyluridine-3'-phosphate
  modified_base 5: mod_base = OTHER; note = 2'-O-methylguanosine-3'-phosphate
  modified_base 6: mod_base = OTHER; note = 2'-O-methyluridine-3'-phosphate
  modified_base 7: mod_base = OTHER; note = 2'-deoxy-2'-fluorocytidine-3'-phosphate
  modified_base 8: mod_base = OTHER; note = 2'-O-methyladenosine-3'-phosphate
  modified_base 9: mod_base = OTHER; note = 2'-deoxy-2'-fluoroguanosine-3'-phosphate
  modified_base 10: mod_base = OTHER; note = 2'-deoxy-2'-fluorouridine-3'-phosphate
  modified_base 11: mod_base = OTHER; note = 2'-deoxy-2'-fluoroadenosine-3'-phosphate
  modified_base 12: mod_base = OTHER; note = 2'-O-methyluridine-3'-phosphate
  modified_base 13: mod_base = OTHER; note = 2'-O-methyluridine-3'-phosphate
  modified_base 14: mod_base = OTHER; note = 2'-O-methyluridine-3'-phosphate
  modified_base 15: mod_base = OTHER; note = 2'-O-methylcytidine-3'-phosphate
  modified_base 16: mod_base = OTHER; note = 2'-O-methyladenosine-3'-phosphate
  modified_base 17: mod_base = OTHER; note = 2'-O-methylguanosine-3'-phosphate
  modified_base 18: mod_base = OTHER; note = 2'-O-methylcytidine-3'-phosphate
  modified_base 19: mod_base = OTHER; note = 2'-O-methyladenosine-3'-phosphate
  modified_base 20: mod_base = OTHER; note = 2'-O-methyluridine-3'-phosphate
  modified_base 21: mod_base = OTHER; note = 2'-O-methyladenosine
tgttgtcagtatttcagcata

SEQ ID NO: 4087 - RNA, 21 nt, synthetic construct
  source 1..21: mol_type = other RNA
  modified_base 1: mod_base = OTHER; note = 2'-O-methylguanosine-3'-phosphate
  modified_base 2: mod_base = OTHER; note = 2'-O-methyluridine-3'-phosphate
  modified_base 3: mod_base = OTHER; note = 2'-O-methyladenosine-3'-phosphate
  modified_base 4: mod_base = OTHER; note = 2'-O-methyluridine-3'-phosphate
  modified_base 5: mod_base = OTHER; note = 2'-O-methyluridine-3'-phosphate
  modified_base 6: mod_base = OTHER; note = 2'-O-methyluridine-3'-phosphate
  modified_base 7: mod_base = OTHER; note = 2'-deoxy-2'-fluorocytidine-3'-phosphate
  modified_base 8: mod_base = OTHER; note = 2'-O-methyladenosine-3'-phosphate
  modified_base 9: mod_base = OTHER; note = 2'-deoxy-2'-fluoroguanosine-3'-phosphate
  modified_base 10: mod_base = OTHER; note = 2'-deoxy-2'-fluorocytidine-3'-phosphate
  modified_base 11: mod_base = OTHER; note = 2'-deoxy-2'-fluoroadenosine-3'-phosphate
  modified_base 12: mod_base = OTHER; note = 2'-O-methyluridine-3'-phosphate
  modified_base 13: mod_base = OTHER; note = 2'-O-methylguanosine-3'-phosphate
  modified_base 14: mod_base = OTHER; note = 2'-O-methyladenosine-3'-phosphate
  modified_base 15: mod_base = OTHER; note = 2'-O-methyladenosine-3'-phosphate
  modified_base 16: mod_base = OTHER; note = 2'-O-methylcytidine-3'-phosphate
  modified_base 17: mod_base = OTHER; note = 2'-O-methyluridine-3'-phosphate
  modified_base 18: mod_base = OTHER; note = 2'-O-methyluridine-3'-phosphate
  modified_base 19: mod_base = OTHER; note = 2'-O-methylguanosine-3'-phosphate
  modified_base 20: mod_base = OTHER; note = 2'-O-methyluridine-3'-phosphate
  modified_base 21: mod_base = OTHER; note = 2'-O-methyladenosine
gtatttcagcatgaacttgta

SEQ ID NO: 4088 - RNA, 21 nt, synthetic construct
  source 1..21: mol_type = other RNA
  modified_base 1: mod_base = OTHER; note = 2'-O-methyluridine-3'-phosphate
  modified_base 2: mod_base = OTHER; note = 2'-O-methyluridine-3'-phosphate
  modified_base 3: mod_base = OTHER; note = 2'-O-methylguanosine-3'-phosphate
  modified_base 4: mod_base = OTHER; note = 2'-O-methyluridine-3'-phosphate
  modified_base 5: mod_base = OTHER; note = 2'-O-methyladenosine-3'-phosphate
  modified_base 6: mod_base = OTHER; note = 2'-O-methyladenosine-3'-phosphate
  modified_base 7: mod_base = OTHER; note = 2'-deoxy-2'-fluorouridine-3'-phosphate
  modified_base 8: mod_base = OTHER; note = 2'-O-methyluridine-3'-phosphate
  modified_base 9: mod_base = OTHER; note = 2'-deoxy-2'-fluoroguanosine-3'-phosphate
  modified_base 10: mod_base = OTHER; note = 2'-deoxy-2'-fluoroguanosine-3'-phosphate
  modified_base 11: mod_base = OTHER; note = 2'-deoxy-2'-fluorouridine-3'-phosphate
  modified_base 12: mod_base = OTHER; note = 2'-O-methyladenosine-3'-phosphate
  modified_base 13: mod_base = OTHER; note = 2'-O-methylcytidine-3'-phosphate
  modified_base 14: mod_base = OTHER; note = 2'-O-methyladenosine-3'-phosphate
  modified_base 15: mod_base = OTHER; note = 2'-O-methylguanosine-3'-phosphate
  modified_base 16: mod_base = OTHER; note = 2'-O-methyladenosine-3'-phosphate
  modified_base 17: mod_base = OTHER; note = 2'-O-methyluridine-3'-phosphate
  modified_base 18: mod_base = OTHER; note = 2'-O-methyluridine-3'-phosphate
  modified_base 19: mod_base = OTHER; note = 2'-O-methylcytidine-3'-phosphate
  modified_base 20: mod_base = OTHER; note = 2'-O-methyluridine-3'-phosphate
  modified_base 21: mod_base = OTHER; note = 2'-O-methyladenosine
ttgtaattggtacagattcta

SEQ ID NO: 4089 - RNA, 21 nt, synthetic construct
  source 1..21: mol_type = other RNA
  modified_base 1: mod_base = OTHER; note = 2'-O-methyluridine-3'-phosphate
  modified_base 2: mod_base = OTHER; note = 2'-O-methylguanosine-3'-phosphate
  modified_base 3: mod_base = OTHER; note = 2'-O-methyluridine-3'-phosphate
  modified_base 4: mod_base = OTHER; note = 2'-O-methyladenosine-3'-phosphate
  modified_base 5: mod_base = OTHER; note = 2'-O-methyladenosine-3'-phosphate
  modified_base 6: mod_base = OTHER; note = 2'-O-methyluridine-3'-phosphate
  modified_base 7: mod_base = OTHER; note = 2'-deoxy-2'-fluorouridine-3'-phosphate
  modified_base 8: mod_base = OTHER; note = 2'-O-methylguanosine-3'-phosphate
  modified_base 9: mod_base = OTHER; note = 2'-deoxy-2'-fluoroguanosine-3'-phosphate
  modified_base 10: mod_base = OTHER; note = 2'-deoxy-2'-fluorouridine-3'-phosphate
  modified_base 11: mod_base = OTHER; note = 2'-deoxy-2'-fluoroadenosine-3'-phosphate
  modified_base 12: mod_base = OTHER; note = 2'-O-methylcytidine-3'-phosphate
  modified_base 13: mod_base = OTHER; note = 2'-O-methyladenosine-3'-phosphate
  modified_base 14: mod_base = OTHER; note = 2'-O-methylguanosine-3'-phosphate
  modified_base 15: mod_base = OTHER; note = 2'-O-methyladenosine-3'-phosphate
  modified_base 16: mod_base = OTHER; note = 2'-O-methyluridine-3'-phosphate
  modified_base 17: mod_base = OTHER; note = 2'-O-methyluridine-3'-phosphate
  modified_base 18: mod_base = OTHER; note = 2'-O-methylcytidine-3'-phosphate
  modified_base 19: mod_base = OTHER; note = 2'-O-methyluridine-3'-phosphate
  modified_base 20: mod_base = OTHER; note = 2'-O-methylguanosine-3'-phosphate
  modified_base 21: mod_base = OTHER; note = 2'-O-methyladenosine
tgtaattggtacagattctga

SEQ ID NO: 4090 - RNA, 21 nt, synthetic construct
  source 1..21: mol_type = other RNA
  modified_base 1: mod_base = OTHER; note = 2'-O-methylguanosine-3'-phosphate
  modified_base 2: mod_base = OTHER; note = 2'-O-methyluridine-3'-phosphate
  modified_base 3: mod_base = OTHER; note = 2'-O-methyladenosine-3'-phosphate
  modified_base 4: mod_base = OTHER; note = 2'-O-methyladenosine-3'-phosphate
  modified_base 5: mod_base = OTHER; note = 2'-O-methyluridine-3'-phosphate
  modified_base 6: mod_base = OTHER; note = 2'-O-methyluridine-3'-phosphate
  modified_base 7: mod_base = OTHER; note = 2'-deoxy-2'-fluoroguanosine-3'-phosphate
  modified_base 8: mod_base = OTHER; note = 2'-O-methylguanosine-3'-phosphate
  modified_base 9: mod_base = OTHER; note = 2'-deoxy-2'-fluorouridine-3'-phosphate
  modified_base 10: mod_base = OTHER; note = 2'-deoxy-2'-fluoroadenosine-3'-phosphate
  modified_base 11: mod_base = OTHER; note = 2'-deoxy-2'-fluorocytidine-3'-phosphate
  modified_base 12: mod_base = OTHER; note = 2'-O-methyladenosine-3'-phosphate
  modified_base 13: mod_base = OTHER; note = 2'-O-methylguanosine-3'-phosphate
  modified_base 14: mod_base = OTHER; note = 2'-O-methyladenosine-3'-phosphate
  modified_base 15: mod_base = OTHER; note = 2'-O-methyluridine-3'-phosphate
  modified_base 16: mod_base = OTHER; note = 2'-O-methyluridine-3'-phosphate
  modified_base 17: mod_base = OTHER; note = 2'-O-methylcytidine-3'-phosphate
  modified_base 18: mod_base = OTHER; note = 2'-O-methyluridine-3'-phosphate
  modified_base 19: mod_base = OTHER; note = 2'-O-methylguanosine-3'-phosphate
  modified_base 20: mod_base = OTHER; note = 2'-O-methyluridine-3'-phosphate
  modified_base 21: mod_base = OTHER; note = 2'-O-methyladenosine
gtaattggtacagattctgta

SEQ ID NO: 4091 - RNA, 21 nt, synthetic construct
  source 1..21: mol_type = other RNA
  modified_base 1: mod_base = OTHER; note = 2'-O-methyluridine-3'-phosphate
  modified_base 2: mod_base = OTHER; note = 2'-O-methyladenosine-3'-phosphate
  modified_base 3: mod_base = OTHER; note = 2'-O-methyladenosine-3'-phosphate
  modified_base 4: mod_base = OTHER; note = 2'-O-methyluridine-3'-phosphate
  modified_base 5: mod_base = OTHER; note = 2'-O-methyluridine-3'-phosphate
  modified_base 6: mod_base = OTHER; note = 2'-O-methylguanosine-3'-phosphate
  modified_base 7: mod_base = OTHER; note = 2'-deoxy-2'-fluoroguanosine-3'-phosphate
  modified_base 8: mod_base = OTHER; note = 2'-O-methyluridine-3'-phosphate
  modified_base 9: mod_base = OTHER; note = 2'-deoxy-2'-fluoroadenosine-3'-phosphate
  modified_base 10: mod_base = OTHER; note = 2'-deoxy-2'-fluorocytidine-3'-phosphate
  modified_base 11: mod_base = OTHER; note = 2'-deoxy-2'-fluoroadenosine-3'-phosphate
  modified_base 12: mod_base = OTHER; note = 2'-O-methylguanosine-3'-phosphate
  modified_base 13: mod_base = OTHER; note = 2'-O-methyladenosine-3'-phosphate
  modified_base 14: mod_base = OTHER; note = 2'-O-methyluridine-3'-phosphate
  modified_base 15: mod_base = OTHER; note = 2'-O-methyluridine-3'-phosphate
  modified_base 16: mod_base = OTHER; note = 2'-O-methylcytidine-3'-phosphate
  modified_base 17: mod_base = OTHER; note = 2'-O-methyluridine-3'-phosphate
  modified_base 18: mod_base = OTHER; note = 2'-O-methylguanosine-3'-phosphate
  modified_base 19: mod_base = OTHER; note = 2'-O-methyluridine-3'-phosphate
  modified_base 20: mod_base = OTHER; note = 2'-O-methyluridine-3'-phosphate
  modified_base 21: mod_base = OTHER; note = 2'-O-methyladenosine
taattggtacagattctgtta

SEQ ID NO: 4092 - RNA, 21 nt, synthetic construct
  source 1..21: mol_type = other RNA
  modified_base 1: mod_base = OTHER; note = 2'-O-methyladenosine-3'-phosphate
  modified_base 2: mod_base = OTHER; note = 2'-O-methyladenosine-3'-phosphate
  modified_base 3: mod_base = OTHER; note = 2'-O-methyluridine-3'-phosphate
  modified_base 4: mod_base = OTHER; note = 2'-O-methyluridine-3'-phosphate
  modified_base 5: mod_base = OTHER; note = 2'-O-methylguanosine-3'-phosphate
  modified_base 6: mod_base = OTHER; note = 2'-O-methylguanosine-3'-phosphate
  modified_base 7: mod_base = OTHER; note = 2'-deoxy-2'-fluorouridine-3'-phosphate
  modified_base 8: mod_base = OTHER; note = 2'-O-methyladenosine-3'-phosphate
  modified_base 9: mod_base = OTHER; note = 2'-deoxy-2'-fluorocytidine-3'-phosphate
  modified_base 10: mod_base = OTHER; note = 2'-deoxy-2'-fluoroadenosine-3'-phosphate
  modified_base 11: mod_base = OTHER; note = 2'-deoxy-2'-fluoroguanosine-3'-phosphate
  modified_base 12: mod_base = OTHER; note = 2'-O-methyladenosine-3'-phosphate
  modified_base 13: mod_base = OTHER; note = 2'-O-methyluridine-3'-phosphate
  modified_base 14: mod_base = OTHER; note = 2'-O-methyluridine-3'-phosphate
  modified_base 15: mod_base = OTHER; note = 2'-O-methylcytidine-3'-phosphate
  modified_base 16: mod_base = OTHER; note = 2'-O-methyluridine-3'-phosphate
  modified_base 17: mod_base = OTHER; note = 2'-O-methylguanosine-3'-phosphate
  modified_base 18: mod_base = OTHER; note = 2'-O-methyluridine-3'-phosphate
  modified_base 19: mod_base = OTHER; note = 2'-O-methyluridine-3'-phosphate
  modified_base 20: mod_base = OTHER; note = 2'-O-methylguanosine-3'-phosphate
  modified_base 21: mod_base = OTHER; note = 2'-O-methyladenosine
aattggtacagattctgttga

SEQ ID NO: 4093 - RNA, 21 nt, synthetic construct
  source 1..21: mol_type = other RNA
  modified_base 1: mod_base = OTHER; note = 2'-O-methyladenosine-3'-phosphate
  modified_base 2: mod_base = OTHER; note = 2'-O-methyluridine-3'-phosphate
  modified_base 3: mod_base = OTHER; note = 2'-O-methyluridine-3'-phosphate
  modified_base 4: mod_base = OTHER; note = 2'-O-methylguanosine-3'-phosphate
  modified_base 5: mod_base = OTHER; note = 2'-O-methylguanosine-3'-phosphate
  modified_base 6: mod_base = OTHER; note = 2'-O-methyluridine-3'-phosphate
  modified_base 7: mod_base = OTHER; note = 2'-deoxy-2'-fluoroadenosine-3'-phosphate
  modified_base 8: mod_base = OTHER; note = 2'-O-methylcytidine-3'-phosphate
  modified_base 9: mod_base = OTHER; note = 2'-deoxy-2'-fluoroadenosine-3'-phosphate
  modified_base 10: mod_base = OTHER; note = 2'-deoxy-2'-fluoroguanosine-3'-phosphate
  modified_base 11: mod_base = OTHER; note = 2'-deoxy-2'-fluoroadenosine-3'-phosphate
  modified_base 12: mod_base = OTHER; note = 2'-O-methyluridine-3'-phosphate
  modified_base 13: mod_base = OTHER; note = 2'-O-methyluridine-3'-phosphate
  modified_base 14: mod_base = OTHER; note = 2'-O-methylcytidine-3'-phosphate
  modified_base 15: mod_base = OTHER; note = 2'-O-methyluridine-3'-phosphate
  modified_base 16: mod_base = OTHER; note = 2'-O-methylguanosine-3'-phosphate
  modified_base 17: mod_base = OTHER; note = 2'-O-methyluridine-3'-phosphate
  modified_base 18: mod_base = OTHER; note = 2'-O-methyluridine-3'-phosphate
  modified_base 19: mod_base = OTHER; note = 2'-O-methylguanosine-3'-phosphate
  modified_base 20: mod_base = OTHER; note = 2'-O-methyluridine-3'-phosphate
  modified_base 21: mod_base = OTHER; note = 2'-O-methyladenosine
attggtacagattctgttgta

SEQ ID NO: 4094 - RNA, 21 nt, synthetic construct
  source 1..21: mol_type = other RNA
  modified_base 1: mod_base = OTHER; note = 2'-O-methyluridine-3'-phosphate
  modified_base 2: mod_base = OTHER; note = 2'-O-methyluridine-3'-phosphate
  modified_base 3: mod_base = OTHER; note = 2'-O-methylguanosine-3'-phosphate
  modified_base 4: mod_base = OTHER; note = 2'-O-methylguanosine-3'-phosphate
  modified_base 5: mod_base = OTHER; note = 2'-O-methyluridine-3'-phosphate
  modified_base 6: mod_base = OTHER; note = 2'-O-methyladenosine-3'-phosphate
  modified_base 7: mod_base = OTHER; note = 2'-deoxy-2'-fluorocytidine-3'-phosphate
  modified_base 8: mod_base = OTHER; note = 2'-O-methyladenosine-3'-phosphate
  modified_base 9: mod_base = OTHER; note = 2'-deoxy-2'-fluoroguanosine-3'-phosphate
  modified_base 10: mod_base = OTHER; note = 2'-deoxy-2'-fluoroadenosine-3'-phosphate
  modified_base 11: mod_base = OTHER; note = 2'-deoxy-2'-fluorouridine-3'-phosphate
  modified_base 12: mod_base = OTHER; note = 2'-O-methyluridine-3'-phosphate
  modified_base 13: mod_base = OTHER; note = 2'-O-methylcytidine-3'-phosphate
  modified_base 14: mod_base = OTHER; note = 2'-O-methyluridine-3'-phosphate
  modified_base 15: mod_base = OTHER; note = 2'-O-methylguanosine-3'-phosphate
  modified_base 16: mod_base = OTHER; note = 2'-O-methyluridine-3'-phosphate
  modified_base 17: mod_base = OTHER; note = 2'-O-methyluridine-3'-phosphate
  modified_base 18: mod_base = OTHER; note = 2'-O-methylguanosine-3'-phosphate
  modified_base 19: mod_base = OTHER; note = 2'-O-methyluridine-3'-phosphate
  modified_base 20: mod_base = OTHER; note = 2'-O-methyladenosine-3'-phosphate
  modified_base 21: mod_base = OTHER; note = 2'-O-methyladenosine
ttggtacagattctgttgtaa

SEQ ID NO: 4095 - RNA, 21 nt, synthetic construct
  source 1..21: mol_type = other RNA
  modified_base 1: mod_base = OTHER; note = 2'-O-methyluridine-3'-phosphate
  modified_base 2: mod_base = OTHER; note = 2'-O-methylguanosine-3'-phosphate
  modified_base 3: mod_base = OTHER; note = 2'-O-methylguanosine-3'-phosphate
  modified_base 4: mod_base = OTHER; note = 2'-O-methyluridine-3'-phosphate
  modified_base 5: mod_base = OTHER; note = 2'-O-methyladenosine-3'-phosphate
  modified_base 6: mod_base = OTHER; note = 2'-O-methylcytidine-3'-phosphate
  modified_base 7: mod_base = OTHER; note = 2'-deoxy-2'-fluoroadenosine-3'-phosphate
  modified_base 8: mod_base = OTHER; note = 2'-O-methylguanosine-3'-phosphate
  modified_base 9: mod_base = OTHER; note = 2'-deoxy-2'-fluoroadenosine-3'-phosphate
  modified_base 10: mod_base = OTHER; note = 2'-deoxy-2'-fluorouridine-3'-phosphate
  modified_base 11: mod_base = OTHER; note = 2'-deoxy-2'-fluorouridine-3'-phosphate
  modified_base 12: mod_base = OTHER; note = 2'-O-methylcytidine-3'-phosphate
  modified_base 13: mod_base = OTHER; note = 2'-O-methyluridine-3'-phosphate
  modified_base 14: mod_base = OTHER; note = 2'-O-methylguanosine-3'-phosphate
  modified_base 15: mod_base = OTHER; note = 2'-O-methyluridine-3'-phosphate
  modified_base 16: mod_base = OTHER; note = 2'-O-methyluridine-3'-phosphate
  modified_base 17: mod_base = OTHER; note = 2'-O-methylguanosine-3'-phosphate
  modified_base 18: mod_base = OTHER; note = 2'-O-methyluridine-3'-phosphate
  modified_base 19: mod_base = OTHER; note = 2'-O-methyladenosine-3'-phosphate
  modified_base 20: mod_base = OTHER; note = 2'-O-methyluridine-3'-phosphate
  modified_base 21: mod_base = OTHER; note = 2'-O-methyladenosine
tggtacagattctgttgtata

SEQ ID NO: 4096 - RNA, 21 nt, synthetic construct
  source 1..21: mol_type = other RNA
  modified_base 1: mod_base = OTHER; note = 2'-O-methylguanosine-3'-phosphate
  modified_base 2: mod_base = OTHER; note = 2'-O-methylguanosine-3'-phosphate
  modified_base 3: mod_base = OTHER; note = 2'-O-methyluridine-3'-phosphate
  modified_base 4: mod_base = OTHER; note = 2'-O-methyladenosine-3'-phosphate
  modified_base 5: mod_base = OTHER; note = 2'-O-methylcytidine-3'-phosphate
  modified_base 6: mod_base = OTHER; note = 2'-O-methyladenosine-3'-phosphate
  modified_base 7: mod_base = OTHER; note = 2'-deoxy-2'-fluoroguanosine-3'-phosphate
  modified_base 8: mod_base = OTHER; note = 2'-O-methyladenosine-3'-phosphate
  modified_base 9: mod_base = OTHER; note = 2'-deoxy-2'-fluorouridine-3'-phosphate
  modified_base 10: mod_base = OTHER; note = 2'-deoxy-2'-fluorouridine-3'-phosphate
  modified_base 11: mod_base = OTHER; note = 2'-deoxy-2'-fluorocytidine-3'-phosphate
  modified_base 12: mod_base = OTHER; note = 2'-O-methyluridine-3'-phosphate
  modified_base 13: mod_base = OTHER; note = 2'-O-methylguanosine-3'-phosphate
  modified_base 14: mod_base = OTHER; note = 2'-O-methyluridine-3'-phosphate
  modified_base 15: mod_base = OTHER; note = 2'-O-methyluridine-3'-phosphate
  modified_base 16: mod_base = OTHER; note = 2'-O-methylguanosine-3'-phosphate
  modified_base 17: mod_base = OTHER; note = 2'-O-methyluridine-3'-phosphate
  modified_base 18: mod_base = OTHER; note = 2'-O-methyladenosine-3'-phosphate
  modified_base 19: mod_base = OTHER; note = 2'-O-methyluridine-3'-phosphate
  modified_base 20: mod_base = OTHER; note = 2'-O-methylguanosine-3'-phosphate
  modified_base 21: mod_base = OTHER; note = 2'-O-methyladenosine
ggtacagattctgttgtatga

SEQ ID NO: 4097 - RNA, 21 nt, synthetic construct
  source 1..21: mol_type = other RNA
  modified_base 1: mod_base = OTHER; note = 2'-O-methylguanosine-3'-phosphate
  modified_base 2: mod_base = OTHER; note = 2'-O-methyluridine-3'-phosphate
  modified_base 3: mod_base = OTHER; note = 2'-O-methyladenosine-3'-phosphate
  modified_base 4: mod_base = OTHER; note = 2'-O-methylcytidine-3'-phosphate
  modified_base 5: mod_base = OTHER; note = 2'-O-methyladenosine-3'-phosphate
  modified_base 6: mod_base = OTHER; note = 2'-O-methylguanosine-3'-phosphate
  modified_base 7: mod_base = OTHER; note = 2'-deoxy-2'-fluoroadenosine-3'-phosphate
  modified_base 8: mod_base = OTHER; note = 2'-O-methyluridine-3'-phosphate
  modified_base 9: mod_base = OTHER; note = 2'-deoxy-2'-fluorouridine-3'-phosphate
  modified_base 10: mod_base = OTHER; note = 2'-deoxy-2'-fluorocytidine-3'-phosphate
  modified_base 11: mod_base = OTHER; note = 2'-deoxy-2'-fluorouridine-3'-phosphate
  modified_base 12: mod_base = OTHER; note = 2'-O-methylguanosine-3'-phosphate
  modified_base 13: mod_base = OTHER; note = 2'-O-methyluridine-3'-phosphate
  modified_base 14: mod_base = OTHER; note = 2'-O-methyluridine-3'-phosphate
  modified_base 15: mod_base = OTHER; note = 2'-O-methylguanosine-3'-phosphate
  modified_base 16: mod_base = OTHER; note = 2'-O-methyluridine-3'-phosphate
  modified_base 17: mod_base = OTHER; note = 2'-O-methyladenosine-3'-phosphate
  modified_base 18: mod_base = OTHER; note = 2'-O-methyluridine-3'-phosphate
  modified_base 19: mod_base = OTHER; note = 2'-O-methylguanosine-3'-phosphate
  modified_base 20: mod_base = OTHER; note = 2'-O-methylcytidine-3'-phosphate
  modified_base 21: mod_base = OTHER; note = 2'-O-methyladenosine
gtacagattctgttgtatgca

SEQ ID NO: 4098 - RNA, 21 nt, synthetic construct
  source 1..21: mol_type = other RNA
  modified_base 1: mod_base = OTHER; note = 2'-O-methyluridine-3'-phosphate
  modified_base 2: mod_base = OTHER; note = 2'-O-methyladenosine-3'-phosphate
  modified_base 3: mod_base = OTHER; note = 2'-O-methylcytidine-3'-phosphate
  modified_base 4: mod_base = OTHER; note = 2'-O-methyladenosine-3'-phosphate
  modified_base 5: mod_base = OTHER; note = 2'-O-methylguanosine-3'-phosphate
  modified_base 6: mod_base = OTHER; note = 2'-O-methyladenosine-3'-phosphate
  modified_base 7: mod_base = OTHER; note = 2'-deoxy-2'-fluorouridine-3'-phosphate
  modified_base 8: mod_base = OTHER; note = 2'-O-methyluridine-3'-phosphate
  modified_base 9: mod_base = OTHER; note = 2'-deoxy-2'-fluorocytidine-3'-phosphate
  modified_base 10: mod_base = OTHER; note = 2'-deoxy-2'-fluorouridine-3'-phosphate
  modified_base 11: mod_base = OTHER; note = 2'-deoxy-2'-fluoroguanosine-3'-phosphate
  modified_base 12: mod_base = OTHER; note = 2'-O-methyluridine-3'-phosphate
  modified_base 13: mod_base = OTHER; note = 2'-O-methyluridine-3'-phosphate
  modified_base 14: mod_base = OTHER; note = 2'-O-methylguanosine-3'-phosphate
  modified_base 15: mod_base = OTHER; note = 2'-O-methyluridine-3'-phosphate
  modified_base 16: mod_base = OTHER; note = 2'-O-methyladenosine-3'-phosphate
  modified_base 17: mod_base = OTHER; note = 2'-O-methyluridine-3'-phosphate
  modified_base 18: mod_base = OTHER; note = 2'-O-methylguanosine-3'-phosphate
  modified_base 19: mod_base = OTHER; note = 2'-O-methylcytidine-3'-phosphate
  modified_base 20: mod_base = OTHER; note = 2'-O-methyluridine-3'-phosphate
  modified_base 21: mod_base = OTHER; note = 2'-O-methyladenosine
tacagattctgttgtatgcta

SEQ ID NO: 4099 - RNA, 21 nt, synthetic construct
  source 1..21: mol_type = other RNA
  modified_base 1: mod_base = OTHER; note = 2'-O-methyladenosine-3'-phosphate
  modified_base 2: mod_base = OTHER; note = 2'-O-methylcytidine-3'-phosphate
  modified_base 3: mod_base = OTHER; note = 2'-O-methyladenosine-3'-phosphate
  modified_base 4: mod_base = OTHER; note = 2'-O-methylguanosine-3'-phosphate
  modified_base 5: mod_base = OTHER; note = 2'-O-methyladenosine-3'-phosphate
  modified_base 6: mod_base = OTHER; note = 2'-O-methyluridine-3'-phosphate
  modified_base 7: mod_base = OTHER; note = 2'-deoxy-2'-fluorouridine-3'-phosphate
  modified_base 8: mod_base = OTHER; note = 2'-O-methylcytidine-3'-phosphate
  modified_base 9: mod_base = OTHER; note = 2'-deoxy-2'-fluorouridine-3'-phosphate
  modified_base 10: mod_base = OTHER; note = 2'-deoxy-2'-fluoroguanosine-3'-phosphate
  modified_base 11: mod_base = OTHER; note = 2'-deoxy-2'-fluorouridine-3'-phosphate
  modified_base 12: mod_base = OTHER; note = 2'-O-methyluridine-3'-phosphate
  modified_base 13: mod_base = OTHER; note = 2'-O-methylguanosine-3'-phosphate
  modified_base 14: mod_base = OTHER; note = 2'-O-methyluridine-3'-phosphate
  modified_base 15: mod_base = OTHER; note = 2'-O-methyladenosine-3'-phosphate
  modified_base 16: mod_base = OTHER; note = 2'-O-methyluridine-3'-phosphate
  modified_base 17: mod_base = OTHER; note = 2'-O-methylguanosine-3'-phosphate
  modified_base 18: mod_base = OTHER; note = 2'-O-methylcytidine-3'-phosphate
  modified_base 19: mod_base = OTHER; note = 2'-O-methyluridine-3'-phosphate
  modified_base 20: mod_base = OTHER; note = 2'-O-methyluridine-3'-phosphate
  modified_base 21: mod_base = OTHER; note = 2'-O-methyladenosine
acagattctgttgtatgctta

SEQ ID NO: 4100 - RNA, 21 nt, synthetic construct
  source 1..21: mol_type = other RNA
  modified_base 1: mod_base = OTHER; note = 2'-O-methylcytidine-3'-phosphate
  modified_base 2: mod_base = OTHER; note = 2'-O-methyladenosine-3'-phosphate
  modified_base 3: mod_base = OTHER; note = 2'-O-methylguanosine-3'-phosphate
  modified_base 4: mod_base = OTHER; note = 2'-O-methyladenosine-3'-phosphate
  modified_base 5: mod_base = OTHER; note = 2'-O-methyluridine-3'-phosphate
  modified_base 6: mod_base = OTHER; note = 2'-O-methyluridine-3'-phosphate
  modified_base 7: mod_base = OTHER; note = 2'-deoxy-2'-fluorocytidine-3'-phosphate
  modified_base 8: mod_base = OTHER; note = 2'-O-methyluridine-3'-phosphate
  modified_base 9: mod_base = OTHER; note = 2'-deoxy-2'-fluoroguanosine-3'-phosphate
  modified_base 10: mod_base = OTHER; note = 2'-deoxy-2'-fluorouridine-3'-phosphate
  modified_base 11: mod_base = OTHER; note = 2'-deoxy-2'-fluorouridine-3'-phosphate
  modified_base 12: mod_base = OTHER; note = 2'-O-methylguanosine-3'-phosphate
  modified_base 13: mod_base = OTHER; note = 2'-O-methyluridine-3'-phosphate
  modified_base 14: mod_base = OTHER; note = 2'-O-methyladenosine-3'-phosphate
  modified_base 15: mod_base = OTHER; note = 2'-O-methyluridine-3'-phosphate
  modified_base 16: mod_base = OTHER; note = 2'-O-methylguanosine-3'-phosphate
  modified_base 17: mod_base = OTHER; note = 2'-O-methylcytidine-3'-phosphate
  modified_base 18: mod_base = OTHER; note = 2'-O-methyluridine-3'-phosphate
  modified_base 19: mod_base = OTHER; note = 2'-O-methyluridine-3'-phosphate
  modified_base 20: mod_base = OTHER; note = 2'-O-methyluridine-3'-phosphate
  modified_base 21: mod_base = OTHER; note = 2'-O-methyladenosine
cagattctgttgtatgcttta

SEQ ID NO: 4101 - RNA, 21 nt, synthetic construct
  source 1..21: mol_type = other RNA
  modified_base 1: mod_base = OTHER; note = 2'-O-methyladenosine-3'-phosphate
  modified_base 2: mod_base = OTHER; note = 2'-O-methylguanosine-3'-phosphate
  modified_base 3: mod_base = OTHER; note = 2'-O-methyladenosine-3'-phosphate
  modified_base 4: mod_base = OTHER; note = 2'-O-methyluridine-3'-phosphate
  modified_base 5: mod_base = OTHER; note = 2'-O-methyluridine-3'-phosphate
  modified_base 6: mod_base = OTHER; note = 2'-O-methylcytidine-3'-phosphate
  modified_base 7: mod_base = OTHER; note = 2'-deoxy-2'-fluorouridine-3'-phosphate
  modified_base 8: mod_base = OTHER; note = 2'-O-methylguanosine-3'-phosphate
  modified_base 9: mod_base = OTHER; note = 2'-deoxy-2'-fluorouridine-3'-phosphate
  modified_base 10: mod_base = OTHER; note = 2'-deoxy-2'-fluorouridine-3'-phosphate
  modified_base 11: mod_base = OTHER; note = 2'-deoxy-2'-fluoroguanosine-3'-phosphate
  modified_base 12: mod_base = OTHER; note = 2'-O-methyluridine-3'-phosphate
  modified_base 13: mod_base = OTHER; note = 2'-O-methyladenosine-3'-phosphate
  modified_base 14: mod_base = OTHER; note = 2'-O-methyluridine-3'-phosphate
  modified_base 15: mod_base = OTHER; note = 2'-O-methylguanosine-3'-phosphate
  modified_base 16: mod_base = OTHER; note = 2'-O-methylcytidine-3'-phosphate
  modified_base 17: mod_base = OTHER; note = 2'-O-methyluridine-3'-phosphate
  modified_base 18: mod_base = OTHER; note = 2'-O-methyluridine-3'-phosphate
  modified_base 19: mod_base = OTHER; note = 2'-O-methyluridine-3'-phosphate
  modified_base 20: mod_base = OTHER; note = 2'-O-methylcytidine-3'-phosphate
  modified_base 21: mod_base = OTHER; note = 2'-O-methyladenosine
agattctgttgtatgctttca

SEQ ID NO: 4102 - RNA, 21 nt, synthetic construct
  source 1..21: mol_type = other RNA
  modified_base 1: mod_base = OTHER; note = 2'-O-methylguanosine-3'-phosphate
  modified_base 2: mod_base = OTHER; note = 2'-O-methyladenosine-3'-phosphate
  modified_base 3: mod_base = OTHER; note = 2'-O-methyluridine-3'-phosphate
  modified_base 4: mod_base = OTHER; note = 2'-O-methyluridine-3'-phosphate
  modified_base 5: mod_base = OTHER; note = 2'-O-methylcytidine-3'-phosphate
  modified_base 6: mod_base = OTHER; note = 2'-O-methyluridine-3'-phosphate
  modified_base 7: mod_base = OTHER; note = 2'-deoxy-2'-fluoroguanosine-3'-phosphate
  modified_base 8: mod_base = OTHER; note = 2'-O-methyluridine-3'-phosphate
  modified_base 9: mod_base = OTHER; note = 2'-deoxy-2'-fluorouridine-3'-phosphate
  modified_base 10: mod_base = OTHER; note = 2'-deoxy-2'-fluoroguanosine-3'-phosphate
  modified_base 11: mod_base = OTHER; note = 2'-deoxy-2'-fluorouridine-3'-phosphate
  modified_base 12: mod_base = OTHER; note = 2'-O-methyladenosine-3'-phosphate
  modified_base 13: mod_base = OTHER; note = 2'-O-methyluridine-3'-phosphate
  modified_base 14: mod_base = OTHER; note = 2'-O-methylguanosine-3'-phosphate
  modified_base 15: mod_base = OTHER; note = 2'-O-methylcytidine-3'-phosphate
  modified_base 16: mod_base = OTHER; note = 2'-O-methyluridine-3'-phosphate
  modified_base 17: mod_base = OTHER; note = 2'-O-methyluridine-3'-phosphate
  modified_base 18: mod_base = OTHER; note = 2'-O-methyluridine-3'-phosphate
  modified_base 19: mod_base = OTHER; note = 2'-O-methylcytidine-3'-phosphate
  modified_base 20: mod_base = OTHER; note = 2'-O-methyluridine-3'-phosphate
  modified_base 21: mod_base = OTHER; note = 2'-O-methyladenosine
gattctgttgtatgctttcta

SEQ ID NO: 4103 - RNA, 21 nt, synthetic construct
  source 1..21: mol_type = other RNA
  modified_base 1: mod_base = OTHER; note = 2'-O-methyluridine-3'-phosphate
  modified_base 2: mod_base = OTHER; note = 2'-O-methylguanosine-3'-phosphate
  modified_base 3: mod_base = OTHER; note = 2'-O-methylguanosine-3'-phosphate
  modified_base 4: mod_base = OTHER; note = 2'-O-methylcytidine-3'-phosphate
  modified_base 5: mod_base = OTHER; note = 2'-O-methyladenosine-3'-phosphate
  modified_base 6: mod_base = OTHER; note = 2'-O-methyluridine-3'-phosphate
  modified_base 7: mod_base = OTHER; note = 2'-deoxy-2'-fluoroguanosine-3'-phosphate
  modified_base 8: mod_base = OTHER; note = 2'-O-methyluridine-3'-phosphate
  modified_base 9: mod_base = OTHER; note = 2'-deoxy-2'-fluorocytidine-3'-phosphate
  modified_base 10: mod_base = OTHER; note = 2'-deoxy-2'-fluoroadenosine-3'-phosphate
  modified_base 11: mod_base = OTHER; note = 2'-deoxy-2'-fluorocytidine-3'-phosphate
  modified_base 12: mod_base = OTHER; note = 2'-O-methyladenosine-3'-phosphate
  modified_base 13: mod_base = OTHER; note = 2'-O-methyluridine-3'-phosphate
  modified_base 14: mod_base = OTHER; note = 2'-O-methylcytidine-3'-phosphate
  modified_base 15: mod_base = OTHER; note = 2'-O-methyluridine-3'-phosphate
  modified_base 16: mod_base = OTHER; note = 2'-O-methyladenosine-3'-phosphate
  modified_base 17: mod_base = OTHER; note = 2'-O-methylguanosine-3'-phosphate
  modified_base 18: mod_base = OTHER; note = 2'-O-methyladenosine-3'-phosphate
  modified_base 19: mod_base = OTHER; note = 2'-O-methyladenosine-3'-phosphate
  modified_base 20: mod_base = OTHER; note = 2'-O-methyluridine-3'-phosphate
  modified_base 21: mod_base = OTHER; note = 2'-O-methyladenosine
tggcatgtcacatctagaata

SEQ ID NO: 4104 - RNA, 21 nt, synthetic construct
  source 1..21: mol_type = other RNA
  modified_base 1: mod_base = OTHER; note = 2'-O-methylguanosine-3'-phosphate
  modified_base 2: mod_base = OTHER; note = 2'-O-methylguanosine-3'-phosphate
  modified_base 3: mod_base = OTHER; note = 2'-O-methylcytidine-3'-phosphate
  modified_base 4: mod_base = OTHER; note = 2'-O-methyladenosine-3'-phosphate
  modified_base 5: mod_base = OTHER; note = 2'-O-methyluridine-3'-phosphate
  modified_base 6: mod_base = OTHER; note = 2'-O-methylguanosine-3'-phosphate
  modified_base 7: mod_base = OTHER; note = 2'-deoxy-2'-fluorouridine-3'-phosphate
  modified_base 8: mod_base = OTHER; note = 2'-O-methylcytidine-3'-phosphate
  modified_base 9: mod_base = OTHER; note = 2'-deoxy-2'-fluoroadenosine-3'-phosphate
  modified_base 10: mod_base = OTHER; note = 2'-deoxy-2'-fluorocytidine-3'-phosphate
  modified_base 11: mod_base = OTHER; note = 2'-deoxy-2'-fluoroadenosine-3'-phosphate
  modified_base 12: mod_base = OTHER; note = 2'-O-methyluridine-3'-phosphate
  modified_base 13: mod_base = OTHER; note = 2'-O-methylcytidine-3'-phosphate
  modified_base 14: mod_base = OTHER; note = 2'-O-methyluridine-3'-phosphate
  modified_base 15: mod_base = OTHER; note = 2'-O-methyladenosine-3'-phosphate
  modified_base 16: mod_base = OTHER; note = 2'-O-methylguanosine-3'-phosphate
  modified_base 17: mod_base = OTHER; note = 2'-O-methyladenosine-3'-phosphate
  modified_base 18: mod_base = OTHER; note = 2'-O-methyladenosine-3'-phosphate
  modified_base 19: mod_base = OTHER; note = 2'-O-methyluridine-3'-phosphate
  modified_base 20: mod_base = OTHER; note = 2'-O-methyluridine-3'-phosphate
  modified_base 21: mod_base = OTHER; note = 2'-O-methyladenosine
ggcatgtcacatctagaatta

SEQ ID NO: 4105 - RNA, 21 nt, synthetic construct
  source 1..21: mol_type = other RNA
  modified_base 1: mod_base = OTHER; note = 2'-O-methylguanosine-3'-phosphate
  modified_base 2: mod_base = OTHER; note = 2'-O-methylcytidine-3'-phosphate
  modified_base 3: mod_base = OTHER; note = 2'-O-methyladenosine-3'-phosphate
  modified_base 4: mod_base = OTHER; note = 2'-O-methyluridine-3'-phosphate
  modified_base 5: mod_base = OTHER; note = 2'-O-methylguanosine-3'-phosphate
  modified_base 6: mod_base = OTHER; note = 2'-O-methyluridine-3'-phosphate
  modified_base 7: mod_base = OTHER; note = 2'-deoxy-2'-fluorocytidine-3'-phosphate
  modified_base 8: mod_base = OTHER; note = 2'-O-methyladenosine-3'-phosphate
  modified_base 9: mod_base = OTHER; note = 2'-deoxy-2'-fluorocytidine-3'-phosphate
  modified_base 10: mod_base = OTHER; note = 2'-deoxy-2'-fluoroadenosine-3'-phosphate
  modified_base 11: mod_base = OTHER; note = 2'-deoxy-2'-fluorouridine-3'-phosphate
  modified_base 12: mod_base = OTHER; note = 2'-O-methylcytidine-3'-phosphate
  modified_base 13: mod_base = OTHER; note = 2'-O-methyluridine-3'-phosphate
  modified_base 14: mod_base = OTHER; note = 2'-O-methyladenosine-3'-phosphate
  modified_base 15: mod_base = OTHER; note = 2'-O-methylguanosine-3'-phosphate
  modified_base 16: mod_base = OTHER; note = 2'-O-methyladenosine-3'-phosphate
  modified_base 17: mod_base = OTHER; note = 2'-O-methyladenosine-3'-phosphate
  modified_base 18: mod_base = OTHER; note = 2'-O-methyluridine-3'-phosphate
  modified_base 19: mod_base = OTHER; note = 2'-O-methyluridine-3'-phosphate
  modified_base 20: mod_base = OTHER; note = 2'-O-methylcytidine-3'-phosphate
  modified_base 21: mod_base = OTHER; note = 2'-O-methyladenosine
gcatgtcacatctagaattca

SEQ ID NO: 4106 - RNA, 21 nt, synthetic construct
  source 1..21: mol_type = other RNA
  modified_base 1: mod_base = OTHER; note = 2'-O-methylcytidine-3'-phosphate
  modified_base 2: mod_base = OTHER; note = 2'-O-methyladenosine-3'-phosphate
  modified_base 3: mod_base = OTHER; note = 2'-O-methyluridine-3'-phosphate
  modified_base 4: mod_base = OTHER; note = 2'-O-methylguanosine-3'-phosphate
  modified_base 5: mod_base = OTHER; note = 2'-O-methyluridine-3'-phosphate
  modified_base 6: mod_base = OTHER; note = 2'-O-methylcytidine-3'-phosphate
  modified_base 7: mod_base = OTHER; note = 2'-deoxy-2'-fluoroadenosine-3'-phosphate
  modified_base 8: mod_base = OTHER; note = 2'-O-methylcytidine-3'-phosphate
  modified_base 9: mod_base = OTHER; note = 2'-deoxy-2'-fluoroadenosine-3'-phosphate
  modified_base 10: mod_base = OTHER; note = 2'-deoxy-2'-fluorouridine-3'-phosphate
  modified_base 11: mod_base = OTHER; note = 2'-deoxy-2'-fluorocytidine-3'-phosphate
  modified_base 12: mod_base = OTHER; note = 2'-O-methyluridine-3'-phosphate
  modified_base 13: mod_base = OTHER; note = 2'-O-methyladenosine-3'-phosphate
  modified_base 14: mod_base = OTHER; note = 2'-O-methylguanosine-3'-phosphate
  modified_base 15: mod_base = OTHER; note = 2'-O-methyladenosine-3'-phosphate
  modified_base 16: mod_base = OTHER; note = 2'-O-methyladenosine-3'-phosphate
  modified_base 17: mod_base = OTHER; note = 2'-O-methyluridine-3'-phosphate
  modified_base 18: mod_base = OTHER; note = 2'-O-methyluridine-3'-phosphate
  modified_base 19: mod_base = OTHER; note = 2'-O-methylcytidine-3'-phosphate
  modified_base 20: mod_base = OTHER; note = 2'-O-methyluridine-3'-phosphate
  modified_base 21: mod_base = OTHER; note = 2'-O-methyladenosine
catgtcacatctagaattcta

SEQ ID NO: 4107 - RNA, 21 nt, synthetic construct
  source 1..21: mol_type = other RNA
  modified_base 1: mod_base = OTHER; note = 2'-O-methyladenosine-3'-phosphate
  modified_base 2: mod_base = OTHER; note = 2'-O-methyluridine-3'-phosphate
  modified_base 3: mod_base = OTHER; note = 2'-O-methylguanosine-3'-phosphate
  modified_base 4: mod_base = OTHER; note = 2'-O-methyluridine-3'-phosphate
  modified_base 5: mod_base = OTHER; note = 2'-O-methylcytidine-3'-phosphate
  modified_base 6: mod_base = OTHER; note = 2'-O-methyladenosine-3'-phosphate
  modified_base 7: mod_base = OTHER; note = 2'-deoxy-2'-fluorocytidine-3'-phosphate
  modified_base 8: mod_base = OTHER; note = 2'-O-methyladenosine-3'-phosphate
  modified_base 9: mod_base = OTHER; note = 2'-deoxy-2'-fluorouridine-3'-phosphate
  modified_base 10: mod_base = OTHER; note = 2'-deoxy-2'-fluorocytidine-3'-phosphate
  modified_base 11: mod_base = OTHER; note = 2'-deoxy-2'-fluorouridine-3'-phosphate
  modified_base 12: mod_base = OTHER; note = 2'-O-methyladenosine-3'-phosphate
  modified_base 13: mod_base = OTHER; note = 2'-O-methylguanosine-3'-phosphate
  modified_base 14: mod_base = OTHER; note = 2'-O-methyladenosine-3'-phosphate
  modified_base 15: mod_base = OTHER; note = 2'-O-methyladenosine-3'-phosphate
  modified_base 16: mod_base = OTHER; note = 2'-O-methyluridine-3'-phosphate
  modified_base 17: mod_base = OTHER; note = 2'-O-methyluridine-3'-phosphate
  modified_base 18: mod_base = OTHER; note = 2'-O-methylcytidine-3'-phosphate
  modified_base 19: mod_base = OTHER; note = 2'-O-methyluridine-3'-phosphate
  modified_base 20: mod_base = OTHER; note = 2'-O-methyluridine-3'-phosphate
  modified_base 21: mod_base = OTHER; note = 2'-O-methyladenosine
atgtcacatctagaattctta

SEQ ID NO: 4108 - RNA, 21 nt, synthetic construct
  source 1..21: mol_type = other RNA
  modified_base 1: mod_base = OTHER; note = 2'-O-methyluridine-3'-phosphate
  modified_base 2: mod_base = OTHER; note = 2'-O-methylguanosine-3'-phosphate
  modified_base 3: mod_base = OTHER; note = 2'-O-methyluridine-3'-phosphate
  modified_base 4: mod_base = OTHER; note = 2'-O-methylcytidine-3'-phosphate
  modified_base 5: mod_base = OTHER; note = 2'-O-methyladenosine-3'-phosphate
  modified_base 6: mod_base = OTHER; note = 2'-O-methylcytidine-3'-phosphate
  modified_base 7: mod_base = OTHER; note = 2'-deoxy-2'-fluoroadenosine-3'-phosphate
  modified_base 8: mod_base = OTHER; note = 2'-O-methyluridine-3'-phosphate
  modified_base 9: mod_base = OTHER; note = 2'-deoxy-2'-fluorocytidine-3'-phosphate
  modified_base 10: mod_base = OTHER; note = 2'-deoxy-2'-fluorouridine-3'-phosphate
  modified_base 11: mod_base = OTHER; note = 2'-deoxy-2'-fluoroadenosine-3'-phosphate
  modified_base 12: mod_base = OTHER; note = 2'-O-methylguanosine-3'-phosphate
  modified_base 13: mod_base = OTHER; note = 2'-O-methyladenosine-3'-phosphate
  modified_base 14: mod_base = OTHER; note = 2'-O-methyladenosine-3'-phosphate
  modified_base 15: mod_base = OTHER; note = 2'-O-methyluridine-3'-phosphate
  modified_base 16: mod_base = OTHER; note = 2'-O-methyluridine-3'-phosphate
  modified_base 17: mod_base = OTHER; note = 2'-O-methylcytidine-3'-phosphate
  modified_base 18: mod_base = OTHER; note = 2'-O-methyluridine-3'-phosphate
  modified_base 19: mod_base = OTHER; note = 2'-O-methyluridine-3'-phosphate
  modified_base 20: mod_base = OTHER; note = 2'-O-methyladenosine-3'-phosphate
  modified_base 21: mod_base = OTHER; note = 2'-O-methyladenosine
tgtcacatctagaattcttaa

SEQ ID NO: 4109 - RNA, 21 nt, synthetic construct
  source 1..21: mol_type = other RNA
  modified_base 1: mod_base = OTHER; note = 2'-O-methylguanosine-3'-phosphate
  modified_base 2: mod_base = OTHER; note = 2'-O-methyluridine-3'-phosphate
  modified_base 3: mod_base = OTHER; note = 2'-O-methylcytidine-3'-phosphate
  modified_base 4: mod_base = OTHER; note = 2'-O-methyladenosine-3'-phosphate
  modified_base 5: mod_base = OTHER; note = 2'-O-methylcytidine-3'-phosphate
  modified_base 6: mod_base = OTHER; note = 2'-O-methyladenosine-3'-phosphate
  modified_base 7: mod_base = OTHER; note = 2'-deoxy-2'-fluorouridine-3'-phosphate
  modified_base 8: mod_base = OTHER; note = 2'-O-methylcytidine-3'-phosphate
  modified_base 9: mod_base = OTHER; note = 2'-deoxy-2'-fluorouridine-3'-phosphate
  modified_base 10: mod_base = OTHER; note = 2'-deoxy-2'-fluoroadenosine-3'-phosphate
  modified_base 11: mod_base = OTHER; note = 2'-deoxy-2'-fluoroguanosine-3'-phosphate
  modified_base 12: mod_base = OTHER; note = 2'-O-methyladenosine-3'-phosphate
  modified_base 13: mod_base = OTHER; note = 2'-O-methyladenosine-3'-phosphate
  modified_base 14: mod_base = OTHER; note = 2'-O-methyluridine-3'-phosphate
  modified_base 15: mod_base = OTHER; note = 2'-O-methyluridine-3'-phosphate
  modified_base 16: mod_base = OTHER; note = 2'-O-methylcytidine-3'-phosphate
  modified_base 17: mod_base = OTHER; note = 2'-O-methyluridine-3'-phosphate
  modified_base 18: mod_base = OTHER; note = 2'-O-methyluridine-3'-phosphate
  modified_base 19: mod_base = OTHER; note = 2'-O-methyladenosine-3'-phosphate
  modified_base 20: mod_base = OTHER; note = 2'-O-methyladenosine-3'-phosphate
  modified_base 21: mod_base = OTHER; note = 2'-O-methyladenosine
gtcacatctagaattcttaaa

SEQ ID NO: 4110 - RNA, 21 nt, synthetic construct
  source 1..21: mol_type = other RNA
  modified_base 1: mod_base = OTHER; note = 2'-O-methyluridine-3'-phosphate
  modified_base 2: mod_base = OTHER; note = 2'-O-methylcytidine-3'-phosphate
  modified_base 3: mod_base = OTHER; note = 2'-O-methyladenosine-3'-phosphate
  modified_base 4: mod_base = OTHER; note = 2'-O-methylcytidine-3'-phosphate
  modified_base 5: mod_base = OTHER; note = 2'-O-methyladenosine-3'-phosphate
  modified_base 6: mod_base = OTHER; note = 2'-O-methyluridine-3'-phosphate
  modified_base 7: mod_base = OTHER; note = 2'-deoxy-2'-fluorocytidine-3'-phosphate
  modified_base 8: mod_base = OTHER; note = 2'-O-methyluridine-3'-phosphate
  modified_base 9: mod_base = OTHER; note = 2'-deoxy-2'-fluoroadenosine-3'-phosphate
  modified_base 10: mod_base = OTHER; note = 2'-deoxy-2'-fluoroguanosine-3'-phosphate
  modified_base 11: mod_base = OTHER; note = 2'-deoxy-2'-fluoroadenosine-3'-phosphate
  modified_base 12: mod_base = OTHER; note = 2'-O-methyladenosine-3'-phosphate
  modified_base 13: mod_base = OTHER; note = 2'-O-methyluridine-3'-phosphate
  modified_base 14: mod_base = OTHER; note = 2'-O-methyluridine-3'-phosphate
  modified_base 15: mod_base = OTHER; note = 2'-O-methylcytidine-3'-phosphate
  modified_base 16: mod_base = OTHER; note = 2'-O-methyluridine-3'-phosphate
  modified_base 17: mod_base = OTHER; note = 2'-O-methyluridine-3'-phosphate
  modified_base 18: mod_base = OTHER; note = 2'-O-methyladenosine-3'-phosphate
  modified_base 19: mod_base = OTHER; note = 2'-O-methyladenosine-3'-phosphate
  modified_base 20: mod_base = OTHER; note = 2'-O-methyluridine-3'-phosphate
  modified_base 21: mod_base = OTHER; note = 2'-O-methyladenosine
tcacatctagaattcttaata

SEQ ID NO: 4111 - RNA, 21 nt, synthetic construct
  source 1..21: mol_type = other RNA
  modified_base 1: mod_base = OTHER; note = 2'-O-methylcytidine-3'-phosphate
  modified_base 2: mod_base = OTHER; note = 2'-O-methyladenosine-3'-phosphate
  modified_base 3: mod_base = OTHER; note = 2'-O-methylcytidine-3'-phosphate
  modified_base 4: mod_base = OTHER; note = 2'-O-methyladenosine-3'-phosphate
  modified_base 5: mod_base = OTHER; note = 2'-O-methyluridine-3'-phosphate
  modified_base 6: mod_base = OTHER; note = 2'-O-methylcytidine-3'-phosphate
  modified_base 7: mod_base = OTHER; note = 2'-deoxy-2'-fluorouridine-3'-phosphate
  modified_base 8: mod_base = OTHER; note = 2'-O-methyladenosine-3'-phosphate
  modified_base 9: mod_base = OTHER; note = 2'-deoxy-2'-fluoroguanosine-3'-phosphate
  modified_base 10: mod_base = OTHER; note = 2'-deoxy-2'-fluoroadenosine-3'-phosphate
  modified_base 11: mod_base = OTHER; note = 2'-deoxy-2'-fluoroadenosine-3'-phosphate
  modified_base 12: mod_base = OTHER; note = 2'-O-methyluridine-3'-phosphate
  modified_base 13: mod_base = OTHER; note = 2'-O-methyluridine-3'-phosphate
  modified_base 14: mod_base = OTHER; note = 2'-O-methylcytidine-3'-phosphate
  modified_base 15: mod_base = OTHER; note = 2'-O-methyluridine-3'-phosphate
  modified_base 16: mod_base = OTHER; note = 2'-O-methyluridine-3'-phosphate
  modified_base 17: mod_base = OTHER; note = 2'-O-methyladenosine-3'-phosphate
  modified_base 18: mod_base = OTHER; note = 2'-O-methyladenosine-3'-phosphate
  modified_base 19: mod_base = OTHER; note = 2'-O-methyluridine-3'-phosphate
  modified_base 20: mod_base = OTHER; note = 2'-O-methyluridine-3'-phosphate
  modified_base 21: mod_base = OTHER; note = 2'-O-methyladenosine
cacatctagaattcttaatta

SEQ ID NO: 4112 - RNA, 21 nt, synthetic construct
  source 1..21: mol_type = other RNA
  modified_base 1: mod_base = OTHER; note = 2'-O-methyluridine-3'-phosphate
  modified_base 2: mod_base = OTHER; note = 2'-O-methylguanosine-3'-phosphate
  modified_base 3: mod_base = OTHER; note = 2'-O-methyladenosine-3'-phosphate
  modified_base 4: mod_base = OTHER; note = 2'-O-methylcytidine-3'-phosphate
  modified_base 5: mod_base = OTHER; note = 2'-O-methyluridine-3'-phosphate
  modified_base 6: mod_base = OTHER; note = 2'-O-methyluridine-3'-phosphate
  modified_base 7: mod_base = OTHER; note = 2'-deoxy-2'-fluoroguanosine-3'-phosphate
  modified_base 8: mod_base = OTHER; note = 2'-O-methyladenosine-3'-phosphate
  modified_base 9: mod_base = OTHER; note = 2'-deoxy-2'-fluoroguanosine-3'-phosphate
  modified_base 10: mod_base = OTHER; note = 2'-deoxy-2'-fluoroadenosine-3'-phosphate
  modified_base 11: mod_base = OTHER; note = 2'-deoxy-2'-fluoroguanosine-3'-phosphate
  modified_base 12: mod_base = OTHER; note = 2'-O-methyluridine-3'-phosphate
  modified_base 13: mod_base = OTHER; note = 2'-O-methyluridine-3'-phosphate
  modified_base 14: mod_base = OTHER; note = 2'-O-methyladenosine-3'-phosphate
  modified_base 15: mod_base = OTHER; note = 2'-O-methyladenosine-3'-phosphate
  modified_base 16: mod_base = OTHER; note = 2'-O-methylguanosine-3'-phosphate
  modified_base 17: mod_base = OTHER; note = 2'-O-methyluridine-3'-phosphate
  modified_base 18: mod_base = OTHER; note = 2'-O-methylguanosine-3'-phosphate
  modified_base 19: mod_base = OTHER; note = 2'-O-methyladenosine-3'-phosphate
  modified_base 20: mod_base = OTHER; note = 2'-O-methyladenosine-3'-phosphate
  modified_base 21: mod_base = OTHER; note = 2'-O-methyladenosine
tgacttgagagttaagtgaaa

SEQ ID NO: 4113 - RNA, 21 nt, synthetic construct
  source 1..21: mol_type = other RNA
  modified_base 1: mod_base = OTHER; note = 2'-O-methyluridine-3'-phosphate
  modified_base 2: mod_base = OTHER; note = 2'-O-methyluridine-3'-phosphate
  modified_base 3: mod_base = OTHER; note = 2'-O-methylguanosine-3'-phosphate
  modified_base 4: mod_base = OTHER; note = 2'-O-methyladenosine-3'-phosphate
  modified_base 5: mod_base = OTHER; note = 2'-O-methylguanosine-3'-phosphate
  modified_base 6: mod_base = OTHER; note = 2'-O-methyladenosine-3'-phosphate
  modified_base 7: mod_base = OTHER; note = 2'-deoxy-2'-fluoroguanosine-3'-phosphate
  modified_base 8: mod_base = OTHER; note = 2'-O-methyluridine-3'-phosphate
  modified_base 9: mod_base = OTHER; note = 2'-deoxy-2'-fluorouridine-3'-phosphate
  modified_base 10: mod_base = OTHER; note = 2'-deoxy-2'-fluoroadenosine-3'-phosphate
  modified_base 11: mod_base = OTHER; note = 2'-deoxy-2'-fluoroadenosine-3'-phosphate
  modified_base 12: mod_base = OTHER; note = 2'-O-methylguanosine-3'-phosphate
  modified_base 13: mod_base = OTHER; note = 2'-O-methyluridine-3'-phosphate
  modified_base 14: mod_base = OTHER; note = 2'-O-methylguanosine-3'-phosphate
  modified_base 15: mod_base = OTHER; note = 2'-O-methyladenosine-3'-phosphate
  modified_base 16: mod_base = OTHER; note = 2'-O-methyladenosine-3'-phosphate
  modified_base 17: mod_base = OTHER; note = 2'-O-methyladenosine-3'-phosphate
  modified_base 18: mod_base = OTHER; note = 2'-O-methylcytidine-3'-phosphate
  modified_base 19: mod_base = OTHER; note = 2'-O-methyladenosine-3'-phosphate
  modified_base 20: mod_base = OTHER; note = 2'-O-methyluridine-3'-phosphate
  modified_base 21: mod_base = OTHER; note = 2'-O-methyladenosine
ttgagagttaagtgaaacata

SEQ ID NO: 4114 - RNA, 21 nt, synthetic construct
  source 1..21: mol_type = other RNA
  modified_base 1: mod_base = OTHER; note = 2'-O-methyluridine-3'-phosphate
  modified_base 2: mod_base = OTHER; note = 2'-O-methyladenosine-3'-phosphate
  modified_base 3: mod_base = OTHER; note = 2'-O-methylguanosine-3'-phosphate
  modified_base 4: mod_base = OTHER; note = 2'-O-methylcytidine-3'-phosphate
  modified_base 5: mod_base = OTHER; note = 2'-O-methyladenosine-3'-phosphate
  modified_base 6: mod_base = OTHER; note = 2'-O-methylcytidine-3'-phosphate
  modified_base 7: mod_base = OTHER; note = 2'-deoxy-2'-fluorouridine-3'-phosphate
  modified_base 8: mod_base = OTHER; note = 2'-O-methyluridine-3'-phosphate
  modified_base 9: mod_base = OTHER; note = 2'-deoxy-2'-fluoroguanosine-3'-phosphate
  modified_base 10: mod_base = OTHER; note = 2'-deoxy-2'-fluorocytidine-3'-phosphate
  modified_base 11: mod_base = OTHER; note = 2'-deoxy-2'-fluorouridine-3'-phosphate
  modified_base 12: mod_base = OTHER; note = 2'-O-methyluridine-3'-phosphate
  modified_base 13: mod_base = OTHER; note = 2'-O-methyluridine-3'-phosphate
  modified_base 14: mod_base = OTHER; note = 2'-O-methyluridine-3'-phosphate
  modified_base 15: mod_base = OTHER; note = 2'-O-methylcytidine-3'-phosphate
  modified_base 16: mod_base = OTHER; note = 2'-O-methyladenosine-3'-phosphate
  modified_base 17: mod_base = OTHER; note = 2'-O-methyluridine-3'-phosphate
  modified_base 18: mod_base = OTHER; note = 2'-O-methylcytidine-3'-phosphate
  modified_base 19: mod_base = OTHER; note = 2'-O-methyluridine-3'-phosphate
  modified_base 20: mod_base = OTHER; note = 2'-O-methyluridine-3'-phosphate
  modified_base 21: mod_base = OTHER; note = 2'-O-methyladenosine
tagcacttgcttttcatctta

SEQ ID NO: 4115 - RNA, 21 nt, synthetic construct
  source 1..21: mol_type = other RNA
  modified_base 1: mod_base = OTHER; note = 2'-O-methyluridine-3'-phosphate
  modified_base 2: mod_base = OTHER; note = 2'-O-methyluridine-3'-phosphate
  modified_base 3: mod_base = OTHER; note = 2'-O-methylguanosine-3'-phosphate
  modified_base 4: mod_base = OTHER; note = 2'-O-methylcytidine-3'-phosphate
  modified_base 5: mod_base = OTHER; note = 2'-O-methyladenosine-3'-phosphate
  modified_base 6: mod_base = OTHER; note = 2'-O-methyluridine-3'-phosphate
  modified_base 7: mod_base = OTHER; note = 2'-deoxy-2'-fluorouridine-3'-phosphate
  modified_base 8: mod_base = OTHER; note = 2'-O-methyluridine-3'-phosphate
  modified_base 9: mod_base = OTHER; note = 2'-deoxy-2'-fluorouridine-3'-phosphate
  modified_base 10: mod_base = OTHER; note = 2'-deoxy-2'-fluoroadenosine-3'-phosphate
  modified_base 11: mod_base = OTHER; note = 2'-deoxy-2'-fluoroadenosine-3'-phosphate
  modified_base 12: mod_base = OTHER; note = 2'-O-methyladenosine-3'-phosphate
  modified_base 13: mod_base = OTHER; note = 2'-O-methyluridine-3'-phosphate
  modified_base 14: mod_base = OTHER; note = 2'-O-methyluridine-3'-phosphate
  modified_base 15: mod_base = OTHER; note = 2'-O-methyluridine-3'-phosphate
  modified_base 16: mod_base = OTHER; note = 2'-O-methylcytidine-3'-phosphate
  modified_base 17: mod_base = OTHER; note = 2'-O-methylcytidine-3'-phosphate
  modified_base 18: mod_base = OTHER; note = 2'-O-methyladenosine-3'-phosphate
  modified_base 19: mod_base = OTHER; note = 2'-O-methyluridine-3'-phosphate
  modified_base 20: mod_base = OTHER; note = 2'-O-methylguanosine-3'-phosphate
  modified_base 21: mod_base = OTHER; note = 2'-O-methyladenosine
ttgcattttaaatttccatga

SEQ ID NO: 4116 - RNA, 21 nt, synthetic construct
  source 1..21: mol_type = other RNA
  modified_base 1: mod_base = OTHER; note = 2'-O-methyladenosine-3'-phosphate
  modified_base 2: mod_base = OTHER; note = 2'-O-methyluridine-3'-phosphate
  modified_base 3: mod_base = OTHER; note = 2'-O-methyluridine-3'-phosphate
  modified_base 4: mod_base = OTHER; note = 2'-O-methyluridine-3'-phosphate
  modified_base 5: mod_base = OTHER; note = 2'-O-methyluridine-3'-phosphate
  modified_base 6: mod_base = OTHER; note = 2'-O-methyladenosine-3'-phosphate
  modified_base 7: mod_base = OTHER; note = 2'-deoxy-2'-fluoroadenosine-3'-phosphate
  modified_base 8: mod_base = OTHER; note = 2'-O-methyladenosine-3'-phosphate
  modified_base 9: mod_base = OTHER; note = 2'-deoxy-2'-fluorouridine-3'-phosphate
  modified_base 10: mod_base = OTHER; note = 2'-deoxy-2'-fluorouridine-3'-phosphate
  modified_base 11: mod_base = OTHER; note = 2'-deoxy-2'-fluorouridine-3'-phosphate
  modified_base 12: mod_base = OTHER; note = 2'-O-methylcytidine-3'-phosphate
  modified_base 13: mod_base = OTHER; note = 2'-O-methylcytidine-3'-phosphate
  modified_base 14: mod_base = OTHER; note = 2'-O-methyladenosine-3'-phosphate
  modified_base 15: mod_base = OTHER; note = 2'-O-methyluridine-3'-phosphate
  modified_base 16: mod_base = OTHER; note = 2'-O-methylguanosine-3'-phosphate
  modified_base 17: mod_base = OTHER; note = 2'-O-methyladenosine-3'-phosphate
  modified_base 18: mod_base = OTHER; note = 2'-O-methyluridine-3'-phosphate
  modified_base 19: mod_base = OTHER; note = 2'-O-methyluridine-3'-phosphate
  modified_base 20: mod_base = OTHER; note = 2'-O-methylguanosine-3'-phosphate
  modified_base 21: mod_base = OTHER; note = 2'-O-methyladenosine
attttaaatttccatgattga

SEQ ID NO: 4117 - RNA, 21 nt, synthetic construct
  source 1..21: mol_type = other RNA
  modified_base 1: mod_base = OTHER; note = 2'-O-methyluridine-3'-phosphate
  modified_base 2: mod_base = OTHER; note = 2'-O-methylguanosine-3'-phosphate
  modified_base 3: mod_base = OTHER; note = 2'-O-methylguanosine-3'-phosphate
  modified_base 4: mod_base = OTHER; note = 2'-O-methyluridine-3'-phosphate
  modified_base 5: mod_base = OTHER; note = 2'-O-methyluridine-3'-phosphate
  modified_base 6: mod_base = OTHER; note = 2'-O-methylguanosine-3'-phosphate
  modified_base 7: mod_base = OTHER; note = 2'-deoxy-2'-fluorocytidine-3'-phosphate
  modified_base 8: mod_base = OTHER; note = 2'-O-methyladenosine-3'-phosphate
  modified_base 9: mod_base = OTHER; note = 2'-deoxy-2'-fluoroguanosine-3'-phosphate
  modified_base 10: mod_base = OTHER; note = 2'-deoxy-2'-fluorouridine-3'-phosphate
  modified_base 11: mod_base = OTHER; note = 2'-deoxy-2'-fluoroadenosine-3'-phosphate
  modified_base 12: mod_base = OTHER; note = 2'-O-methyluridine-3'-phosphate
  modified_base 13: mod_base = OTHER; note = 2'-O-methylcytidine-3'-phosphate
  modified_base 14: mod_base = OTHER; note = 2'-O-methyluridine-3'-phosphate
  modified_base 15: mod_base = OTHER; note = 2'-O-methylguanosine-3'-phosphate
  modified_base 16: mod_base = OTHER; note = 2'-O-methyladenosine-3'-phosphate
  modified_base 17: mod_base = OTHER; note = 2'-O-methyladenosine-3'-phosphate
  modified_base 18: mod_base = OTHER; note = 2'-O-methyladenosine-3'-phosphate
  modified_base 19: mod_base = OTHER; note = 2'-O-methyladenosine-3'-phosphate
  modified_base 20: mod_base = OTHER; note = 2'-O-methyladenosine-3'-phosphate
  modified_base 21: mod_base = OTHER; note = 2'-O-methyladenosine
tggttgcagtatctgaaaaaa

SEQ ID NO: 4118 - RNA, 21 nt, synthetic construct
  source 1..21: mol_type = other RNA
  modified_base 1: mod_base = OTHER; note = 2'-O-methylguanosine-3'-phosphate
  modified_base 2: mod_base = OTHER; note = 2'-O-methylguanosine-3'-phosphate
  modified_base 3: mod_base = OTHER; note = 2'-O-methyluridine-3'-phosphate
  modified_base 4: mod_base = OTHER; note = 2'-O-methyluridine-3'-phosphate
  modified_base 5: mod_base = OTHER; note = 2'-O-methylguanosine-3'-phosphate
  modified_base 6: mod_base = OTHER; note = 2'-O-methylcytidine-3'-phosphate
  modified_base 7: mod_base = OTHER; note = 2'-deoxy-2'-fluoroadenosine-3'-phosphate
  modified_base 8: mod_base = OTHER; note = 2'-O-methylguanosine-3'-phosphate
  modified_base 9: mod_base = OTHER; note = 2'-deoxy-2'-fluorouridine-3'-phosphate
  modified_base 10: mod_base = OTHER; note = 2'-deoxy-2'-fluoroadenosine-3'-phosphate
  modified_base 11: mod_base = OTHER; note = 2'-deoxy-2'-fluorouridine-3'-phosphate
  modified_base 12: mod_base = OTHER; note = 2'-O-methylcytidine-3'-phosphate
  modified_base 13: mod_base = OTHER; note = 2'-O-methyluridine-3'-phosphate
  modified_base 14: mod_base = OTHER; note = 2'-O-methylguanosine-3'-phosphate
  modified_base 15: mod_base = OTHER; note = 2'-O-methyladenosine-3'-phosphate
  modified_base 16: mod_base = OTHER; note = 2'-O-methyladenosine-3'-phosphate
  modified_base 17: mod_base = OTHER; note = 2'-O-methyladenosine-3'-phosphate
  modified_base 18: mod_base = OTHER; note = 2'-O-methyladenosine-3'-phosphate
  modified_base 19: mod_base = OTHER; note = 2'-O-methyladenosine-3'-phosphate
  modified_base 20: mod_base = OTHER; note = 2'-O-methyladenosine-3'-phosphate
  modified_base 21: mod_base = OTHER; note = 2'-O-methyladenosine
ggttgcagtatctgaaaaaaa

SEQ ID NO: 4119 - RNA, 21 nt, synthetic construct
  source 1..21: mol_type = other RNA
  modified_base 1: mod_base = OTHER; note = 2'-O-methylguanosine-3'-phosphate
  modified_base 2: mod_base = OTHER; note = 2'-O-methyluridine-3'-phosphate
  modified_base 3: mod_base = OTHER; note = 2'-O-methyluridine-3'-phosphate
  modified_base 4: mod_base = OTHER; note = 2'-O-methylguanosine-3'-phosphate
  modified_base 5: mod_base = OTHER; note = 2'-O-methylcytidine-3'-phosphate
  modified_base 6: mod_base = OTHER; note = 2'-O-methyladenosine-3'-phosphate
  modified_base 7: mod_base = OTHER; note = 2'-deoxy-2'-fluoroguanosine-3'-phosphate
  modified_base 8: mod_base = OTHER; note = 2'-O-methyluridine-3'-phosphate
  modified_base 9: mod_base = OTHER; note = 2'-deoxy-2'-fluoroadenosine-3'-phosphate
  modified_base 10: mod_base = OTHER; note = 2'-deoxy-2'-fluorouridine-3'-phosphate
  modified_base 11: mod_base = OTHER; note = 2'-deoxy-2'-fluorocytidine-3'-phosphate
  modified_base 12: mod_base = OTHER; note = 2'-O-methyluridine-3'-phosphate
  modified_base 13: mod_base = OTHER; note = 2'-O-methylguanosine-3'-phosphate
  modified_base 14: mod_base = OTHER; note = 2'-O-methyladenosine-3'-phosphate
  modified_base 15: mod_base = OTHER; note = 2'-O-methyladenosine-3'-phosphate
  modified_base 16: mod_base = OTHER; note = 2'-O-methyladenosine-3'-phosphate
  modified_base 17: mod_base = OTHER; note = 2'-O-methyladenosine-3'-phosphate
  modified_base 18: mod_base = OTHER; note = 2'-O-methyladenosine-3'-phosphate
  modified_base 19: mod_base = OTHER; note = 2'-O-methyladenosine-3'-phosphate
  modified_base 20: mod_base = OTHER; note = 2'-O-methyluridine-3'-phosphate
  modified_base 21: mod_base = OTHER; note = 2'-O-methyladenosine
gttgcagtatctgaaaaaata

SEQ ID NO: 4120 - RNA, 21 nt, synthetic construct
  source 1..21: mol_type = other RNA
  modified_base 1: mod_base = OTHER; note = 2'-O-methyluridine-3'-phosphate
  modified_base 2: mod_base = OTHER; note = 2'-O-methyluridine-3'-phosphate
  modified_base 3: mod_base = OTHER; note = 2'-O-methylguanosine-3'-phosphate
  modified_base 4: mod_base = OTHER; note = 2'-O-methylcytidine-3'-phosphate
  modified_base 5: mod_base = OTHER; note = 2'-O-methyladenosine-3'-phosphate
  modified_base 6: mod_base = OTHER; note = 2'-O-methylguanosine-3'-phosphate
  modified_base 7: mod_base = OTHER; note = 2'-deoxy-2'-fluorouridine-3'-phosphate
  modified_base 8: mod_base = OTHER; note = 2'-O-methyladenosine-3'-phosphate
  modified_base 9: mod_base = OTHER; note = 2'-deoxy-2'-fluorouridine-3'-phosphate
  modified_base 10: mod_base = OTHER; note = 2'-deoxy-2'-fluorocytidine-3'-phosphate
  modified_base 11: mod_base = OTHER; note = 2'-deoxy-2'-fluorouridine-3'-phosphate
  modified_base 12: mod_base = OTHER; note = 2'-O-methylguanosine-3'-phosphate
  modified_base 13: mod_base = OTHER; note = 2'-O-methyladenosine-3'-phosphate
  modified_base 14: mod_base = OTHER; note = 2'-O-methyladenosine-3'-phosphate
  modified_base 15: mod_base = OTHER; note = 2'-O-methyladenosine-3'-phosphate
  modified_base 16: mod_base = OTHER; note = 2'-O-methyladenosine-3'-phosphate
  modified_base 17: mod_base = OTHER; note = 2'-O-methyladenosine-3'-phosphate
  modified_base 18: mod_base = OTHER; note = 2'-O-methyladenosine-3'-phosphate
  modified_base 19: mod_base = OTHER; note = 2'-O-methyluridine-3'-phosphate
  modified_base 20: mod_base = OTHER; note = 2'-O-methyluridine-3'-phosphate
  modified_base 21: mod_base = OTHER; note = 2'-O-methyladenosine
ttgcagtatctgaaaaaatta

SEQ ID NO: 4121 - RNA, 21 nt, synthetic construct
  source 1..21: mol_type = other RNA
  modified_base 1: mod_base = OTHER; note = 2'-O-methyluridine-3'-phosphate
  modified_base 2: mod_base = OTHER; note = 2'-O-methylguanosine-3'-phosphate
  modified_base 3: mod_base = OTHER; note = 2'-O-methylcytidine-3'-phosphate
  modified_base 4: mod_base = OTHER; note = 2'-O-methyladenosine-3'-phosphate
  modified_base 5: mod_base = OTHER; note = 2'-O-methylguanosine-3'-phosphate
  modified_base 6: mod_base = OTHER; note = 2'-O-methyluridine-3'-phosphate
  modified_base 7: mod_base = OTHER; note = 2'-deoxy-2'-fluoroadenosine-3'-phosphate
  modified_base 8: mod_base = OTHER; note = 2'-O-methyluridine-3'-phosphate
  modified_base 9: mod_base = OTHER; note = 2'-deoxy-2'-fluorocytidine-3'-phosphate
  modified_base 10: mod_base = OTHER; note = 2'-deoxy-2'-fluorouridine-3'-phosphate
  modified_base 11: mod_base = OTHER; note = 2'-deoxy-2'-fluoroguanosine-3'-phosphate
  modified_base 12: mod_base = OTHER; note = 2'-O-methyladenosine-3'-phosphate
  modified_base 13: mod_base = OTHER; note = 2'-O-methyladenosine-3'-phosphate
  modified_base 14: mod_base = OTHER; note = 2'-O-methyladenosine-3'-phosphate
  modified_base 15: mod_base = OTHER; note = 2'-O-methyladenosine-3'-phosphate
  modified_base 16: mod_base = OTHER; note = 2'-O-methyladenosine-3'-phosphate
  modified_base 17: mod_base = OTHER; note = 2'-O-methyladenosine-3'-phosphate
  modified_base 18: mod_base = OTHER; note = 2'-O-methyluridine-3'-phosphate
  modified_base 19: mod_base = OTHER; note = 2'-O-methyluridine-3'-phosphate
  modified_base 20: mod_base = OTHER; note = 2'-O-methyladenosine-3'-phosphate
  modified_base 21: mod_base = OTHER; note = 2'-O-methyladenosine
tgcagtatctgaaaaaattaa

SEQ ID NO: 4122 - RNA, 21 nt, synthetic construct
  source 1..21: mol_type = other RNA
  modified_base 1: mod_base = OTHER; note = 2'-O-methyladenosine-3'-phosphate
  modified_base 2: mod_base = OTHER; note = 2'-O-methyluridine-3'-phosphate
  modified_base 3: mod_base = OTHER; note = 2'-O-methyluridine-3'-phosphate
  modified_base 4: mod_base = OTHER; note = 2'-O-methylcytidine-3'-phosphate
  modified_base 5: mod_base = OTHER; note = 2'-O-methyladenosine-3'-phosphate
  modified_base 6: mod_base = OTHER; note = 2'-O-methyluridine-3'-phosphate
  modified_base 7: mod_base = OTHER; note = 2'-deoxy-2'-fluorouridine-3'-phosphate
  modified_base 8: mod_base = OTHER; note = 2'-O-methyladenosine-3'-phosphate
  modified_base 9: mod_base = OTHER; note = 2'-deoxy-2'-fluoroguanosine-3'-phosphate
  modified_base 10: mod_base = OTHER; note = 2'-deoxy-2'-fluoroguanosine-3'-phosphate
  modified_base 11: mod_base = OTHER; note = 2'-deoxy-2'-fluorouridine-3'-phosphate
  modified_base 12: mod_base = OTHER; note = 2'-O-methyluridine-3'-phosphate
  modified_base 13: mod_base = OTHER; note = 2'-O-methyladenosine-3'-phosphate
  modified_base 14: mod_base = OTHER; note = 2'-O-methylguanosine-3'-phosphate
  modified_base 15: mod_base = OTHER; note = 2'-O-methyladenosine-3'-phosphate
  modified_base 16: mod_base = OTHER; note = 2'-O-methyladenosine-3'-phosphate
  modified_base 17: mod_base = OTHER; note = 2'-O-methylguanosine-3'-phosphate
  modified_base 18: mod_base = OTHER; note = 2'-O-methyluridine-3'-phosphate
  modified_base 19: mod_base = OTHER; note = 2'-O-methyluridine-3'-phosphate
  modified_base 20: mod_base = OTHER; note = 2'-O-methylcytidine-3'-phosphate
  modified_base 21: mod_base = OTHER; note = 2'-O-methyladenosine
attcattaggttagaagttca

SEQ ID NO: 4123 - RNA, 21 nt, synthetic construct
  source 1..21: mol_type = other RNA
  modified_base 1: mod_base = OTHER; note = 2'-O-methyluridine-3'-phosphate
  modified_base 2: mod_base = OTHER; note = 2'-O-methyladenosine-3'-phosphate
  modified_base 3: mod_base = OTHER; note = 2'-O-methylguanosine-3'-phosphate
  modified_base 4: mod_base = OTHER; note = 2'-O-methyladenosine-3'-phosphate
  modified_base 5: mod_base = OTHER; note = 2'-O-methyladenosine-3'-phosphate
  modified_base 6: mod_base = OTHER; note = 2'-O-methylguanosine-3'-phosphate
  modified_base 7: mod_base = OTHER; note = 2'-deoxy-2'-fluorouridine-3'-phosphate
  modified_base 8: mod_base = OTHER; note = 2'-O-methyluridine-3'-phosphate
  modified_base 9: mod_base = OTHER; note = 2'-deoxy-2'-fluorocytidine-3'-phosphate
  modified_base 10: mod_base = OTHER; note = 2'-deoxy-2'-fluorocytidine-3'-phosphate
  modified_base 11: mod_base = OTHER; note = 2'-deoxy-2'-fluoroadenosine-3'-phosphate
  modified_base 12: mod_base = OTHER; note = 2'-O-methylguanosine-3'-phosphate
  modified_base 13: mod_base = OTHER; note = 2'-O-methyladenosine-3'-phosphate
  modified_base 14: mod_base = OTHER; note = 2'-O-methyladenosine-3'-phosphate
  modified_base 15: mod_base = OTHER; note = 2'-O-methyluridine-3'-phosphate
  modified_base 16: mod_base = OTHER; note = 2'-O-methyladenosine-3'-phosphate
  modified_base 17: mod_base = OTHER; note = 2'-O-methyladenosine-3'-phosphate
  modified_base 18: mod_base = OTHER; note = 2'-O-methyluridine-3'-phosphate
  modified_base 19: mod_base = OTHER; note = 2'-O-methyluridine-3'-phosphate
  modified_base 20: mod_base = OTHER; note = 2'-O-methyluridine-3'-phosphate
  modified_base 21: mod_base = OTHER; note = 2'-O-methyladenosine
tagaagttccagaataattta

SEQ ID NO: 4124 - RNA, 21 nt, synthetic construct
  source 1..21: mol_type = other RNA
  modified_base 1: mod_base = OTHER; note = 2'-O-methyladenosine-3'-phosphate
  modified_base 2: mod_base = OTHER; note = 2'-O-methylcytidine-3'-phosphate
  modified_base 3: mod_base = OTHER; note = 2'-O-methylcytidine-3'-phosphate
  modified_base 4: mod_base = OTHER; note = 2'-O-methyluridine-3'-phosphate
  modified_base 5: mod_base = OTHER; note = 2'-O-methyladenosine-3'-phosphate
  modified_base 6: mod_base = OTHER; note = 2'-O-methylcytidine-3'-phosphate
  modified_base 7: mod_base = OTHER; note = 2'-deoxy-2'-fluorouridine-3'-phosphate
  modified_base 8: mod_base = OTHER; note = 2'-O-methyladenosine-3'-phosphate
  modified_base 9: mod_base = OTHER; note = 2'-deoxy-2'-fluorouridine-3'-phosphate
  modified_base 10: mod_base = OTHER; note = 2'-deoxy-2'-fluorouridine-3'-phosphate
  modified_base 11: mod_base = OTHER; note = 2'-deoxy-2'-fluoroguanosine-3'-phosphate
  modified_base 12: mod_base = OTHER; note = 2'-O-methyluridine-3'-phosphate
  modified_base 13: mod_base = OTHER; note = 2'-O-methyladenosine-3'-phosphate
  modified_base 14: mod_base = OTHER; note = 2'-O-methylguanosine-3'-phosphate
  modified_base 15: mod_base = OTHER; note = 2'-O-methyladenosine-3'-phosphate
  modified_base 16: mod_base = OTHER; note = 2'-O-methyladenosine-3'-phosphate
  modified_base 17: mod_base = OTHER; note = 2'-O-methyluridine-3'-phosphate
  modified_base 18: mod_base = OTHER; note = 2'-O-methyluridine-3'-phosphate
  modified_base 19: mod_base = OTHER; note = 2'-O-methyladenosine-3'-phosphate
  modified_base 20: mod_base = OTHER; note = 2'-O-methylcytidine-3'-phosphate
  modified_base 21: mod_base = OTHER; note = 2'-O-methyladenosine
acctactattgtagaattaca

SEQ ID NO: 4125 - RNA, 21 nt, synthetic construct
  source 1..21: mol_type = other RNA
  modified_base 1: mod_base = OTHER; note = 2'-O-methyladenosine-3'-phosphate
  modified_base 2: mod_base = OTHER; note = 2'-O-methyladenosine-3'-phosphate
  modified_base 3: mod_base = OTHER; note = 2'-O-methyladenosine-3'-phosphate
  modified_base 4: mod_base = OTHER; note = 2'-O-methylcytidine-3'-phosphate
  modified_base 5: mod_base = OTHER; note = 2'-O-methyladenosine-3'-phosphate
  modified_base 6: mod_base = OTHER; note = 2'-O-methyladenosine-3'-phosphate
  modified_base 7: mod_base = OTHER; note = 2'-deoxy-2'-fluoroadenosine-3'-phosphate
  modified_base 8: mod_base = OTHER; note = 2'-O-methyladenosine-3'-phosphate
  modified_base 9: mod_base = OTHER; note = 2'-deoxy-2'-fluorocytidine-3'-phosphate
  modified_base 10: mod_base = OTHER; note = 2'-deoxy-2'-fluoroadenosine-3'-phosphate
  modified_base 11: mod_base = OTHER; note = 2'-deoxy-2'-fluoroadenosine-3'-phosphate
  modified_base 12: mod_base = OTHER; note = 2'-O-methyladenosine-3'-phosphate
  modified_base 13: mod_base = OTHER; note = 2'-O-methyladenosine-3'-phosphate
  modified_base 14: mod_base = OTHER; note = 2'-O-methylcytidine-3'-phosphate
  modified_base 15: mod_base = OTHER; note = 2'-O-methyluridine-3'-phosphate
  modified_base 16: mod_base = OTHER; note = 2'-O-methyladenosine-3'-phosphate
  modified_base 17: mod_base = OTHER; note = 2'-O-methylcytidine-3'-phosphate
  modified_base 18: mod_base = OTHER; note = 2'-O-methyluridine-3'-phosphate
  modified_base 19: mod_base = OTHER; note = 2'-O-methylcytidine-3'-phosphate
  modified_base 20: mod_base = OTHER; note = 2'-O-methylcytidine-3'-phosphate
  modified_base 21: mod_base = OTHER; note = 2'-O-methyladenosine
aaacaaaacaaaactactcca

SEQ ID NO: 4126 - RNA, 21 nt, synthetic construct
  source 1..21: mol_type = other RNA
  modified_base 1: mod_base = OTHER; note = 2'-O-methyladenosine-3'-phosphate
  modified_base 2: mod_base = OTHER; note = 2'-O-methylcytidine-3'-phosphate
  modified_base 3: mod_base = OTHER; note = 2'-O-methyladenosine-3'-phosphate
  modified_base 4: mod_base = OTHER; note = 2'-O-methyladenosine-3'-phosphate
  modified_base 5: mod_base = OTHER; note = 2'-O-methyladenosine-3'-phosphate
  modified_base 6: mod_base = OTHER; note = 2'-O-methyladenosine-3'-phosphate
  modified_base 7: mod_base = OTHER; note = 2'-deoxy-2'-fluorocytidine-3'-phosphate
  modified_base 8: mod_base = OTHER; note = 2'-O-methyladenosine-3'-phosphate
  modified_base 9: mod_base = OTHER; note = 2'-deoxy-2'-fluoroadenosine-3'-phosphate
  modified_base 10: mod_base = OTHER; note = 2'-deoxy-2'-fluoroadenosine-3'-phosphate
  modified_base 11: mod_base = OTHER; note = 2'-deoxy-2'-fluoroadenosine-3'-phosphate
  modified_base 12: mod_base = OTHER; note = 2'-O-methylcytidine-3'-phosphate
  modified_base 13: mod_base = OTHER; note = 2'-O-methyluridine-3'-phosphate
  modified_base 14: mod_base = OTHER; note = 2'-O-methyladenosine-3'-phosphate
  modified_base 15: mod_base = OTHER; note = 2'-O-methylcytidine-3'-phosphate
  modified_base 16: mod_base = OTHER; note = 2'-O-methyluridine-3'-phosphate
  modified_base 17: mod_base = OTHER; note = 2'-O-methylcytidine-3'-phosphate
  modified_base 18: mod_base = OTHER; note = 2'-O-methylcytidine-3'-phosphate
  modified_base 19: mod_base = OTHER; note = 2'-O-methyluridine-3'-phosphate
  modified_base 20: mod_base = OTHER; note = 2'-O-methyladenosine-3'-phosphate
  modified_base 21: mod_base = OTHER; note = 2'-O-methyladenosine
acaaaacaaaactactcctaa

SEQ ID NO: 4127 - RNA, 21 nt, synthetic construct
  source 1..21: mol_type = other RNA
  modified_base 1: mod_base = OTHER; note = 2'-O-methylcytidine-3'-phosphate
  modified_base 2: mod_base = OTHER; note = 2'-O-methyladenosine-3'-phosphate
  modified_base 3: mod_base = OTHER; note = 2'-O-methyladenosine-3'-phosphate
  modified_base 4: mod_base = OTHER; note = 2'-O-methyladenosine-3'-phosphate
  modified_base 5: mod_base = OTHER; note = 2'-O-methyladenosine-3'-phosphate
  modified_base 6: mod_base = OTHER; note = 2'-O-methylcytidine-3'-phosphate
  modified_base 7: mod_base = OTHER; note = 2'-deoxy-2'-fluoroadenosine-3'-phosphate
  modified_base 8: mod_base = OTHER; note = 2'-O-methyladenosine-3'-phosphate
  modified_base 9: mod_base = OTHER; note = 2'-deoxy-2'-fluoroadenosine-3'-phosphate
  modified_base 10: mod_base = OTHER; note = 2'-deoxy-2'-fluoroadenosine-3'-phosphate
  modified_base 11: mod_base = OTHER; note = 2'-deoxy-2'-fluorocytidine-3'-phosphate
  modified_base 12: mod_base = OTHER; note = 2'-O-methyluridine-3'-phosphate
  modified_base 13: mod_base = OTHER; note = 2'-O-methyladenosine-3'-phosphate
  modified_base 14: mod_base = OTHER; note = 2'-O-methylcytidine-3'-phosphate
  modified_base 15: mod_base = OTHER; note = 2'-O-methyluridine-3'-phosphate
  modified_base 16: mod_base = OTHER; note = 2'-O-methylcytidine-3'-phosphate
  modified_base 17: mod_base = OTHER; note = 2'-O-methylcytidine-3'-phosphate
  modified_base 18: mod_base = OTHER; note = 2'-O-methyluridine-3'-phosphate
  modified_base 19: mod_base = OTHER; note = 2'-O-methyladenosine-3'-phosphate
  modified_base 20: mod_base = OTHER; note = 2'-O-methyluridine-3'-phosphate
  modified_base 21: mod_base = OTHER; note = 2'-O-methyladenosine
caaaacaaaactactcctata

SEQ ID NO: 4128 - RNA, 21 nt, synthetic construct
  source 1..21: mol_type = other RNA
  modified_base 1: mod_base = OTHER; note = 2'-O-methyladenosine-3'-phosphate
  modified_base 2: mod_base = OTHER; note = 2'-O-methyladenosine-3'-phosphate
  modified_base 3: mod_base = OTHER; note = 2'-O-methyladenosine-3'-phosphate
  modified_base 4: mod_base = OTHER; note = 2'-O-methyladenosine-3'-phosphate
  modified_base 5: mod_base = OTHER; note = 2'-O-methylcytidine-3'-phosphate
  modified_base 6: mod_base = OTHER; note = 2'-O-methyladenosine-3'-phosphate
  modified_base 7: mod_base = OTHER; note = 2'-deoxy-2'-fluoroadenosine-3'-phosphate
  modified_base 8: mod_base = OTHER; note = 2'-O-methyladenosine-3'-phosphate
  modified_base 9: mod_base = OTHER; note = 2'-deoxy-2'-fluoroadenosine-3'-phosphate
  modified_base 10: mod_base = OTHER; note = 2'-deoxy-2'-fluorocytidine-3'-phosphate
  modified_base 11: mod_base = OTHER; note = 2'-deoxy-2'-fluorouridine-3'-phosphate
  modified_base 12: mod_base = OTHER; note = 2'-O-methyladenosine-3'-phosphate
  modified_base 13: mod_base = OTHER; note = 2'-O-methylcytidine-3'-phosphate
  modified_base 14: mod_base = OTHER; note = 2'-O-methyluridine-3'-phosphate
  modified_base 15: mod_base = OTHER; note = 2'-O-methylcytidine-3'-phosphate
  modified_base 16: mod_base = OTHER; note = 2'-O-methylcytidine-3'-phosphate
  modified_base 17: mod_base = OTHER; note = 2'-O-methyluridine-3'-phosphate
  modified_base 18: mod_base = OTHER; note = 2'-O-methyladenosine-3'-phosphate
  modified_base 19: mod_base = OTHER; note = 2'-O-methyluridine-3'-phosphate
  modified_base 20: mod_base = OTHER; note = 2'-O-methyluridine-3'-phosphate
  modified_base 21: mod_base = OTHER; note = 2'-O-methyladenosine
aaaacaaaactactcctatta

SEQ ID NO: 4129 - RNA, 21 nt, synthetic construct
  source 1..21: mol_type = other RNA
  modified_base 1: mod_base = OTHER; note = 2'-O-methyladenosine-3'-phosphate
  modified_base 2: mod_base = OTHER; note = 2'-O-methyladenosine-3'-phosphate
  modified_base 3: mod_base = OTHER; note = 2'-O-methyladenosine-3'-phosphate
  modified_base 4: mod_base = OTHER; note = 2'-O-methylcytidine-3'-phosphate
  modified_base 5: mod_base = OTHER; note = 2'-O-methyladenosine-3'-phosphate
  modified_base 6: mod_base = OTHER; note = 2'-O-methyladenosine-3'-phosphate
  modified_base 7: mod_base = OTHER; note = 2'-deoxy-2'-fluoroadenosine-3'-phosphate
  modified_base 8: mod_base = OTHER; note = 2'-O-methyladenosine-3'-phosphate
  modified_base 9: mod_base = OTHER; note = 2'-deoxy-2'-fluorocytidine-3'-phosphate
  modified_base 10: mod_base = OTHER; note = 2'-deoxy-2'-fluorouridine-3'-phosphate
  modified_base 11: mod_base = OTHER; note = 2'-deoxy-2'-fluoroadenosine-3'-phosphate
  modified_base 12: mod_base = OTHER; note = 2'-O-methylcytidine-3'-phosphate
  modified_base 13: mod_base = OTHER; note = 2'-O-methyluridine-3'-phosphate
  modified_base 14: mod_base = OTHER; note = 2'-O-methylcytidine-3'-phosphate
  modified_base 15: mod_base = OTHER; note = 2'-O-methylcytidine-3'-phosphate
  modified_base 16: mod_base = OTHER; note = 2'-O-methyluridine-3'-phosphate
  modified_base 17: mod_base = OTHER; note = 2'-O-methyladenosine-3'-phosphate
  modified_base 18: mod_base = OTHER; note = 2'-O-methyluridine-3'-phosphate
  modified_base 19: mod_base = OTHER; note = 2'-O-methyluridine-3'-phosphate
  modified_base 20: mod_base = OTHER; note = 2'-O-methyluridine-3'-phosphate
  modified_base 21: mod_base = OTHER; note = 2'-O-methyladenosine
aaacaaaactactcctattta

SEQ ID NO: 4130 - RNA, 21 nt, synthetic construct
  source 1..21: mol_type = other RNA
  modified_base 1: mod_base = OTHER; note = 2'-O-methyladenosine-3'-phosphate
  modified_base 2: mod_base = OTHER; note = 2'-O-methylcytidine-3'-phosphate
  modified_base 3: mod_base = OTHER; note = 2'-O-methyladenosine-3'-phosphate
  modified_base 4: mod_base = OTHER; note = 2'-O-methyladenosine-3'-phosphate
  modified_base 5: mod_base = OTHER; note = 2'-O-methyladenosine-3'-phosphate
  modified_base 6: mod_base = OTHER; note = 2'-O-methyladenosine-3'-phosphate
  modified_base 7: mod_base = OTHER; note = 2'-deoxy-2'-fluorocytidine-3'-phosphate
  modified_base 8: mod_base = OTHER; note = 2'-O-methyluridine-3'-phosphate
  modified_base 9: mod_base = OTHER; note = 2'-deoxy-2'-fluoroadenosine-3'-phosphate
  modified_base 10: mod_base = OTHER; note = 2'-deoxy-2'-fluorocytidine-3'-phosphate
  modified_base 11: mod_base = OTHER; note = 2'-deoxy-2'-fluorouridine-3'-phosphate
  modified_base 12: mod_base = OTHER; note = 2'-O-methylcytidine-3'-phosphate
  modified_base 13: mod_base = OTHER; note = 2'-O-methylcytidine-3'-phosphate
  modified_base 14: mod_base = OTHER; note = 2'-O-methyluridine-3'-phosphate
  modified_base 15: mod_base = OTHER; note = 2'-O-methyladenosine-3'-phosphate
  modified_base 16: mod_base = OTHER; note = 2'-O-methyluridine-3'-phosphate
  modified_base 17: mod_base = OTHER; note = 2'-O-methyluridine-3'-phosphate
  modified_base 18: mod_base = OTHER; note = 2'-O-methyluridine-3'-phosphate
  modified_base 19: mod_base = OTHER; note = 2'-O-methyluridine-3'-phosphate
  modified_base 20: mod_base = OTHER; note = 2'-O-methylcytidine-3'-phosphate
  modified_base 21: mod_base = OTHER; note = 2'-O-methyladenosine
acaaaactactcctattttca

SEQ ID NO: 4131 - RNA, 21 nt, synthetic construct
  source 1..21: mol_type = other RNA
  modified_base 1: mod_base = OTHER; note = 2'-O-methylcytidine-3'-phosphate
  modified_base 2: mod_base = OTHER; note = 2'-O-methyladenosine-3'-phosphate
  modified_base 3: mod_base = OTHER; note = 2'-O-methyladenosine-3'-phosphate
  modified_base 4: mod_base = OTHER; note = 2'-O-methyladenosine-3'-phosphate
  modified_base 5: mod_base = OTHER; note = 2'-O-methyladenosine-3'-phosphate
  modified_base 6: mod_base = OTHER; note = 2'-O-methylcytidine-3'-phosphate
  modified_base 7: mod_base = OTHER; note = 2'-deoxy-2'-fluorouridine-3'-phosphate
  modified_base 8: mod_base = OTHER; note = 2'-O-methyladenosine-3'-phosphate
  modified_base 9: mod_base = OTHER; note = 2'-deoxy-2'-fluorocytidine-3'-phosphate
  modified_base 10: mod_base = OTHER; note = 2'-deoxy-2'-fluorouridine-3'-phosphate
  modified_base 11: mod_base = OTHER; note = 2'-deoxy-2'-fluorocytidine-3'-phosphate
  modified_base 12: mod_base = OTHER; note = 2'-O-methylcytidine-3'-phosphate
  modified_base 13: mod_base = OTHER; note = 2'-O-methyluridine-3'-phosphate
  modified_base 14: mod_base = OTHER; note = 2'-O-methyladenosine-3'-phosphate
  modified_base 15: mod_base = OTHER; note = 2'-O-methyluridine-3'-phosphate
  modified_base 16: mod_base = OTHER; note = 2'-O-methyluridine-3'-phosphate
  modified_base 17: mod_base = OTHER; note = 2'-O-methyluridine-3'-phosphate
  modified_base 18: mod_base = OTHER; note = 2'-O-methyluridine-3'-phosphate
  modified_base 19: mod_base = OTHER; note = 2'-O-methylcytidine-3'-phosphate
  modified_base 20: mod_base = OTHER; note = 2'-O-methylcytidine-3'-phosphate
  modified_base 21: mod_base = OTHER; note = 2'-O-methyladenosine
caaaactactcctattttcca

SEQ ID NO: 4132 - RNA, 21 nt, synthetic construct
  source 1..21: mol_type = other RNA
  modified_base 1: mod_base = OTHER; note = 2'-O-methyladenosine-3'-phosphate
  modified_base 2: mod_base = OTHER; note = 2'-O-methyladenosine-3'-phosphate
  modified_base 3: mod_base = OTHER; note = 2'-O-methyladenosine-3'-phosphate
  modified_base 4: mod_base = OTHER; note = 2'-O-methyladenosine-3'-phosphate
  modified_base 5: mod_base = OTHER; note = 2'-O-methylcytidine-3'-phosphate
  modified_base 6: mod_base = OTHER; note = 2'-O-methyluridine-3'-phosphate
  modified_base 7: mod_base = OTHER; note = 2'-deoxy-2'-fluoroadenosine-3'-phosphate
  modified_base 8: mod_base = OTHER; note = 2'-O-methylcytidine-3'-phosphate
  modified_base 9: mod_base = OTHER; note = 2'-deoxy-2'-fluorouridine-3'-phosphate
  modified_base 10: mod_base = OTHER; note = 2'-deoxy-2'-fluorocytidine-3'-phosphate
  modified_base 11: mod_base = OTHER; note = 2'-deoxy-2'-fluorocytidine-3'-phosphate
  modified_base 12: mod_base = OTHER; note = 2'-O-methyluridine-3'-phosphate
  modified_base 13: mod_base = OTHER; note = 2'-O-methyladenosine-3'-phosphate
  modified_base 14: mod_base = OTHER; note = 2'-O-methyluridine-3'-phosphate
  modified_base 15: mod_base = OTHER; note = 2'-O-methyluridine-3'-phosphate
  modified_base 16: mod_base = OTHER; note = 2'-O-methyluridine-3'-phosphate
  modified_base 17: mod_base = OTHER; note = 2'-O-methyluridine-3'-phosphate
  modified_base 18: mod_base = OTHER; note = 2'-O-methylcytidine-3'-phosphate
  modified_base 19: mod_base = OTHER; note = 2'-O-methylcytidine-3'-phosphate
  modified_base 20: mod_base = OTHER; note = 2'-O-methyluridine-3'-phosphate
  modified_base 21: mod_base = OTHER; note = 2'-O-methyladenosine
aaaactactcctattttccta

SEQ ID NO: 4133 - RNA, 21 nt, synthetic construct
  source 1..21: mol_type = other RNA
  modified_base 1: mod_base = OTHER; note = 2'-O-methyladenosine-3'-phosphate
  modified_base 2: mod_base = OTHER; note = 2'-O-methyluridine-3'-phosphate
  modified_base 3: mod_base = OTHER; note = 2'-O-methyluridine-3'-phosphate
  modified_base 4: mod_base = OTHER; note = 2'-O-methyluridine-3'-phosphate
  modified_base 5: mod_base = OTHER; note = 2'-O-methyluridine-3'-phosphate
  modified_base 6: mod_base = OTHER; note = 2'-O-methylcytidine-3'-phosphate
  modified_base 7: mod_base = OTHER; note = 2'-deoxy-2'-fluorocytidine-3'-phosphate
  modified_base 8: mod_base = OTHER; note = 2'-O-methyluridine-3'-phosphate
  modified_base 9: mod_base = OTHER; note = 2'-deoxy-2'-fluoroguanosine-3'-phosphate
  modified_base 10: mod_base = OTHER; note = 2'-deoxy-2'-fluoroguanosine-3'-phosphate
  modified_base 11: mod_base = OTHER; note = 2'-deoxy-2'-fluoroadenosine-3'-phosphate
  modified_base 12: mod_base = OTHER; note = 2'-O-methyladenosine-3'-phosphate
  modified_base 13: mod_base = OTHER; note = 2'-O-methyluridine-3'-phosphate
  modified_base 14: mod_base = OTHER; note = 2'-O-methyluridine-3'-phosphate
  modified_base 15: mod_base = OTHER; note = 2'-O-methyluridine-3'-phosphate
  modified_base 16: mod_base = OTHER; note = 2'-O-methyluridine-3'-phosphate
  modified_base 17: mod_base = OTHER; note = 2'-O-methylguanosine-3'-phosphate
  modified_base 18: mod_base = OTHER; note = 2'-O-methylcytidine-3'-phosphate
  modified_base 19: mod_base = OTHER; note = 2'-O-methylcytidine-3'-phosphate
  modified_base 20: mod_base = OTHER; note = 2'-O-methyladenosine-3'-phosphate
  modified_base 21: mod_base = OTHER; note = 2'-O-methyladenosine
attttcctggaattttgccaa

SEQ ID NO: 4134 - RNA, 21 nt, synthetic construct
  source 1..21: mol_type = other RNA
  modified_base 1: mod_base = OTHER; note = 2'-O-methylguanosine-3'-phosphate
  modified_base 2: mod_base = OTHER; note = 2'-O-methyladenosine-3'-phosphate
  modified_base 3: mod_base = OTHER; note = 2'-O-methyluridine-3'-phosphate
  modified_base 4: mod_base = OTHER; note = 2'-O-methylguanosine-3'-phosphate
  modified_base 5: mod_base = OTHER; note = 2'-O-methyluridine-3'-phosphate
  modified_base 6: mod_base = OTHER; note = 2'-O-methyluridine-3'-phosphate
  modified_base 7: mod_base = OTHER; note = 2'-deoxy-2'-fluorouridine-3'-phosphate
  modified_base 8: mod_base = OTHER; note = 2'-O-methylguanosine-3'-phosphate
  modified_base 9: mod_base = OTHER; note = 2'-deoxy-2'-fluorocytidine-3'-phosphate
  modified_base 10: mod_base = OTHER; note = 2'-deoxy-2'-fluorocytidine-3'-phosphate
  modified_base 11: mod_base = OTHER; note = 2'-deoxy-2'-fluoroadenosine-3'-phosphate
  modified_base 12: mod_base = OTHER; note = 2'-O-methyluridine-3'-phosphate
  modified_base 13: mod_base = OTHER; note = 2'-O-methyluridine-3'-phosphate
  modified_base 14: mod_base = OTHER; note = 2'-O-methyladenosine-3'-phosphate
  modified_base 15: mod_base = OTHER; note = 2'-O-methyluridine-3'-phosphate
  modified_base 16: mod_base = OTHER; note = 2'-O-methyladenosine-3'-phosphate
  modified_base 17: mod_base = OTHER; note = 2'-O-methylcytidine-3'-phosphate
  modified_base 18: mod_base = OTHER; note = 2'-O-methyladenosine-3'-phosphate
  modified_base 19: mod_base = OTHER; note = 2'-O-methyladenosine-3'-phosphate
  modified_base 20: mod_base = OTHER; note = 2'-O-methyladenosine-3'-phosphate
  modified_base 21: mod_base = OTHER; note = 2'-O-methyladenosine
gatgtttgccattatacaaaa

SEQ ID NO: 4135 - RNA, 21 nt, synthetic construct
  source 1..21: mol_type = other RNA
  modified_base 1: mod_base = OTHER; note = 2'-O-methylcytidine-3'-phosphate
  modified_base 2: mod_base = OTHER; note = 2'-O-methyladenosine-3'-phosphate
  modified_base 3: mod_base = OTHER; note = 2'-O-methyladenosine-3'-phosphate
  modified_base 4: mod_base = OTHER; note = 2'-O-methyladenosine-3'-phosphate
  modified_base 5: mod_base = OTHER; note = 2'-O-methylguanosine-3'-phosphate
  modified_base 6: mod_base = OTHER; note = 2'-O-methyluridine-3'-phosphate
  modified_base 7: mod_base = OTHER; note = 2'-deoxy-2'-fluorouridine-3'-phosphate
  modified_base 8: mod_base = OTHER; note = 2'-O-methyluridine-3'-phosphate
  modified_base 9: mod_base = OTHER; note = 2'-deoxy-2'-fluoroguanosine-3'-phosphate
  modified_base 10: mod_base = OTHER; note = 2'-deoxy-2'-fluoroadenosine-3'-phosphate
  modified_base 11: mod_base = OTHER; note = 2'-deoxy-2'-fluoroguanosine-3'-phosphate
  modified_base 12: mod_base = OTHER; note = 2'-O-methyluridine-3'-phosphate
  modified_base 13: mod_base = OTHER; note = 2'-O-methyladenosine-3'-phosphate
  modified_base 14: mod_base = OTHER; note = 2'-O-methyladenosine-3'-phosphate
  modified_base 15: mod_base = OTHER; note = 2'-O-methyladenosine-3'-phosphate
  modified_base 16: mod_base = OTHER; note = 2'-O-methylcytidine-3'-phosphate
  modified_base 17: mod_base = OTHER; note = 2'-O-methyladenosine-3'-phosphate
  modified_base 18: mod_base = OTHER; note = 2'-O-methyladenosine-3'-phosphate
  modified_base 19: mod_base = OTHER; note = 2'-O-methylcytidine-3'-phosphate
  modified_base 20: mod_base = OTHER; note = 2'-O-methyluridine-3'-phosphate
  modified_base 21: mod_base = OTHER; note = 2'-O-methyladenosine
caaagtttgagtaaacaacta

SEQ ID NO: 4136 - RNA, 21 nt, synthetic construct
  source 1..21: mol_type = other RNA
  modified_base 1: mod_base = OTHER; note = 2'-O-methyladenosine-3'-phosphate
  modified_base 2: mod_base = OTHER; note = 2'-O-methyladenosine-3'-phosphate
  modified_base 3: mod_base = OTHER; note = 2'-O-methyladenosine-3'-phosphate
  modified_base 4: mod_base = OTHER; note = 2'-O-methylguanosine-3'-phosphate
  modified_base 5: mod_base = OTHER; note = 2'-O-methyluridine-3'-phosphate
  modified_base 6: mod_base = OTHER; note = 2'-O-methyluridine-3'-phosphate
  modified_base 7: mod_base = OTHER; note = 2'-deoxy-2'-fluorouridine-3'-phosphate
  modified_base 8: mod_base = OTHER; note = 2'-O-methylguanosine-3'-phosphate
  modified_base 9: mod_base = OTHER; note = 2'-deoxy-2'-fluoroadenosine-3'-phosphate
  modified_base 10: mod_base = OTHER; note = 2'-deoxy-2'-fluoroguanosine-3'-phosphate
  modified_base 11: mod_base = OTHER; note = 2'-deoxy-2'-fluorouridine-3'-phosphate
  modified_base 12: mod_base = OTHER; note = 2'-O-methyladenosine-3'-phosphate
  modified_base 13: mod_base = OTHER; note = 2'-O-methyladenosine-3'-phosphate
  modified_base 14: mod_base = OTHER; note = 2'-O-methyladenosine-3'-phosphate
  modified_base 15: mod_base = OTHER; note = 2'-O-methylcytidine-3'-phosphate
  modified_base 16: mod_base = OTHER; note = 2'-O-methyladenosine-3'-phosphate
  modified_base 17: mod_base = OTHER; note = 2'-O-methyladenosine-3'-phosphate
  modified_base 18: mod_base = OTHER; note = 2'-O-methylcytidine-3'-phosphate
  modified_base 19: mod_base = OTHER; note = 2'-O-methyluridine-3'-phosphate
  modified_base 20: mod_base = OTHER; note = 2'-O-methyluridine-3'-phosphate
  modified_base 21: mod_base = OTHER; note = 2'-O-methyladenosine
aaagtttgagtaaacaactta

SEQ ID NO: 4137 - RNA, 21 nt, synthetic construct
  source 1..21: mol_type = other RNA
  modified_base 1: mod_base = OTHER; note = 2'-O-methyladenosine-3'-phosphate
  modified_base 2: mod_base = OTHER; note = 2'-O-methyladenosine-3'-phosphate
  modified_base 3: mod_base = OTHER; note = 2'-O-methylguanosine-3'-phosphate
  modified_base 4: mod_base = OTHER; note = 2'-O-methyluridine-3'-phosphate
  modified_base 5: mod_base = OTHER; note = 2'-O-methyluridine-3'-phosphate
  modified_base 6: mod_base = OTHER; note = 2'-O-methyluridine-3'-phosphate
  modified_base 7: mod_base = OTHER; note = 2'-deoxy-2'-fluoroguanosine-3'-phosphate
  modified_base 8: mod_base = OTHER; note = 2'-O-methyladenosine-3'-phosphate
  modified_base 9: mod_base = OTHER; note = 2'-deoxy-2'-fluoroguanosine-3'-phosphate
  modified_base 10: mod_base = OTHER; note = 2'-deoxy-2'-fluorouridine-3'-phosphate
  modified_base 11: mod_base = OTHER; note = 2'-deoxy-2'-fluoroadenosine-3'-phosphate
  modified_base 12: mod_base = OTHER; note = 2'-O-methyladenosine-3'-phosphate
  modified_base 13: mod_base = OTHER; note = 2'-O-methyladenosine-3'-phosphate
  modified_base 14: mod_base = OTHER; note = 2'-O-methylcytidine-3'-phosphate
  modified_base 15: mod_base = OTHER; note = 2'-O-methyladenosine-3'-phosphate
  modified_base 16: mod_base = OTHER; note = 2'-O-methyladenosine-3'-phosphate
  modified_base 17: mod_base = OTHER; note = 2'-O-methylcytidine-3'-phosphate
  modified_base 18: mod_base = OTHER; note = 2'-O-methyluridine-3'-phosphate
  modified_base 19: mod_base = OTHER; note = 2'-O-methyluridine-3'-phosphate
  modified_base 20: mod_base = OTHER; note = 2'-O-methyladenosine-3'-phosphate
  modified_base 21: mod_base = OTHER; note = 2'-O-methyladenosine
aagtttgagtaaacaacttaa

SEQ ID NO: 4138 - RNA, 21 nt, synthetic construct
  source 1..21: mol_type = other RNA
  modified_base 1: mod_base = OTHER; note = 2'-O-methyladenosine-3'-phosphate
  modified_base 2: mod_base = OTHER; note = 2'-O-methylguanosine-3'-phosphate
  modified_base 3: mod_base = OTHER; note = 2'-O-methyluridine-3'-phosphate
  modified_base 4: mod_base = OTHER; note = 2'-O-methyladenosine-3'-phosphate
  modified_base 5: mod_base = OTHER; note = 2'-O-methyladenosine-3'-phosphate
  modified_base 6: mod_base = OTHER; note = 2'-O-methyladenosine-3'-phosphate
  modified_base 7: mod_base = OTHER; note = 2'-deoxy-2'-fluorocytidine-3'-phosphate
  modified_base 8: mod_base = OTHER; note = 2'-O-methyladenosine-3'-phosphate
  modified_base 9: mod_base = OTHER; note = 2'-deoxy-2'-fluoroadenosine-3'-phosphate
  modified_base 10: mod_base = OTHER; note = 2'-deoxy-2'-fluorocytidine-3'-phosphate
  modified_base 11: mod_base = OTHER; note = 2'-deoxy-2'-fluorouridine-3'-phosphate
  modified_base 12: mod_base = OTHER; note = 2'-O-methyluridine-3'-phosphate
  modified_base 13: mod_base = OTHER; note = 2'-O-methyladenosine-3'-phosphate
  modified_base 14: mod_base = OTHER; note = 2'-O-methyladenosine-3'-phosphate
  modified_base 15: mod_base = OTHER; note = 2'-O-methyladenosine-3'-phosphate
  modified_base 16: mod_base = OTHER; note = 2'-O-methyladenosine-3'-phosphate
  modified_base 17: mod_base = OTHER; note = 2'-O-methyluridine-3'-phosphate
  modified_base 18: mod_base = OTHER; note = 2'-O-methyluridine-3'-phosphate
  modified_base 19: mod_base = OTHER; note = 2'-O-methylguanosine-3'-phosphate
  modified_base 20: mod_base = OTHER; note = 2'-O-methylcytidine-3'-phosphate
  modified_base 21: mod_base = OTHER; note = 2'-O-methyladenosine
agtaaacaacttaaaattgca

SEQ ID NO: 4139 - RNA, 21 nt, synthetic construct
  source 1..21: mol_type = other RNA
  modified_base 1: mod_base = OTHER; note = 2'-O-methylguanosine-3'-phosphate
  modified_base 2: mod_base = OTHER; note = 2'-O-methyluridine-3'-phosphate
  modified_base 3: mod_base = OTHER; note = 2'-O-methyladenosine-3'-phosphate
  modified_base 4: mod_base = OTHER; note = 2'-O-methyladenosine-3'-phosphate
  modified_base 5: mod_base = OTHER; note = 2'-O-methyladenosine-3'-phosphate
  modified_base 6: mod_base = OTHER; note = 2'-O-methylcytidine-3'-phosphate
  modified_base 7: mod_base = OTHER; note = 2'-deoxy-2'-fluoroadenosine-3'-phosphate
  modified_base 8: mod_base = OTHER; note = 2'-O-methyladenosine-3'-phosphate
  modified_base 9: mod_base = OTHER; note = 2'-deoxy-2'-fluorocytidine-3'-phosphate
  modified_base 10: mod_base = OTHER; note = 2'-deoxy-2'-fluorouridine-3'-phosphate
  modified_base 11: mod_base = OTHER; note = 2'-deoxy-2'-fluorouridine-3'-phosphate
  modified_base 12: mod_base = OTHER; note = 2'-O-methyladenosine-3'-phosphate
  modified_base 13: mod_base = OTHER; note = 2'-O-methyladenosine-3'-phosphate
  modified_base 14: mod_base = OTHER; note = 2'-O-methyladenosine-3'-phosphate
  modified_base 15: mod_base = OTHER; note = 2'-O-methyladenosine-3'-phosphate
  modified_base 16: mod_base = OTHER; note = 2'-O-methyluridine-3'-phosphate
  modified_base 17: mod_base = OTHER; note = 2'-O-methyluridine-3'-phosphate
  modified_base 18: mod_base = OTHER; note = 2'-O-methylguanosine-3'-phosphate
  modified_base 19: mod_base = OTHER; note = 2'-O-methylcytidine-3'-phosphate
  modified_base 20: mod_base = OTHER; note = 2'-O-methyluridine-3'-phosphate
  modified_base 21: mod_base = OTHER; note = 2'-O-methyladenosine
gtaaacaacttaaaattgcta

SEQ ID NO: 4140 - RNA, 21 nt, synthetic construct
  source 1..21: mol_type = other RNA
  modified_base 1: mod_base = OTHER; note = 2'-O-methyladenosine-3'-phosphate
  modified_base 2: mod_base = OTHER; note = 2'-O-methyladenosine-3'-phosphate
  modified_base 3: mod_base = OTHER; note = 2'-O-methyladenosine-3'-phosphate
  modified_base 4: mod_base = OTHER; note = 2'-O-methylcytidine-3'-phosphate
  modified_base 5: mod_base = OTHER; note = 2'-O-methyladenosine-3'-phosphate
  modified_base 6: mod_base = OTHER; note = 2'-O-methyladenosine-3'-phosphate
  modified_base 7: mod_base = OTHER; note = 2'-deoxy-2'-fluorocytidine-3'-phosphate
  modified_base 8: mod_base = OTHER; note = 2'-O-methyluridine-3'-phosphate
  modified_base 9: mod_base = OTHER; note = 2'-deoxy-2'-fluorouridine-3'-phosphate
  modified_base 10: mod_base = OTHER; note = 2'-deoxy-2'-fluoroadenosine-3'-phosphate
  modified_base 11: mod_base = OTHER; note = 2'-deoxy-2'-fluoroadenosine-3'-phosphate
  modified_base 12: mod_base = OTHER; note = 2'-O-methyladenosine-3'-phosphate
  modified_base 13: mod_base = OTHER; note = 2'-O-methyladenosine-3'-phosphate
  modified_base 14: mod_base = OTHER; note = 2'-O-methyluridine-3'-phosphate
  modified_base 15: mod_base = OTHER; note = 2'-O-methyluridine-3'-phosphate
  modified_base 16: mod_base = OTHER; note = 2'-O-methylguanosine-3'-phosphate
  modified_base 17: mod_base = OTHER; note = 2'-O-methylcytidine-3'-phosphate
  modified_base 18: mod_base = OTHER; note = 2'-O-methyluridine-3'-phosphate
  modified_base 19: mod_base = OTHER; note = 2'-O-methyluridine-3'-phosphate
  modified_base 20: mod_base = OTHER; note = 2'-O-methylguanosine-3'-phosphate
  modified_base 21: mod_base = OTHER; note = 2'-O-methyladenosine
aaacaacttaaaattgcttga

SEQ ID NO: 4141 - RNA, 21 nt, synthetic construct
  source 1..21: mol_type = other RNA
  modified_base 1: mod_base = OTHER; note = 2'-O-methyladenosine-3'-phosphate
  modified_base 2: mod_base = OTHER; note = 2'-O-methyluridine-3'-phosphate
  modified_base 3: mod_base = OTHER; note = 2'-O-methyladenosine-3'-phosphate
  modified_base 4: mod_base = OTHER; note = 2'-O-methylguanosine-3'-phosphate
  modified_base 5: mod_base = OTHER; note = 2'-O-methyluridine-3'-phosphate
  modified_base 6: mod_base = OTHER; note = 2'-O-methylcytidine-3'-phosphate
  modified_base 7: mod_base = OTHER; note = 2'-deoxy-2'-fluorouridine-3'-phosphate
  modified_base 8: mod_base = OTHER; note = 2'-O-methyluridine-3'-phosphate
  modified_base 9: mod_base = OTHER; note = 2'-deoxy-2'-fluorouridine-3'-phosphate
  modified_base 10: mod_base = OTHER; note = 2'-deoxy-2'-fluoroguanosine-3'-phosphate
  modified_base 11: mod_base = OTHER; note = 2'-deoxy-2'-fluoroadenosine-3'-phosphate
  modified_base 12: mod_base = OTHER; note = 2'-O-methyluridine-3'-phosphate
  modified_base 13: mod_base = OTHER; note = 2'-O-methyluridine-3'-phosphate
  modified_base 14: mod_base = OTHER; note = 2'-O-methylguanosine-3'-phosphate
  modified_base 15: mod_base = OTHER; note = 2'-O-methyladenosine-3'-phosphate
  modified_base 16: mod_base = OTHER; note = 2'-O-methyladenosine-3'-phosphate
  modified_base 17: mod_base = OTHER; note = 2'-O-methyladenosine-3'-phosphate
  modified_base 18: mod_base = OTHER; note = 2'-O-methyluridine-3'-phosphate
  modified_base 19: mod_base = OTHER; note = 2'-O-methyladenosine-3'-phosphate
  modified_base 20: mod_base = OTHER; note = 2'-O-methyladenosine-3'-phosphate
  modified_base 21: mod_base = OTHER; note = 2'-O-methyladenosine
atagtctttgattgaaataaa

SEQ ID NO: 4142 - RNA, 21 nt, synthetic construct
  source 1..21: mol_type = other RNA
  modified_base 1: mod_base = OTHER; note = 2'-O-methylguanosine-3'-phosphate
  modified_base 2: mod_base = OTHER; note = 2'-O-methyladenosine-3'-phosphate
  modified_base 3: mod_base = OTHER; note = 2'-O-methylguanosine-3'-phosphate
  modified_base 4: mod_base = OTHER; note = 2'-O-methyladenosine-3'-phosphate
  modified_base 5: mod_base = OTHER; note = 2'-O-methyladenosine-3'-phosphate
  modified_base 6: mod_base = OTHER; note = 2'-O-methyluridine-3'-phosphate
  modified_base 7: mod_base = OTHER; note = 2'-deoxy-2'-fluoroguanosine-3'-phosphate
  modified_base 8: mod_base = OTHER; note = 2'-O-methyluridine-3'-phosphate
  modified_base 9: mod_base = OTHER; note = 2'-deoxy-2'-fluoroadenosine-3'-phosphate
  modified_base 10: mod_base = OTHER; note = 2'-deoxy-2'-fluorouridine-3'-phosphate
  modified_base 11: mod_base = OTHER; note = 2'-deoxy-2'-fluorouridine-3'-phosphate
  modified_base 12: mod_base = OTHER; note = 2'-O-methyluridine-3'-phosphate
  modified_base 13: mod_base = OTHER; note = 2'-O-methylguanosine-3'-phosphate
  modified_base 14: mod_base = OTHER; note = 2'-O-methylguanosine-3'-phosphate
  modified_base 15: mod_base = OTHER; note = 2'-O-methylcytidine-3'-phosphate
  modified_base 16: mod_base = OTHER; note = 2'-O-methyluridine-3'-phosphate
  modified_base 17: mod_base = OTHER; note = 2'-O-methyladenosine-3'-phosphate
  modified_base 18: mod_base = OTHER; note = 2'-O-methyladenosine-3'-phosphate
  modified_base 19: mod_base = OTHER; note = 2'-O-methyladenosine-3'-phosphate
  modified_base 20: mod_base = OTHER; note = 2'-O-methyluridine-3'-phosphate
  modified_base 21: mod_base = OTHER; note = 2'-O-methyladenosine
gagaatgtatttggctaaata

SEQ ID NO: 4143 - RNA, 21 nt, synthetic construct
  source 1..21: mol_type = other RNA
  modified_base 1: mod_base = OTHER; note = 2'-O-methylcytidine-3'-phosphate
  modified_base 2: mod_base = OTHER; note = 2'-O-methyluridine-3'-phosphate
  modified_base 3: mod_base = OTHER; note = 2'-O-methylguanosine-3'-phosphate
  modified_base 4: mod_base = OTHER; note = 2'-O-methylguanosine-3'-phosphate
  modified_base 5: mod_base = OTHER; note = 2'-O-methylcytidine-3'-phosphate
  modified_base 6: mod_base = OTHER; note = 2'-O-methyladenosine-3'-phosphate
  modified_base 7: mod_base = OTHER; note = 2'-deoxy-2'-fluoroguanosine-3'-phosphate
  modified_base 8: mod_base = OTHER; note = 2'-O-methyluridine-3'-phosphate
  modified_base 9: mod_base = OTHER; note = 2'-deoxy-2'-fluorouridine-3'-phosphate
  modified_base 10: mod_base = OTHER; note = 2'-deoxy-2'-fluoroguanosine-3'-phosphate
  modified_base 11: mod_base = OTHER; note = 2'-deoxy-2'-fluoroadenosine-3'-phosphate
  modified_base 12: mod_base = OTHER; note = 2'-O-methyluridine-3'-phosphate
  modified_base 13: mod_base = OTHER; note = 2'-O-methylguanosine-3'-phosphate
  modified_base 14: mod_base = OTHER; note = 2'-O-methyluridine-3'-phosphate
  modified_base 15: mod_base = OTHER; note = 2'-O-methylcytidine-3'-phosphate
  modified_base 16: mod_base = OTHER; note = 2'-O-methyluridine-3'-phosphate
  modified_base 17: mod_base = OTHER; note = 2'-O-methyluridine-3'-phosphate
  modified_base 18: mod_base = OTHER; note = 2'-O-methylcytidine-3'-phosphate
  modified_base 19: mod_base = OTHER; note = 2'-O-methyladenosine-3'-phosphate
  modified_base 20: mod_base = OTHER; note = 2'-O-methyladenosine-3'-phosphate
  modified_base 21: mod_base = OTHER; note = 2'-O-methyladenosine
ctggcagttgatgtcttcaaa

SEQ ID NO: 4144 - RNA, 21 nt, synthetic construct
  source 1..21: mol_type = other RNA
  modified_base 1: mod_base = OTHER; note = 2'-O-methylguanosine-3'-phosphate
  modified_base 2: mod_base = OTHER; note = 2'-O-methylguanosine-3'-phosphate
  modified_base 3: mod_base = OTHER; note = 2'-O-methylcytidine-3'-phosphate
  modified_base 4: mod_base = OTHER; note = 2'-O-methyladenosine-3'-phosphate
  modified_base 5: mod_base = OTHER; note = 2'-O-methylguanosine-3'-phosphate
  modified_base 6: mod_base = OTHER; note = 2'-O-methyluridine-3'-phosphate
  modified_base 7: mod_base = OTHER; note = 2'-deoxy-2'-fluorouridine-3'-phosphate
  modified_base 8: mod_base = OTHER; note = 2'-O-methylguanosine-3'-phosphate
  modified_base 9: mod_base = OTHER; note = 2'-deoxy-2'-fluoroadenosine-3'-phosphate
  modified_base 10: mod_base = OTHER; note = 2'-deoxy-2'-fluorouridine-3'-phosphate
  modified_base 11: mod_base = OTHER; note = 2'-deoxy-2'-fluoroguanosine-3'-phosphate
  modified_base 12: mod_base = OTHER; note = 2'-O-methyluridine-3'-phosphate
  modified_base 13: mod_base = OTHER; note = 2'-O-methylcytidine-3'-phosphate
  modified_base 14: mod_base = OTHER; note = 2'-O-methyluridine-3'-phosphate
  modified_base 15: mod_base = OTHER; note = 2'-O-methyluridine-3'-phosphate
  modified_base 16: mod_base = OTHER; note = 2'-O-methylcytidine-3'-phosphate
  modified_base 17: mod_base = OTHER; note = 2'-O-methyladenosine-3'-phosphate
  modified_base 18: mod_base = OTHER; note = 2'-O-methyladenosine-3'-phosphate
  modified_base 19: mod_base = OTHER; note = 2'-O-methyluridine-3'-phosphate
  modified_base 20: mod_base = OTHER; note = 2'-O-methyladenosine-3'-phosphate
  modified_base 21: mod_base = OTHER; note = 2'-O-methyladenosine
ggcagttgatgtcttcaataa

SEQ ID NO: 4145 - RNA, 21 nt, synthetic construct
  source 1..21: mol_type = other RNA
  modified_base 1: mod_base = OTHER; note = 2'-O-methylguanosine-3'-phosphate
  modified_base 2: mod_base = OTHER; note = 2'-O-methylcytidine-3'-phosphate
  modified_base 3: mod_base = OTHER; note = 2'-O-methyladenosine-3'-phosphate
  modified_base 4: mod_base = OTHER; note = 2'-O-methylguanosine-3'-phosphate
  modified_base 5: mod_base = OTHER; note = 2'-O-methyluridine-3'-phosphate
  modified_base 6: mod_base = OTHER; note = 2'-O-methyluridine-3'-phosphate
  modified_base 7: mod_base = OTHER; note = 2'-deoxy-2'-fluoroguanosine-3'-phosphate
  modified_base 8: mod_base = OTHER; note = 2'-O-methyladenosine-3'-phosphate
  modified_base 9: mod_base = OTHER; note = 2'-deoxy-2'-fluorouridine-3'-phosphate
  modified_base 10: mod_base = OTHER; note = 2'-deoxy-2'-fluoroguanosine-3'-phosphate
  modified_base 11: mod_base = OTHER; note = 2'-deoxy-2'-fluorouridine-3'-phosphate
  modified_base 12: mod_base = OTHER; note = 2'-O-methylcytidine-3'-phosphate
  modified_base 13: mod_base = OTHER; note = 2'-O-methyluridine-3'-phosphate
  modified_base 14: mod_base = OTHER; note = 2'-O-methyluridine-3'-phosphate
  modified_base 15: mod_base = OTHER; note = 2'-O-methylcytidine-3'-phosphate
  modified_base 16: mod_base = OTHER; note = 2'-O-methyladenosine-3'-phosphate
  modified_base 17: mod_base = OTHER; note = 2'-O-methyladenosine-3'-phosphate
  modified_base 18: mod_base = OTHER; note = 2'-O-methyluridine-3'-phosphate
  modified_base 19: mod_base = OTHER; note = 2'-O-methyladenosine-3'-phosphate
  modified_base 20: mod_base = OTHER; note = 2'-O-methyladenosine-3'-phosphate
  modified_base 21: mod_base = OTHER; note = 2'-O-methyladenosine
gcagttgatgtcttcaataaa

SEQ ID NO: 4146 - RNA, 21 nt, synthetic construct
  source 1..21: mol_type = other RNA
  modified_base 1: mod_base = OTHER; note = 2'-O-methylcytidine-3'-phosphate
  modified_base 2: mod_base = OTHER; note = 2'-O-methyladenosine-3'-phosphate
  modified_base 3: mod_base = OTHER; note = 2'-O-methylguanosine-3'-phosphate
  modified_base 4: mod_base = OTHER; note = 2'-O-methyluridine-3'-phosphate
  modified_base 5: mod_base = OTHER; note = 2'-O-methyluridine-3'-phosphate
  modified_base 6: mod_base = OTHER; note = 2'-O-methylguanosine-3'-phosphate
  modified_base 7: mod_base = OTHER; note = 2'-deoxy-2'-fluoroadenosine-3'-phosphate
  modified_base 8: mod_base = OTHER; note = 2'-O-methyluridine-3'-phosphate
  modified_base 9: mod_base = OTHER; note = 2'-deoxy-2'-fluoroguanosine-3'-phosphate
  modified_base 10: mod_base = OTHER; note = 2'-deoxy-2'-fluorouridine-3'-phosphate
  modified_base 11: mod_base = OTHER; note = 2'-deoxy-2'-fluorocytidine-3'-phosphate
  modified_base 12: mod_base = OTHER; note = 2'-O-methyluridine-3'-phosphate
  modified_base 13: mod_base = OTHER; note = 2'-O-methyluridine-3'-phosphate
  modified_base 14: mod_base = OTHER; note = 2'-O-methylcytidine-3'-phosphate
  modified_base 15: mod_base = OTHER; note = 2'-O-methyladenosine-3'-phosphate
  modified_base 16: mod_base = OTHER; note = 2'-O-methyladenosine-3'-phosphate
  modified_base 17: mod_base = OTHER; note = 2'-O-methyluridine-3'-phosphate
  modified_base 18: mod_base = OTHER; note = 2'-O-methyladenosine-3'-phosphate
  modified_base 19: mod_base = OTHER; note = 2'-O-methyladenosine-3'-phosphate
  modified_base 20: mod_base = OTHER; note = 2'-O-methyluridine-3'-phosphate
  modified_base 21: mod_base = OTHER; note = 2'-O-methyladenosine
cagttgatgtcttcaataata

SEQ ID NO: 4147 - RNA, 21 nt, synthetic construct
  source 1..21: mol_type = other RNA
  modified_base 1: mod_base = OTHER; note = 2'-O-methyladenosine-3'-phosphate
  modified_base 2: mod_base = OTHER; note = 2'-O-methylguanosine-3'-phosphate
  modified_base 3: mod_base = OTHER; note = 2'-O-methyluridine-3'-phosphate
  modified_base 4: mod_base = OTHER; note = 2'-O-methyluridine-3'-phosphate
  modified_base 5: mod_base = OTHER; note = 2'-O-methylguanosine-3'-phosphate
  modified_base 6: mod_base = OTHER; note = 2'-O-methyladenosine-3'-phosphate
  modified_base 7: mod_base = OTHER; note = 2'-deoxy-2'-fluorouridine-3'-phosphate
  modified_base 8: mod_base = OTHER; note = 2'-O-methylguanosine-3'-phosphate
  modified_base 9: mod_base = OTHER; note = 2'-deoxy-2'-fluorouridine-3'-phosphate
  modified_base 10: mod_base = OTHER; note = 2'-deoxy-2'-fluorocytidine-3'-phosphate
  modified_base 11: mod_base = OTHER; note = 2'-deoxy-2'-fluorouridine-3'-phosphate
  modified_base 12: mod_base = OTHER; note = 2'-O-methyluridine-3'-phosphate
  modified_base 13: mod_base = OTHER; note = 2'-O-methylcytidine-3'-phosphate
  modified_base 14: mod_base = OTHER; note = 2'-O-methyladenosine-3'-phosphate
  modified_base 15: mod_base = OTHER; note = 2'-O-methyladenosine-3'-phosphate
  modified_base 16: mod_base = OTHER; note = 2'-O-methyluridine-3'-phosphate
  modified_base 17: mod_base = OTHER; note = 2'-O-methyladenosine-3'-phosphate
  modified_base 18: mod_base = OTHER; note = 2'-O-methyladenosine-3'-phosphate
  modified_base 19: mod_base = OTHER; note = 2'-O-methyluridine-3'-phosphate
  modified_base 20: mod_base = OTHER; note = 2'-O-methylcytidine-3'-phosphate
  modified_base 21: mod_base = OTHER; note = 2'-O-methyladenosine
agttgatgtcttcaataatca

SEQ ID NO: 4148 - RNA, 21 nt, synthetic construct
  source 1..21: mol_type = other RNA
  modified_base 1: mod_base = OTHER; note = 2'-O-methylguanosine-3'-phosphate
  modified_base 2: mod_base = OTHER; note = 2'-O-methyluridine-3'-phosphate
  modified_base 3: mod_base = OTHER; note = 2'-O-methyluridine-3'-phosphate
  modified_base 4: mod_base = OTHER; note = 2'-O-methylguanosine-3'-phosphate
  modified_base 5: mod_base = OTHER; note = 2'-O-methyladenosine-3'-phosphate
  modified_base 6: mod_base = OTHER; note = 2'-O-methyluridine-3'-phosphate
  modified_base 7: mod_base = OTHER; note = 2'-deoxy-2'-fluoroguanosine-3'-phosphate
  modified_base 8: mod_base = OTHER; note = 2'-O-methyluridine-3'-phosphate
  modified_base 9: mod_base = OTHER; note = 2'-deoxy-2'-fluorocytidine-3'-phosphate
  modified_base 10: mod_base = OTHER; note = 2'-deoxy-2'-fluorouridine-3'-phosphate
  modified_base 11: mod_base = OTHER; note = 2'-deoxy-2'-fluorouridine-3'-phosphate
  modified_base 12: mod_base = OTHER; note = 2'-O-methylcytidine-3'-phosphate
  modified_base 13: mod_base = OTHER; note = 2'-O-methyladenosine-3'-phosphate
  modified_base 14: mod_base = OTHER; note = 2'-O-methyladenosine-3'-phosphate
  modified_base 15: mod_base = OTHER; note = 2'-O-methyluridine-3'-phosphate
  modified_base 16: mod_base = OTHER; note = 2'-O-methyladenosine-3'-phosphate
  modified_base 17: mod_base = OTHER; note = 2'-O-methyladenosine-3'-phosphate
  modified_base 18: mod_base = OTHER; note = 2'-O-methyluridine-3'-phosphate
  modified_base 19: mod_base = OTHER; note = 2'-O-methylcytidine-3'-phosphate
  modified_base 20: mod_base = OTHER; note = 2'-O-methyladenosine-3'-phosphate
  modified_base 21: mod_base = OTHER; note = 2'-O-methyladenosine
gttgatgtcttcaataatcaa

SEQ ID NO: 4149 - RNA, 21 nt, synthetic construct
  source 1..21: mol_type = other RNA
  modified_base 1: mod_base = OTHER; note = 2'-O-methyluridine-3'-phosphate
  modified_base 2: mod_base = OTHER; note = 2'-O-methyluridine-3'-phosphate
  modified_base 3: mod_base = OTHER; note = 2'-O-methylguanosine-3'-phosphate
  modified_base 4: mod_base = OTHER; note = 2'-O-methyladenosine-3'-phosphate
  modified_base 5: mod_base = OTHER; note = 2'-O-methyluridine-3'-phosphate
  modified_base 6: mod_base = OTHER; note = 2'-O-methylguanosine-3'-phosphate
  modified_base 7: mod_base = OTHER; note = 2'-deoxy-2'-fluorouridine-3'-phosphate
  modified_base 8: mod_base = OTHER; note = 2'-O-methylcytidine-3'-phosphate
  modified_base 9: mod_base = OTHER; note = 2'-deoxy-2'-fluorouridine-3'-phosphate
  modified_base 10: mod_base = OTHER; note = 2'-deoxy-2'-fluorouridine-3'-phosphate
  modified_base 11: mod_base = OTHER; note = 2'-deoxy-2'-fluorocytidine-3'-phosphate
  modified_base 12: mod_base = OTHER; note = 2'-O-methyladenosine-3'-phosphate
  modified_base 13: mod_base = OTHER; note = 2'-O-methyladenosine-3'-phosphate
  modified_base 14: mod_base = OTHER; note = 2'-O-methyluridine-3'-phosphate
  modified_base 15: mod_base = OTHER; note = 2'-O-methyladenosine-3'-phosphate
  modified_base 16: mod_base = OTHER; note = 2'-O-methyladenosine-3'-phosphate
  modified_base 17: mod_base = OTHER; note = 2'-O-methyluridine-3'-phosphate
  modified_base 18: mod_base = OTHER; note = 2'-O-methylcytidine-3'-phosphate
  modified_base 19: mod_base = OTHER; note = 2'-O-methyladenosine-3'-phosphate
  modified_base 20: mod_base = OTHER; note = 2'-O-methyluridine-3'-phosphate
  modified_base 21: mod_base = OTHER; note = 2'-O-methyladenosine
ttgatgtcttcaataatcata

SEQ ID NO: 4150 - RNA, 21 nt, synthetic construct
  source 1..21: mol_type = other RNA
  modified_base 1: mod_base = OTHER; note = 2'-O-methyluridine-3'-phosphate
  modified_base 2: mod_base = OTHER; note = 2'-O-methylguanosine-3'-phosphate
  modified_base 3: mod_base = OTHER; note = 2'-O-methyladenosine-3'-phosphate
  modified_base 4: mod_base = OTHER; note = 2'-O-methyluridine-3'-phosphate
  modified_base 5: mod_base = OTHER; note = 2'-O-methylguanosine-3'-phosphate
  modified_base 6: mod_base = OTHER; note = 2'-O-methyluridine-3'-phosphate
  modified_base 7: mod_base = OTHER; note = 2'-deoxy-2'-fluorocytidine-3'-phosphate
  modified_base 8: mod_base = OTHER; note = 2'-O-methyluridine-3'-phosphate
  modified_base 9: mod_base = OTHER; note = 2'-deoxy-2'-fluorouridine-3'-phosphate
  modified_base 10: mod_base = OTHER; note = 2'-deoxy-2'-fluorocytidine-3'-phosphate
  modified_base 11: mod_base = OTHER; note = 2'-deoxy-2'-fluoroadenosine-3'-phosphate
  modified_base 12: mod_base = OTHER; note = 2'-O-methyladenosine-3'-phosphate
  modified_base 13: mod_base = OTHER; note = 2'-O-methyluridine-3'-phosphate
  modified_base 14: mod_base = OTHER; note = 2'-O-methyladenosine-3'-phosphate
  modified_base 15: mod_base = OTHER; note = 2'-O-methyladenosine-3'-phosphate
  modified_base 16: mod_base = OTHER; note = 2'-O-methyluridine-3'-phosphate
  modified_base 17: mod_base = OTHER; note = 2'-O-methylcytidine-3'-phosphate
  modified_base 18: mod_base = OTHER; note = 2'-O-methyladenosine-3'-phosphate
  modified_base 19: mod_base = OTHER; note = 2'-O-methyluridine-3'-phosphate
  modified_base 20: mod_base = OTHER; note = 2'-O-methyluridine-3'-phosphate
  modified_base 21: mod_base = OTHER; note = 2'-O-methyladenosine
tgatgtcttcaataatcatta

SEQ ID NO: 4151 - RNA, 21 nt, synthetic construct
  source 1..21: mol_type = other RNA
  modified_base 1: mod_base = OTHER; note = 2'-O-methylguanosine-3'-phosphate
  modified_base 2: mod_base = OTHER; note = 2'-O-methyladenosine-3'-phosphate
  modified_base 3: mod_base = OTHER; note = 2'-O-methyluridine-3'-phosphate
  modified_base 4: mod_base = OTHER; note = 2'-O-methylguanosine-3'-phosphate
  modified_base 5: mod_base = OTHER; note = 2'-O-methyluridine-3'-phosphate
  modified_base 6: mod_base = OTHER; note = 2'-O-methylcytidine-3'-phosphate
  modified_base 7: mod_base = OTHER; note = 2'-deoxy-2'-fluorouridine-3'-phosphate
  modified_base 8: mod_base = OTHER; note = 2'-O-methyluridine-3'-phosphate
  modified_base 9: mod_base = OTHER; note = 2'-deoxy-2'-fluorocytidine-3'-phosphate
  modified_base 10: mod_base = OTHER; note = 2'-deoxy-2'-fluoroadenosine-3'-phosphate
  modified_base 11: mod_base = OTHER; note = 2'-deoxy-2'-fluoroadenosine-3'-phosphate
  modified_base 12: mod_base = OTHER; note = 2'-O-methyluridine-3'-phosphate
  modified_base 13: mod_base = OTHER; note = 2'-O-methyladenosine-3'-phosphate
  modified_base 14: mod_base = OTHER; note = 2'-O-methyladenosine-3'-phosphate
  modified_base 15: mod_base = OTHER; note = 2'-O-methyluridine-3'-phosphate
  modified_base 16: mod_base = OTHER; note = 2'-O-methylcytidine-3'-phosphate
  modified_base 17: mod_base = OTHER; note = 2'-O-methyladenosine-3'-phosphate
  modified_base 18: mod_base = OTHER; note = 2'-O-methyluridine-3'-phosphate
  modified_base 19: mod_base = OTHER; note = 2'-O-methyluridine-3'-phosphate
  modified_base 20: mod_base = OTHER; note = 2'-O-methylcytidine-3'-phosphate
  modified_base 21: mod_base = OTHER; note = 2'-O-methyladenosine
gatgtcttcaataatcattca

SEQ ID NO: 4152 - RNA, 21 nt, synthetic construct
  source 1..21: mol_type = other RNA
  modified_base 1: mod_base = OTHER; note = 2'-O-methyladenosine-3'-phosphate
  modified_base 2: mod_base = OTHER; note = 2'-O-methyluridine-3'-phosphate
  modified_base 3: mod_base = OTHER; note = 2'-O-methylguanosine-3'-phosphate
  modified_base 4: mod_base = OTHER; note = 2'-O-methyluridine-3'-phosphate
  modified_base 5: mod_base = OTHER; note = 2'-O-methylcytidine-3'-phosphate
  modified_base 6: mod_base = OTHER; note = 2'-O-methyluridine-3'-phosphate
  modified_base 7: mod_base = OTHER; note = 2'-deoxy-2'-fluorouridine-3'-phosphate
  modified_base 8: mod_base = OTHER; note = 2'-O-methylcytidine-3'-phosphate
  modified_base 9: mod_base = OTHER; note = 2'-deoxy-2'-fluoroadenosine-3'-phosphate
  modified_base 10: mod_base = OTHER; note = 2'-deoxy-2'-fluoroadenosine-3'-phosphate
  modified_base 11: mod_base = OTHER; note = 2'-deoxy-2'-fluorouridine-3'-phosphate
  modified_base 12: mod_base = OTHER; note = 2'-O-methyladenosine-3'-phosphate
  modified_base 13: mod_base = OTHER; note = 2'-O-methyladenosine-3'-phosphate
  modified_base 14: mod_base = OTHER; note = 2'-O-methyluridine-3'-phosphate
  modified_base 15: mod_base = OTHER; note = 2'-O-methylcytidine-3'-phosphate
  modified_base 16: mod_base = OTHER; note = 2'-O-methyladenosine-3'-phosphate
  modified_base 17: mod_base = OTHER; note = 2'-O-methyluridine-3'-phosphate
  modified_base 18: mod_base = OTHER; note = 2'-O-methyluridine-3'-phosphate
  modified_base 19: mod_base = OTHER; note = 2'-O-methylcytidine-3'-phosphate
  modified_base 20: mod_base = OTHER; note = 2'-O-methylcytidine-3'-phosphate
  modified_base 21: mod_base = OTHER; note = 2'-O-methyladenosine
atgtcttcaataatcattcca

SEQ ID NO: 4153 - RNA, 21 nt, synthetic construct
  source 1..21: mol_type = other RNA
  modified_base 1: mod_base = OTHER; note = 2'-O-methyluridine-3'-phosphate
  modified_base 2: mod_base = OTHER; note = 2'-O-methylguanosine-3'-phosphate
  modified_base 3: mod_base = OTHER; note = 2'-O-methyluridine-3'-phosphate
  modified_base 4: mod_base = OTHER; note = 2'-O-methylcytidine-3'-phosphate
  modified_base 5: mod_base = OTHER; note = 2'-O-methyluridine-3'-phosphate
  modified_base 6: mod_base = OTHER; note = 2'-O-methyluridine-3'-phosphate
  modified_base 7: mod_base = OTHER; note = 2'-deoxy-2'-fluorocytidine-3'-phosphate
  modified_base 8: mod_base = OTHER; note = 2'-O-methyladenosine-3'-phosphate
  modified_base 9: mod_base = OTHER; note = 2'-deoxy-2'-fluoroadenosine-3'-phosphate
  modified_base 10: mod_base = OTHER; note = 2'-deoxy-2'-fluorouridine-3'-phosphate
  modified_base 11: mod_base = OTHER; note = 2'-deoxy-2'-fluoroadenosine-3'-phosphate
  modified_base 12: mod_base = OTHER; note = 2'-O-methyladenosine-3'-phosphate
  modified_base 13: mod_base = OTHER; note = 2'-O-methyluridine-3'-phosphate
  modified_base 14: mod_base = OTHER; note = 2'-O-methylcytidine-3'-phosphate
  modified_base 15: mod_base = OTHER; note = 2'-O-methyladenosine-3'-phosphate
  modified_base 16: mod_base = OTHER; note = 2'-O-methyluridine-3'-phosphate
  modified_base 17: mod_base = OTHER; note = 2'-O-methyluridine-3'-phosphate
  modified_base 18: mod_base = OTHER; note = 2'-O-methylcytidine-3'-phosphate
  modified_base 19: mod_base = OTHER; note = 2'-O-methylcytidine-3'-phosphate
  modified_base 20: mod_base = OTHER; note = 2'-O-methyluridine-3'-phosphate
  modified_base 21: mod_base = OTHER; note = 2'-O-methyladenosine
tgtcttcaataatcattccta

SEQ ID NO: 4154 - RNA, 21 nt, synthetic construct
  source 1..21: mol_type = other RNA
  modified_base 1: mod_base = OTHER; note = 2'-O-methylguanosine-3'-phosphate
  modified_base 2: mod_base = OTHER; note = 2'-O-methyluridine-3'-phosphate
  modified_base 3: mod_base = OTHER; note = 2'-O-methylcytidine-3'-phosphate
  modified_base 4: mod_base = OTHER; note = 2'-O-methyluridine-3'-phosphate
  modified_base 5: mod_base = OTHER; note = 2'-O-methyluridine-3'-phosphate
  modified_base 6: mod_base = OTHER; note = 2'-O-methylcytidine-3'-phosphate
  modified_base 7: mod_base = OTHER; note = 2'-deoxy-2'-fluoroadenosine-3'-phosphate
  modified_base 8: mod_base = OTHER; note = 2'-O-methyladenosine-3'-phosphate
  modified_base 9: mod_base = OTHER; note = 2'-deoxy-2'-fluorouridine-3'-phosphate
  modified_base 10: mod_base = OTHER; note = 2'-deoxy-2'-fluoroadenosine-3'-phosphate
  modified_base 11: mod_base = OTHER; note = 2'-deoxy-2'-fluoroadenosine-3'-phosphate
  modified_base 12: mod_base = OTHER; note = 2'-O-methyluridine-3'-phosphate
  modified_base 13: mod_base = OTHER; note = 2'-O-methylcytidine-3'-phosphate
  modified_base 14: mod_base = OTHER; note = 2'-O-methyladenosine-3'-phosphate
  modified_base 15: mod_base = OTHER; note = 2'-O-methyluridine-3'-phosphate
  modified_base 16: mod_base = OTHER; note = 2'-O-methyluridine-3'-phosphate
  modified_base 17: mod_base = OTHER; note = 2'-O-methylcytidine-3'-phosphate
  modified_base 18: mod_base = OTHER; note = 2'-O-methylcytidine-3'-phosphate
  modified_base 19: mod_base = OTHER; note = 2'-O-methyluridine-3'-phosphate
  modified_base 20: mod_base = OTHER; note = 2'-O-methyluridine-3'-phosphate
  modified_base 21: mod_base = OTHER; note = 2'-O-methyladenosine
gtcttcaataatcattcctta

SEQ ID NO: 4155 - RNA, 21 nt, synthetic construct
  source 1..21: mol_type = other RNA
  modified_base 1: mod_base = OTHER; note = 2'-O-methyluridine-3'-phosphate
  modified_base 2: mod_base = OTHER; note = 2'-O-methylcytidine-3'-phosphate
  modified_base 3: mod_base = OTHER; note = 2'-O-methyluridine-3'-phosphate
  modified_base 4: mod_base = OTHER; note = 2'-O-methyluridine-3'-phosphate
  modified_base 5: mod_base = OTHER; note = 2'-O-methylcytidine-3'-phosphate
  modified_base 6: mod_base = OTHER; note = 2'-O-methyladenosine-3'-phosphate
  modified_base 7: mod_base = OTHER; note = 2'-deoxy-2'-fluoroadenosine-3'-phosphate
  modified_base 8: mod_base = OTHER; note = 2'-O-methyluridine-3'-phosphate
  modified_base 9: mod_base = OTHER; note = 2'-deoxy-2'-fluoroadenosine-3'-phosphate
  modified_base 10: mod_base = OTHER; note = 2'-deoxy-2'-fluoroadenosine-3'-phosphate
  modified_base 11: mod_base = OTHER; note = 2'-deoxy-2'-fluorouridine-3'-phosphate
  modified_base 12: mod_base = OTHER; note = 2'-O-methylcytidine-3'-phosphate
  modified_base 13: mod_base = OTHER; note = 2'-O-methyladenosine-3'-phosphate
  modified_base 14: mod_base = OTHER; note = 2'-O-methyluridine-3'-phosphate
  modified_base 15: mod_base = OTHER; note = 2'-O-methyluridine-3'-phosphate
  modified_base 16: mod_base = OTHER; note = 2'-O-methylcytidine-3'-phosphate
  modified_base 17: mod_base = OTHER; note = 2'-O-methylcytidine-3'-phosphate
  modified_base 18: mod_base = OTHER; note = 2'-O-methyluridine-3'-phosphate
  modified_base 19: mod_base = OTHER; note = 2'-O-methyluridine-3'-phosphate
  modified_base 20: mod_base = OTHER; note = 2'-O-methyluridine-3'-phosphate
  modified_base 21: mod_base = OTHER; note = 2'-O-methyladenosine
tcttcaataatcattccttta

SEQ ID NO: 4156 - RNA, 21 nt, synthetic construct
  source 1..21: mol_type = other RNA
  modified_base 1: mod_base = OTHER; note = 2'-O-methylcytidine-3'-phosphate
  modified_base 2: mod_base = OTHER; note = 2'-O-methyluridine-3'-phosphate
  modified_base 3: mod_base = OTHER; note = 2'-O-methyluridine-3'-phosphate
  modified_base 4: mod_base = OTHER; note = 2'-O-methylcytidine-3'-phosphate
  modified_base 5: mod_base = OTHER; note = 2'-O-methyladenosine-3'-phosphate
  modified_base 6: mod_base = OTHER; note = 2'-O-methyladenosine-3'-phosphate
  modified_base 7: mod_base = OTHER; note = 2'-deoxy-2'-fluorouridine-3'-phosphate
  modified_base 8: mod_base = OTHER; note = 2'-O-methyladenosine-3'-phosphate
  modified_base 9: mod_base = OTHER; note = 2'-deoxy-2'-fluoroadenosine-3'-phosphate
  modified_base 10: mod_base = OTHER; note = 2'-deoxy-2'-fluorouridine-3'-phosphate
  modified_base 11: mod_base = OTHER; note = 2'-deoxy-2'-fluorocytidine-3'-phosphate
  modified_base 12: mod_base = OTHER; note = 2'-O-methyladenosine-3'-phosphate
  modified_base 13: mod_base = OTHER; note = 2'-O-methyluridine-3'-phosphate
  modified_base 14: mod_base = OTHER; note = 2'-O-methyluridine-3'-phosphate
  modified_base 15: mod_base = OTHER; note = 2'-O-methylcytidine-3'-phosphate
  modified_base 16: mod_base = OTHER; note = 2'-O-methylcytidine-3'-phosphate
  modified_base 17: mod_base = OTHER; note = 2'-O-methyluridine-3'-phosphate
  modified_base 18: mod_base = OTHER; note = 2'-O-methyluridine-3'-phosphate
  modified_base 19: mod_base = OTHER; note = 2'-O-methyluridine-3'-phosphate
  modified_base 20: mod_base = OTHER; note = 2'-O-methyladenosine-3'-phosphate
  modified_base 21: mod_base = OTHER; note = 2'-O-methyladenosine
cttcaataatcattcctttaa

SEQ ID NO: 4157 - RNA, 21 nt, synthetic construct
  source 1..21: mol_type = other RNA
  modified_base 1: mod_base = OTHER; note = 2'-O-methyladenosine-3'-phosphate
  modified_base 2: mod_base = OTHER; note = 2'-O-methyluridine-3'-phosphate
  modified_base 3: mod_base = OTHER; note = 2'-O-methyluridine-3'-phosphate
  modified_base 4: mod_base = OTHER; note = 2'-O-methylcytidine-3'-phosphate
  modified_base 5: mod_base = OTHER; note = 2'-O-methyladenosine-3'-phosphate
  modified_base 6: mod_base = OTHER; note = 2'-O-methylcytidine-3'-phosphate
  modified_base 7: mod_base = OTHER; note = 2'-deoxy-2'-fluoroadenosine-3'-phosphate
  modified_base 8: mod_base = OTHER; note = 2'-O-methyladenosine-3'-phosphate
  modified_base 9: mod_base = OTHER; note = 2'-deoxy-2'-fluoroadenosine-3'-phosphate
  modified_base 10: mod_base = OTHER; note = 2'-deoxy-2'-fluorocytidine-3'-phosphate
  modified_base 11: mod_base = OTHER; note = 2'-deoxy-2'-fluoroadenosine-3'-phosphate
  modified_base 12: mod_base = OTHER; note = 2'-O-methylcytidine-3'-phosphate
  modified_base 13: mod_base = OTHER; note = 2'-O-methyladenosine-3'-phosphate
  modified_base 14: mod_base = OTHER; note = 2'-O-methyluridine-3'-phosphate
  modified_base 15: mod_base = OTHER; note = 2'-O-methylcytidine-3'-phosphate
  modified_base 16: mod_base = OTHER; note = 2'-O-methyladenosine-3'-phosphate
  modified_base 17: mod_base = OTHER; note = 2'-O-methyluridine-3'-phosphate
  modified_base 18: mod_base = OTHER; note = 2'-O-methyluridine-3'-phosphate
  modified_base 19: mod_base = OTHER; note = 2'-O-methyladenosine-3'-phosphate
  modified_base 20: mod_base = OTHER; note = 2'-O-methylcytidine-3'-phosphate
  modified_base 21: mod_base = OTHER; note = 2'-O-methyladenosine
attcacaaacacatcattaca

SEQ ID NO: 4158 - RNA, 21 nt, synthetic construct
  source 1..21: mol_type = other RNA
  modified_base 1: mod_base = OTHER; note = 2'-O-methyluridine-3'-phosphate
  modified_base 2: mod_base = OTHER; note = 2'-O-methyluridine-3'-phosphate
  modified_base 3: mod_base = OTHER; note = 2'-O-methylcytidine-3'-phosphate
  modified_base 4: mod_base = OTHER; note = 2'-O-methyladenosine-3'-phosphate
  modified_base 5: mod_base = OTHER; note = 2'-O-methylcytidine-3'-phosphate
  modified_base 6: mod_base = OTHER; note = 2'-O-methyladenosine-3'-phosphate
  modified_base 7: mod_base = OTHER; note = 2'-deoxy-2'-fluoroadenosine-3'-phosphate
  modified_base 8: mod_base = OTHER; note = 2'-O-methyladenosine-3'-phosphate
  modified_base 9: mod_base = OTHER; note = 2'-deoxy-2'-fluorocytidine-3'-phosphate
  modified_base 10: mod_base = OTHER; note = 2'-deoxy-2'-fluoroadenosine-3'-phosphate
  modified_base 11: mod_base = OTHER; note = 2'-deoxy-2'-fluorocytidine-3'-phosphate
  modified_base 12: mod_base = OTHER; note = 2'-O-methyladenosine-3'-phosphate
  modified_base 13: mod_base = OTHER; note = 2'-O-methyluridine-3'-phosphate
  modified_base 14: mod_base = OTHER; note = 2'-O-methylcytidine-3'-phosphate
  modified_base 15: mod_base = OTHER; note = 2'-O-methyladenosine-3'-phosphate
  modified_base 16: mod_base = OTHER; note = 2'-O-methyluridine-3'-phosphate
  modified_base 17: mod_base = OTHER; note = 2'-O-methyluridine-3'-phosphate
  modified_base 18: mod_base = OTHER; note = 2'-O-methyladenosine-3'-phosphate
  modified_base 19: mod_base = OTHER; note = 2'-O-methylcytidine-3'-phosphate
  modified_base 20: mod_base = OTHER; note = 2'-O-methyladenosine-3'-phosphate
  modified_base 21: mod_base = OTHER; note = 2'-O-methyladenosine
ttcacaaacacatcattacaa

SEQ ID NO: 4159 - RNA, 21 nt, synthetic construct
  source 1..21: mol_type = other RNA
  modified_base 1: mod_base = OTHER; note = 2'-O-methyluridine-3'-phosphate
  modified_base 2: mod_base = OTHER; note = 2'-O-methylcytidine-3'-phosphate
  modified_base 3: mod_base = OTHER; note = 2'-O-methyladenosine-3'-phosphate
  modified_base 4: mod_base = OTHER; note = 2'-O-methylcytidine-3'-phosphate
  modified_base 5: mod_base = OTHER; note = 2'-O-methyladenosine-3'-phosphate
  modified_base 6: mod_base = OTHER; note = 2'-O-methyladenosine-3'-phosphate
  modified_base 7: mod_base = OTHER; note = 2'-deoxy-2'-fluoroadenosine-3'-phosphate
  modified_base 8: mod_base = OTHER; note = 2'-O-methylcytidine-3'-phosphate
  modified_base 9: mod_base = OTHER; note = 2'-deoxy-2'-fluoroadenosine-3'-phosphate
  modified_base 10: mod_base = OTHER; note = 2'-deoxy-2'-fluorocytidine-3'-phosphate
  modified_base 11: mod_base = OTHER; note = 2'-deoxy-2'-fluoroadenosine-3'-phosphate
  modified_base 12: mod_base = OTHER; note = 2'-O-methyluridine-3'-phosphate
  modified_base 13: mod_base = OTHER; note = 2'-O-methylcytidine-3'-phosphate
  modified_base 14: mod_base = OTHER; note = 2'-O-methyladenosine-3'-phosphate
  modified_base 15: mod_base = OTHER; note = 2'-O-methyluridine-3'-phosphate
  modified_base 16: mod_base = OTHER; note = 2'-O-methyluridine-3'-phosphate
  modified_base 17: mod_base = OTHER; note = 2'-O-methyladenosine-3'-phosphate
  modified_base 18: mod_base = OTHER; note = 2'-O-methylcytidine-3'-phosphate
  modified_base 19: mod_base = OTHER; note = 2'-O-methyladenosine-3'-phosphate
  modified_base 20: mod_base = OTHER; note = 2'-O-methyladenosine-3'-phosphate
  modified_base 21: mod_base = OTHER; note = 2'-O-methyladenosine
tcacaaacacatcattacaaa

SEQ ID NO: 4160 - RNA, 21 nt, synthetic construct
  source 1..21: mol_type = other RNA
  modified_base 1: mod_base = OTHER; note = 2'-O-methylcytidine-3'-phosphate
  modified_base 2: mod_base = OTHER; note = 2'-O-methyladenosine-3'-phosphate
  modified_base 3: mod_base = OTHER; note = 2'-O-methylcytidine-3'-phosphate
  modified_base 4: mod_base = OTHER; note = 2'-O-methyladenosine-3'-phosphate
  modified_base 5: mod_base = OTHER; note = 2'-O-methyladenosine-3'-phosphate
  modified_base 6: mod_base = OTHER; note = 2'-O-methyladenosine-3'-phosphate
  modified_base 7: mod_base = OTHER; note = 2'-deoxy-2'-fluorocytidine-3'-phosphate
  modified_base 8: mod_base = OTHER; note = 2'-O-methyladenosine-3'-phosphate
  modified_base 9: mod_base = OTHER; note = 2'-deoxy-2'-fluorocytidine-3'-phosphate
  modified_base 10: mod_base = OTHER; note = 2'-deoxy-2'-fluoroadenosine-3'-phosphate
  modified_base 11: mod_base = OTHER; note = 2'-deoxy-2'-fluorouridine-3'-phosphate
  modified_base 12: mod_base = OTHER; note = 2'-O-methylcytidine-3'-phosphate
  modified_base 13: mod_base = OTHER; note = 2'-O-methyladenosine-3'-phosphate
  modified_base 14: mod_base = OTHER; note = 2'-O-methyluridine-3'-phosphate
  modified_base 15: mod_base = OTHER; note = 2'-O-methyluridine-3'-phosphate
  modified_base 16: mod_base = OTHER; note = 2'-O-methyladenosine-3'-phosphate
  modified_base 17: mod_base = OTHER; note = 2'-O-methylcytidine-3'-phosphate
  modified_base 18: mod_base = OTHER; note = 2'-O-methyladenosine-3'-phosphate
  modified_base 19: mod_base = OTHER; note = 2'-O-methyladenosine-3'-phosphate
  modified_base 20: mod_base = OTHER; note = 2'-O-methylguanosine-3'-phosphate
  modified_base 21: mod_base = OTHER; note = 2'-O-methyladenosine
cacaaacacatcattacaaga

SEQ ID NO: 4161 - RNA, 21 nt, synthetic construct
  source 1..21: mol_type = other RNA
  modified_base 1: mod_base = OTHER; note = 2'-O-methyladenosine-3'-phosphate
  modified_base 2: mod_base = OTHER; note = 2'-O-methylcytidine-3'-phosphate
  modified_base 3: mod_base = OTHER; note = 2'-O-methyladenosine-3'-phosphate
  modified_base 4: mod_base = OTHER; note = 2'-O-methyladenosine-3'-phosphate
  modified_base 5: mod_base = OTHER; note = 2'-O-methyladenosine-3'-phosphate
  modified_base 6: mod_base = OTHER; note = 2'-O-methylcytidine-3'-phosphate
  modified_base 7: mod_base = OTHER; note = 2'-deoxy-2'-fluoroadenosine-3'-phosphate
  modified_base 8: mod_base = OTHER; note = 2'-O-methylcytidine-3'-phosphate
  modified_base 9: mod_base = OTHER; note = 2'-deoxy-2'-fluoroadenosine-3'-phosphate
  modified_base 10: mod_base = OTHER; note = 2'-deoxy-2'-fluorouridine-3'-phosphate
  modified_base 11: mod_base = OTHER; note = 2'-deoxy-2'-fluorocytidine-3'-phosphate
  modified_base 12: mod_base = OTHER; note = 2'-O-methyladenosine-3'-phosphate
  modified_base 13: mod_base = OTHER; note = 2'-O-methyluridine-3'-phosphate
  modified_base 14: mod_base = OTHER; note = 2'-O-methyluridine-3'-phosphate
  modified_base 15: mod_base = OTHER; note = 2'-O-methyladenosine-3'-phosphate
  modified_base 16: mod_base = OTHER; note = 2'-O-methylcytidine-3'-phosphate
  modified_base 17: mod_base = OTHER; note = 2'-O-methyladenosine-3'-phosphate
  modified_base 18: mod_base = OTHER; note = 2'-O-methyladenosine-3'-phosphate
  modified_base 19: mod_base = OTHER; note = 2'-O-methylguanosine-3'-phosphate
  modified_base 20: mod_base = OTHER; note = 2'-O-methylcytidine-3'-phosphate
  modified_base 21: mod_base = OTHER; note = 2'-O-methyladenosine
acaaacacatcattacaagca

SEQ ID NO: 4162 - RNA, 21 nt, synthetic construct
  source 1..21: mol_type = other RNA
  modified_base 1: mod_base = OTHER; note = 2'-O-methylcytidine-3'-phosphate
  modified_base 2: mod_base = OTHER; note = 2'-O-methyladenosine-3'-phosphate
  modified_base 3: mod_base = OTHER; note = 2'-O-methyladenosine-3'-phosphate
  modified_base 4: mod_base = OTHER; note = 2'-O-methyladenosine-3'-phosphate
  modified_base 5: mod_base = OTHER; note = 2'-O-methylcytidine-3'-phosphate
  modified_base 6: mod_base = OTHER; note = 2'-O-methyladenosine-3'-phosphate
  modified_base 7: mod_base = OTHER; note = 2'-deoxy-2'-fluorocytidine-3'-phosphate
  modified_base 8: mod_base = OTHER; note = 2'-O-methyladenosine-3'-phosphate
  modified_base 9: mod_base = OTHER; note = 2'-deoxy-2'-fluorouridine-3'-phosphate
  modified_base 10: mod_base = OTHER; note = 2'-deoxy-2'-fluorocytidine-3'-phosphate
  modified_base 11: mod_base = OTHER; note = 2'-deoxy-2'-fluoroadenosine-3'-phosphate
  modified_base 12: mod_base = OTHER; note = 2'-O-methyluridine-3'-phosphate
  modified_base 13: mod_base = OTHER; note = 2'-O-methyluridine-3'-phosphate
  modified_base 14: mod_base = OTHER; note = 2'-O-methyladenosine-3'-phosphate
  modified_base 15: mod_base = OTHER; note = 2'-O-methylcytidine-3'-phosphate
  modified_base 16: mod_base = OTHER; note = 2'-O-methyladenosine-3'-phosphate
  modified_base 17: mod_base = OTHER; note = 2'-O-methyladenosine-3'-phosphate
  modified_base 18: mod_base = OTHER; note = 2'-O-methylguanosine-3'-phosphate
  modified_base 19: mod_base = OTHER; note = 2'-O-methylcytidine-3'-phosphate
  modified_base 20: mod_base = OTHER; note = 2'-O-methyluridine-3'-phosphate
  modified_base 21: mod_base = OTHER; note = 2'-O-methyladenosine
caaacacatcattacaagcta

SEQ ID NO: 4163 - RNA, 21 nt, synthetic construct
  source 1..21: mol_type = other RNA
  modified_base 1: mod_base = OTHER; note = 2'-O-methyladenosine-3'-phosphate
  modified_base 2: mod_base = OTHER; note = 2'-O-methyladenosine-3'-phosphate
  modified_base 3: mod_base = OTHER; note = 2'-O-methyladenosine-3'-phosphate
  modified_base 4: mod_base = OTHER; note = 2'-O-methylcytidine-3'-phosphate
  modified_base 5: mod_base = OTHER; note = 2'-O-methyladenosine-3'-phosphate
  modified_base 6: mod_base = OTHER; note = 2'-O-methylcytidine-3'-phosphate
  modified_base 7: mod_base = OTHER; note = 2'-deoxy-2'-fluoroadenosine-3'-phosphate
  modified_base 8: mod_base = OTHER; note = 2'-O-methyluridine-3'-phosphate
  modified_base 9: mod_base = OTHER; note = 2'-deoxy-2'-fluorocytidine-3'-phosphate
  modified_base 10: mod_base = OTHER; note = 2'-deoxy-2'-fluoroadenosine-3'-phosphate
  modified_base 11: mod_base = OTHER; note = 2'-deoxy-2'-fluorouridine-3'-phosphate
  modified_base 12: mod_base = OTHER; note = 2'-O-methyluridine-3'-phosphate
  modified_base 13: mod_base = OTHER; note = 2'-O-methyladenosine-3'-phosphate
  modified_base 14: mod_base = OTHER; note = 2'-O-methylcytidine-3'-phosphate
  modified_base 15: mod_base = OTHER; note = 2'-O-methyladenosine-3'-phosphate
  modified_base 16: mod_base = OTHER; note = 2'-O-methyladenosine-3'-phosphate
  modified_base 17: mod_base = OTHER; note = 2'-O-methylguanosine-3'-phosphate
  modified_base 18: mod_base = OTHER; note = 2'-O-methylcytidine-3'-phosphate
  modified_base 19: mod_base = OTHER; note = 2'-O-methyluridine-3'-phosphate
  modified_base 20: mod_base = OTHER; note = 2'-O-methyladenosine-3'-phosphate
  modified_base 21: mod_base = OTHER; note = 2'-O-methyladenosine
aaacacatcattacaagctaa

SEQ ID NO: 4164 - RNA, 21 nt, synthetic construct
  source 1..21: mol_type = other RNA
  modified_base 1: mod_base = OTHER; note = 2'-O-methyladenosine-3'-phosphate
  modified_base 2: mod_base = OTHER; note = 2'-O-methyladenosine-3'-phosphate
  modified_base 3: mod_base = OTHER; note = 2'-O-methylcytidine-3'-phosphate
  modified_base 4: mod_base = OTHER; note = 2'-O-methyladenosine-3'-phosphate
  modified_base 5: mod_base = OTHER; note = 2'-O-methylcytidine-3'-phosphate
  modified_base 6: mod_base = OTHER; note = 2'-O-methyladenosine-3'-phosphate
  modified_base 7: mod_base = OTHER; note = 2'-deoxy-2'-fluorouridine-3'-phosphate
  modified_base 8: mod_base = OTHER; note = 2'-O-methylcytidine-3'-phosphate
  modified_base 9: mod_base = OTHER; note = 2'-deoxy-2'-fluoroadenosine-3'-phosphate
  modified_base 10: mod_base = OTHER; note = 2'-deoxy-2'-fluorouridine-3'-phosphate
  modified_base 11: mod_base = OTHER; note = 2'-deoxy-2'-fluorouridine-3'-phosphate
  modified_base 12: mod_base = OTHER; note = 2'-O-methyladenosine-3'-phosphate
  modified_base 13: mod_base = OTHER; note = 2'-O-methylcytidine-3'-phosphate
  modified_base 14: mod_base = OTHER; note = 2'-O-methyladenosine-3'-phosphate
  modified_base 15: mod_base = OTHER; note = 2'-O-methyladenosine-3'-phosphate
  modified_base 16: mod_base = OTHER; note = 2'-O-methylguanosine-3'-phosphate
  modified_base 17: mod_base = OTHER; note = 2'-O-methylcytidine-3'-phosphate
  modified_base 18: mod_base = OTHER; note = 2'-O-methyluridine-3'-phosphate
  modified_base 19: mod_base = OTHER; note = 2'-O-methyladenosine-3'-phosphate
  modified_base 20: mod_base = OTHER; note = 2'-O-methylcytidine-3'-phosphate
  modified_base 21: mod_base = OTHER; note = 2'-O-methyladenosine
aacacatcattacaagctaca

SEQ ID NO: 4165 - RNA, 21 nt, synthetic construct
  source 1..21: mol_type = other RNA
  modified_base 1: mod_base = OTHER; note = 2'-O-methyladenosine-3'-phosphate
  modified_base 2: mod_base = OTHER; note = 2'-O-methylcytidine-3'-phosphate
  modified_base 3: mod_base = OTHER; note = 2'-O-methyladenosine-3'-phosphate
  modified_base 4: mod_base = OTHER; note = 2'-O-methylcytidine-3'-phosphate
  modified_base 5: mod_base = OTHER; note = 2'-O-methyladenosine-3'-phosphate
  modified_base 6: mod_base = OTHER; note = 2'-O-methyluridine-3'-phosphate
  modified_base 7: mod_base = OTHER; note = 2'-deoxy-2'-fluorocytidine-3'-phosphate
  modified_base 8: mod_base = OTHER; note = 2'-O-methyladenosine-3'-phosphate
  modified_base 9: mod_base = OTHER; note = 2'-deoxy-2'-fluorouridine-3'-phosphate
  modified_base 10: mod_base = OTHER; note = 2'-deoxy-2'-fluorouridine-3'-phosphate
  modified_base 11: mod_base = OTHER; note = 2'-deoxy-2'-fluoroadenosine-3'-phosphate
  modified_base 12: mod_base = OTHER; note = 2'-O-methylcytidine-3'-phosphate
  modified_base 13: mod_base = OTHER; note = 2'-O-methyladenosine-3'-phosphate
  modified_base 14: mod_base = OTHER; note = 2'-O-methyladenosine-3'-phosphate
  modified_base 15: mod_base = OTHER; note = 2'-O-methylguanosine-3'-phosphate
  modified_base 16: mod_base = OTHER; note = 2'-O-methylcytidine-3'-phosphate
  modified_base 17: mod_base = OTHER; note = 2'-O-methyluridine-3'-phosphate
  modified_base 18: mod_base = OTHER; note = 2'-O-methyladenosine-3'-phosphate
  modified_base 19: mod_base = OTHER; note = 2'-O-methylcytidine-3'-phosphate
  modified_base 20: mod_base = OTHER; note = 2'-O-methyluridine-3'-phosphate
  modified_base 21: mod_base = OTHER; note = 2'-O-methyladenosine
acacatcattacaagctacta

SEQ ID NO: 4166 - RNA, 21 nt, synthetic construct
  source 1..21: mol_type = other RNA
  modified_base 1: mod_base = OTHER; note = 2'-O-methylcytidine-3'-phosphate
  modified_base 2: mod_base = OTHER; note = 2'-O-methyladenosine-3'-phosphate
  modified_base 3: mod_base = OTHER; note = 2'-O-methylcytidine-3'-phosphate
  modified_base 4: mod_base = OTHER; note = 2'-O-methyladenosine-3'-phosphate
  modified_base 5: mod_base = OTHER; note = 2'-O-methyluridine-3'-phosphate
  modified_base 6: mod_base = OTHER; note = 2'-O-methylcytidine-3'-phosphate
  modified_base 7: mod_base = OTHER; note = 2'-deoxy-2'-fluoroadenosine-3'-phosphate
  modified_base 8: mod_base = OTHER; note = 2'-O-methyluridine-3'-phosphate
  modified_base 9: mod_base = OTHER; note = 2'-deoxy-2'-fluorouridine-3'-phosphate
  modified_base 10: mod_base = OTHER; note = 2'-deoxy-2'-fluoroadenosine-3'-phosphate
  modified_base 11: mod_base = OTHER; note = 2'-deoxy-2'-fluorocytidine-3'-phosphate
  modified_base 12: mod_base = OTHER; note = 2'-O-methyladenosine-3'-phosphate
  modified_base 13: mod_base = OTHER; note = 2'-O-methyladenosine-3'-phosphate
  modified_base 14: mod_base = OTHER; note = 2'-O-methylguanosine-3'-phosphate
  modified_base 15: mod_base = OTHER; note = 2'-O-methylcytidine-3'-phosphate
  modified_base 16: mod_base = OTHER; note = 2'-O-methyluridine-3'-phosphate
  modified_base 17: mod_base = OTHER; note = 2'-O-methyladenosine-3'-phosphate
  modified_base 18: mod_base = OTHER; note = 2'-O-methylcytidine-3'-phosphate
  modified_base 19: mod_base = OTHER; note = 2'-O-methyluridine-3'-phosphate
  modified_base 20: mod_base = OTHER; note = 2'-O-methyluridine-3'-phosphate
  modified_base 21: mod_base = OTHER; note = 2'-O-methyladenosine
cacatcattacaagctactta

SEQ ID NO: 4167 - RNA, 21 nt, synthetic construct
  source 1..21: mol_type = other RNA
  modified_base 1: mod_base = OTHER; note = 2'-O-methyluridine-3'-phosphate
  modified_base 2: mod_base = OTHER; note = 2'-O-methylcytidine-3'-phosphate
  modified_base 3: mod_base = OTHER; note = 2'-O-methyladenosine-3'-phosphate
  modified_base 4: mod_base = OTHER; note = 2'-O-methyluridine-3'-phosphate
  modified_base 5: mod_base = OTHER; note = 2'-O-methyluridine-3'-phosphate
  modified_base 6: mod_base = OTHER; note = 2'-O-methyladenosine-3'-phosphate
  modified_base 7: mod_base = OTHER; note = 2'-deoxy-2'-fluorocytidine-3'-phosphate
  modified_base 8: mod_base = OTHER; note = 2'-O-methyladenosine-3'-phosphate
  modified_base 9: mod_base = OTHER; note = 2'-deoxy-2'-fluoroadenosine-3'-phosphate
  modified_base 10: mod_base = OTHER; note = 2'-deoxy-2'-fluoroguanosine-3'-phosphate
  modified_base 11: mod_base = OTHER; note = 2'-deoxy-2'-fluorocytidine-3'-phosphate
  modified_base 12: mod_base = OTHER; note = 2'-O-methyluridine-3'-phosphate
  modified_base 13: mod_base = OTHER; note = 2'-O-methyladenosine-3'-phosphate
  modified_base 14: mod_base = OTHER; note = 2'-O-methylcytidine-3'-phosphate
  modified_base 15: mod_base = OTHER; note = 2'-O-methyluridine-3'-phosphate
  modified_base 16: mod_base = OTHER; note = 2'-O-methyluridine-3'-phosphate
  modified_base 17: mod_base = OTHER; note = 2'-O-methyladenosine-3'-phosphate
  modified_base 18: mod_base = OTHER; note = 2'-O-methylguanosine-3'-phosphate
  modified_base 19: mod_base = OTHER; note = 2'-O-methyladenosine-3'-phosphate
  modified_base 20: mod_base = OTHER; note = 2'-O-methyladenosine-3'-phosphate
  modified_base 21: mod_base = OTHER; note = 2'-O-methyladenosine
tcattacaagctacttagaaa

SEQ ID NO: 4168 - RNA, 21 nt, synthetic construct
  source 1..21: mol_type = other RNA
  modified_base 1: mod_base = OTHER; note = 2'-O-methyladenosine-3'-phosphate
  modified_base 2: mod_base = OTHER; note = 2'-O-methylcytidine-3'-phosphate
  modified_base 3: mod_base = OTHER; note = 2'-O-methyladenosine-3'-phosphate
  modified_base 4: mod_base = OTHER; note = 2'-O-methyladenosine-3'-phosphate
  modified_base 5: mod_base = OTHER; note = 2'-O-methylguanosine-3'-phosphate
  modified_base 6: mod_base = OTHER; note = 2'-O-methylcytidine-3'-phosphate
  modified_base 7: mod_base = OTHER; note = 2'-deoxy-2'-fluorouridine-3'-phosphate
  modified_base 8: mod_base = OTHER; note = 2'-O-methyladenosine-3'-phosphate
  modified_base 9: mod_base = OTHER; note = 2'-deoxy-2'-fluorocytidine-3'-phosphate
  modified_base 10: mod_base = OTHER; note = 2'-deoxy-2'-fluorouridine-3'-phosphate
  modified_base 11: mod_base = OTHER; note = 2'-deoxy-2'-fluorouridine-3'-phosphate
  modified_base 12: mod_base = OTHER; note = 2'-O-methyladenosine-3'-phosphate
  modified_base 13: mod_base = OTHER; note = 2'-O-methylguanosine-3'-phosphate
  modified_base 14: mod_base = OTHER; note = 2'-O-methyladenosine-3'-phosphate
  modified_base 15: mod_base = OTHER; note = 2'-O-methyladenosine-3'-phosphate
  modified_base 16: mod_base = OTHER; note = 2'-O-methyladenosine-3'-phosphate
  modified_base 17: mod_base = OTHER; note = 2'-O-methyluridine-3'-phosphate
  modified_base 18: mod_base = OTHER; note = 2'-O-methylguanosine-3'-phosphate
  modified_base 19: mod_base = OTHER; note = 2'-O-methyluridine-3'-phosphate
  modified_base 20: mod_base = OTHER; note = 2'-O-methyluridine-3'-phosphate
  modified_base 21: mod_base = OTHER; note = 2'-O-methyladenosine
acaagctacttagaaatgtta

SEQ ID NO: 4169 - RNA, 21 nt, synthetic construct
  source 1..21: mol_type = other RNA
  modified_base 1: mod_base = OTHER; note = 2'-O-methyladenosine-3'-phosphate
  modified_base 2: mod_base = OTHER; note = 2'-O-methyladenosine-3'-phosphate
  modified_base 3: mod_base = OTHER; note = 2'-O-methylguanosine-3'-phosphate
  modified_base 4: mod_base = OTHER; note = 2'-O-methylcytidine-3'-phosphate
  modified_base 5: mod_base = OTHER; note = 2'-O-methyluridine-3'-phosphate
  modified_base 6: mod_base = OTHER; note = 2'-O-methyladenosine-3'-phosphate
  modified_base 7: mod_base = OTHER; note = 2'-deoxy-2'-fluorocytidine-3'-phosphate
  modified_base 8: mod_base = OTHER; note = 2'-O-methyluridine-3'-phosphate
  modified_base 9: mod_base = OTHER; note = 2'-deoxy-2'-fluorouridine-3'-phosphate
  modified_base 10: mod_base = OTHER; note = 2'-deoxy-2'-fluoroadenosine-3'-phosphate
  modified_base 11: mod_base = OTHER; note = 2'-deoxy-2'-fluoroguanosine-3'-phosphate
  modified_base 12: mod_base = OTHER; note = 2'-O-methyladenosine-3'-phosphate
  modified_base 13: mod_base = OTHER; note = 2'-O-methyladenosine-3'-phosphate
  modified_base 14: mod_base = OTHER; note = 2'-O-methyladenosine-3'-phosphate
  modified_base 15: mod_base = OTHER; note = 2'-O-methyluridine-3'-phosphate
  modified_base 16: mod_base = OTHER; note = 2'-O-methylguanosine-3'-phosphate
  modified_base 17: mod_base = OTHER; note = 2'-O-methyluridine-3'-phosphate
  modified_base 18: mod_base = OTHER; note = 2'-O-methyluridine-3'-phosphate
  modified_base 19: mod_base = OTHER; note = 2'-O-methyluridine-3'-phosphate
  modified_base 20: mod_base = OTHER; note = 2'-O-methyladenosine-3'-phosphate
  modified_base 21: mod_base = OTHER; note = 2'-O-methyladenosine
aagctacttagaaatgtttaa

SEQ ID NO: 4170 - RNA, 21 nt, synthetic construct
  source 1..21: mol_type = other RNA
  modified_base 1: mod_base = OTHER; note = 2'-O-methylcytidine-3'-phosphate
  modified_base 2: mod_base = OTHER; note = 2'-O-methyluridine-3'-phosphate
  modified_base 3: mod_base = OTHER; note = 2'-O-methyladenosine-3'-phosphate
  modified_base 4: mod_base = OTHER; note = 2'-O-methylcytidine-3'-phosphate
  modified_base 5: mod_base = OTHER; note = 2'-O-methyluridine-3'-phosphate
  modified_base 6: mod_base = OTHER; note = 2'-O-methyluridine-3'-phosphate
  modified_base 7: mod_base = OTHER; note = 2'-deoxy-2'-fluoroadenosine-3'-phosphate
  modified_base 8: mod_base = OTHER; note = 2'-O-methylguanosine-3'-phosphate
  modified_base 9: mod_base = OTHER; note = 2'-deoxy-2'-fluoroadenosine-3'-phosphate
  modified_base 10: mod_base = OTHER; note = 2'-deoxy-2'-fluoroadenosine-3'-phosphate
  modified_base 11: mod_base = OTHER; note = 2'-deoxy-2'-fluoroadenosine-3'-phosphate
  modified_base 12: mod_base = OTHER; note = 2'-O-methyluridine-3'-phosphate
  modified_base 13: mod_base = OTHER; note = 2'-O-methylguanosine-3'-phosphate
  modified_base 14: mod_base = OTHER; note = 2'-O-methyluridine-3'-phosphate
  modified_base 15: mod_base = OTHER; note = 2'-O-methyluridine-3'-phosphate
  modified_base 16: mod_base = OTHER; note = 2'-O-methyluridine-3'-phosphate
  modified_base 17: mod_base = OTHER; note = 2'-O-methyladenosine-3'-phosphate
  modified_base 18: mod_base = OTHER; note = 2'-O-methylguanosine-3'-phosphate
  modified_base 19: mod_base = OTHER; note = 2'-O-methyluridine-3'-phosphate
  modified_base 20: mod_base = OTHER; note = 2'-O-methyladenosine-3'-phosphate
  modified_base 21: mod_base = OTHER; note = 2'-O-methyladenosine
ctacttagaaatgtttagtaa

SEQ ID NO: 4171 - RNA, 21 nt, synthetic construct
  source 1..21: mol_type = other RNA
  modified_base 1: mod_base = OTHER; note = 2'-O-methylguanosine-3'-phosphate
  modified_base 2: mod_base = OTHER; note = 2'-O-methyladenosine-3'-phosphate
  modified_base 3: mod_base = OTHER; note = 2'-O-methyladenosine-3'-phosphate
  modified_base 4: mod_base = OTHER; note = 2'-O-methyladenosine-3'-phosphate
  modified_base 5: mod_base = OTHER; note = 2'-O-methylcytidine-3'-phosphate
  modified_base 6: mod_base = OTHER; note = 2'-O-methyladenosine-3'-phosphate
  modified_base 7: mod_base = OTHER; note = 2'-deoxy-2'-fluorouridine-3'-phosphate
  modified_base 8: mod_base = OTHER; note = 2'-O-methyladenosine-3'-phosphate
  modified_base 9: mod_base = OTHER; note = 2'-deoxy-2'-fluorocytidine-3'-phosphate
  modified_base 10: mod_base = OTHER; note = 2'-deoxy-2'-fluorouridine-3'-phosphate
  modified_base 11: mod_base = OTHER; note = 2'-deoxy-2'-fluoroadenosine-3'-phosphate
  modified_base 12: mod_base = OTHER; note = 2'-O-methyluridine-3'-phosphate
  modified_base 13: mod_base = OTHER; note = 2'-O-methyluridine-3'-phosphate
  modified_base 14: mod_base = OTHER; note = 2'-O-methyluridine-3'-phosphate
  modified_base 15: mod_base = OTHER; note = 2'-O-methylcytidine-3'-phosphate
  modified_base 16: mod_base = OTHER; note = 2'-O-methyluridine-3'-phosphate
  modified_base 17: mod_base = OTHER; note = 2'-O-methylguanosine-3'-phosphate
  modified_base 18: mod_base = OTHER; note = 2'-O-methyluridine-3'-phosphate
  modified_base 19: mod_base = OTHER; note = 2'-O-methyluridine-3'-phosphate
  modified_base 20: mod_base = OTHER; note = 2'-O-methyluridine-3'-phosphate
  modified_base 21: mod_base = OTHER; note = 2'-O-methyladenosine
gaaacatactatttctgttta

SEQ ID NO: 4172 - RNA, 21 nt, synthetic construct
  source 1..21: mol_type = other RNA
  modified_base 1: mod_base = OTHER; note = 2'-O-methylcytidine-3'-phosphate
  modified_base 2: mod_base = OTHER; note = 2'-O-methyluridine-3'-phosphate
  modified_base 3: mod_base = OTHER; note = 2'-O-methylguanosine-3'-phosphate
  modified_base 4: mod_base = OTHER; note = 2'-O-methylcytidine-3'-phosphate
  modified_base 5: mod_base = OTHER; note = 2'-O-methyluridine-3'-phosphate
  modified_base 6: mod_base = OTHER; note = 2'-O-methyluridine-3'-phosphate
  modified_base 7: mod_base = OTHER; note = 2'-deoxy-2'-fluorocytidine-3'-phosphate
  modified_base 8: mod_base = OTHER; note = 2'-O-methyluridine-3'-phosphate
  modified_base 9: mod_base = OTHER; note = 2'-deoxy-2'-fluoroadenosine-3'-phosphate
  modified_base 10: mod_base = OTHER; note = 2'-deoxy-2'-fluoroadenosine-3'-phosphate
  modified_base 11: mod_base = OTHER; note = 2'-deoxy-2'-fluoroadenosine-3'-phosphate
  modified_base 12: mod_base = OTHER; note = 2'-O-methyluridine-3'-phosphate
  modified_base 13: mod_base = OTHER; note = 2'-O-methyladenosine-3'-phosphate
  modified_base 14: mod_base = OTHER; note = 2'-O-methyladenosine-3'-phosphate
  modified_base 15: mod_base = OTHER; note = 2'-O-methylcytidine-3'-phosphate
  modified_base 16: mod_base = OTHER; note = 2'-O-methyladenosine-3'-phosphate
  modified_base 17: mod_base = OTHER; note = 2'-O-methyladenosine-3'-phosphate
  modified_base 18: mod_base = OTHER; note = 2'-O-methyladenosine-3'-phosphate
  modified_base 19: mod_base = OTHER; note = 2'-O-methyladenosine-3'-phosphate
  modified_base 20: mod_base = OTHER; note = 2'-O-methyladenosine-3'-phosphate
  modified_base 21: mod_base = OTHER; note = 2'-O-methyladenosine
ctgcttctaaataacaaaaaa

SEQ ID NO: 4173 - RNA, 21 nt, synthetic construct
  source 1..21: mol_type = other RNA
  modified_base 1: mod_base = OTHER; note = 2'-O-methyluridine-3'-phosphate
  modified_base 2: mod_base = OTHER; note = 2'-O-methylguanosine-3'-phosphate
  modified_base 3: mod_base = OTHER; note = 2'-O-methylcytidine-3'-phosphate
  modified_base 4: mod_base = OTHER; note = 2'-O-methyluridine-3'-phosphate
  modified_base 5: mod_base = OTHER; note = 2'-O-methyluridine-3'-phosphate
  modified_base 6: mod_base = OTHER; note = 2'-O-methylcytidine-3'-phosphate
  modified_base 7: mod_base = OTHER; note = 2'-deoxy-2'-fluorouridine-3'-phosphate
  modified_base 8: mod_base = OTHER; note = 2'-O-methyladenosine-3'-phosphate
  modified_base 9: mod_base = OTHER; note = 2'-deoxy-2'-fluoroadenosine-3'-phosphate
  modified_base 10: mod_base = OTHER; note = 2'-deoxy-2'-fluoroadenosine-3'-phosphate
  modified_base 11: mod_base = OTHER; note = 2'-deoxy-2'-fluorouridine-3'-phosphate
  modified_base 12: mod_base = OTHER; note = 2'-O-methyladenosine-3'-phosphate
  modified_base 13: mod_base = OTHER; note = 2'-O-methyladenosine-3'-phosphate
  modified_base 14: mod_base = OTHER; note = 2'-O-methylcytidine-3'-phosphate
  modified_base 15: mod_base = OTHER; note = 2'-O-methyladenosine-3'-phosphate
  modified_base 16: mod_base = OTHER; note = 2'-O-methyladenosine-3'-phosphate
  modified_base 17: mod_base = OTHER; note = 2'-O-methyladenosine-3'-phosphate
  modified_base 18: mod_base = OTHER; note = 2'-O-methyladenosine-3'-phosphate
  modified_base 19: mod_base = OTHER; note = 2'-O-methyladenosine-3'-phosphate
  modified_base 20: mod_base = OTHER; note = 2'-O-methyladenosine-3'-phosphate
  modified_base 21: mod_base = OTHER; note = 2'-O-methyladenosine
tgcttctaaataacaaaaaaa

SEQ ID NO: 4174 - RNA, 21 nt, synthetic construct
  source 1..21: mol_type = other RNA
  modified_base 1: mod_base = OTHER; note = 2'-O-methyluridine-3'-phosphate
  modified_base 2: mod_base = OTHER; note = 2'-O-methylguanosine-3'-phosphate
  modified_base 3: mod_base = OTHER; note = 2'-O-methylguanosine-3'-phosphate
  modified_base 4: mod_base = OTHER; note = 2'-O-methylguanosine-3'-phosphate
  modified_base 5: mod_base = OTHER; note = 2'-O-methylcytidine-3'-phosphate
  modified_base 6: mod_base = OTHER; note = 2'-O-methyladenosine-3'-phosphate
  modified_base 7: mod_base = OTHER; note = 2'-deoxy-2'-fluorouridine-3'-phosphate
  modified_base 8: mod_base = OTHER; note = 2'-O-methyluridine-3'-phosphate
  modified_base 9: mod_base = OTHER; note = 2'-deoxy-2'-fluorouridine-3'-phosphate
  modified_base 10: mod_base = OTHER; note = 2'-deoxy-2'-fluorouridine-3'-phosphate
  modified_base 11: mod_base = OTHER; note = 2'-deoxy-2'-fluorouridine-3'-phosphate
  modified_base 12: mod_base = OTHER; note = 2'-O-methylcytidine-3'-phosphate
  modified_base 13: mod_base = OTHER; note = 2'-O-methyladenosine-3'-phosphate
  modified_base 14: mod_base = OTHER; note = 2'-O-methyladenosine-3'-phosphate
  modified_base 15: mod_base = OTHER; note = 2'-O-methyladenosine-3'-phosphate
  modified_base 16: mod_base = OTHER; note = 2'-O-methyladenosine-3'-phosphate
  modified_base 17: mod_base = OTHER; note = 2'-O-methylcytidine-3'-phosphate
  modified_base 18: mod_base = OTHER; note = 2'-O-methyladenosine-3'-phosphate
  modified_base 19: mod_base = OTHER; note = 2'-O-methyluridine-3'-phosphate
  modified_base 20: mod_base = OTHER; note = 2'-O-methyluridine-3'-phosphate
  modified_base 21: mod_base = OTHER; note = 2'-O-methyladenosine
tgggcatttttcaaaacatta

SEQ ID NO: 4175 - RNA, 21 nt, synthetic construct
  source 1..21: mol_type = other RNA
  modified_base 1: mod_base = OTHER; note = 2'-O-methyladenosine-3'-phosphate
  modified_base 2: mod_base = OTHER; note = 2'-O-methylcytidine-3'-phosphate
  modified_base 3: mod_base = OTHER; note = 2'-O-methyluridine-3'-phosphate
  modified_base 4: mod_base = OTHER; note = 2'-O-methyluridine-3'-phosphate
  modified_base 5: mod_base = OTHER; note = 2'-O-methyluridine-3'-phosphate
  modified_base 6: mod_base = OTHER; note = 2'-O-methylcytidine-3'-phosphate
  modified_base 7: mod_base = OTHER; note = 2'-deoxy-2'-fluorouridine-3'-phosphate
  modified_base 8: mod_base = OTHER; note = 2'-O-methyluridine-3'-phosphate
  modified_base 9: mod_base = OTHER; note = 2'-deoxy-2'-fluorouridine-3'-phosphate
  modified_base 10: mod_base = OTHER; note = 2'-deoxy-2'-fluorouridine-3'-phosphate
  modified_base 11: mod_base = OTHER; note = 2'-deoxy-2'-fluorouridine-3'-phosphate
  modified_base 12: mod_base = OTHER; note = 2'-O-methyluridine-3'-phosphate
  modified_base 13: mod_base = OTHER; note = 2'-O-methyluridine-3'-phosphate
  modified_base 14: mod_base = OTHER; note = 2'-O-methylcytidine-3'-phosphate
  modified_base 15: mod_base = OTHER; note = 2'-O-methyladenosine-3'-phosphate
  modified_base 16: mod_base = OTHER; note = 2'-O-methyluridine-3'-phosphate
  modified_base 17: mod_base = OTHER; note = 2'-O-methylcytidine-3'-phosphate
  modified_base 18: mod_base = OTHER; note = 2'-O-methyluridine-3'-phosphate
  modified_base 19: mod_base = OTHER; note = 2'-O-methyladenosine-3'-phosphate
  modified_base 20: mod_base = OTHER; note = 2'-O-methylguanosine-3'-phosphate
  modified_base 21: mod_base = OTHER; note = 2'-O-methyladenosine
actttctttttttcatctaga

SEQ ID NO: 4176 - RNA, 21 nt, synthetic construct
  source 1..21: mol_type = other RNA
  modified_base 1: mod_base = OTHER; note = 2'-O-methylcytidine-3'-phosphate
  modified_base 2: mod_base = OTHER; note = 2'-O-methyluridine-3'-phosphate
  modified_base 3: mod_base = OTHER; note = 2'-O-methyluridine-3'-phosphate
  modified_base 4: mod_base = OTHER; note = 2'-O-methyluridine-3'-phosphate
  modified_base 5: mod_base = OTHER; note = 2'-O-methylcytidine-3'-phosphate
  modified_base 6: mod_base = OTHER; note = 2'-O-methyluridine-3'-phosphate
  modified_base 7: mod_base = OTHER; note = 2'-deoxy-2'-fluorouridine-3'-phosphate
  modified_base 8: mod_base = OTHER; note = 2'-O-methyluridine-3'-phosphate
  modified_base 9: mod_base = OTHER; note = 2'-deoxy-2'-fluorouridine-3'-phosphate
  modified_base 10: mod_base = OTHER; note = 2'-deoxy-2'-fluorouridine-3'-phosphate
  modified_base 11: mod_base = OTHER; note = 2'-deoxy-2'-fluorouridine-3'-phosphate
  modified_base 12: mod_base = OTHER; note = 2'-O-methyluridine-3'-phosphate
  modified_base 13: mod_base = OTHER; note = 2'-O-methylcytidine-3'-phosphate
  modified_base 14: mod_base = OTHER; note = 2'-O-methyladenosine-3'-phosphate
  modified_base 15: mod_base = OTHER; note = 2'-O-methyluridine-3'-phosphate
  modified_base 16: mod_base = OTHER; note = 2'-O-methylcytidine-3'-phosphate
  modified_base 17: mod_base = OTHER; note = 2'-O-methyluridine-3'-phosphate
  modified_base 18: mod_base = OTHER; note = 2'-O-methyladenosine-3'-phosphate
  modified_base 19: mod_base = OTHER; note = 2'-O-methylguanosine-3'-phosphate
  modified_base 20: mod_base = OTHER; note = 2'-O-methylcytidine-3'-phosphate
  modified_base 21: mod_base = OTHER; note = 2'-O-methyladenosine
ctttctttttttcatctagca

SEQ ID NO: 4177 - RNA, 21 nt, synthetic construct
  source 1..21: mol_type = other RNA
  modified_base 1: mod_base = OTHER; note = 2'-O-methyluridine-3'-phosphate
  modified_base 2: mod_base = OTHER; note = 2'-O-methyluridine-3'-phosphate
  modified_base 3: mod_base = OTHER; note = 2'-O-methyluridine-3'-phosphate
  modified_base 4: mod_base = OTHER; note = 2'-O-methylcytidine-3'-phosphate
  modified_base 5: mod_base = OTHER; note = 2'-O-methyluridine-3'-phosphate
  modified_base 6: mod_base = OTHER; note = 2'-O-methyluridine-3'-phosphate
  modified_base 7: mod_base = OTHER; note = 2'-deoxy-2'-fluorouridine-3'-phosphate
  modified_base 8: mod_base = OTHER; note = 2'-O-methyluridine-3'-phosphate
  modified_base 9: mod_base = OTHER; note = 2'-deoxy-2'-fluorouridine-3'-phosphate
  modified_base 10: mod_base = OTHER; note = 2'-deoxy-2'-fluorouridine-3'-phosphate
  modified_base 11: mod_base = OTHER; note = 2'-deoxy-2'-fluorouridine-3'-phosphate
  modified_base 12: mod_base = OTHER; note = 2'-O-methylcytidine-3'-phosphate
  modified_base 13: mod_base = OTHER; note = 2'-O-methyladenosine-3'-phosphate
  modified_base 14: mod_base = OTHER; note = 2'-O-methyluridine-3'-phosphate
  modified_base 15: mod_base = OTHER; note = 2'-O-methylcytidine-3'-phosphate
  modified_base 16: mod_base = OTHER; note = 2'-O-methyluridine-3'-phosphate
  modified_base 17: mod_base = OTHER; note = 2'-O-methyladenosine-3'-phosphate
  modified_base 18: mod_base = OTHER; note = 2'-O-methylguanosine-3'-phosphate
  modified_base 19: mod_base = OTHER; note = 2'-O-methylcytidine-3'-phosphate
  modified_base 20: mod_base = OTHER; note = 2'-O-methylcytidine-3'-phosphate
  modified_base 21: mod_base = OTHER; note = 2'-O-methyladenosine
tttctttttttcatctagcca

SEQ ID NO: 4178 - RNA, 21 nt, synthetic construct
  source 1..21: mol_type = other RNA
  modified_base 1: mod_base = OTHER; note = 2'-O-methyluridine-3'-phosphate
  modified_base 2: mod_base = OTHER; note = 2'-O-methyluridine-3'-phosphate
  modified_base 3: mod_base = OTHER; note = 2'-O-methylcytidine-3'-phosphate
  modified_base 4: mod_base = OTHER; note = 2'-O-methyluridine-3'-phosphate
  modified_base 5: mod_base = OTHER; note = 2'-O-methyluridine-3'-phosphate
  modified_base 6: mod_base = OTHER; note = 2'-O-methyluridine-3'-phosphate
  modified_base 7: mod_base = OTHER; note = 2'-deoxy-2'-fluorouridine-3'-phosphate
  modified_base 8: mod_base = OTHER; note = 2'-O-methyluridine-3'-phosphate
  modified_base 9: mod_base = OTHER; note = 2'-deoxy-2'-fluorouridine-3'-phosphate
  modified_base 10: mod_base = OTHER; note = 2'-deoxy-2'-fluorouridine-3'-phosphate
  modified_base 11: mod_base = OTHER; note = 2'-deoxy-2'-fluorocytidine-3'-phosphate
  modified_base 12: mod_base = OTHER; note = 2'-O-methyladenosine-3'-phosphate
  modified_base 13: mod_base = OTHER; note = 2'-O-methyluridine-3'-phosphate
  modified_base 14: mod_base = OTHER; note = 2'-O-methylcytidine-3'-phosphate
  modified_base 15: mod_base = OTHER; note = 2'-O-methyluridine-3'-phosphate
  modified_base 16: mod_base = OTHER; note = 2'-O-methyladenosine-3'-phosphate
  modified_base 17: mod_base = OTHER; note = 2'-O-methylguanosine-3'-phosphate
  modified_base 18: mod_base = OTHER; note = 2'-O-methylcytidine-3'-phosphate
  modified_base 19: mod_base = OTHER; note = 2'-O-methylcytidine-3'-phosphate
  modified_base 20: mod_base = OTHER; note = 2'-O-methyluridine-3'-phosphate
  modified_base 21: mod_base = OTHER; note = 2'-O-methyladenosine
ttctttttttcatctagccta

SEQ ID NO: 4179 - RNA, 21 nt, synthetic construct
  source 1..21: mol_type = other RNA
  modified_base 1: mod_base = OTHER; note = 2'-O-methyluridine-3'-phosphate
  modified_base 2: mod_base = OTHER; note = 2'-O-methylcytidine-3'-phosphate
  modified_base 3: mod_base = OTHER; note = 2'-O-methyluridine-3'-phosphate
  modified_base 4: mod_base = OTHER; note = 2'-O-methyluridine-3'-phosphate
  modified_base 5: mod_base = OTHER; note = 2'-O-methyluridine-3'-phosphate
  modified_base 6: mod_base = OTHER; note = 2'-O-methyluridine-3'-phosphate
  modified_base 7: mod_base = OTHER; note = 2'-deoxy-2'-fluorouridine-3'-phosphate
  modified_base 8: mod_base = OTHER; note = 2'-O-methyluridine-3'-phosphate
  modified_base 9: mod_base = OTHER; note = 2'-deoxy-2'-fluorouridine-3'-phosphate
  modified_base 10: mod_base = OTHER; note = 2'-deoxy-2'-fluorocytidine-3'-phosphate
  modified_base 11: mod_base = OTHER; note = 2'-deoxy-2'-fluoroadenosine-3'-phosphate
  modified_base 12: mod_base = OTHER; note = 2'-O-methyluridine-3'-phosphate
  modified_base 13: mod_base = OTHER; note = 2'-O-methylcytidine-3'-phosphate
  modified_base 14: mod_base = OTHER; note = 2'-O-methyluridine-3'-phosphate
  modified_base 15: mod_base = OTHER; note = 2'-O-methyladenosine-3'-phosphate
  modified_base 16: mod_base = OTHER; note = 2'-O-methylguanosine-3'-phosphate
  modified_base 17: mod_base = OTHER; note = 2'-O-methylcytidine-3'-phosphate
  modified_base 18: mod_base = OTHER; note = 2'-O-methylcytidine-3'-phosphate
  modified_base 19: mod_base = OTHER; note = 2'-O-methyluridine-3'-phosphate
  modified_base 20: mod_base = OTHER; note = 2'-O-methyluridine-3'-phosphate
  modified_base 21: mod_base = OTHER; note = 2'-O-methyladenosine
tctttttttcatctagcctta

SEQ ID NO: 4180 - RNA, 21 nt, synthetic construct
  source 1..21: mol_type = other RNA
  modified_base 1: mod_base = OTHER; note = 2'-O-methylcytidine-3'-phosphate
  modified_base 2: mod_base = OTHER; note = 2'-O-methyluridine-3'-phosphate
  modified_base 3: mod_base = OTHER; note = 2'-O-methyluridine-3'-phosphate
  modified_base 4: mod_base = OTHER; note = 2'-O-methyluridine-3'-phosphate
  modified_base 5: mod_base = OTHER; note = 2'-O-methyluridine-3'-phosphate
  modified_base 6: mod_base = OTHER; note = 2'-O-methyluridine-3'-phosphate
  modified_base 7: mod_base = OTHER; note = 2'-deoxy-2'-fluorouridine-3'-phosphate
  modified_base 8: mod_base = OTHER; note = 2'-O-methyluridine-3'-phosphate
  modified_base 9: mod_base = OTHER; note = 2'-deoxy-2'-fluorocytidine-3'-phosphate
  modified_base 10: mod_base = OTHER; note = 2'-deoxy-2'-fluoroadenosine-3'-phosphate
  modified_base 11: mod_base = OTHER; note = 2'-deoxy-2'-fluorouridine-3'-phosphate
  modified_base 12: mod_base = OTHER; note = 2'-O-methylcytidine-3'-phosphate
  modified_base 13: mod_base = OTHER; note = 2'-O-methyluridine-3'-phosphate
  modified_base 14: mod_base = OTHER; note = 2'-O-methyladenosine-3'-phosphate
  modified_base 15: mod_base = OTHER; note = 2'-O-methylguanosine-3'-phosphate
  modified_base 16: mod_base = OTHER; note = 2'-O-methylcytidine-3'-phosphate
  modified_base 17: mod_base = OTHER; note = 2'-O-methylcytidine-3'-phosphate
  modified_base 18: mod_base = OTHER; note = 2'-O-methyluridine-3'-phosphate
  modified_base 19: mod_base = OTHER; note = 2'-O-methyluridine-3'-phosphate
  modified_base 20: mod_base = OTHER; note = 2'-O-methylguanosine-3'-phosphate
  modified_base 21: mod_base = OTHER; note = 2'-O-methyladenosine
ctttttttcatctagccttga

SEQ ID NO: 4181 - RNA, 21 nt, synthetic construct
  source 1..21: mol_type = other RNA
  modified_base 1: mod_base = OTHER; note = 2'-O-methyluridine-3'-phosphate
  modified_base 2: mod_base = OTHER; note = 2'-O-methyluridine-3'-phosphate
  modified_base 3: mod_base = OTHER; note = 2'-O-methyluridine-3'-phosphate
  modified_base 4: mod_base = OTHER; note = 2'-O-methyluridine-3'-phosphate
  modified_base 5: mod_base = OTHER; note = 2'-O-methyluridine-3'-phosphate
  modified_base 6: mod_base = OTHER; note = 2'-O-methyluridine-3'-phosphate
  modified_base 7: mod_base = OTHER; note = 2'-deoxy-2'-fluorouridine-3'-phosphate
  modified_base 8: mod_base = OTHER; note = 2'-O-methylcytidine-3'-phosphate
  modified_base 9: mod_base = OTHER; note = 2'-deoxy-2'-fluoroadenosine-3'-phosphate
  modified_base 10: mod_base = OTHER; note = 2'-deoxy-2'-fluorouridine-3'-phosphate
  modified_base 11: mod_base = OTHER; note = 2'-deoxy-2'-fluorocytidine-3'-phosphate
  modified_base 12: mod_base = OTHER; note = 2'-O-methyluridine-3'-phosphate
  modified_base 13: mod_base = OTHER; note = 2'-O-methyladenosine-3'-phosphate
  modified_base 14: mod_base = OTHER; note = 2'-O-methylguanosine-3'-phosphate
  modified_base 15: mod_base = OTHER; note = 2'-O-methylcytidine-3'-phosphate
  modified_base 16: mod_base = OTHER; note = 2'-O-methylcytidine-3'-phosphate
  modified_base 17: mod_base = OTHER; note = 2'-O-methyluridine-3'-phosphate
  modified_base 18: mod_base = OTHER; note = 2'-O-methyluridine-3'-phosphate
  modified_base 19: mod_base = OTHER; note = 2'-O-methylguanosine-3'-phosphate
  modified_base 20: mod_base = OTHER; note = 2'-O-methylcytidine-3'-phosphate
  modified_base 21: mod_base = OTHER; note = 2'-O-methyladenosine
tttttttcatctagccttgca

SEQ ID NO: 4182 - RNA, 21 nt, synthetic construct
  source 1..21: mol_type = other RNA
  modified_base 1: mod_base = OTHER; note = 2'-O-methyluridine-3'-phosphate
  modified_base 2: mod_base = OTHER; note = 2'-O-methyluridine-3'-phosphate
  modified_base 3: mod_base = OTHER; note = 2'-O-methyluridine-3'-phosphate
  modified_base 4: mod_base = OTHER; note = 2'-O-methyluridine-3'-phosphate
  modified_base 5: mod_base = OTHER; note = 2'-O-methyluridine-3'-phosphate
  modified_base 6: mod_base = OTHER; note = 2'-O-methyluridine-3'-phosphate
  modified_base 7: mod_base = OTHER; note = 2'-deoxy-2'-fluorocytidine-3'-phosphate
  modified_base 8: mod_base = OTHER; note = 2'-O-methyladenosine-3'-phosphate
  modified_base 9: mod_base = OTHER; note = 2'-deoxy-2'-fluorouridine-3'-phosphate
  modified_base 10: mod_base = OTHER; note = 2'-deoxy-2'-fluorocytidine-3'-phosphate
  modified_base 11: mod_base = OTHER; note = 2'-deoxy-2'-fluorouridine-3'-phosphate
  modified_base 12: mod_base = OTHER; note = 2'-O-methyladenosine-3'-phosphate
  modified_base 13: mod_base = OTHER; note = 2'-O-methylguanosine-3'-phosphate
  modified_base 14: mod_base = OTHER; note = 2'-O-methylcytidine-3'-phosphate
  modified_base 15: mod_base = OTHER; note = 2'-O-methylcytidine-3'-phosphate
  modified_base 16: mod_base = OTHER; note = 2'-O-methyluridine-3'-phosphate
  modified_base 17: mod_base = OTHER; note = 2'-O-methyluridine-3'-phosphate
  modified_base 18: mod_base = OTHER; note = 2'-O-methylguanosine-3'-phosphate
  modified_base 19: mod_base = OTHER; note = 2'-O-methylcytidine-3'-phosphate
  modified_base 20: mod_base = OTHER; note = 2'-O-methyluridine-3'-phosphate
  modified_base 21: mod_base = OTHER; note = 2'-O-methyladenosine
ttttttcatctagccttgcta

SEQ ID NO: 4183 - RNA, 21 nt, synthetic construct
  source 1..21: mol_type = other RNA
  modified_base 1: mod_base = OTHER; note = 2'-O-methyluridine-3'-phosphate
  modified_base 2: mod_base = OTHER; note = 2'-O-methyluridine-3'-phosphate
  modified_base 3: mod_base = OTHER; note = 2'-O-methyluridine-3'-phosphate
  modified_base 4: mod_base = OTHER; note = 2'-O-methyluridine-3'-phosphate
  modified_base 5: mod_base = OTHER; note = 2'-O-methyluridine-3'-phosphate
  modified_base 6: mod_base = OTHER; note = 2'-O-methylcytidine-3'-phosphate
  modified_base 7: mod_base = OTHER; note = 2'-deoxy-2'-fluoroadenosine-3'-phosphate
  modified_base 8: mod_base = OTHER; note = 2'-O-methyluridine-3'-phosphate
  modified_base 9: mod_base = OTHER; note = 2'-deoxy-2'-fluorocytidine-3'-phosphate
  modified_base 10: mod_base = OTHER; note = 2'-deoxy-2'-fluorouridine-3'-phosphate
  modified_base 11: mod_base = OTHER; note = 2'-deoxy-2'-fluoroadenosine-3'-phosphate
  modified_base 12: mod_base = OTHER; note = 2'-O-methylguanosine-3'-phosphate
  modified_base 13: mod_base = OTHER; note = 2'-O-methylcytidine-3'-phosphate
  modified_base 14: mod_base = OTHER; note = 2'-O-methylcytidine-3'-phosphate
  modified_base 15: mod_base = OTHER; note = 2'-O-methyluridine-3'-phosphate
  modified_base 16: mod_base = OTHER; note = 2'-O-methyluridine-3'-phosphate
  modified_base 17: mod_base = OTHER; note = 2'-O-methylguanosine-3'-phosphate
  modified_base 18: mod_base = OTHER; note = 2'-O-methylcytidine-3'-phosphate
  modified_base 19: mod_base = OTHER; note = 2'-O-methyluridine-3'-phosphate
  modified_base 20: mod_base = OTHER; note = 2'-O-methyluridine-3'-phosphate
  modified_base 21: mod_base = OTHER; note = 2'-O-methyladenosine
tttttcatctagccttgctta

SEQ ID NO: 4184 - RNA, 21 nt, synthetic construct
  source 1..21: mol_type = other RNA
  modified_base 1: mod_base = OTHER; note = 2'-O-methyluridine-3'-phosphate
  modified_base 2: mod_base = OTHER; note = 2'-O-methyluridine-3'-phosphate
  modified_base 3: mod_base = OTHER; note = 2'-O-methyluridine-3'-phosphate
  modified_base 4: mod_base = OTHER; note = 2'-O-methyluridine-3'-phosphate
  modified_base 5: mod_base = OTHER; note = 2'-O-methylcytidine-3'-phosphate
  modified_base 6: mod_base = OTHER; note = 2'-O-methyladenosine-3'-phosphate
  modified_base 7: mod_base = OTHER; note = 2'-deoxy-2'-fluorouridine-3'-phosphate
  modified_base 8: mod_base = OTHER; note = 2'-O-methylcytidine-3'-phosphate
  modified_base 9: mod_base = OTHER; note = 2'-deoxy-2'-fluorouridine-3'-phosphate
  modified_base 10: mod_base = OTHER; note = 2'-deoxy-2'-fluoroadenosine-3'-phosphate
  modified_base 11: mod_base = OTHER; note = 2'-deoxy-2'-fluoroguanosine-3'-phosphate
  modified_base 12: mod_base = OTHER; note = 2'-O-methylcytidine-3'-phosphate
  modified_base 13: mod_base = OTHER; note = 2'-O-methylcytidine-3'-phosphate
  modified_base 14: mod_base = OTHER; note = 2'-O-methyluridine-3'-phosphate
  modified_base 15: mod_base = OTHER; note = 2'-O-methyluridine-3'-phosphate
  modified_base 16: mod_base = OTHER; note = 2'-O-methylguanosine-3'-phosphate
  modified_base 17: mod_base = OTHER; note = 2'-O-methylcytidine-3'-phosphate
  modified_base 18: mod_base = OTHER; note = 2'-O-methyluridine-3'-phosphate
  modified_base 19: mod_base = OTHER; note = 2'-O-methyluridine-3'-phosphate
  modified_base 20: mod_base = OTHER; note = 2'-O-methyluridine-3'-phosphate
  modified_base 21: mod_base = OTHER; note = 2'-O-methyladenosine
ttttcatctagccttgcttta

SEQ ID NO: 4185 - RNA, 21 nt, synthetic construct
  source 1..21: mol_type = other RNA
  modified_base 1: mod_base = OTHER; note = 2'-O-methyluridine-3'-phosphate
  modified_base 2: mod_base = OTHER; note = 2'-O-methyluridine-3'-phosphate
  modified_base 3: mod_base = OTHER; note = 2'-O-methylcytidine-3'-phosphate
  modified_base 4: mod_base = OTHER; note = 2'-O-methyladenosine-3'-phosphate
  modified_base 5: mod_base = OTHER; note = 2'-O-methyluridine-3'-phosphate
  modified_base 6: mod_base = OTHER; note = 2'-O-methylcytidine-3'-phosphate
  modified_base 7: mod_base = OTHER; note = 2'-deoxy-2'-fluorouridine-3'-phosphate
  modified_base 8: mod_base = OTHER; note = 2'-O-methyladenosine-3'-phosphate
  modified_base 9: mod_base = OTHER; note = 2'-deoxy-2'-fluoroguanosine-3'-phosphate
  modified_base 10: mod_base = OTHER; note = 2'-deoxy-2'-fluorocytidine-3'-phosphate
  modified_base 11: mod_base = OTHER; note = 2'-deoxy-2'-fluorocytidine-3'-phosphate
  modified_base 12: mod_base = OTHER; note = 2'-O-methyluridine-3'-phosphate
  modified_base 13: mod_base = OTHER; note = 2'-O-methyluridine-3'-phosphate
  modified_base 14: mod_base = OTHER; note = 2'-O-methylguanosine-3'-phosphate
  modified_base 15: mod_base = OTHER; note = 2'-O-methylcytidine-3'-phosphate
  modified_base 16: mod_base = OTHER; note = 2'-O-methyluridine-3'-phosphate
  modified_base 17: mod_base = OTHER; note = 2'-O-methyluridine-3'-phosphate
  modified_base 18: mod_base = OTHER; note = 2'-O-methyluridine-3'-phosphate
  modified_base 19: mod_base = OTHER; note = 2'-O-methyladenosine-3'-phosphate
  modified_base 20: mod_base = OTHER; note = 2'-O-methyluridine-3'-phosphate
  modified_base 21: mod_base = OTHER; note = 2'-O-methyladenosine
ttcatctagccttgctttata

SEQ ID NO: 4186 - RNA, 21 nt, synthetic construct
  source 1..21: mol_type = other RNA
  modified_base 1: mod_base = OTHER; note = 2'-O-methylcytidine-3'-phosphate
  modified_base 2: mod_base = OTHER; note = 2'-O-methylcytidine-3'-phosphate
  modified_base 3: mod_base = OTHER; note = 2'-O-methyluridine-3'-phosphate
  modified_base 4: mod_base = OTHER; note = 2'-O-methyluridine-3'-phosphate
  modified_base 5: mod_base = OTHER; note = 2'-O-methyladenosine-3'-phosphate
  modified_base 6: mod_base = OTHER; note = 2'-O-methylguanosine-3'-phosphate
  modified_base 7: mod_base = OTHER; note = 2'-deoxy-2'-fluorouridine-3'-phosphate
  modified_base 8: mod_base = OTHER; note = 2'-O-methyladenosine-3'-phosphate
  modified_base 9: mod_base = OTHER; note = 2'-deoxy-2'-fluorocytidine-3'-phosphate
  modified_base 10: mod_base = OTHER; note = 2'-deoxy-2'-fluorouridine-3'-phosphate
  modified_base 11: mod_base = OTHER; note = 2'-deoxy-2'-fluorocytidine-3'-phosphate
  modified_base 12: mod_base = OTHER; note = 2'-O-methyluridine-3'-phosphate
  modified_base 13: mod_base = OTHER; note = 2'-O-methylcytidine-3'-phosphate
  modified_base 14: mod_base = OTHER; note = 2'-O-methyladenosine-3'-phosphate
  modified_base 15: mod_base = OTHER; note = 2'-O-methylguanosine-3'-phosphate
  modified_base 16: mod_base = OTHER; note = 2'-O-methyladenosine-3'-phosphate
  modified_base 17: mod_base = OTHER; note = 2'-O-methylguanosine-3'-phosphate
  modified_base 18: mod_base = OTHER; note = 2'-O-methyladenosine-3'-phosphate
  modified_base 19: mod_base = OTHER; note = 2'-O-methyluridine-3'-phosphate
  modified_base 20: mod_base = OTHER; note = 2'-O-methyluridine-3'-phosphate
  modified_base 21: mod_base = OTHER; note = 2'-O-methyladenosine
ccttagtactctcagagatta

SEQ ID NO: 4187 - RNA, 21 nt, synthetic construct
  source 1..21: mol_type = other RNA
  modified_base 1: mod_base = OTHER; note = 2'-O-methyluridine-3'-phosphate
  modified_base 2: mod_base = OTHER; note = 2'-O-methyladenosine-3'-phosphate
  modified_base 3: mod_base = OTHER; note = 2'-O-methylcytidine-3'-phosphate
  modified_base 4: mod_base = OTHER; note = 2'-O-methyluridine-3'-phosphate
  modified_base 5: mod_base = OTHER; note = 2'-O-methylcytidine-3'-phosphate
  modified_base 6: mod_base = OTHER; note = 2'-O-methyluridine-3'-phosphate
  modified_base 7: mod_base = OTHER; note = 2'-deoxy-2'-fluorocytidine-3'-phosphate
  modified_base 8: mod_base = OTHER; note = 2'-O-methyladenosine-3'-phosphate
  modified_base 9: mod_base = OTHER; note = 2'-deoxy-2'-fluoroguanosine-3'-phosphate
  modified_base 10: mod_base = OTHER; note = 2'-deoxy-2'-fluoroadenosine-3'-phosphate
  modified_base 11: mod_base = OTHER; note = 2'-deoxy-2'-fluoroguanosine-3'-phosphate
  modified_base 12: mod_base = OTHER; note = 2'-O-methyladenosine-3'-phosphate
  modified_base 13: mod_base = OTHER; note = 2'-O-methyluridine-3'-phosphate
  modified_base 14: mod_base = OTHER; note = 2'-O-methyluridine-3'-phosphate
  modified_base 15: mod_base = OTHER; note = 2'-O-methyladenosine-3'-phosphate
  modified_base 16: mod_base = OTHER; note = 2'-O-methyluridine-3'-phosphate
  modified_base 17: mod_base = OTHER; note = 2'-O-methyladenosine-3'-phosphate
  modified_base 18: mod_base = OTHER; note = 2'-O-methyluridine-3'-phosphate
  modified_base 19: mod_base = OTHER; note = 2'-O-methyladenosine-3'-phosphate
  modified_base 20: mod_base = OTHER; note = 2'-O-methyladenosine-3'-phosphate
  modified_base 21: mod_base = OTHER; note = 2'-O-methyladenosine
tactctcagagattatataaa

SEQ ID NO: 4188 - RNA, 21 nt, synthetic construct
  source 1..21: mol_type = other RNA
  modified_base 1: mod_base = OTHER; note = 2'-O-methyladenosine-3'-phosphate
  modified_base 2: mod_base = OTHER; note = 2'-O-methylcytidine-3'-phosphate
  modified_base 3: mod_base = OTHER; note = 2'-O-methyluridine-3'-phosphate
  modified_base 4: mod_base = OTHER; note = 2'-O-methylcytidine-3'-phosphate
  modified_base 5: mod_base = OTHER; note = 2'-O-methyluridine-3'-phosphate
  modified_base 6: mod_base = OTHER; note = 2'-O-methylcytidine-3'-phosphate
  modified_base 7: mod_base = OTHER; note = 2'-deoxy-2'-fluoroadenosine-3'-phosphate
  modified_base 8: mod_base = OTHER; note = 2'-O-methylguanosine-3'-phosphate
  modified_base 9: mod_base = OTHER; note = 2'-deoxy-2'-fluoroadenosine-3'-phosphate
  modified_base 10: mod_base = OTHER; note = 2'-deoxy-2'-fluoroguanosine-3'-phosphate
  modified_base 11: mod_base = OTHER; note = 2'-deoxy-2'-fluoroadenosine-3'-phosphate
  modified_base 12: mod_base = OTHER; note = 2'-O-methyluridine-3'-phosphate
  modified_base 13: mod_base = OTHER; note = 2'-O-methyluridine-3'-phosphate
  modified_base 14: mod_base = OTHER; note = 2'-O-methyladenosine-3'-phosphate
  modified_base 15: mod_base = OTHER; note = 2'-O-methyluridine-3'-phosphate
  modified_base 16: mod_base = OTHER; note = 2'-O-methyladenosine-3'-phosphate
  modified_base 17: mod_base = OTHER; note = 2'-O-methyluridine-3'-phosphate
  modified_base 18: mod_base = OTHER; note = 2'-O-methyladenosine-3'-phosphate
  modified_base 19: mod_base = OTHER; note = 2'-O-methyladenosine-3'-phosphate
  modified_base 20: mod_base = OTHER; note = 2'-O-methyladenosine-3'-phosphate
  modified_base 21: mod_base = OTHER; note = 2'-O-methyladenosine
actctcagagattatataaaa

SEQ ID NO: 4189 - RNA, 21 nt, synthetic construct
  source 1..21: mol_type = other RNA
  modified_base 1: mod_base = OTHER; note = 2'-O-methyladenosine-3'-phosphate
  modified_base 2: mod_base = OTHER; note = 2'-O-methylguanosine-3'-phosphate
  modified_base 3: mod_base = OTHER; note = 2'-O-methyluridine-3'-phosphate
  modified_base 4: mod_base = OTHER; note = 2'-O-methyluridine-3'-phosphate
  modified_base 5: mod_base = OTHER; note = 2'-O-methyladenosine-3'-phosphate
  modified_base 6: mod_base = OTHER; note = 2'-O-methylcytidine-3'-phosphate
  modified_base 7: mod_base = OTHER; note = 2'-deoxy-2'-fluorouridine-3'-phosphate
  modified_base 8: mod_base = OTHER; note = 2'-O-methyladenosine-3'-phosphate
  modified_base 9: mod_base = OTHER; note = 2'-deoxy-2'-fluoroguanosine-3'-phosphate
  modified_base 10: mod_base = OTHER; note = 2'-deoxy-2'-fluorocytidine-3'-phosphate
  modified_base 11: mod_base = OTHER; note = 2'-deoxy-2'-fluoroadenosine-3'-phosphate
  modified_base 12: mod_base = OTHER; note = 2'-O-methylguanosine-3'-phosphate
  modified_base 13: mod_base = OTHER; note = 2'-O-methyladenosine-3'-phosphate
  modified_base 14: mod_base = OTHER; note = 2'-O-methyladenosine-3'-phosphate
  modified_base 15: mod_base = OTHER; note = 2'-O-methylcytidine-3'-phosphate
  modified_base 16: mod_base = OTHER; note = 2'-O-methyluridine-3'-phosphate
  modified_base 17: mod_base = OTHER; note = 2'-O-methylcytidine-3'-phosphate
  modified_base 18: mod_base = OTHER; note = 2'-O-methyluridine-3'-phosphate
  modified_base 19: mod_base = OTHER; note = 2'-O-methyluridine-3'-phosphate
  modified_base 20: mod_base = OTHER; note = 2'-O-methyladenosine-3'-phosphate
  modified_base 21: mod_base = OTHER; note = 2'-O-methyladenosine
agttactagcagaactcttaa

SEQ ID NO: 4190 - RNA, 21 nt, synthetic construct
  source 1..21: mol_type = other RNA
  modified_base 1: mod_base = OTHER; note = 2'-O-methylcytidine-3'-phosphate
  modified_base 2: mod_base = OTHER; note = 2'-O-methyladenosine-3'-phosphate
  modified_base 3: mod_base = OTHER; note = 2'-O-methylguanosine-3'-phosphate
  modified_base 4: mod_base = OTHER; note = 2'-O-methylcytidine-3'-phosphate
  modified_base 5: mod_base = OTHER; note = 2'-O-methyladenosine-3'-phosphate
  modified_base 6: mod_base = OTHER; note = 2'-O-methylcytidine-3'-phosphate
  modified_base 7: mod_base = OTHER; note = 2'-deoxy-2'-fluorouridine-3'-phosphate
  modified_base 8: mod_base = OTHER; note = 2'-O-methylguanosine-3'-phosphate
  modified_base 9: mod_base = OTHER; note = 2'-deoxy-2'-fluorouridine-3'-phosphate
  modified_base 10: mod_base = OTHER; note = 2'-deoxy-2'-fluorouridine-3'-phosphate
  modified_base 11: mod_base = OTHER; note = 2'-deoxy-2'-fluorocytidine-3'-phosphate
  modified_base 12: mod_base = OTHER; note = 2'-O-methylcytidine-3'-phosphate
  modified_base 13: mod_base = OTHER; note = 2'-O-methylcytidine-3'-phosphate
  modified_base 14: mod_base = OTHER; note = 2'-O-methyluridine-3'-phosphate
  modified_base 15: mod_base = OTHER; note = 2'-O-methylguanosine-3'-phosphate
  modified_base 16: mod_base = OTHER; note = 2'-O-methylcytidine-3'-phosphate
  modified_base 17: mod_base = OTHER; note = 2'-O-methylcytidine-3'-phosphate
  modified_base 18: mod_base = OTHER; note = 2'-O-methyladenosine-3'-phosphate
  modified_base 19: mod_base = OTHER; note = 2'-O-methyluridine-3'-phosphate
  modified_base 20: mod_base = OTHER; note = 2'-O-methyladenosine-3'-phosphate
  modified_base 21: mod_base = OTHER; note = 2'-O-methyladenosine
cagcactgttccctgccataa

SEQ ID NO: 4191 - RNA, 21 nt, synthetic construct
  source 1..21: mol_type = other RNA
  modified_base 1: mod_base = OTHER; note = 2'-O-methyladenosine-3'-phosphate
  modified_base 2: mod_base = OTHER; note = 2'-O-methylguanosine-3'-phosphate
  modified_base 3: mod_base = OTHER; note = 2'-O-methylcytidine-3'-phosphate
  modified_base 4: mod_base = OTHER; note = 2'-O-methyladenosine-3'-phosphate
  modified_base 5: mod_base = OTHER; note = 2'-O-methylcytidine-3'-phosphate
  modified_base 6: mod_base = OTHER; note = 2'-O-methyluridine-3'-phosphate
  modified_base 7: mod_base = OTHER; note = 2'-deoxy-2'-fluoroguanosine-3'-phosphate
  modified_base 8: mod_base = OTHER; note = 2'-O-methyluridine-3'-phosphate
  modified_base 9: mod_base = OTHER; note = 2'-deoxy-2'-fluorouridine-3'-phosphate
  modified_base 10: mod_base = OTHER; note = 2'-deoxy-2'-fluorocytidine-3'-phosphate
  modified_base 11: mod_base = OTHER; note = 2'-deoxy-2'-fluorocytidine-3'-phosphate
  modified_base 12: mod_base = OTHER; note = 2'-O-methylcytidine-3'-phosphate
  modified_base 13: mod_base = OTHER; note = 2'-O-methyluridine-3'-phosphate
  modified_base 14: mod_base = OTHER; note = 2'-O-methylguanosine-3'-phosphate
  modified_base 15: mod_base = OTHER; note = 2'-O-methylcytidine-3'-phosphate
  modified_base 16: mod_base = OTHER; note = 2'-O-methylcytidine-3'-phosphate
  modified_base 17: mod_base = OTHER; note = 2'-O-methyladenosine-3'-phosphate
  modified_base 18: mod_base = OTHER; note = 2'-O-methyluridine-3'-phosphate
  modified_base 19: mod_base = OTHER; note = 2'-O-methyladenosine-3'-phosphate
  modified_base 20: mod_base = OTHER; note = 2'-O-methyluridine-3'-phosphate
  modified_base 21: mod_base = OTHER; note = 2'-O-methyladenosine
agcactgttccctgccatata

SEQ ID NO: 4192 - RNA, 21 nt, synthetic construct
  source 1..21: mol_type = other RNA
  modified_base 1: mod_base = OTHER; note = 2'-O-methylguanosine-3'-phosphate
  modified_base 2: mod_base = OTHER; note = 2'-O-methylcytidine-3'-phosphate
  modified_base 3: mod_base = OTHER; note = 2'-O-methyladenosine-3'-phosphate
  modified_base 4: mod_base = OTHER; note = 2'-O-methylcytidine-3'-phosphate
  modified_base 5: mod_base = OTHER; note = 2'-O-methyluridine-3'-phosphate
  modified_base 6: mod_base = OTHER; note = 2'-O-methylguanosine-3'-phosphate
  modified_base 7: mod_base = OTHER; note = 2'-deoxy-2'-fluorouridine-3'-phosphate
  modified_base 8: mod_base = OTHER; note = 2'-O-methyluridine-3'-phosphate
  modified_base 9: mod_base = OTHER; note = 2'-deoxy-2'-fluorocytidine-3'-phosphate
  modified_base 10: mod_base = OTHER; note = 2'-deoxy-2'-fluorocytidine-3'-phosphate
  modified_base 11: mod_base = OTHER; note = 2'-deoxy-2'-fluorocytidine-3'-phosphate
  modified_base 12: mod_base = OTHER; note = 2'-O-methyluridine-3'-phosphate
  modified_base 13: mod_base = OTHER; note = 2'-O-methylguanosine-3'-phosphate
  modified_base 14: mod_base = OTHER; note = 2'-O-methylcytidine-3'-phosphate
  modified_base 15: mod_base = OTHER; note = 2'-O-methylcytidine-3'-phosphate
  modified_base 16: mod_base = OTHER; note = 2'-O-methyladenosine-3'-phosphate
  modified_base 17: mod_base = OTHER; note = 2'-O-methyluridine-3'-phosphate
  modified_base 18: mod_base = OTHER; note = 2'-O-methyladenosine-3'-phosphate
  modified_base 19: mod_base = OTHER; note = 2'-O-methyluridine-3'-phosphate
  modified_base 20: mod_base = OTHER; note = 2'-O-methylcytidine-3'-phosphate
  modified_base 21: mod_base = OTHER; note = 2'-O-methyladenosine
gcactgttccctgccatatca

SEQ ID NO: 4193 - RNA, 21 nt, synthetic construct
  source 1..21: mol_type = other RNA
  modified_base 1: mod_base = OTHER; note = 2'-O-methylcytidine-3'-phosphate
  modified_base 2: mod_base = OTHER; note = 2'-O-methyladenosine-3'-phosphate
  modified_base 3: mod_base = OTHER; note = 2'-O-methylcytidine-3'-phosphate
  modified_base 4: mod_base = OTHER; note = 2'-O-methyluridine-3'-phosphate
  modified_base 5: mod_base = OTHER; note = 2'-O-methylguanosine-3'-phosphate
  modified_base 6: mod_base = OTHER; note = 2'-O-methyluridine-3'-phosphate
  modified_base 7: mod_base = OTHER; note = 2'-deoxy-2'-fluorouridine-3'-phosphate
  modified_base 8: mod_base = OTHER; note = 2'-O-methylcytidine-3'-phosphate
  modified_base 9: mod_base = OTHER; note = 2'-deoxy-2'-fluorocytidine-3'-phosphate
  modified_base 10: mod_base = OTHER; note = 2'-deoxy-2'-fluorocytidine-3'-phosphate
  modified_base 11: mod_base = OTHER; note = 2'-deoxy-2'-fluorouridine-3'-phosphate
  modified_base 12: mod_base = OTHER; note = 2'-O-methylguanosine-3'-phosphate
  modified_base 13: mod_base = OTHER; note = 2'-O-methylcytidine-3'-phosphate
  modified_base 14: mod_base = OTHER; note = 2'-O-methylcytidine-3'-phosphate
  modified_base 15: mod_base = OTHER; note = 2'-O-methyladenosine-3'-phosphate
  modified_base 16: mod_base = OTHER; note = 2'-O-methyluridine-3'-phosphate
  modified_base 17: mod_base = OTHER; note = 2'-O-methyladenosine-3'-phosphate
  modified_base 18: mod_base = OTHER; note = 2'-O-methyluridine-3'-phosphate
  modified_base 19: mod_base = OTHER; note = 2'-O-methylcytidine-3'-phosphate
  modified_base 20: mod_base = OTHER; note = 2'-O-methylcytidine-3'-phosphate
  modified_base 21: mod_base = OTHER; note = 2'-O-methyladenosine
cactgttccctgccatatcca

SEQ ID NO: 4194 - RNA, 21 nt, synthetic construct
  source 1..21: mol_type = other RNA
  modified_base 1: mod_base = OTHER; note = 2'-O-methylcytidine-3'-phosphate
  modified_base 2: mod_base = OTHER; note = 2'-O-methyladenosine-3'-phosphate
  modified_base 3: mod_base = OTHER; note = 2'-O-methyladenosine-3'-phosphate
  modified_base 4: mod_base = OTHER; note = 2'-O-methylcytidine-3'-phosphate
  modified_base 5: mod_base = OTHER; note = 2'-O-methyluridine-3'-phosphate
  modified_base 6: mod_base = OTHER; note = 2'-O-methyluridine-3'-phosphate
  modified_base 7: mod_base = OTHER; note = 2'-deoxy-2'-fluorouridine-3'-phosphate
  modified_base 8: mod_base = OTHER; note = 2'-O-methyluridine-3'-phosphate
  modified_base 9: mod_base = OTHER; note = 2'-deoxy-2'-fluoroadenosine-3'-phosphate
  modified_base 10: mod_base = OTHER; note = 2'-deoxy-2'-fluorocytidine-3'-phosphate
  modified_base 11: mod_base = OTHER; note = 2'-deoxy-2'-fluorouridine-3'-phosphate
  modified_base 12: mod_base = OTHER; note = 2'-O-methylguanosine-3'-phosphate
  modified_base 13: mod_base = OTHER; note = 2'-O-methyladenosine-3'-phosphate
  modified_base 14: mod_base = OTHER; note = 2'-O-methyluridine-3'-phosphate
  modified_base 15: mod_base = OTHER; note = 2'-O-methyluridine-3'-phosphate
  modified_base 16: mod_base = OTHER; note = 2'-O-methyladenosine-3'-phosphate
  modified_base 17: mod_base = OTHER; note = 2'-O-methyladenosine-3'-phosphate
  modified_base 18: mod_base = OTHER; note = 2'-O-methyladenosine-3'-phosphate
  modified_base 19: mod_base = OTHER; note = 2'-O-methyladenosine-3'-phosphate
  modified_base 20: mod_base = OTHER; note = 2'-O-methyladenosine-3'-phosphate
  modified_base 21: mod_base = OTHER; note = 2'-O-methyladenosine
caacttttactgattaaaaaa

SEQ ID NO: 4195 - RNA, 21 nt, synthetic construct
  source 1..21: mol_type = other RNA
  modified_base 1: mod_base = OTHER; note = 2'-O-methylguanosine-3'-phosphate
  modified_base 2: mod_base = OTHER; note = 2'-O-methyluridine-3'-phosphate
  modified_base 3: mod_base = OTHER; note = 2'-O-methyladenosine-3'-phosphate
  modified_base 4: mod_base = OTHER; note = 2'-O-methyladenosine-3'-phosphate
  modified_base 5: mod_base = OTHER; note = 2'-O-methyluridine-3'-phosphate
  modified_base 6: mod_base = OTHER; note = 2'-O-methylguanosine-3'-phosphate
  modified_base 7: mod_base = OTHER; note = 2'-deoxy-2'-fluorouridine-3'-phosphate
  modified_base 8: mod_base = OTHER; note = 2'-O-methylguanosine-3'-phosphate
  modified_base 9: mod_base = OTHER; note = 2'-deoxy-2'-fluorocytidine-3'-phosphate
  modified_base 10: mod_base = OTHER; note = 2'-deoxy-2'-fluorocytidine-3'-phosphate
  modified_base 11: mod_base = OTHER; note = 2'-deoxy-2'-fluoroadenosine-3'-phosphate
  modified_base 12: mod_base = OTHER; note = 2'-O-methyluridine-3'-phosphate
  modified_base 13: mod_base = OTHER; note = 2'-O-methyluridine-3'-phosphate
  modified_base 14: mod_base = OTHER; note = 2'-O-methylcytidine-3'-phosphate
  modified_base 15: mod_base = OTHER; note = 2'-O-methyladenosine-3'-phosphate
  modified_base 16: mod_base = OTHER; note = 2'-O-methyladenosine-3'-phosphate
  modified_base 17: mod_base = OTHER; note = 2'-O-methyluridine-3'-phosphate
  modified_base 18: mod_base = OTHER; note = 2'-O-methylguanosine-3'-phosphate
  modified_base 19: mod_base = OTHER; note = 2'-O-methyladenosine-3'-phosphate
  modified_base 20: mod_base = OTHER; note = 2'-O-methyluridine-3'-phosphate
  modified_base 21: mod_base = OTHER; note = 2'-O-methyladenosine
gtaatgtgccattcaatgata

SEQ ID NO: 4196 - RNA, 21 nt, synthetic construct
  source 1..21: mol_type = other RNA
  modified_base 1: mod_base = OTHER; note = 2'-O-methyluridine-3'-phosphate
  modified_base 2: mod_base = OTHER; note = 2'-O-methylguanosine-3'-phosphate
  modified_base 3: mod_base = OTHER; note = 2'-O-methyladenosine-3'-phosphate
  modified_base 4: mod_base = OTHER; note = 2'-O-methyluridine-3'-phosphate
  modified_base 5: mod_base = OTHER; note = 2'-O-methylguanosine-3'-phosphate
  modified_base 6: mod_base = OTHER; note = 2'-O-methyladenosine-3'-phosphate
  modified_base 7: mod_base = OTHER; note = 2'-deoxy-2'-fluorouridine-3'-phosphate
  modified_base 8: mod_base = OTHER; note = 2'-O-methyladenosine-3'-phosphate
  modified_base 9: mod_base = OTHER; note = 2'-deoxy-2'-fluoroadenosine-3'-phosphate
  modified_base 10: mod_base = OTHER; note = 2'-deoxy-2'-fluoroadenosine-3'-phosphate
  modified_base 11: mod_base = OTHER; note = 2'-deoxy-2'-fluoroadenosine-3'-phosphate
  modified_base 12: mod_base = OTHER; note = 2'-O-methyluridine-3'-phosphate
  modified_base 13: mod_base = OTHER; note = 2'-O-methylcytidine-3'-phosphate
  modified_base 14: mod_base = OTHER; note = 2'-O-methylcytidine-3'-phosphate
  modified_base 15: mod_base = OTHER; note = 2'-O-methylcytidine-3'-phosphate
  modified_base 16: mod_base = OTHER; note = 2'-O-methyladenosine-3'-phosphate
  modified_base 17: mod_base = OTHER; note = 2'-O-methylcytidine-3'-phosphate
  modified_base 18: mod_base = OTHER; note = 2'-O-methyluridine-3'-phosphate
  modified_base 19: mod_base = OTHER; note = 2'-O-methyluridine-3'-phosphate
  modified_base 20: mod_base = OTHER; note = 2'-O-methyluridine-3'-phosphate
  modified_base 21: mod_base = OTHER; note = 2'-O-methyladenosine
tgatgataaaatcccacttta

SEQ ID NO: 4197 - RNA, 21 nt, synthetic construct
  source 1..21: mol_type = other RNA
  modified_base 1: mod_base = OTHER; note = 2'-O-methylguanosine-3'-phosphate
  modified_base 2: mod_base = OTHER; note = 2'-O-methyladenosine-3'-phosphate
  modified_base 3: mod_base = OTHER; note = 2'-O-methyluridine-3'-phosphate
  modified_base 4: mod_base = OTHER; note = 2'-O-methylguanosine-3'-phosphate
  modified_base 5: mod_base = OTHER; note = 2'-O-methyladenosine-3'-phosphate
  modified_base 6: mod_base = OTHER; note = 2'-O-methyluridine-3'-phosphate
  modified_base 7: mod_base = OTHER; note = 2'-deoxy-2'-fluoroadenosine-3'-phosphate
  modified_base 8: mod_base = OTHER; note = 2'-O-methyladenosine-3'-phosphate
  modified_base 9: mod_base = OTHER; note = 2'-deoxy-2'-fluoroadenosine-3'-phosphate
  modified_base 10: mod_base = OTHER; note = 2'-deoxy-2'-fluoroadenosine-3'-phosphate
  modified_base 11: mod_base = OTHER; note = 2'-deoxy-2'-fluorouridine-3'-phosphate
  modified_base 12: mod_base = OTHER; note = 2'-O-methylcytidine-3'-phosphate
  modified_base 13: mod_base = OTHER; note = 2'-O-methylcytidine-3'-phosphate
  modified_base 14: mod_base = OTHER; note = 2'-O-methylcytidine-3'-phosphate
  modified_base 15: mod_base = OTHER; note = 2'-O-methyladenosine-3'-phosphate
  modified_base 16: mod_base = OTHER; note = 2'-O-methylcytidine-3'-phosphate
  modified_base 17: mod_base = OTHER; note = 2'-O-methyluridine-3'-phosphate
  modified_base 18: mod_base = OTHER; note = 2'-O-methyluridine-3'-phosphate
  modified_base 19: mod_base = OTHER; note = 2'-O-methyluridine-3'-phosphate
  modified_base 20: mod_base = OTHER; note = 2'-O-methyluridine-3'-phosphate
  modified_base 21: mod_base = OTHER; note = 2'-O-methyladenosine
gatgataaaatcccactttta

SEQ ID NO: 4198 - RNA, 21 nt, synthetic construct
  source 1..21: mol_type = other RNA
  modified_base 1: mod_base = OTHER; note = 2'-O-methylcytidine-3'-phosphate
  modified_base 2: mod_base = OTHER; note = 2'-O-methylcytidine-3'-phosphate
  modified_base 3: mod_base = OTHER; note = 2'-O-methyladenosine-3'-phosphate
  modified_base 4: mod_base = OTHER; note = 2'-O-methylcytidine-3'-phosphate
  modified_base 5: mod_base = OTHER; note = 2'-O-methyluridine-3'-phosphate
  modified_base 6: mod_base = OTHER; note = 2'-O-methyluridine-3'-phosphate
  modified_base 7: mod_base = OTHER; note = 2'-deoxy-2'-fluorouridine-3'-phosphate
  modified_base 8: mod_base = OTHER; note = 2'-O-methyluridine-3'-phosphate
  modified_base 9: mod_base = OTHER; note = 2'-deoxy-2'-fluorocytidine-3'-phosphate
  modified_base 10: mod_base = OTHER; note = 2'-deoxy-2'-fluorouridine-3'-phosphate
  modified_base 11: mod_base = OTHER; note = 2'-deoxy-2'-fluorouridine-3'-phosphate
  modified_base 12: mod_base = OTHER; note = 2'-O-methyluridine-3'-phosphate
  modified_base 13: mod_base = OTHER; note = 2'-O-methylguanosine-3'-phosphate
  modified_base 14: mod_base = OTHER; note = 2'-O-methylguanosine-3'-phosphate
  modified_base 15: mod_base = OTHER; note = 2'-O-methylguanosine-3'-phosphate
  modified_base 16: mod_base = OTHER; note = 2'-O-methyluridine-3'-phosphate
  modified_base 17: mod_base = OTHER; note = 2'-O-methyluridine-3'-phosphate
  modified_base 18: mod_base = OTHER; note = 2'-O-methyluridine-3'-phosphate
  modified_base 19: mod_base = OTHER; note = 2'-O-methylcytidine-3'-phosphate
  modified_base 20: mod_base = OTHER; note = 2'-O-methyluridine-3'-phosphate
  modified_base 21: mod_base = OTHER; note = 2'-O-methyladenosine
ccacttttctttgggtttcta

SEQ ID NO: 4199 - RNA, 21 nt, synthetic construct
  source 1..21: mol_type = other RNA
  modified_base 1: mod_base = OTHER; note = 2'-O-methylcytidine-3'-phosphate
  modified_base 2: mod_base = OTHER; note = 2'-O-methyladenosine-3'-phosphate
  modified_base 3: mod_base = OTHER; note = 2'-O-methylcytidine-3'-phosphate
  modified_base 4: mod_base = OTHER; note = 2'-O-methyluridine-3'-phosphate
  modified_base 5: mod_base = OTHER; note = 2'-O-methyluridine-3'-phosphate
  modified_base 6: mod_base = OTHER; note = 2'-O-methyluridine-3'-phosphate
  modified_base 7: mod_base = OTHER; note = 2'-deoxy-2'-fluorouridine-3'-phosphate
  modified_base 8: mod_base = OTHER; note = 2'-O-methylcytidine-3'-phosphate
  modified_base 9: mod_base = OTHER; note = 2'-deoxy-2'-fluorouridine-3'-phosphate
  modified_base 10: mod_base = OTHER; note = 2'-deoxy-2'-fluorouridine-3'-phosphate
  modified_base 11: mod_base = OTHER; note = 2'-deoxy-2'-fluorouridine-3'-phosphate
  modified_base 12: mod_base = OTHER; note = 2'-O-methylguanosine-3'-phosphate
  modified_base 13: mod_base = OTHER; note = 2'-O-methylguanosine-3'-phosphate
  modified_base 14: mod_base = OTHER; note = 2'-O-methylguanosine-3'-phosphate
  modified_base 15: mod_base = OTHER; note = 2'-O-methyluridine-3'-phosphate
  modified_base 16: mod_base = OTHER; note = 2'-O-methyluridine-3'-phosphate
  modified_base 17: mod_base = OTHER; note = 2'-O-methyluridine-3'-phosphate
  modified_base 18: mod_base = OTHER; note = 2'-O-methylcytidine-3'-phosphate
  modified_base 19: mod_base = OTHER; note = 2'-O-methyluridine-3'-phosphate
  modified_base 20: mod_base = OTHER; note = 2'-O-methyladenosine-3'-phosphate
  modified_base 21: mod_base = OTHER; note = 2'-O-methyladenosine
cacttttctttgggtttctaa

SEQ ID NO: 4200 - RNA, 21 nt, synthetic construct
  source 1..21: mol_type = other RNA
  modified_base 1: mod_base = OTHER; note = 2'-O-methyladenosine-3'-phosphate
  modified_base 2: mod_base = OTHER; note = 2'-O-methylcytidine-3'-phosphate
  modified_base 3: mod_base = OTHER; note = 2'-O-methyluridine-3'-phosphate
  modified_base 4: mod_base = OTHER; note = 2'-O-methyluridine-3'-phosphate
  modified_base 5: mod_base = OTHER; note = 2'-O-methyluridine-3'-phosphate
  modified_base 6: mod_base = OTHER; note = 2'-O-methyluridine-3'-phosphate
  modified_base 7: mod_base = OTHER; note = 2'-deoxy-2'-fluorocytidine-3'-phosphate
  modified_base 8: mod_base = OTHER; note = 2'-O-methyluridine-3'-phosphate
  modified_base 9: mod_base = OTHER; note = 2'-deoxy-2'-fluorouridine-3'-phosphate
  modified_base 10: mod_base = OTHER; note = 2'-deoxy-2'-fluorouridine-3'-phosphate
  modified_base 11: mod_base = OTHER; note = 2'-deoxy-2'-fluoroguanosine-3'-phosphate
  modified_base 12: mod_base = OTHER; note = 2'-O-methylguanosine-3'-phosphate
  modified_base 13: mod_base = OTHER; note = 2'-O-methylguanosine-3'-phosphate
  modified_base 14: mod_base = OTHER; note = 2'-O-methyluridine-3'-phosphate
  modified_base 15: mod_base = OTHER; note = 2'-O-methyluridine-3'-phosphate
  modified_base 16: mod_base = OTHER; note = 2'-O-methyluridine-3'-phosphate
  modified_base 17: mod_base = OTHER; note = 2'-O-methylcytidine-3'-phosphate
  modified_base 18: mod_base = OTHER; note = 2'-O-methyluridine-3'-phosphate
  modified_base 19: mod_base = OTHER; note = 2'-O-methyladenosine-3'-phosphate
  modified_base 20: mod_base = OTHER; note = 2'-O-methylcytidine-3'-phosphate
  modified_base 21: mod_base = OTHER; note = 2'-O-methyladenosine
acttttctttgggtttctaca

SEQ ID NO: 4201 - RNA, 21 nt, synthetic construct
  source 1..21: mol_type = other RNA
  modified_base 1: mod_base = OTHER; note = 2'-O-methylcytidine-3'-phosphate
  modified_base 2: mod_base = OTHER; note = 2'-O-methyluridine-3'-phosphate
  modified_base 3: mod_base = OTHER; note = 2'-O-methyluridine-3'-phosphate
  modified_base 4: mod_base = OTHER; note = 2'-O-methyluridine-3'-phosphate
  modified_base 5: mod_base = OTHER; note = 2'-O-methyluridine-3'-phosphate
  modified_base 6: mod_base = OTHER; note = 2'-O-methylcytidine-3'-phosphate
  modified_base 7: mod_base = OTHER; note = 2'-deoxy-2'-fluorouridine-3'-phosphate
  modified_base 8: mod_base = OTHER; note = 2'-O-methyluridine-3'-phosphate
  modified_base 9: mod_base = OTHER; note = 2'-deoxy-2'-fluorouridine-3'-phosphate
  modified_base 10: mod_base = OTHER; note = 2'-deoxy-2'-fluoroguanosine-3'-phosphate
  modified_base 11: mod_base = OTHER; note = 2'-deoxy-2'-fluoroguanosine-3'-phosphate
  modified_base 12: mod_base = OTHER; note = 2'-O-methylguanosine-3'-phosphate
  modified_base 13: mod_base = OTHER; note = 2'-O-methyluridine-3'-phosphate
  modified_base 14: mod_base = OTHER; note = 2'-O-methyluridine-3'-phosphate
  modified_base 15: mod_base = OTHER; note = 2'-O-methyluridine-3'-phosphate
  modified_base 16: mod_base = OTHER; note = 2'-O-methylcytidine-3'-phosphate
  modified_base 17: mod_base = OTHER; note = 2'-O-methyluridine-3'-phosphate
  modified_base 18: mod_base = OTHER; note = 2'-O-methyladenosine-3'-phosphate
  modified_base 19: mod_base = OTHER; note = 2'-O-methylcytidine-3'-phosphate
  modified_base 20: mod_base = OTHER; note = 2'-O-methyluridine-3'-phosphate
  modified_base 21: mod_base = OTHER; note = 2'-O-methyladenosine
cttttctttgggtttctacta

SEQ ID NO: 4202 - RNA, 21 nt, synthetic construct
  source 1..21: mol_type = other RNA
  modified_base 1: mod_base = OTHER; note = 2'-O-methyluridine-3'-phosphate
  modified_base 2: mod_base = OTHER; note = 2'-O-methyluridine-3'-phosphate
  modified_base 3: mod_base = OTHER; note = 2'-O-methyluridine-3'-phosphate
  modified_base 4: mod_base = OTHER; note = 2'-O-methyluridine-3'-phosphate
  modified_base 5: mod_base = OTHER; note = 2'-O-methylcytidine-3'-phosphate
  modified_base 6: mod_base = OTHER; note = 2'-O-methyluridine-3'-phosphate
  modified_base 7: mod_base = OTHER; note = 2'-deoxy-2'-fluorouridine-3'-phosphate
  modified_base 8: mod_base = OTHER; note = 2'-O-methyluridine-3'-phosphate
  modified_base 9: mod_base = OTHER; note = 2'-deoxy-2'-fluoroguanosine-3'-phosphate
  modified_base 10: mod_base = OTHER; note = 2'-deoxy-2'-fluoroguanosine-3'-phosphate
  modified_base 11: mod_base = OTHER; note = 2'-deoxy-2'-fluoroguanosine-3'-phosphate
  modified_base 12: mod_base = OTHER; note = 2'-O-methyluridine-3'-phosphate
  modified_base 13: mod_base = OTHER; note = 2'-O-methyluridine-3'-phosphate
  modified_base 14: mod_base = OTHER; note = 2'-O-methyluridine-3'-phosphate
  modified_base 15: mod_base = OTHER; note = 2'-O-methylcytidine-3'-phosphate
  modified_base 16: mod_base = OTHER; note = 2'-O-methyluridine-3'-phosphate
  modified_base 17: mod_base = OTHER; note = 2'-O-methyladenosine-3'-phosphate
  modified_base 18: mod_base = OTHER; note = 2'-O-methylcytidine-3'-phosphate
  modified_base 19: mod_base = OTHER; note = 2'-O-methyluridine-3'-phosphate
  modified_base 20: mod_base = OTHER; note = 2'-O-methyladenosine-3'-phosphate
  modified_base 21: mod_base = OTHER; note = 2'-O-methyladenosine
ttttctttgggtttctactaa

SEQ ID NO: 4203 - RNA, 21 nt, synthetic construct
  source 1..21: mol_type = other RNA
  modified_base 1: mod_base = OTHER; note = 2'-O-methyluridine-3'-phosphate
  modified_base 2: mod_base = OTHER; note = 2'-O-methyluridine-3'-phosphate
  modified_base 3: mod_base = OTHER; note = 2'-O-methyluridine-3'-phosphate
  modified_base 4: mod_base = OTHER; note = 2'-O-methylcytidine-3'-phosphate
  modified_base 5: mod_base = OTHER; note = 2'-O-methyluridine-3'-phosphate
  modified_base 6: mod_base = OTHER; note = 2'-O-methyluridine-3'-phosphate
  modified_base 7: mod_base = OTHER; note = 2'-deoxy-2'-fluorouridine-3'-phosphate
  modified_base 8: mod_base = OTHER; note = 2'-O-methylguanosine-3'-phosphate
  modified_base 9: mod_base = OTHER; note = 2'-deoxy-2'-fluoroguanosine-3'-phosphate
  modified_base 10: mod_base = OTHER; note = 2'-deoxy-2'-fluoroguanosine-3'-phosphate
  modified_base 11: mod_base = OTHER; note = 2'-deoxy-2'-fluorouridine-3'-phosphate
  modified_base 12: mod_base = OTHER; note = 2'-O-methyluridine-3'-phosphate
  modified_base 13: mod_base = OTHER; note = 2'-O-methyluridine-3'-phosphate
  modified_base 14: mod_base = OTHER; note = 2'-O-methylcytidine-3'-phosphate
  modified_base 15: mod_base = OTHER; note = 2'-O-methyluridine-3'-phosphate
  modified_base 16: mod_base = OTHER; note = 2'-O-methyladenosine-3'-phosphate
  modified_base 17: mod_base = OTHER; note = 2'-O-methylcytidine-3'-phosphate
  modified_base 18: mod_base = OTHER; note = 2'-O-methyluridine-3'-phosphate
  modified_base 19: mod_base = OTHER; note = 2'-O-methyladenosine-3'-phosphate
  modified_base 20: mod_base = OTHER; note = 2'-O-methyladenosine-3'-phosphate
  modified_base 21: mod_base = OTHER; note = 2'-O-methyladenosine
tttctttgggtttctactaaa

SEQ ID NO: 4204 - RNA, 21 nt, synthetic construct
  source 1..21: mol_type = other RNA
  modified_base 1: mod_base = OTHER; note = 2'-O-methyluridine-3'-phosphate
  modified_base 2: mod_base = OTHER; note = 2'-O-methyluridine-3'-phosphate
  modified_base 3: mod_base = OTHER; note = 2'-O-methylcytidine-3'-phosphate
  modified_base 4: mod_base = OTHER; note = 2'-O-methyluridine-3'-phosphate
  modified_base 5: mod_base = OTHER; note = 2'-O-methyluridine-3'-phosphate
  modified_base 6: mod_base = OTHER; note = 2'-O-methyluridine-3'-phosphate
  modified_base 7: mod_base = OTHER; note = 2'-deoxy-2'-fluoroguanosine-3'-phosphate
  modified_base 8: mod_base = OTHER; note = 2'-O-methylguanosine-3'-phosphate
  modified_base 9: mod_base = OTHER; note = 2'-deoxy-2'-fluoroguanosine-3'-phosphate
  modified_base 10: mod_base = OTHER; note = 2'-deoxy-2'-fluorouridine-3'-phosphate
  modified_base 11: mod_base = OTHER; note = 2'-deoxy-2'-fluorouridine-3'-phosphate
  modified_base 12: mod_base = OTHER; note = 2'-O-methyluridine-3'-phosphate
  modified_base 13: mod_base = OTHER; note = 2'-O-methylcytidine-3'-phosphate
  modified_base 14: mod_base = OTHER; note = 2'-O-methyluridine-3'-phosphate
  modified_base 15: mod_base = OTHER; note = 2'-O-methyladenosine-3'-phosphate
  modified_base 16: mod_base = OTHER; note = 2'-O-methylcytidine-3'-phosphate
  modified_base 17: mod_base = OTHER; note = 2'-O-methyluridine-3'-phosphate
  modified_base 18: mod_base = OTHER; note = 2'-O-methyladenosine-3'-phosphate
  modified_base 19: mod_base = OTHER; note = 2'-O-methyladenosine-3'-phosphate
  modified_base 20: mod_base = OTHER; note = 2'-O-methyladenosine-3'-phosphate
  modified_base 21: mod_base = OTHER; note = 2'-O-methyladenosine
ttctttgggtttctactaaaa

SEQ ID NO: 4205 - RNA, 21 nt, synthetic construct
  source 1..21: mol_type = other RNA
  modified_base 1: mod_base = OTHER; note = 2'-O-methyluridine-3'-phosphate
  modified_base 2: mod_base = OTHER; note = 2'-O-methylcytidine-3'-phosphate
  modified_base 3: mod_base = OTHER; note = 2'-O-methyluridine-3'-phosphate
  modified_base 4: mod_base = OTHER; note = 2'-O-methyluridine-3'-phosphate
  modified_base 5: mod_base = OTHER; note = 2'-O-methyluridine-3'-phosphate
  modified_base 6: mod_base = OTHER; note = 2'-O-methylguanosine-3'-phosphate
  modified_base 7: mod_base = OTHER; note = 2'-deoxy-2'-fluoroguanosine-3'-phosphate
  modified_base 8: mod_base = OTHER; note = 2'-O-methylguanosine-3'-phosphate
  modified_base 9: mod_base = OTHER; note = 2'-deoxy-2'-fluorouridine-3'-phosphate
  modified_base 10: mod_base = OTHER; note = 2'-deoxy-2'-fluorouridine-3'-phosphate
  modified_base 11: mod_base = OTHER; note = 2'-deoxy-2'-fluorouridine-3'-phosphate
  modified_base 12: mod_base = OTHER; note = 2'-O-methylcytidine-3'-phosphate
  modified_base 13: mod_base = OTHER; note = 2'-O-methyluridine-3'-phosphate
  modified_base 14: mod_base = OTHER; note = 2'-O-methyladenosine-3'-phosphate
  modified_base 15: mod_base = OTHER; note = 2'-O-methylcytidine-3'-phosphate
  modified_base 16: mod_base = OTHER; note = 2'-O-methyluridine-3'-phosphate
  modified_base 17: mod_base = OTHER; note = 2'-O-methyladenosine-3'-phosphate
  modified_base 18: mod_base = OTHER; note = 2'-O-methyladenosine-3'-phosphate
  modified_base 19: mod_base = OTHER; note = 2'-O-methyladenosine-3'-phosphate
  modified_base 20: mod_base = OTHER; note = 2'-O-methyladenosine-3'-phosphate
  modified_base 21: mod_base = OTHER; note = 2'-O-methyladenosine
tctttgggtttctactaaaaa

SEQ ID NO: 4206 - RNA, 21 nt, synthetic construct
  source 1..21: mol_type = other RNA
  modified_base 1: mod_base = OTHER; note = 2'-O-methylcytidine-3'-phosphate
  modified_base 2: mod_base = OTHER; note = 2'-O-methyluridine-3'-phosphate
  modified_base 3: mod_base = OTHER; note = 2'-O-methyluridine-3'-phosphate
  modified_base 4: mod_base = OTHER; note = 2'-O-methyluridine-3'-phosphate
  modified_base 5: mod_base = OTHER; note = 2'-O-methylguanosine-3'-phosphate
  modified_base 6: mod_base = OTHER; note = 2'-O-methylguanosine-3'-phosphate
  modified_base 7: mod_base = OTHER; note = 2'-deoxy-2'-fluoroguanosine-3'-phosphate
  modified_base 8: mod_base = OTHER; note = 2'-O-methyluridine-3'-phosphate
  modified_base 9: mod_base = OTHER; note = 2'-deoxy-2'-fluorouridine-3'-phosphate
  modified_base 10: mod_base = OTHER; note = 2'-deoxy-2'-fluorouridine-3'-phosphate
  modified_base 11: mod_base = OTHER; note = 2'-deoxy-2'-fluorocytidine-3'-phosphate
  modified_base 12: mod_base = OTHER; note = 2'-O-methyluridine-3'-phosphate
  modified_base 13: mod_base = OTHER; note = 2'-O-methyladenosine-3'-phosphate
  modified_base 14: mod_base = OTHER; note = 2'-O-methylcytidine-3'-phosphate
  modified_base 15: mod_base = OTHER; note = 2'-O-methyluridine-3'-phosphate
  modified_base 16: mod_base = OTHER; note = 2'-O-methyladenosine-3'-phosphate
  modified_base 17: mod_base = OTHER; note = 2'-O-methyladenosine-3'-phosphate
  modified_base 18: mod_base = OTHER; note = 2'-O-methyladenosine-3'-phosphate
  modified_base 19: mod_base = OTHER; note = 2'-O-methyladenosine-3'-phosphate
  modified_base 20: mod_base = OTHER; note = 2'-O-methyluridine-3'-phosphate
  modified_base 21: mod_base = OTHER; note = 2'-O-methyladenosine
ctttgggtttctactaaaata

SEQ ID NO: 4207 - RNA, 21 nt, synthetic construct
  source 1..21: mol_type = other RNA
  modified_base 1: mod_base = OTHER; note = 2'-O-methyluridine-3'-phosphate
  modified_base 2: mod_base = OTHER; note = 2'-O-methyluridine-3'-phosphate
  modified_base 3: mod_base = OTHER; note = 2'-O-methyluridine-3'-phosphate
  modified_base 4: mod_base = OTHER; note = 2'-O-methylguanosine-3'-phosphate
  modified_base 5: mod_base = OTHER; note = 2'-O-methylguanosine-3'-phosphate
  modified_base 6: mod_base = OTHER; note = 2'-O-methylguanosine-3'-phosphate
  modified_base 7: mod_base = OTHER; note = 2'-deoxy-2'-fluorouridine-3'-phosphate
  modified_base 8: mod_base = OTHER; note = 2'-O-methyluridine-3'-phosphate
  modified_base 9: mod_base = OTHER; note = 2'-deoxy-2'-fluorouridine-3'-phosphate
  modified_base 10: mod_base = OTHER; note = 2'-deoxy-2'-fluorocytidine-3'-phosphate
  modified_base 11: mod_base = OTHER; note = 2'-deoxy-2'-fluorouridine-3'-phosphate
  modified_base 12: mod_base = OTHER; note = 2'-O-methyladenosine-3'-phosphate
  modified_base 13: mod_base = OTHER; note = 2'-O-methylcytidine-3'-phosphate
  modified_base 14: mod_base = OTHER; note = 2'-O-methyluridine-3'-phosphate
  modified_base 15: mod_base = OTHER; note = 2'-O-methyladenosine-3'-phosphate
  modified_base 16: mod_base = OTHER; note = 2'-O-methyladenosine-3'-phosphate
  modified_base 17: mod_base = OTHER; note = 2'-O-methyladenosine-3'-phosphate
  modified_base 18: mod_base = OTHER; note = 2'-O-methyladenosine-3'-phosphate
  modified_base 19: mod_base = OTHER; note = 2'-O-methyluridine-3'-phosphate
  modified_base 20: mod_base = OTHER; note = 2'-O-methyladenosine-3'-phosphate
  modified_base 21: mod_base = OTHER; note = 2'-O-methyladenosine
tttgggtttctactaaaataa

SEQ ID NO: 4208 - RNA, 21 nt, synthetic construct
  source 1..21: mol_type = other RNA
  modified_base 1: mod_base = OTHER; note = 2'-O-methyluridine-3'-phosphate
  modified_base 2: mod_base = OTHER; note = 2'-O-methyluridine-3'-phosphate
  modified_base 3: mod_base = OTHER; note = 2'-O-methylguanosine-3'-phosphate
  modified_base 4: mod_base = OTHER; note = 2'-O-methylguanosine-3'-phosphate
  modified_base 5: mod_base = OTHER; note = 2'-O-methylguanosine-3'-phosphate
  modified_base 6: mod_base = OTHER; note = 2'-O-methyluridine-3'-phosphate
  modified_base 7: mod_base = OTHER; note = 2'-deoxy-2'-fluorouridine-3'-phosphate
  modified_base 8: mod_base = OTHER; note = 2'-O-methyluridine-3'-phosphate
  modified_base 9: mod_base = OTHER; note = 2'-deoxy-2'-fluorocytidine-3'-phosphate
  modified_base 10: mod_base = OTHER; note = 2'-deoxy-2'-fluorouridine-3'-phosphate
  modified_base 11: mod_base = OTHER; note = 2'-deoxy-2'-fluoroadenosine-3'-phosphate
  modified_base 12: mod_base = OTHER; note = 2'-O-methylcytidine-3'-phosphate
  modified_base 13: mod_base = OTHER; note = 2'-O-methyluridine-3'-phosphate
  modified_base 14: mod_base = OTHER; note = 2'-O-methyladenosine-3'-phosphate
  modified_base 15: mod_base = OTHER; note = 2'-O-methyladenosine-3'-phosphate
  modified_base 16: mod_base = OTHER; note = 2'-O-methyladenosine-3'-phosphate
  modified_base 17: mod_base = OTHER; note = 2'-O-methyladenosine-3'-phosphate
  modified_base 18: mod_base = OTHER; note = 2'-O-methyluridine-3'-phosphate
  modified_base 19: mod_base = OTHER; note = 2'-O-methyladenosine-3'-phosphate
  modified_base 20: mod_base = OTHER; note = 2'-O-methyladenosine-3'-phosphate
  modified_base 21: mod_base = OTHER; note = 2'-O-methyladenosine
ttgggtttctactaaaataaa

SEQ ID NO: 4209 - RNA, 21 nt, synthetic construct
  source 1..21: mol_type = other RNA
  modified_base 1: mod_base = OTHER; note = 2'-O-methyladenosine-3'-phosphate
  modified_base 2: mod_base = OTHER; note = 2'-O-methyladenosine-3'-phosphate
  modified_base 3: mod_base = OTHER; note = 2'-O-methyladenosine-3'-phosphate
  modified_base 4: mod_base = OTHER; note = 2'-O-methyladenosine-3'-phosphate
  modified_base 5: mod_base = OTHER; note = 2'-O-methyluridine-3'-phosphate
  modified_base 6: mod_base = OTHER; note = 2'-O-methyladenosine-3'-phosphate
  modified_base 7: mod_base = OTHER; note = 2'-deoxy-2'-fluoroadenosine-3'-phosphate
  modified_base 8: mod_base = OTHER; note = 2'-O-methyluridine-3'-phosphate
  modified_base 9: mod_base = OTHER; note = 2'-deoxy-2'-fluorouridine-3'-phosphate
  modified_base 10: mod_base = OTHER; note = 2'-deoxy-2'-fluorouridine-3'-phosphate
  modified_base 11: mod_base = OTHER; note = 2'-deoxy-2'-fluoroadenosine-3'-phosphate
  modified_base 12: mod_base = OTHER; note = 2'-O-methylcytidine-3'-phosphate
  modified_base 13: mod_base = OTHER; note = 2'-O-methyluridine-3'-phosphate
  modified_base 14: mod_base = OTHER; note = 2'-O-methylcytidine-3'-phosphate
  modified_base 15: mod_base = OTHER; note = 2'-O-methyladenosine-3'-phosphate
  modified_base 16: mod_base = OTHER; note = 2'-O-methylcytidine-3'-phosphate
  modified_base 17: mod_base = OTHER; note = 2'-O-methyluridine-3'-phosphate
  modified_base 18: mod_base = OTHER; note = 2'-O-methylcytidine-3'-phosphate
  modified_base 19: mod_base = OTHER; note = 2'-O-methyladenosine-3'-phosphate
  modified_base 20: mod_base = OTHER; note = 2'-O-methylguanosine-3'-phosphate
  modified_base 21: mod_base = OTHER; note = 2'-O-methyladenosine
aaaataatttactcactcaga

SEQ ID NO: 4210 - RNA, 21 nt, synthetic construct
  source 1..21: mol_type = other RNA
  modified_base 1: mod_base = OTHER; note = 2'-O-methyladenosine-3'-phosphate
  modified_base 2: mod_base = OTHER; note = 2'-O-methyladenosine-3'-phosphate
  modified_base 3: mod_base = OTHER; note = 2'-O-methyluridine-3'-phosphate
  modified_base 4: mod_base = OTHER; note = 2'-O-methyladenosine-3'-phosphate
  modified_base 5: mod_base = OTHER; note = 2'-O-methyladenosine-3'-phosphate
  modified_base 6: mod_base = OTHER; note = 2'-O-methyluridine-3'-phosphate
  modified_base 7: mod_base = OTHER; note = 2'-deoxy-2'-fluorouridine-3'-phosphate
  modified_base 8: mod_base = OTHER; note = 2'-O-methyluridine-3'-phosphate
  modified_base 9: mod_base = OTHER; note = 2'-deoxy-2'-fluoroadenosine-3'-phosphate
  modified_base 10: mod_base = OTHER; note = 2'-deoxy-2'-fluorocytidine-3'-phosphate
  modified_base 11: mod_base = OTHER; note = 2'-deoxy-2'-fluorouridine-3'-phosphate
  modified_base 12: mod_base = OTHER; note = 2'-O-methylcytidine-3'-phosphate
  modified_base 13: mod_base = OTHER; note = 2'-O-methyladenosine-3'-phosphate
  modified_base 14: mod_base = OTHER; note = 2'-O-methylcytidine-3'-phosphate
  modified_base 15: mod_base = OTHER; note = 2'-O-methyluridine-3'-phosphate
  modified_base 16: mod_base = OTHER; note = 2'-O-methylcytidine-3'-phosphate
  modified_base 17: mod_base = OTHER; note = 2'-O-methyladenosine-3'-phosphate
  modified_base 18: mod_base = OTHER; note = 2'-O-methylguanosine-3'-phosphate
  modified_base 19: mod_base = OTHER; note = 2'-O-methyladenosine-3'-phosphate
  modified_base 20: mod_base = OTHER; note = 2'-O-methylguanosine-3'-phosphate
  modified_base 21: mod_base = OTHER; note = 2'-O-methyladenosine
aataatttactcactcagaga

SEQ ID NO: 4211 - RNA, 21 nt, synthetic construct
  source 1..21: mol_type = other RNA
  modified_base 1: mod_base = OTHER; note = 2'-O-methyladenosine-3'-phosphate
  modified_base 2: mod_base = OTHER; note = 2'-O-methyluridine-3'-phosphate
  modified_base 3: mod_base = OTHER; note = 2'-O-methyladenosine-3'-phosphate
  modified_base 4: mod_base = OTHER; note = 2'-O-methyladenosine-3'-phosphate
  modified_base 5: mod_base = OTHER; note = 2'-O-methyluridine-3'-phosphate
  modified_base 6: mod_base = OTHER; note = 2'-O-methyluridine-3'-phosphate
  modified_base 7: mod_base = OTHER; note = 2'-deoxy-2'-fluorouridine-3'-phosphate
  modified_base 8: mod_base = OTHER; note = 2'-O-methyladenosine-3'-phosphate
  modified_base 9: mod_base = OTHER; note = 2'-deoxy-2'-fluorocytidine-3'-phosphate
  modified_base 10: mod_base = OTHER; note = 2'-deoxy-2'-fluorouridine-3'-phosphate
  modified_base 11: mod_base = OTHER; note = 2'-deoxy-2'-fluorocytidine-3'-phosphate
  modified_base 12: mod_base = OTHER; note = 2'-O-methyladenosine-3'-phosphate
  modified_base 13: mod_base = OTHER; note = 2'-O-methylcytidine-3'-phosphate
  modified_base 14: mod_base = OTHER; note = 2'-O-methyluridine-3'-phosphate
  modified_base 15: mod_base = OTHER; note = 2'-O-methylcytidine-3'-phosphate
  modified_base 16: mod_base = OTHER; note = 2'-O-methyladenosine-3'-phosphate
  modified_base 17: mod_base = OTHER; note = 2'-O-methylguanosine-3'-phosphate
  modified_base 18: mod_base = OTHER; note = 2'-O-methyladenosine-3'-phosphate
  modified_base 19: mod_base = OTHER; note = 2'-O-methylguanosine-3'-phosphate
  modified_base 20: mod_base = OTHER; note = 2'-O-methyluridine-3'-phosphate
  modified_base 21: mod_base = OTHER; note = 2'-O-methyladenosine
ataatttactcactcagagta

SEQ ID NO: 4212 - RNA, 21 nt, synthetic construct
  source 1..21: mol_type = other RNA
  modified_base 1: mod_base = OTHER; note = 2'-O-methyluridine-3'-phosphate
  modified_base 2: mod_base = OTHER; note = 2'-O-methyladenosine-3'-phosphate
  modified_base 3: mod_base = OTHER; note = 2'-O-methyladenosine-3'-phosphate
  modified_base 4: mod_base = OTHER; note = 2'-O-methyluridine-3'-phosphate
  modified_base 5: mod_base = OTHER; note = 2'-O-methyluridine-3'-phosphate
  modified_base 6: mod_base = OTHER; note = 2'-O-methyluridine-3'-phosphate
  modified_base 7: mod_base = OTHER; note = 2'-deoxy-2'-fluoroadenosine-3'-phosphate
  modified_base 8: mod_base = OTHER; note = 2'-O-methylcytidine-3'-phosphate
  modified_base 9: mod_base = OTHER; note = 2'-deoxy-2'-fluorouridine-3'-phosphate
  modified_base 10: mod_base = OTHER; note = 2'-deoxy-2'-fluorocytidine-3'-phosphate
  modified_base 11: mod_base = OTHER; note = 2'-deoxy-2'-fluoroadenosine-3'-phosphate
  modified_base 12: mod_base = OTHER; note = 2'-O-methylcytidine-3'-phosphate
  modified_base 13: mod_base = OTHER; note = 2'-O-methyluridine-3'-phosphate
  modified_base 14: mod_base = OTHER; note = 2'-O-methylcytidine-3'-phosphate
  modified_base 15: mod_base = OTHER; note = 2'-O-methyladenosine-3'-phosphate
  modified_base 16: mod_base = OTHER; note = 2'-O-methylguanosine-3'-phosphate
  modified_base 17: mod_base = OTHER; note = 2'-O-methyladenosine-3'-phosphate
  modified_base 18: mod_base = OTHER; note = 2'-O-methylguanosine-3'-phosphate
  modified_base 19: mod_base = OTHER; note = 2'-O-methyluridine-3'-phosphate
  modified_base 20: mod_base = OTHER; note = 2'-O-methylguanosine-3'-phosphate
  modified_base 21: mod_base = OTHER; note = 2'-O-methyladenosine
taatttactcactcagagtga

SEQ ID NO: 4213 - RNA, 21 nt, synthetic construct
  source 1..21: mol_type = other RNA
  modified_base 1: mod_base = OTHER; note = 2'-O-methyladenosine-3'-phosphate
  modified_base 2: mod_base = OTHER; note = 2'-O-methyladenosine-3'-phosphate
  modified_base 3: mod_base = OTHER; note = 2'-O-methyluridine-3'-phosphate
  modified_base 4: mod_base = OTHER; note = 2'-O-methyluridine-3'-phosphate
  modified_base 5: mod_base = OTHER; note = 2'-O-methyluridine-3'-phosphate
  modified_base 6: mod_base = OTHER; note = 2'-O-methyladenosine-3'-phosphate
  modified_base 7: mod_base = OTHER; note = 2'-deoxy-2'-fluorocytidine-3'-phosphate
  modified_base 8: mod_base = OTHER; note = 2'-O-methyluridine-3'-phosphate
  modified_base 9: mod_base = OTHER; note = 2'-deoxy-2'-fluorocytidine-3'-phosphate
  modified_base 10: mod_base = OTHER; note = 2'-deoxy-2'-fluoroadenosine-3'-phosphate
  modified_base 11: mod_base = OTHER; note = 2'-deoxy-2'-fluorocytidine-3'-phosphate
  modified_base 12: mod_base = OTHER; note = 2'-O-methyluridine-3'-phosphate
  modified_base 13: mod_base = OTHER; note = 2'-O-methylcytidine-3'-phosphate
  modified_base 14: mod_base = OTHER; note = 2'-O-methyladenosine-3'-phosphate
  modified_base 15: mod_base = OTHER; note = 2'-O-methylguanosine-3'-phosphate
  modified_base 16: mod_base = OTHER; note = 2'-O-methyladenosine-3'-phosphate
  modified_base 17: mod_base = OTHER; note = 2'-O-methylguanosine-3'-phosphate
  modified_base 18: mod_base = OTHER; note = 2'-O-methyluridine-3'-phosphate
  modified_base 19: mod_base = OTHER; note = 2'-O-methylguanosine-3'-phosphate
  modified_base 20: mod_base = OTHER; note = 2'-O-methyladenosine-3'-phosphate
  modified_base 21: mod_base = OTHER; note = 2'-O-methyladenosine
aatttactcactcagagtgaa

SEQ ID NO: 4214 - RNA, 21 nt, synthetic construct
  source 1..21: mol_type = other RNA
  modified_base 1: mod_base = OTHER; note = 2'-O-methyladenosine-3'-phosphate
  modified_base 2: mod_base = OTHER; note = 2'-O-methyluridine-3'-phosphate
  modified_base 3: mod_base = OTHER; note = 2'-O-methyluridine-3'-phosphate
  modified_base 4: mod_base = OTHER; note = 2'-O-methyluridine-3'-phosphate
  modified_base 5: mod_base = OTHER; note = 2'-O-methyladenosine-3'-phosphate
  modified_base 6: mod_base = OTHER; note = 2'-O-methylcytidine-3'-phosphate
  modified_base 7: mod_base = OTHER; note = 2'-deoxy-2'-fluorouridine-3'-phosphate
  modified_base 8: mod_base = OTHER; note = 2'-O-methylcytidine-3'-phosphate
  modified_base 9: mod_base = OTHER; note = 2'-deoxy-2'-fluoroadenosine-3'-phosphate
  modified_base 10: mod_base = OTHER; note = 2'-deoxy-2'-fluorocytidine-3'-phosphate
  modified_base 11: mod_base = OTHER; note = 2'-deoxy-2'-fluorouridine-3'-phosphate
  modified_base 12: mod_base = OTHER; note = 2'-O-methylcytidine-3'-phosphate
  modified_base 13: mod_base = OTHER; note = 2'-O-methyladenosine-3'-phosphate
  modified_base 14: mod_base = OTHER; note = 2'-O-methylguanosine-3'-phosphate
  modified_base 15: mod_base = OTHER; note = 2'-O-methyladenosine-3'-phosphate
  modified_base 16: mod_base = OTHER; note = 2'-O-methylguanosine-3'-phosphate
  modified_base 17: mod_base = OTHER; note = 2'-O-methyluridine-3'-phosphate
  modified_base 18: mod_base = OTHER; note = 2'-O-methylguanosine-3'-phosphate
  modified_base 19: mod_base = OTHER; note = 2'-O-methyladenosine-3'-phosphate
  modified_base 20: mod_base = OTHER; note = 2'-O-methylguanosine-3'-phosphate
  modified_base 21: mod_base = OTHER; note = 2'-O-methyladenosine
atttactcactcagagtgaga

SEQ ID NO: 4215 - RNA, 21 nt, synthetic construct
  source 1..21: mol_type = other RNA
  modified_base 1: mod_base = OTHER; note = 2'-O-methyladenosine-3'-phosphate
  modified_base 2: mod_base = OTHER; note = 2'-O-methylguanosine-3'-phosphate
  modified_base 3: mod_base = OTHER; note = 2'-O-methyluridine-3'-phosphate
  modified_base 4: mod_base = OTHER; note = 2'-O-methylguanosine-3'-phosphate
  modified_base 5: mod_base = OTHER; note = 2'-O-methyladenosine-3'-phosphate
  modified_base 6: mod_base = OTHER; note = 2'-O-methylguanosine-3'-phosphate
  modified_base 7: mod_base = OTHER; note = 2'-deoxy-2'-fluoroguanosine-3'-phosphate
  modified_base 8: mod_base = OTHER; note = 2'-O-methyluridine-3'-phosphate
  modified_base 9: mod_base = OTHER; note = 2'-deoxy-2'-fluorocytidine-3'-phosphate
  modified_base 10: mod_base = OTHER; note = 2'-deoxy-2'-fluoroadenosine-3'-phosphate
  modified_base 11: mod_base = OTHER; note = 2'-deoxy-2'-fluoroadenosine-3'-phosphate
  modified_base 12: mod_base = OTHER; note = 2'-O-methyluridine-3'-phosphate
  modified_base 13: mod_base = OTHER; note = 2'-O-methylguanosine-3'-phosphate
  modified_base 14: mod_base = OTHER; note = 2'-O-methyladenosine-3'-phosphate
  modified_base 15: mod_base = OTHER; note = 2'-O-methylguanosine-3'-phosphate
  modified_base 16: mod_base = OTHER; note = 2'-O-methyladenosine-3'-phosphate
  modified_base 17: mod_base = OTHER; note = 2'-O-methyladenosine-3'-phosphate
  modified_base 18: mod_base = OTHER; note = 2'-O-methyladenosine-3'-phosphate
  modified_base 19: mod_base = OTHER; note = 2'-O-methyladenosine-3'-phosphate
  modified_base 20: mod_base = OTHER; note = 2'-O-methyladenosine-3'-phosphate
  modified_base 21: mod_base = OTHER; note = 2'-O-methyladenosine
agtgaggtcaatgagaaaaaa

SEQ ID NO: 4216 - RNA, 21 nt, synthetic construct
  source 1..21: mol_type = other RNA
  modified_base 1: mod_base = OTHER; note = 2'-O-methylcytidine-3'-phosphate
  modified_base 2: mod_base = OTHER; note = 2'-O-methyluridine-3'-phosphate
  modified_base 3: mod_base = OTHER; note = 2'-O-methyladenosine-3'-phosphate
  modified_base 4: mod_base = OTHER; note = 2'-O-methyladenosine-3'-phosphate
  modified_base 5: mod_base = OTHER; note = 2'-O-methylguanosine-3'-phosphate
  modified_base 6: mod_base = OTHER; note = 2'-O-methyladenosine-3'-phosphate
  modified_base 7: mod_base = OTHER; note = 2'-deoxy-2'-fluoroadenosine-3'-phosphate
  modified_base 8: mod_base = OTHER; note = 2'-O-methyladenosine-3'-phosphate
  modified_base 9: mod_base = OTHER; note = 2'-deoxy-2'-fluoroguanosine-3'-phosphate
  modified_base 10: mod_base = OTHER; note = 2'-deoxy-2'-fluoroadenosine-3'-phosphate
  modified_base 11: mod_base = OTHER; note = 2'-deoxy-2'-fluoroguanosine-3'-phosphate
  modified_base 12: mod_base = OTHER; note = 2'-O-methyluridine-3'-phosphate
  modified_base 13: mod_base = OTHER; note = 2'-O-methyluridine-3'-phosphate
  modified_base 14: mod_base = OTHER; note = 2'-O-methylguanosine-3'-phosphate
  modified_base 15: mod_base = OTHER; note = 2'-O-methyluridine-3'-phosphate
  modified_base 16: mod_base = OTHER; note = 2'-O-methyladenosine-3'-phosphate
  modified_base 17: mod_base = OTHER; note = 2'-O-methylguanosine-3'-phosphate
  modified_base 18: mod_base = OTHER; note = 2'-O-methyladenosine-3'-phosphate
  modified_base 19: mod_base = OTHER; note = 2'-O-methyladenosine-3'-phosphate
  modified_base 20: mod_base = OTHER; note = 2'-O-methyluridine-3'-phosphate
  modified_base 21: mod_base = OTHER; note = 2'-O-methyladenosine
ctaagaaagagttgtagaata

SEQ ID NO: 4217 - RNA, 21 nt, synthetic construct
  source 1..21: mol_type = other RNA
  modified_base 1: mod_base = OTHER; note = 2'-O-methylguanosine-3'-phosphate
  modified_base 2: mod_base = OTHER; note = 2'-O-methyladenosine-3'-phosphate
  modified_base 3: mod_base = OTHER; note = 2'-O-methyladenosine-3'-phosphate
  modified_base 4: mod_base = OTHER; note = 2'-O-methyladenosine-3'-phosphate
  modified_base 5: mod_base = OTHER; note = 2'-O-methylguanosine-3'-phosphate
  modified_base 6: mod_base = OTHER; note = 2'-O-methyladenosine-3'-phosphate
  modified_base 7: mod_base = OTHER; note = 2'-deoxy-2'-fluoroguanosine-3'-phosphate
  modified_base 8: mod_base = OTHER; note = 2'-O-methyluridine-3'-phosphate
  modified_base 9: mod_base = OTHER; note = 2'-deoxy-2'-fluorouridine-3'-phosphate
  modified_base 10: mod_base = OTHER; note = 2'-deoxy-2'-fluoroguanosine-3'-phosphate
  modified_base 11: mod_base = OTHER; note = 2'-deoxy-2'-fluorouridine-3'-phosphate
  modified_base 12: mod_base = OTHER; note = 2'-O-methyladenosine-3'-phosphate
  modified_base 13: mod_base = OTHER; note = 2'-O-methylguanosine-3'-phosphate
  modified_base 14: mod_base = OTHER; note = 2'-O-methyladenosine-3'-phosphate
  modified_base 15: mod_base = OTHER; note = 2'-O-methyladenosine-3'-phosphate
  modified_base 16: mod_base = OTHER; note = 2'-O-methyluridine-3'-phosphate
  modified_base 17: mod_base = OTHER; note = 2'-O-methylguanosine-3'-phosphate
  modified_base 18: mod_base = OTHER; note = 2'-O-methylguanosine-3'-phosphate
  modified_base 19: mod_base = OTHER; note = 2'-O-methyluridine-3'-phosphate
  modified_base 20: mod_base = OTHER; note = 2'-O-methyluridine-3'-phosphate
  modified_base 21: mod_base = OTHER; note = 2'-O-methyladenosine
gaaagagttgtagaatggtta

SEQ ID NO: 4218 - RNA, 21 nt, synthetic construct
  source 1..21: mol_type = other RNA
  modified_base 1: mod_base = OTHER; note = 2'-O-methylguanosine-3'-phosphate
  modified_base 2: mod_base = OTHER; note = 2'-O-methyluridine-3'-phosphate
  modified_base 3: mod_base = OTHER; note = 2'-O-methylguanosine-3'-phosphate
  modified_base 4: mod_base = OTHER; note = 2'-O-methylcytidine-3'-phosphate
  modified_base 5: mod_base = OTHER; note = 2'-O-methyluridine-3'-phosphate
  modified_base 6: mod_base = OTHER; note = 2'-O-methylguanosine-3'-phosphate
  modified_base 7: mod_base = OTHER; note = 2'-deoxy-2'-fluoroadenosine-3'-phosphate
  modified_base 8: mod_base = OTHER; note = 2'-O-methyluridine-3'-phosphate
  modified_base 9: mod_base = OTHER; note = 2'-deoxy-2'-fluoroadenosine-3'-phosphate
  modified_base 10: mod_base = OTHER; note = 2'-deoxy-2'-fluoroadenosine-3'-phosphate
  modified_base 11: mod_base = OTHER; note = 2'-deoxy-2'-fluoroadenosine-3'-phosphate
  modified_base 12: mod_base = OTHER; note = 2'-O-methyladenosine-3'-phosphate
  modified_base 13: mod_base = OTHER; note = 2'-O-methyluridine-3'-phosphate
  modified_base 14: mod_base = OTHER; note = 2'-O-methyluridine-3'-phosphate
  modified_base 15: mod_base = OTHER; note = 2'-O-methyladenosine-3'-phosphate
  modified_base 16: mod_base = OTHER; note = 2'-O-methyladenosine-3'-phosphate
  modified_base 17: mod_base = OTHER; note = 2'-O-methyluridine-3'-phosphate
  modified_base 18: mod_base = OTHER; note = 2'-O-methylguanosine-3'-phosphate
  modified_base 19: mod_base = OTHER; note = 2'-O-methylguanosine-3'-phosphate
  modified_base 20: mod_base = OTHER; note = 2'-O-methyladenosine-3'-phosphate
  modified_base 21: mod_base = OTHER; note = 2'-O-methyladenosine
gtgctgataaaattaatggaa

SEQ ID NO: 4219 - RNA, 21 nt, synthetic construct
  source 1..21: mol_type = other RNA
  modified_base 1: mod_base = OTHER; note = 2'-O-methyluridine-3'-phosphate
  modified_base 2: mod_base = OTHER; note = 2'-O-methylguanosine-3'-phosphate
  modified_base 3: mod_base = OTHER; note = 2'-O-methylcytidine-3'-phosphate
  modified_base 4: mod_base = OTHER; note = 2'-O-methyluridine-3'-phosphate
  modified_base 5: mod_base = OTHER; note = 2'-O-methylguanosine-3'-phosphate
  modified_base 6: mod_base = OTHER; note = 2'-O-methyladenosine-3'-phosphate
  modified_base 7: mod_base = OTHER; note = 2'-deoxy-2'-fluorouridine-3'-phosphate
  modified_base 8: mod_base = OTHER; note = 2'-O-methyladenosine-3'-phosphate
  modified_base 9: mod_base = OTHER; note = 2'-deoxy-2'-fluoroadenosine-3'-phosphate
  modified_base 10: mod_base = OTHER; note = 2'-deoxy-2'-fluoroadenosine-3'-phosphate
  modified_base 11: mod_base = OTHER; note = 2'-deoxy-2'-fluoroadenosine-3'-phosphate
  modified_base 12: mod_base = OTHER; note = 2'-O-methyluridine-3'-phosphate
  modified_base 13: mod_base = OTHER; note = 2'-O-methyluridine-3'-phosphate
  modified_base 14: mod_base = OTHER; note = 2'-O-methyladenosine-3'-phosphate
  modified_base 15: mod_base = OTHER; note = 2'-O-methyladenosine-3'-phosphate
  modified_base 16: mod_base = OTHER; note = 2'-O-methyluridine-3'-phosphate
  modified_base 17: mod_base = OTHER; note = 2'-O-methylguanosine-3'-phosphate
  modified_base 18: mod_base = OTHER; note = 2'-O-methylguanosine-3'-phosphate
  modified_base 19: mod_base = OTHER; note = 2'-O-methyladenosine-3'-phosphate
  modified_base 20: mod_base = OTHER; note = 2'-O-methyluridine-3'-phosphate
  modified_base 21: mod_base = OTHER; note = 2'-O-methyladenosine
tgctgataaaattaatggata

SEQ ID NO: 4220 - RNA, 21 nt, synthetic construct
  source 1..21: mol_type = other RNA
  modified_base 1: mod_base = OTHER; note = 2'-O-methylguanosine-3'-phosphate
  modified_base 2: mod_base = OTHER; note = 2'-O-methylcytidine-3'-phosphate
  modified_base 3: mod_base = OTHER; note = 2'-O-methyluridine-3'-phosphate
  modified_base 4: mod_base = OTHER; note = 2'-O-methylguanosine-3'-phosphate
  modified_base 5: mod_base = OTHER; note = 2'-O-methyladenosine-3'-phosphate
  modified_base 6: mod_base = OTHER; note = 2'-O-methyluridine-3'-phosphate
  modified_base 7: mod_base = OTHER; note = 2'-deoxy-2'-fluoroadenosine-3'-phosphate
  modified_base 8: mod_base = OTHER; note = 2'-O-methyladenosine-3'-phosphate
  modified_base 9: mod_base = OTHER; note = 2'-deoxy-2'-fluoroadenosine-3'-phosphate
  modified_base 10: mod_base = OTHER; note = 2'-deoxy-2'-fluoroadenosine-3'-phosphate
  modified_base 11: mod_base = OTHER; note = 2'-deoxy-2'-fluorouridine-3'-phosphate
  modified_base 12: mod_base = OTHER; note = 2'-O-methyluridine-3'-phosphate
  modified_base 13: mod_base = OTHER; note = 2'-O-methyladenosine-3'-phosphate
  modified_base 14: mod_base = OTHER; note = 2'-O-methyladenosine-3'-phosphate
  modified_base 15: mod_base = OTHER; note = 2'-O-methyluridine-3'-phosphate
  modified_base 16: mod_base = OTHER; note = 2'-O-methylguanosine-3'-phosphate
  modified_base 17: mod_base = OTHER; note = 2'-O-methylguanosine-3'-phosphate
  modified_base 18: mod_base = OTHER; note = 2'-O-methyladenosine-3'-phosphate
  modified_base 19: mod_base = OTHER; note = 2'-O-methyluridine-3'-phosphate
  modified_base 20: mod_base = OTHER; note = 2'-O-methyladenosine-3'-phosphate
  modified_base 21: mod_base = OTHER; note = 2'-O-methyladenosine
gctgataaaattaatggataa

SEQ ID NO: 4221 - RNA, 21 nt, synthetic construct
  source 1..21: mol_type = other RNA
  modified_base 1: mod_base = OTHER; note = 2'-O-methylguanosine-3'-phosphate
  modified_base 2: mod_base = OTHER; note = 2'-O-methylguanosine-3'-phosphate
  modified_base 3: mod_base = OTHER; note = 2'-O-methyladenosine-3'-phosphate
  modified_base 4: mod_base = OTHER; note = 2'-O-methyladenosine-3'-phosphate
  modified_base 5: mod_base = OTHER; note = 2'-O-methylcytidine-3'-phosphate
  modified_base 6: mod_base = OTHER; note = 2'-O-methyluridine-3'-phosphate
  modified_base 7: mod_base = OTHER; note = 2'-deoxy-2'-fluoroguanosine-3'-phosphate
  modified_base 8: mod_base = OTHER; note = 2'-O-methyluridine-3'-phosphate
  modified_base 9: mod_base = OTHER; note = 2'-deoxy-2'-fluoroguanosine-3'-phosphate
  modified_base 10: mod_base = OTHER; note = 2'-deoxy-2'-fluoroadenosine-3'-phosphate
  modified_base 11: mod_base = OTHER; note = 2'-deoxy-2'-fluoroguanosine-3'-phosphate
  modified_base 12: mod_base = OTHER; note = 2'-O-methyladenosine-3'-phosphate
  modified_base 13: mod_base = OTHER; note = 2'-O-methylguanosine-3'-phosphate
  modified_base 14: mod_base = OTHER; note = 2'-O-methyluridine-3'-phosphate
  modified_base 15: mod_base = OTHER; note = 2'-O-methyladenosine-3'-phosphate
  modified_base 16: mod_base = OTHER; note = 2'-O-methyluridine-3'-phosphate
  modified_base 17: mod_base = OTHER; note = 2'-O-methyladenosine-3'-phosphate
  modified_base 18: mod_base = OTHER; note = 2'-O-methylguanosine-3'-phosphate
  modified_base 19: mod_base = OTHER; note = 2'-O-methyladenosine-3'-phosphate
  modified_base 20: mod_base = OTHER; note = 2'-O-methyladenosine-3'-phosphate
  modified_base 21: mod_base = OTHER; note = 2'-O-methyladenosine
ggaactgtgagagtatagaaa

SEQ ID NO: 4222 - RNA, 21 nt, synthetic construct
  source 1..21: mol_type = other RNA
  modified_base 1: mod_base = OTHER; note = 2'-O-methylguanosine-3'-phosphate
  modified_base 2: mod_base = OTHER; note = 2'-O-methyladenosine-3'-phosphate
  modified_base 3: mod_base = OTHER; note = 2'-O-methyladenosine-3'-phosphate
  modified_base 4: mod_base = OTHER; note = 2'-O-methylcytidine-3'-phosphate
  modified_base 5: mod_base = OTHER; note = 2'-O-methyluridine-3'-phosphate
  modified_base 6: mod_base = OTHER; note = 2'-O-methylguanosine-3'-phosphate
  modified_base 7: mod_base = OTHER; note = 2'-deoxy-2'-fluorouridine-3'-phosphate
  modified_base 8: mod_base = OTHER; note = 2'-O-methylguanosine-3'-phosphate
  modified_base 9: mod_base = OTHER; note = 2'-deoxy-2'-fluoroadenosine-3'-phosphate
  modified_base 10: mod_base = OTHER; note = 2'-deoxy-2'-fluoroguanosine-3'-phosphate
  modified_base 11: mod_base = OTHER; note = 2'-deoxy-2'-fluoroadenosine-3'-phosphate
  modified_base 12: mod_base = OTHER; note = 2'-O-methylguanosine-3'-phosphate
  modified_base 13: mod_base = OTHER; note = 2'-O-methyluridine-3'-phosphate
  modified_base 14: mod_base = OTHER; note = 2'-O-methyladenosine-3'-phosphate
  modified_base 15: mod_base = OTHER; note = 2'-O-methyluridine-3'-phosphate
  modified_base 16: mod_base = OTHER; note = 2'-O-methyladenosine-3'-phosphate
  modified_base 17: mod_base = OTHER; note = 2'-O-methylguanosine-3'-phosphate
  modified_base 18: mod_base = OTHER; note = 2'-O-methyladenosine-3'-phosphate
  modified_base 19: mod_base = OTHER; note = 2'-O-methyladenosine-3'-phosphate
  modified_base 20: mod_base = OTHER; note = 2'-O-methyluridine-3'-phosphate
  modified_base 21: mod_base = OTHER; note = 2'-O-methyladenosine
gaactgtgagagtatagaata

SEQ ID NO: 4223 - RNA, 21 nt, synthetic construct
  source 1..21: mol_type = other RNA
  modified_base 1: mod_base = OTHER; note = 2'-O-methyladenosine-3'-phosphate
  modified_base 2: mod_base = OTHER; note = 2'-O-methyladenosine-3'-phosphate
  modified_base 3: mod_base = OTHER; note = 2'-O-methylcytidine-3'-phosphate
  modified_base 4: mod_base = OTHER; note = 2'-O-methyluridine-3'-phosphate
  modified_base 5: mod_base = OTHER; note = 2'-O-methylguanosine-3'-phosphate
  modified_base 6: mod_base = OTHER; note = 2'-O-methyluridine-3'-phosphate
  modified_base 7: mod_base = OTHER; note = 2'-deoxy-2'-fluoroguanosine-3'-phosphate
  modified_base 8: mod_base = OTHER; note = 2'-O-methyladenosine-3'-phosphate
  modified_base 9: mod_base = OTHER; note = 2'-deoxy-2'-fluoroguanosine-3'-phosphate
  modified_base 10: mod_base = OTHER; note = 2'-deoxy-2'-fluoroadenosine-3'-phosphate
  modified_base 11: mod_base = OTHER; note = 2'-deoxy-2'-fluoroguanosine-3'-phosphate
  modified_base 12: mod_base = OTHER; note = 2'-O-methyluridine-3'-phosphate
  modified_base 13: mod_base = OTHER; note = 2'-O-methyladenosine-3'-phosphate
  modified_base 14: mod_base = OTHER; note = 2'-O-methyluridine-3'-phosphate
  modified_base 15: mod_base = OTHER; note = 2'-O-methyladenosine-3'-phosphate
  modified_base 16: mod_base = OTHER; note = 2'-O-methylguanosine-3'-phosphate
  modified_base 17: mod_base = OTHER; note = 2'-O-methyladenosine-3'-phosphate
  modified_base 18: mod_base = OTHER; note = 2'-O-methyladenosine-3'-phosphate
  modified_base 19: mod_base = OTHER; note = 2'-O-methyluridine-3'-phosphate
  modified_base 20: mod_base = OTHER; note = 2'-O-methyluridine-3'-phosphate
  modified_base 21: mod_base = OTHER; note = 2'-O-methyladenosine
aactgtgagagtatagaatta

SEQ ID NO: 4224 - RNA, 21 nt, synthetic construct
  source 1..21: mol_type = other RNA
  modified_base 1: mod_base = OTHER; note = 2'-O-methyladenosine-3'-phosphate
  modified_base 2: mod_base = OTHER; note = 2'-O-methylcytidine-3'-phosphate
  modified_base 3: mod_base = OTHER; note = 2'-O-methyluridine-3'-phosphate
  modified_base 4: mod_base = OTHER; note = 2'-O-methylguanosine-3'-phosphate
  modified_base 5: mod_base = OTHER; note = 2'-O-methyluridine-3'-phosphate
  modified_base 6: mod_base = OTHER; note = 2'-O-methylguanosine-3'-phosphate
  modified_base 7: mod_base = OTHER; note = 2'-deoxy-2'-fluoroadenosine-3'-phosphate
  modified_base 8: mod_base = OTHER; note = 2'-O-methylguanosine-3'-phosphate
  modified_base 9: mod_base = OTHER; note = 2'-deoxy-2'-fluoroadenosine-3'-phosphate
  modified_base 10: mod_base = OTHER; note = 2'-deoxy-2'-fluoroguanosine-3'-phosphate
  modified_base 11: mod_base = OTHER; note = 2'-deoxy-2'-fluorouridine-3'-phosphate
  modified_base 12: mod_base = OTHER; note = 2'-O-methyladenosine-3'-phosphate
  modified_base 13: mod_base = OTHER; note = 2'-O-methyluridine-3'-phosphate
  modified_base 14: mod_base = OTHER; note = 2'-O-methyladenosine-3'-phosphate
  modified_base 15: mod_base = OTHER; note = 2'-O-methylguanosine-3'-phosphate
  modified_base 16: mod_base = OTHER; note = 2'-O-methyladenosine-3'-phosphate
  modified_base 17: mod_base = OTHER; note = 2'-O-methyladenosine-3'-phosphate
  modified_base 18: mod_base = OTHER; note = 2'-O-methyluridine-3'-phosphate
  modified_base 19: mod_base = OTHER; note = 2'-O-methyluridine-3'-phosphate
  modified_base 20: mod_base = OTHER; note = 2'-O-methyluridine-3'-phosphate
  modified_base 21: mod_base = OTHER; note = 2'-O-methyladenosine
actgtgagagtatagaattta

SEQ ID NO: 4225 - RNA, 21 nt, synthetic construct
  source 1..21: mol_type = other RNA
  modified_base 1: mod_base = OTHER; note = 2'-O-methylcytidine-3'-phosphate
  modified_base 2: mod_base = OTHER; note = 2'-O-methyluridine-3'-phosphate
  modified_base 3: mod_base = OTHER; note = 2'-O-methylguanosine-3'-phosphate
  modified_base 4: mod_base = OTHER; note = 2'-O-methyluridine-3'-phosphate
  modified_base 5: mod_base = OTHER; note = 2'-O-methylguanosine-3'-phosphate
  modified_base 6: mod_base = OTHER; note = 2'-O-methyladenosine-3'-phosphate
  modified_base 7: mod_base = OTHER; note = 2'-deoxy-2'-fluoroguanosine-3'-phosphate
  modified_base 8: mod_base = OTHER; note = 2'-O-methyladenosine-3'-phosphate
  modified_base 9: mod_base = OTHER; note = 2'-deoxy-2'-fluoroguanosine-3'-phosphate
  modified_base 10: mod_base = OTHER; note = 2'-deoxy-2'-fluorouridine-3'-phosphate
  modified_base 11: mod_base = OTHER; note = 2'-deoxy-2'-fluoroadenosine-3'-phosphate
  modified_base 12: mod_base = OTHER; note = 2'-O-methyluridine-3'-phosphate
  modified_base 13: mod_base = OTHER; note = 2'-O-methyladenosine-3'-phosphate
  modified_base 14: mod_base = OTHER; note = 2'-O-methylguanosine-3'-phosphate
  modified_base 15: mod_base = OTHER; note = 2'-O-methyladenosine-3'-phosphate
  modified_base 16: mod_base = OTHER; note = 2'-O-methyladenosine-3'-phosphate
  modified_base 17: mod_base = OTHER; note = 2'-O-methyluridine-3'-phosphate
  modified_base 18: mod_base = OTHER; note = 2'-O-methyluridine-3'-phosphate
  modified_base 19: mod_base = OTHER; note = 2'-O-methyluridine-3'-phosphate
  modified_base 20: mod_base = OTHER; note = 2'-O-methylcytidine-3'-phosphate
  modified_base 21: mod_base = OTHER; note = 2'-O-methyladenosine
ctgtgagagtatagaatttca

SEQ ID NO: 4226 - RNA, 21 nt, synthetic construct
  source 1..21: mol_type = other RNA
  modified_base 1: mod_base = OTHER; note = 2'-O-methyluridine-3'-phosphate
  modified_base 2: mod_base = OTHER; note = 2'-O-methylguanosine-3'-phosphate
  modified_base 3: mod_base = OTHER; note = 2'-O-methyluridine-3'-phosphate
  modified_base 4: mod_base = OTHER; note = 2'-O-methylguanosine-3'-phosphate
  modified_base 5: mod_base = OTHER; note = 2'-O-methyladenosine-3'-phosphate
  modified_base 6: mod_base = OTHER; note = 2'-O-methylguanosine-3'-phosphate
  modified_base 7: mod_base = OTHER; note = 2'-deoxy-2'-fluoroadenosine-3'-phosphate
  modified_base 8: mod_base = OTHER; note = 2'-O-methylguanosine-3'-phosphate
  modified_base 9: mod_base = OTHER; note = 2'-deoxy-2'-fluorouridine-3'-phosphate
  modified_base 10: mod_base = OTHER; note = 2'-deoxy-2'-fluoroadenosine-3'-phosphate
  modified_base 11: mod_base = OTHER; note = 2'-deoxy-2'-fluorouridine-3'-phosphate
  modified_base 12: mod_base = OTHER; note = 2'-O-methyladenosine-3'-phosphate
  modified_base 13: mod_base = OTHER; note = 2'-O-methylguanosine-3'-phosphate
  modified_base 14: mod_base = OTHER; note = 2'-O-methyladenosine-3'-phosphate
  modified_base 15: mod_base = OTHER; note = 2'-O-methyladenosine-3'-phosphate
  modified_base 16: mod_base = OTHER; note = 2'-O-methyluridine-3'-phosphate
  modified_base 17: mod_base = OTHER; note = 2'-O-methyluridine-3'-phosphate
  modified_base 18: mod_base = OTHER; note = 2'-O-methyluridine-3'-phosphate
  modified_base 19: mod_base = OTHER; note = 2'-O-methylcytidine-3'-phosphate
  modified_base 20: mod_base = OTHER; note = 2'-O-methyluridine-3'-phosphate
  modified_base 21: mod_base = OTHER; note = 2'-O-methyladenosine
tgtgagagtatagaatttcta

SEQ ID NO: 4227 - RNA, 21 nt, synthetic construct
  source 1..21: mol_type = other RNA
  modified_base 1: mod_base = OTHER; note = 2'-O-methylguanosine-3'-phosphate
  modified_base 2: mod_base = OTHER; note = 2'-O-methyluridine-3'-phosphate
  modified_base 3: mod_base = OTHER; note = 2'-O-methylguanosine-3'-phosphate
  modified_base 4: mod_base = OTHER; note = 2'-O-methyladenosine-3'-phosphate
  modified_base 5: mod_base = OTHER; note = 2'-O-methylguanosine-3'-phosphate
  modified_base 6: mod_base = OTHER; note = 2'-O-methyladenosine-3'-phosphate
  modified_base 7: mod_base = OTHER; note = 2'-deoxy-2'-fluoroguanosine-3'-phosphate
  modified_base 8: mod_base = OTHER; note = 2'-O-methyluridine-3'-phosphate
  modified_base 9: mod_base = OTHER; note = 2'-deoxy-2'-fluoroadenosine-3'-phosphate
  modified_base 10: mod_base = OTHER; note = 2'-deoxy-2'-fluorouridine-3'-phosphate
  modified_base 11: mod_base = OTHER; note = 2'-deoxy-2'-fluoroadenosine-3'-phosphate
  modified_base 12: mod_base = OTHER; note = 2'-O-methylguanosine-3'-phosphate
  modified_base 13: mod_base = OTHER; note = 2'-O-methyladenosine-3'-phosphate
  modified_base 14: mod_base = OTHER; note = 2'-O-methyladenosine-3'-phosphate
  modified_base 15: mod_base = OTHER; note = 2'-O-methyluridine-3'-phosphate
  modified_base 16: mod_base = OTHER; note = 2'-O-methyluridine-3'-phosphate
  modified_base 17: mod_base = OTHER; note = 2'-O-methyluridine-3'-phosphate
  modified_base 18: mod_base = OTHER; note = 2'-O-methylcytidine-3'-phosphate
  modified_base 19: mod_base = OTHER; note = 2'-O-methyluridine-3'-phosphate
  modified_base 20: mod_base = OTHER; note = 2'-O-methyluridine-3'-phosphate
  modified_base 21: mod_base = OTHER; note = 2'-O-methyladenosine
gtgagagtatagaatttctta

SEQ ID NO: 4228 - RNA, 21 nt, synthetic construct
  source 1..21: mol_type = other RNA
  modified_base 1: mod_base = OTHER; note = 2'-O-methyluridine-3'-phosphate
  modified_base 2: mod_base = OTHER; note = 2'-O-methylguanosine-3'-phosphate
  modified_base 3: mod_base = OTHER; note = 2'-O-methyladenosine-3'-phosphate
  modified_base 4: mod_base = OTHER; note = 2'-O-methylguanosine-3'-phosphate
  modified_base 5: mod_base = OTHER; note = 2'-O-methyladenosine-3'-phosphate
  modified_base 6: mod_base = OTHER; note = 2'-O-methylguanosine-3'-phosphate
  modified_base 7: mod_base = OTHER; note = 2'-deoxy-2'-fluorouridine-3'-phosphate
  modified_base 8: mod_base = OTHER; note = 2'-O-methyladenosine-3'-phosphate
  modified_base 9: mod_base = OTHER; note = 2'-deoxy-2'-fluorouridine-3'-phosphate
  modified_base 10: mod_base = OTHER; note = 2'-deoxy-2'-fluoroadenosine-3'-phosphate
  modified_base 11: mod_base = OTHER; note = 2'-deoxy-2'-fluoroguanosine-3'-phosphate
  modified_base 12: mod_base = OTHER; note = 2'-O-methyladenosine-3'-phosphate
  modified_base 13: mod_base = OTHER; note = 2'-O-methyladenosine-3'-phosphate
  modified_base 14: mod_base = OTHER; note = 2'-O-methyluridine-3'-phosphate
  modified_base 15: mod_base = OTHER; note = 2'-O-methyluridine-3'-phosphate
  modified_base 16: mod_base = OTHER; note = 2'-O-methyluridine-3'-phosphate
  modified_base 17: mod_base = OTHER; note = 2'-O-methylcytidine-3'-phosphate
  modified_base 18: mod_base = OTHER; note = 2'-O-methyluridine-3'-phosphate
  modified_base 19: mod_base = OTHER; note = 2'-O-methyluridine-3'-phosphate
  modified_base 20: mod_base = OTHER; note = 2'-O-methyladenosine-3'-phosphate
  modified_base 21: mod_base = OTHER; note = 2'-O-methyladenosine
tgagagtatagaatttcttaa

SEQ ID NO: 4229 - RNA, 21 nt, synthetic construct
  source 1..21: mol_type = other RNA
  modified_base 1: mod_base = OTHER; note = 2'-O-methylguanosine-3'-phosphate
  modified_base 2: mod_base = OTHER; note = 2'-O-methyladenosine-3'-phosphate
  modified_base 3: mod_base = OTHER; note = 2'-O-methylguanosine-3'-phosphate
  modified_base 4: mod_base = OTHER; note = 2'-O-methyladenosine-3'-phosphate
  modified_base 5: mod_base = OTHER; note = 2'-O-methylguanosine-3'-phosphate
  modified_base 6: mod_base = OTHER; note = 2'-O-methyluridine-3'-phosphate
  modified_base 7: mod_base = OTHER; note = 2'-deoxy-2'-fluoroadenosine-3'-phosphate
  modified_base 8: mod_base = OTHER; note = 2'-O-methyluridine-3'-phosphate
  modified_base 9: mod_base = OTHER; note = 2'-deoxy-2'-fluoroadenosine-3'-phosphate
  modified_base 10: mod_base = OTHER; note = 2'-deoxy-2'-fluoroguanosine-3'-phosphate
  modified_base 11: mod_base = OTHER; note = 2'-deoxy-2'-fluoroadenosine-3'-phosphate
  modified_base 12: mod_base = OTHER; note = 2'-O-methyladenosine-3'-phosphate
  modified_base 13: mod_base = OTHER; note = 2'-O-methyluridine-3'-phosphate
  modified_base 14: mod_base = OTHER; note = 2'-O-methyluridine-3'-phosphate
  modified_base 15: mod_base = OTHER; note = 2'-O-methyluridine-3'-phosphate
  modified_base 16: mod_base = OTHER; note = 2'-O-methylcytidine-3'-phosphate
  modified_base 17: mod_base = OTHER; note = 2'-O-methyluridine-3'-phosphate
  modified_base 18: mod_base = OTHER; note = 2'-O-methyluridine-3'-phosphate
  modified_base 19: mod_base = OTHER; note = 2'-O-methyladenosine-3'-phosphate
  modified_base 20: mod_base = OTHER; note = 2'-O-methylguanosine-3'-phosphate
  modified_base 21: mod_base = OTHER; note = 2'-O-methyladenosine
gagagtatagaatttcttaga

SEQ ID NO: 4230 - RNA, 21 nt, synthetic construct
  source 1..21: mol_type = other RNA
  modified_base 1: mod_base = OTHER; note = 2'-O-methyladenosine-3'-phosphate
  modified_base 2: mod_base = OTHER; note = 2'-O-methylguanosine-3'-phosphate
  modified_base 3: mod_base = OTHER; note = 2'-O-methyladenosine-3'-phosphate
  modified_base 4: mod_base = OTHER; note = 2'-O-methylguanosine-3'-phosphate
  modified_base 5: mod_base = OTHER; note = 2'-O-methyluridine-3'-phosphate
  modified_base 6: mod_base = OTHER; note = 2'-O-methyladenosine-3'-phosphate
  modified_base 7: mod_base = OTHER; note = 2'-deoxy-2'-fluorouridine-3'-phosphate
  modified_base 8: mod_base = OTHER; note = 2'-O-methyladenosine-3'-phosphate
  modified_base 9: mod_base = OTHER; note = 2'-deoxy-2'-fluoroguanosine-3'-phosphate
  modified_base 10: mod_base = OTHER; note = 2'-deoxy-2'-fluoroadenosine-3'-phosphate
  modified_base 11: mod_base = OTHER; note = 2'-deoxy-2'-fluoroadenosine-3'-phosphate
  modified_base 12: mod_base = OTHER; note = 2'-O-methyluridine-3'-phosphate
  modified_base 13: mod_base = OTHER; note = 2'-O-methyluridine-3'-phosphate
  modified_base 14: mod_base = OTHER; note = 2'-O-methyluridine-3'-phosphate
  modified_base 15: mod_base = OTHER; note = 2'-O-methylcytidine-3'-phosphate
  modified_base 16: mod_base = OTHER; note = 2'-O-methyluridine-3'-phosphate
  modified_base 17: mod_base = OTHER; note = 2'-O-methyluridine-3'-phosphate
  modified_base 18: mod_base = OTHER; note = 2'-O-methyladenosine-3'-phosphate
  modified_base 19: mod_base = OTHER; note = 2'-O-methylguanosine-3'-phosphate
  modified_base 20: mod_base = OTHER; note = 2'-O-methyluridine-3'-phosphate
  modified_base 21: mod_base = OTHER; note = 2'-O-methyladenosine
agagtatagaatttcttagta

SEQ ID NO: 4231 - RNA, 21 nt, synthetic construct
  source 1..21: mol_type = other RNA
  modified_base 1: mod_base = OTHER; note = 2'-O-methylguanosine-3'-phosphate
  modified_base 2: mod_base = OTHER; note = 2'-O-methyladenosine-3'-phosphate
  modified_base 3: mod_base = OTHER; note = 2'-O-methylguanosine-3'-phosphate
  modified_base 4: mod_base = OTHER; note = 2'-O-methyluridine-3'-phosphate
  modified_base 5: mod_base = OTHER; note = 2'-O-methyladenosine-3'-phosphate
  modified_base 6: mod_base = OTHER; note = 2'-O-methyluridine-3'-phosphate
  modified_base 7: mod_base = OTHER; note = 2'-deoxy-2'-fluoroadenosine-3'-phosphate
  modified_base 8: mod_base = OTHER; note = 2'-O-methylguanosine-3'-phosphate
  modified_base 9: mod_base = OTHER; note = 2'-deoxy-2'-fluoroadenosine-3'-phosphate
  modified_base 10: mod_base = OTHER; note = 2'-deoxy-2'-fluoroadenosine-3'-phosphate
  modified_base 11: mod_base = OTHER; note = 2'-deoxy-2'-fluorouridine-3'-phosphate
  modified_base 12: mod_base = OTHER; note = 2'-O-methyluridine-3'-phosphate
  modified_base 13: mod_base = OTHER; note = 2'-O-methyluridine-3'-phosphate
  modified_base 14: mod_base = OTHER; note = 2'-O-methylcytidine-3'-phosphate
  modified_base 15: mod_base = OTHER; note = 2'-O-methyluridine-3'-phosphate
  modified_base 16: mod_base = OTHER; note = 2'-O-methyluridine-3'-phosphate
  modified_base 17: mod_base = OTHER; note = 2'-O-methyladenosine-3'-phosphate
  modified_base 18: mod_base = OTHER; note = 2'-O-methylguanosine-3'-phosphate
  modified_base 19: mod_base = OTHER; note = 2'-O-methyluridine-3'-phosphate
  modified_base 20: mod_base = OTHER; note = 2'-O-methylguanosine-3'-phosphate
  modified_base 21: mod_base = OTHER; note = 2'-O-methyladenosine
gagtatagaatttcttagtga

SEQ ID NO: 4232 - RNA, 21 nt, synthetic construct
  source 1..21: mol_type = other RNA
  modified_base 1: mod_base = OTHER; note = 2'-O-methyladenosine-3'-phosphate
  modified_base 2: mod_base = OTHER; note = 2'-O-methylguanosine-3'-phosphate
  modified_base 3: mod_base = OTHER; note = 2'-O-methyluridine-3'-phosphate
  modified_base 4: mod_base = OTHER; note = 2'-O-methyladenosine-3'-phosphate
  modified_base 5: mod_base = OTHER; note = 2'-O-methyluridine-3'-phosphate
  modified_base 6: mod_base = OTHER; note = 2'-O-methyladenosine-3'-phosphate
  modified_base 7: mod_base = OTHER; note = 2'-deoxy-2'-fluoroguanosine-3'-phosphate
  modified_base 8: mod_base = OTHER; note = 2'-O-methyladenosine-3'-phosphate
  modified_base 9: mod_base = OTHER; note = 2'-deoxy-2'-fluoroadenosine-3'-phosphate
  modified_base 10: mod_base = OTHER; note = 2'-deoxy-2'-fluorouridine-3'-phosphate
  modified_base 11: mod_base = OTHER; note = 2'-deoxy-2'-fluorouridine-3'-phosphate
  modified_base 12: mod_base = OTHER; note = 2'-O-methyluridine-3'-phosphate
  modified_base 13: mod_base = OTHER; note = 2'-O-methylcytidine-3'-phosphate
  modified_base 14: mod_base = OTHER; note = 2'-O-methyluridine-3'-phosphate
  modified_base 15: mod_base = OTHER; note = 2'-O-methyluridine-3'-phosphate
  modified_base 16: mod_base = OTHER; note = 2'-O-methyladenosine-3'-phosphate
  modified_base 17: mod_base = OTHER; note = 2'-O-methylguanosine-3'-phosphate
  modified_base 18: mod_base = OTHER; note = 2'-O-methyluridine-3'-phosphate
  modified_base 19: mod_base = OTHER; note = 2'-O-methylguanosine-3'-phosphate
  modified_base 20: mod_base = OTHER; note = 2'-O-methylcytidine-3'-phosphate
  modified_base 21: mod_base = OTHER; note = 2'-O-methyladenosine
agtatagaatttcttagtgca

SEQ ID NO: 4233 - RNA, 21 nt, synthetic construct
  source 1..21: mol_type = other RNA
  modified_base 1: mod_base = OTHER; note = 2'-O-methylguanosine-3'-phosphate
  modified_base 2: mod_base = OTHER; note = 2'-O-methyluridine-3'-phosphate
  modified_base 3: mod_base = OTHER; note = 2'-O-methyladenosine-3'-phosphate
  modified_base 4: mod_base = OTHER; note = 2'-O-methyluridine-3'-phosphate
  modified_base 5: mod_base = OTHER; note = 2'-O-methyladenosine-3'-phosphate
  modified_base 6: mod_base = OTHER; note = 2'-O-methylguanosine-3'-phosphate
  modified_base 7: mod_base = OTHER; note = 2'-deoxy-2'-fluoroadenosine-3'-phosphate
  modified_base 8: mod_base = OTHER; note = 2'-O-methyladenosine-3'-phosphate
  modified_base 9: mod_base = OTHER; note = 2'-deoxy-2'-fluorouridine-3'-phosphate
  modified_base 10: mod_base = OTHER; note = 2'-deoxy-2'-fluorouridine-3'-phosphate
  modified_base 11: mod_base = OTHER; note = 2'-deoxy-2'-fluorouridine-3'-phosphate
  modified_base 12: mod_base = OTHER; note = 2'-O-methylcytidine-3'-phosphate
  modified_base 13: mod_base = OTHER; note = 2'-O-methyluridine-3'-phosphate
  modified_base 14: mod_base = OTHER; note = 2'-O-methyluridine-3'-phosphate
  modified_base 15: mod_base = OTHER; note = 2'-O-methyladenosine-3'-phosphate
  modified_base 16: mod_base = OTHER; note = 2'-O-methylguanosine-3'-phosphate
  modified_base 17: mod_base = OTHER; note = 2'-O-methyluridine-3'-phosphate
  modified_base 18: mod_base = OTHER; note = 2'-O-methylguanosine-3'-phosphate
  modified_base 19: mod_base = OTHER; note = 2'-O-methylcytidine-3'-phosphate
  modified_base 20: mod_base = OTHER; note = 2'-O-methyladenosine-3'-phosphate
  modified_base 21: mod_base = OTHER; note = 2'-O-methyladenosine
gtatagaatttcttagtgcaa

SEQ ID NO: 4234 - RNA, 21 nt, synthetic construct
  source 1..21: mol_type = other RNA
  modified_base 1: mod_base = OTHER; note = 2'-O-methyluridine-3'-phosphate
  modified_base 2: mod_base = OTHER; note = 2'-O-methylguanosine-3'-phosphate
  modified_base 3: mod_base = OTHER; note = 2'-O-methyluridine-3'-phosphate
  modified_base 4: mod_base = OTHER; note = 2'-O-methyladenosine-3'-phosphate
  modified_base 5: mod_base = OTHER; note = 2'-O-methyladenosine-3'-phosphate
  modified_base 6: mod_base = OTHER; note = 2'-O-methylguanosine-3'-phosphate
  modified_base 7: mod_base = OTHER; note = 2'-deoxy-2'-fluoroguanosine-3'-phosphate
  modified_base 8: mod_base = OTHER; note = 2'-O-methyladenosine-3'-phosphate
  modified_base 9: mod_base = OTHER; note = 2'-deoxy-2'-fluorocytidine-3'-phosphate
  modified_base 10: mod_base = OTHER; note = 2'-deoxy-2'-fluorouridine-3'-phosphate
  modified_base 11: mod_base = OTHER; note = 2'-deoxy-2'-fluoroguanosine-3'-phosphate
  modified_base 12: mod_base = OTHER; note = 2'-O-methyluridine-3'-phosphate
  modified_base 13: mod_base = OTHER; note = 2'-O-methyluridine-3'-phosphate
  modified_base 14: mod_base = OTHER; note = 2'-O-methylcytidine-3'-phosphate
  modified_base 15: mod_base = OTHER; note = 2'-O-methyluridine-3'-phosphate
  modified_base 16: mod_base = OTHER; note = 2'-O-methyluridine-3'-phosphate
  modified_base 17: mod_base = OTHER; note = 2'-O-methyluridine-3'-phosphate
  modified_base 18: mod_base = OTHER; note = 2'-O-methylcytidine-3'-phosphate
  modified_base 19: mod_base = OTHER; note = 2'-O-methyluridine-3'-phosphate
  modified_base 20: mod_base = OTHER; note = 2'-O-methylcytidine-3'-phosphate
  modified_base 21: mod_base = OTHER; note = 2'-O-methyladenosine
tgtaaggactgttctttctca

SEQ ID NO: 4235 - RNA, 21 nt, synthetic construct
  source 1..21: mol_type = other RNA
  modified_base 1: mod_base = OTHER; note = 2'-O-methyluridine-3'-phosphate
  modified_base 2: mod_base = OTHER; note = 2'-O-methylguanosine-3'-phosphate
  modified_base 3: mod_base = OTHER; note = 2'-O-methylguanosine-3'-phosphate
  modified_base 4: mod_base = OTHER; note = 2'-O-methylguanosine-3'-phosphate
  modified_base 5: mod_base = OTHER; note = 2'-O-methyladenosine-3'-phosphate
  modified_base 6: mod_base = OTHER; note = 2'-O-methyluridine-3'-phosphate
  modified_base 7: mod_base = OTHER; note = 2'-deoxy-2'-fluoroadenosine-3'-phosphate
  modified_base 8: mod_base = OTHER; note = 2'-O-methyluridine-3'-phosphate
  modified_base 9: mod_base = OTHER; note = 2'-deoxy-2'-fluorouridine-3'-phosphate
  modified_base 10: mod_base = OTHER; note = 2'-deoxy-2'-fluoroadenosine-3'-phosphate
  modified_base 11: mod_base = OTHER; note = 2'-deoxy-2'-fluorouridine-3'-phosphate
  modified_base 12: mod_base = OTHER; note = 2'-O-methylcytidine-3'-phosphate
  modified_base 13: mod_base = OTHER; note = 2'-O-methyluridine-3'-phosphate
  modified_base 14: mod_base = OTHER; note = 2'-O-methyladenosine-3'-phosphate
  modified_base 15: mod_base = OTHER; note = 2'-O-methyladenosine-3'-phosphate
  modified_base 16: mod_base = OTHER; note = 2'-O-methylcytidine-3'-phosphate
  modified_base 17: mod_base = OTHER; note = 2'-O-methyluridine-3'-phosphate
  modified_base 18: mod_base = OTHER; note = 2'-O-methyluridine-3'-phosphate
  modified_base 19: mod_base = OTHER; note = 2'-O-methyluridine-3'-phosphate
  modified_base 20: mod_base = OTHER; note = 2'-O-methyluridine-3'-phosphate
  modified_base 21: mod_base = OTHER; note = 2'-O-methyladenosine
tgggatattatctaactttta

SEQ ID NO: 4236 - RNA, 21 nt, synthetic construct
  source 1..21: mol_type = other RNA
  modified_base 1: mod_base = OTHER; note = 2'-O-methyluridine-3'-phosphate
  modified_base 2: mod_base = OTHER; note = 2'-O-methylguanosine-3'-phosphate
  modified_base 3: mod_base = OTHER; note = 2'-O-methyluridine-3'-phosphate
  modified_base 4: mod_base = OTHER; note = 2'-O-methylcytidine-3'-phosphate
  modified_base 5: mod_base = OTHER; note = 2'-O-methyluridine-3'-phosphate
  modified_base 6: mod_base = OTHER; note = 2'-O-methyluridine-3'-phosphate
  modified_base 7: mod_base = OTHER; note = 2'-deoxy-2'-fluorouridine-3'-phosphate
  modified_base 8: mod_base = OTHER; note = 2'-O-methylguanosine-3'-phosphate
  modified_base 9: mod_base = OTHER; note = 2'-deoxy-2'-fluoroguanosine-3'-phosphate
  modified_base 10: mod_base = OTHER; note = 2'-deoxy-2'-fluorocytidine-3'-phosphate
  modified_base 11: mod_base = OTHER; note = 2'-deoxy-2'-fluoroadenosine-3'-phosphate
  modified_base 12: mod_base = OTHER; note = 2'-O-methyluridine-3'-phosphate
  modified_base 13: mod_base = OTHER; note = 2'-O-methyluridine-3'-phosphate
  modified_base 14: mod_base = OTHER; note = 2'-O-methylcytidine-3'-phosphate
  modified_base 15: mod_base = OTHER; note = 2'-O-methyladenosine-3'-phosphate
  modified_base 16: mod_base = OTHER; note = 2'-O-methyluridine-3'-phosphate
  modified_base 17: mod_base = OTHER; note = 2'-O-methylcytidine-3'-phosphate
  modified_base 18: mod_base = OTHER; note = 2'-O-methyluridine-3'-phosphate
  modified_base 19: mod_base = OTHER; note = 2'-O-methyluridine-3'-phosphate
  modified_base 20: mod_base = OTHER; note = 2'-O-methylcytidine-3'-phosphate
  modified_base 21: mod_base = OTHER; note = 2'-O-methyladenosine
tgtctttggcattcatcttca

SEQ ID NO: 4237 - RNA, 21 nt, synthetic construct
  source 1..21: mol_type = other RNA
  modified_base 1: mod_base = OTHER; note = 2'-O-methyluridine-3'-phosphate
  modified_base 2: mod_base = OTHER; note = 2'-O-methyluridine-3'-phosphate
  modified_base 3: mod_base = OTHER; note = 2'-O-methyluridine-3'-phosphate
  modified_base 4: mod_base = OTHER; note = 2'-O-methylguanosine-3'-phosphate
  modified_base 5: mod_base = OTHER; note = 2'-O-methylguanosine-3'-phosphate
  modified_base 6: mod_base = OTHER; note = 2'-O-methylcytidine-3'-phosphate
  modified_base 7: mod_base = OTHER; note = 2'-deoxy-2'-fluoroadenosine-3'-phosphate
  modified_base 8: mod_base = OTHER; note = 2'-O-methyluridine-3'-phosphate
  modified_base 9: mod_base = OTHER; note = 2'-deoxy-2'-fluorouridine-3'-phosphate
  modified_base 10: mod_base = OTHER; note = 2'-deoxy-2'-fluorocytidine-3'-phosphate
  modified_base 11: mod_base = OTHER; note = 2'-deoxy-2'-fluoroadenosine-3'-phosphate
  modified_base 12: mod_base = OTHER; note = 2'-O-methyluridine-3'-phosphate
  modified_base 13: mod_base = OTHER; note = 2'-O-methylcytidine-3'-phosphate
  modified_base 14: mod_base = OTHER; note = 2'-O-methyluridine-3'-phosphate
  modified_base 15: mod_base = OTHER; note = 2'-O-methyluridine-3'-phosphate
  modified_base 16: mod_base = OTHER; note = 2'-O-methylcytidine-3'-phosphate
  modified_base 17: mod_base = OTHER; note = 2'-O-methyluridine-3'-phosphate
  modified_base 18: mod_base = OTHER; note = 2'-O-methyluridine-3'-phosphate
  modified_base 19: mod_base = OTHER; note = 2'-O-methyluridine-3'-phosphate
  modified_base 20: mod_base = OTHER; note = 2'-O-methyluridine-3'-phosphate
  modified_base 21: mod_base = OTHER; note = 2'-O-methyladenosine
tttggcattcatcttctttta

SEQ ID NO: 4238 - RNA, 21 nt, synthetic construct
  source 1..21: mol_type = other RNA
  modified_base 1: mod_base = OTHER; note = 2'-O-methylguanosine-3'-phosphate
  modified_base 2: mod_base = OTHER; note = 2'-O-methylcytidine-3'-phosphate
  modified_base 3: mod_base = OTHER; note = 2'-O-methyladenosine-3'-phosphate
  modified_base 4: mod_base = OTHER; note = 2'-O-methyluridine-3'-phosphate
  modified_base 5: mod_base = OTHER; note = 2'-O-methyluridine-3'-phosphate
  modified_base 6: mod_base = OTHER; note = 2'-O-methyladenosine-3'-phosphate
  modified_base 7: mod_base = OTHER; note = 2'-deoxy-2'-fluoroadenosine-3'-phosphate
  modified_base 8: mod_base = OTHER; note = 2'-O-methyladenosine-3'-phosphate
  modified_base 9: mod_base = OTHER; note = 2'-deoxy-2'-fluoroadenosine-3'-phosphate
  modified_base 10: mod_base = OTHER; note = 2'-deoxy-2'-fluoroadenosine-3'-phosphate
  modified_base 11: mod_base = OTHER; note = 2'-deoxy-2'-fluoroadenosine-3'-phosphate
  modified_base 12: mod_base = OTHER; note = 2'-O-methyluridine-3'-phosphate
  modified_base 13: mod_base = OTHER; note = 2'-O-methylguanosine-3'-phosphate
  modified_base 14: mod_base = OTHER; note = 2'-O-methyluridine-3'-phosphate
  modified_base 15: mod_base = OTHER; note = 2'-O-methyluridine-3'-phosphate
  modified_base 16: mod_base = OTHER; note = 2'-O-methyluridine-3'-phosphate
  modified_base 17: mod_base = OTHER; note = 2'-O-methylguanosine-3'-phosphate
  modified_base 18: mod_base = OTHER; note = 2'-O-methylguanosine-3'-phosphate
  modified_base 19: mod_base = OTHER; note = 2'-O-methylcytidine-3'-phosphate
  modified_base 20: mod_base = OTHER; note = 2'-O-methyladenosine-3'-phosphate
  modified_base 21: mod_base = OTHER; note = 2'-O-methyladenosine
gcattaaaaaatgtttggcaa

SEQ ID NO: 4239 - RNA, 21 nt, synthetic construct
  source 1..21: mol_type = other RNA
  modified_base 1: mod_base = OTHER; note = 2'-O-methyluridine-3'-phosphate
  modified_base 2: mod_base = OTHER; note = 2'-O-methylcytidine-3'-phosphate
  modified_base 3: mod_base = OTHER; note = 2'-O-methyladenosine-3'-phosphate
  modified_base 4: mod_base = OTHER; note = 2'-O-methylcytidine-3'-phosphate
  modified_base 5: mod_base = OTHER; note = 2'-O-methyluridine-3'-phosphate
  modified_base 6: mod_base = OTHER; note = 2'-O-methylcytidine-3'-phosphate
  modified_base 7: mod_base = OTHER; note = 2'-deoxy-2'-fluorouridine-3'-phosphate
  modified_base 8: mod_base = OTHER; note = 2'-O-methyladenosine-3'-phosphate
  modified_base 9: mod_base = OTHER; note = 2'-deoxy-2'-fluorouridine-3'-phosphate
  modified_base 10: mod_base = OTHER; note = 2'-deoxy-2'-fluoroadenosine-3'-phosphate
  modified_base 11: mod_base = OTHER; note = 2'-deoxy-2'-fluoroadenosine-3'-phosphate
  modified_base 12: mod_base = OTHER; note = 2'-O-methyluridine-3'-phosphate
  modified_base 13: mod_base = OTHER; note = 2'-O-methyluridine-3'-phosphate
  modified_base 14: mod_base = OTHER; note = 2'-O-methylcytidine-3'-phosphate
  modified_base 15: mod_base = OTHER; note = 2'-O-methylcytidine-3'-phosphate
  modified_base 16: mod_base = OTHER; note = 2'-O-methyluridine-3'-phosphate
  modified_base 17: mod_base = OTHER; note = 2'-O-methylguanosine-3'-phosphate
  modified_base 18: mod_base = OTHER; note = 2'-O-methyluridine-3'-phosphate
  modified_base 19: mod_base = OTHER; note = 2'-O-methyladenosine-3'-phosphate
  modified_base 20: mod_base = OTHER; note = 2'-O-methyluridine-3'-phosphate
  modified_base 21: mod_base = OTHER; note = 2'-O-methyladenosine
tcactctataattcctgtata

SEQ ID NO: 4240 - RNA, 21 nt, synthetic construct
  source 1..21: mol_type = other RNA
  modified_base 1: mod_base = OTHER; note = 2'-O-methyluridine-3'-phosphate
  modified_base 2: mod_base = OTHER; note = 2'-O-methyladenosine-3'-phosphate
  modified_base 3: mod_base = OTHER; note = 2'-O-methylguanosine-3'-phosphate
  modified_base 4: mod_base = OTHER; note = 2'-O-methyluridine-3'-phosphate
  modified_base 5: mod_base = OTHER; note = 2'-O-methyluridine-3'-phosphate
  modified_base 6: mod_base = OTHER; note = 2'-O-methylguanosine-3'-phosphate
  modified_base 7: mod_base = OTHER; note = 2'-deoxy-2'-fluorouridine-3'-phosphate
  modified_base 8: mod_base = OTHER; note = 2'-O-methylcytidine-3'-phosphate
  modified_base 9: mod_base = OTHER; note = 2'-deoxy-2'-fluoroguanosine-3'-phosphate
  modified_base 10: mod_base = OTHER; note = 2'-deoxy-2'-fluorouridine-3'-phosphate
  modified_base 11: mod_base = OTHER; note = 2'-deoxy-2'-fluorouridine-3'-phosphate
  modified_base 12: mod_base = OTHER; note = 2'-O-methyluridine-3'-phosphate
  modified_base 13: mod_base = OTHER; note = 2'-O-methyladenosine-3'-phosphate
  modified_base 14: mod_base = OTHER; note = 2'-O-methyladenosine-3'-phosphate
  modified_base 15: mod_base = OTHER; note = 2'-O-methylcytidine-3'-phosphate
  modified_base 16: mod_base = OTHER; note = 2'-O-methylcytidine-3'-phosphate
  modified_base 17: mod_base = OTHER; note = 2'-O-methyluridine-3'-phosphate
  modified_base 18: mod_base = OTHER; note = 2'-O-methylguanosine-3'-phosphate
  modified_base 19: mod_base = OTHER; note = 2'-O-methyluridine-3'-phosphate
  modified_base 20: mod_base = OTHER; note = 2'-O-methylcytidine-3'-phosphate
  modified_base 21: mod_base = OTHER; note = 2'-O-methyladenosine
tagttgtcgtttaacctgtca

SEQ ID NO: 4241 - RNA, 21 nt, synthetic construct
  source 1..21: mol_type = other RNA
  modified_base 1: mod_base = OTHER; note = 2'-O-methyladenosine-3'-phosphate
  modified_base 2: mod_base = OTHER; note = 2'-O-methylguanosine-3'-phosphate
  modified_base 3: mod_base = OTHER; note = 2'-O-methyluridine-3'-phosphate
  modified_base 4: mod_base = OTHER; note = 2'-O-methyluridine-3'-phosphate
  modified_base 5: mod_base = OTHER; note = 2'-O-methylguanosine-3'-phosphate
  modified_base 6: mod_base = OTHER; note = 2'-O-methyluridine-3'-phosphate
  modified_base 7: mod_base = OTHER; note = 2'-deoxy-2'-fluorocytidine-3'-phosphate
  modified_base 8: mod_base = OTHER; note = 2'-O-methylguanosine-3'-phosphate
  modified_base 9: mod_base = OTHER; note = 2'-deoxy-2'-fluorouridine-3'-phosphate
  modified_base 10: mod_base = OTHER; note = 2'-deoxy-2'-fluorouridine-3'-phosphate
  modified_base 11: mod_base = OTHER; note = 2'-deoxy-2'-fluorouridine-3'-phosphate
  modified_base 12: mod_base = OTHER; note = 2'-O-methyladenosine-3'-phosphate
  modified_base 13: mod_base = OTHER; note = 2'-O-methyladenosine-3'-phosphate
  modified_base 14: mod_base = OTHER; note = 2'-O-methylcytidine-3'-phosphate
  modified_base 15: mod_base = OTHER; note = 2'-O-methylcytidine-3'-phosphate
  modified_base 16: mod_base = OTHER; note = 2'-O-methyluridine-3'-phosphate
  modified_base 17: mod_base = OTHER; note = 2'-O-methylguanosine-3'-phosphate
  modified_base 18: mod_base = OTHER; note = 2'-O-methyluridine-3'-phosphate
  modified_base 19: mod_base = OTHER; note = 2'-O-methylcytidine-3'-phosphate
  modified_base 20: mod_base = OTHER; note = 2'-O-methylcytidine-3'-phosphate
  modified_base 21: mod_base = OTHER; note = 2'-O-methyladenosine
agttgtcgtttaacctgtcca

SEQ ID NO: 4242 - RNA, 21 nt, synthetic construct
  source 1..21: mol_type = other RNA
  modified_base 1: mod_base = OTHER; note = 2'-O-methylguanosine-3'-phosphate
  modified_base 2: mod_base = OTHER; note = 2'-O-methyluridine-3'-phosphate
  modified_base 3: mod_base = OTHER; note = 2'-O-methyluridine-3'-phosphate
  modified_base 4: mod_base = OTHER; note = 2'-O-methylguanosine-3'-phosphate
  modified_base 5: mod_base = OTHER; note = 2'-O-methyluridine-3'-phosphate
  modified_base 6: mod_base = OTHER; note = 2'-O-methylcytidine-3'-phosphate
  modified_base 7: mod_base = OTHER; note = 2'-deoxy-2'-fluoroguanosine-3'-phosphate
  modified_base 8: mod_base = OTHER; note = 2'-O-methyluridine-3'-phosphate
  modified_base 9: mod_base = OTHER; note = 2'-deoxy-2'-fluorouridine-3'-phosphate
  modified_base 10: mod_base = OTHER; note = 2'-deoxy-2'-fluorouridine-3'-phosphate
  modified_base 11: mod_base = OTHER; note = 2'-deoxy-2'-fluoroadenosine-3'-phosphate
  modified_base 12: mod_base = OTHER; note = 2'-O-methyladenosine-3'-phosphate
  modified_base 13: mod_base = OTHER; note = 2'-O-methylcytidine-3'-phosphate
  modified_base 14: mod_base = OTHER; note = 2'-O-methylcytidine-3'-phosphate
  modified_base 15: mod_base = OTHER; note = 2'-O-methyluridine-3'-phosphate
  modified_base 16: mod_base = OTHER; note = 2'-O-methylguanosine-3'-phosphate
  modified_base 17: mod_base = OTHER; note = 2'-O-methyluridine-3'-phosphate
  modified_base 18: mod_base = OTHER; note = 2'-O-methylcytidine-3'-phosphate
  modified_base 19: mod_base = OTHER; note = 2'-O-methylcytidine-3'-phosphate
  modified_base 20: mod_base = OTHER; note = 2'-O-methyladenosine-3'-phosphate
  modified_base 21: mod_base = OTHER; note = 2'-O-methyladenosine
gttgtcgtttaacctgtccaa

SEQ ID NO: 4243 - RNA, 21 nt, synthetic construct
  source 1..21: mol_type = other RNA
  modified_base 1: mod_base = OTHER; note = 2'-O-methyluridine-3'-phosphate
  modified_base 2: mod_base = OTHER; note = 2'-O-methyluridine-3'-phosphate
  modified_base 3: mod_base = OTHER; note = 2'-O-methylguanosine-3'-phosphate
  modified_base 4: mod_base = OTHER; note = 2'-O-methyluridine-3'-phosphate
  modified_base 5: mod_base = OTHER; note = 2'-O-methylcytidine-3'-phosphate
  modified_base 6: mod_base = OTHER; note = 2'-O-methylguanosine-3'-phosphate
  modified_base 7: mod_base = OTHER; note = 2'-deoxy-2'-fluorouridine-3'-phosphate
  modified_base 8: mod_base = OTHER; note = 2'-O-methyluridine-3'-phosphate
  modified_base 9: mod_base = OTHER; note = 2'-deoxy-2'-fluorouridine-3'-phosphate
  modified_base 10: mod_base = OTHER; note = 2'-deoxy-2'-fluoroadenosine-3'-phosphate
  modified_base 11: mod_base = OTHER; note = 2'-deoxy-2'-fluoroadenosine-3'-phosphate
  modified_base 12: mod_base = OTHER; note = 2'-O-methylcytidine-3'-phosphate
  modified_base 13: mod_base = OTHER; note = 2'-O-methylcytidine-3'-phosphate
  modified_base 14: mod_base = OTHER; note = 2'-O-methyluridine-3'-phosphate
  modified_base 15: mod_base = OTHER; note = 2'-O-methylguanosine-3'-phosphate
  modified_base 16: mod_base = OTHER; note = 2'-O-methyluridine-3'-phosphate
  modified_base 17: mod_base = OTHER; note = 2'-O-methylcytidine-3'-phosphate
  modified_base 18: mod_base = OTHER; note = 2'-O-methylcytidine-3'-phosphate
  modified_base 19: mod_base = OTHER; note = 2'-O-methyladenosine-3'-phosphate
  modified_base 20: mod_base = OTHER; note = 2'-O-methyladenosine-3'-phosphate
  modified_base 21: mod_base = OTHER; note = 2'-O-methyladenosine
ttgtcgtttaacctgtccaaa

SEQ ID NO: 4244 - RNA, 21 nt, synthetic construct
  source 1..21: mol_type = other RNA
  modified_base 1: mod_base = OTHER; note = 2'-O-methyluridine-3'-phosphate
  modified_base 2: mod_base = OTHER; note = 2'-O-methylguanosine-3'-phosphate
  modified_base 3: mod_base = OTHER; note = 2'-O-methyluridine-3'-phosphate
  modified_base 4: mod_base = OTHER; note = 2'-O-methylcytidine-3'-phosphate
  modified_base 5: mod_base = OTHER; note = 2'-O-methylguanosine-3'-phosphate
  modified_base 6: mod_base = OTHER; note = 2'-O-methyluridine-3'-phosphate
  modified_base 7: mod_base = OTHER; note = 2'-deoxy-2'-fluorouridine-3'-phosphate
  modified_base 8: mod_base = OTHER; note = 2'-O-methyluridine-3'-phosphate
  modified_base 9: mod_base = OTHER; note = 2'-deoxy-2'-fluoroadenosine-3'-phosphate
  modified_base 10: mod_base = OTHER; note = 2'-deoxy-2'-fluoroadenosine-3'-phosphate
  modified_base 11: mod_base = OTHER; note = 2'-deoxy-2'-fluorocytidine-3'-phosphate
  modified_base 12: mod_base = OTHER; note = 2'-O-methylcytidine-3'-phosphate
  modified_base 13: mod_base = OTHER; note = 2'-O-methyluridine-3'-phosphate
  modified_base 14: mod_base = OTHER; note = 2'-O-methylguanosine-3'-phosphate
  modified_base 15: mod_base = OTHER; note = 2'-O-methyluridine-3'-phosphate
  modified_base 16: mod_base = OTHER; note = 2'-O-methylcytidine-3'-phosphate
  modified_base 17: mod_base = OTHER; note = 2'-O-methylcytidine-3'-phosphate
  modified_base 18: mod_base = OTHER; note = 2'-O-methyladenosine-3'-phosphate
  modified_base 19: mod_base = OTHER; note = 2'-O-methyladenosine-3'-phosphate
  modified_base 20: mod_base = OTHER; note = 2'-O-methyladenosine-3'-phosphate
  modified_base 21: mod_base = OTHER; note = 2'-O-methyladenosine
tgtcgtttaacctgtccaaaa

SEQ ID NO: 4245 - RNA, 21 nt, synthetic construct
  source 1..21: mol_type = other RNA
  modified_base 1: mod_base = OTHER; note = 2'-O-methylguanosine-3'-phosphate
  modified_base 2: mod_base = OTHER; note = 2'-O-methyluridine-3'-phosphate
  modified_base 3: mod_base = OTHER; note = 2'-O-methylcytidine-3'-phosphate
  modified_base 4: mod_base = OTHER; note = 2'-O-methylguanosine-3'-phosphate
  modified_base 5: mod_base = OTHER; note = 2'-O-methyluridine-3'-phosphate
  modified_base 6: mod_base = OTHER; note = 2'-O-methyluridine-3'-phosphate
  modified_base 7: mod_base = OTHER; note = 2'-deoxy-2'-fluorouridine-3'-phosphate
  modified_base 8: mod_base = OTHER; note = 2'-O-methyladenosine-3'-phosphate
  modified_base 9: mod_base = OTHER; note = 2'-deoxy-2'-fluoroadenosine-3'-phosphate
  modified_base 10: mod_base = OTHER; note = 2'-deoxy-2'-fluorocytidine-3'-phosphate
  modified_base 11: mod_base = OTHER; note = 2'-deoxy-2'-fluorocytidine-3'-phosphate
  modified_base 12: mod_base = OTHER; note = 2'-O-methyluridine-3'-phosphate
  modified_base 13: mod_base = OTHER; note = 2'-O-methylguanosine-3'-phosphate
  modified_base 14: mod_base = OTHER; note = 2'-O-methyluridine-3'-phosphate
  modified_base 15: mod_base = OTHER; note = 2'-O-methylcytidine-3'-phosphate
  modified_base 16: mod_base = OTHER; note = 2'-O-methylcytidine-3'-phosphate
  modified_base 17: mod_base = OTHER; note = 2'-O-methyladenosine-3'-phosphate
  modified_base 18: mod_base = OTHER; note = 2'-O-methyladenosine-3'-phosphate
  modified_base 19: mod_base = OTHER; note = 2'-O-methyladenosine-3'-phosphate
  modified_base 20: mod_base = OTHER; note = 2'-O-methylcytidine-3'-phosphate
  modified_base 21: mod_base = OTHER; note = 2'-O-methyladenosine
gtcgtttaacctgtccaaaca

SEQ ID NO: 4246 - RNA, 21 nt, synthetic construct
  source 1..21: mol_type = other RNA
  modified_base 1: mod_base = OTHER; note = 2'-O-methyluridine-3'-phosphate
  modified_base 2: mod_base = OTHER; note = 2'-O-methylcytidine-3'-phosphate
  modified_base 3: mod_base = OTHER; note = 2'-O-methylguanosine-3'-phosphate
  modified_base 4: mod_base = OTHER; note = 2'-O-methyluridine-3'-phosphate
  modified_base 5: mod_base = OTHER; note = 2'-O-methyluridine-3'-phosphate
  modified_base 6: mod_base = OTHER; note = 2'-O-methyluridine-3'-phosphate
  modified_base 7: mod_base = OTHER; note = 2'-deoxy-2'-fluoroadenosine-3'-phosphate
  modified_base 8: mod_base = OTHER; note = 2'-O-methyladenosine-3'-phosphate
  modified_base 9: mod_base = OTHER; note = 2'-deoxy-2'-fluorocytidine-3'-phosphate
  modified_base 10: mod_base = OTHER; note = 2'-deoxy-2'-fluorocytidine-3'-phosphate
  modified_base 11: mod_base = OTHER; note = 2'-deoxy-2'-fluorouridine-3'-phosphate
  modified_base 12: mod_base = OTHER; note = 2'-O-methylguanosine-3'-phosphate
  modified_base 13: mod_base = OTHER; note = 2'-O-methyluridine-3'-phosphate
  modified_base 14: mod_base = OTHER; note = 2'-O-methylcytidine-3'-phosphate
  modified_base 15: mod_base = OTHER; note = 2'-O-methylcytidine-3'-phosphate
  modified_base 16: mod_base = OTHER; note = 2'-O-methyladenosine-3'-phosphate
  modified_base 17: mod_base = OTHER; note = 2'-O-methyladenosine-3'-phosphate
  modified_base 18: mod_base = OTHER; note = 2'-O-methyladenosine-3'-phosphate
  modified_base 19: mod_base = OTHER; note = 2'-O-methylcytidine-3'-phosphate
  modified_base 20: mod_base = OTHER; note = 2'-O-methyluridine-3'-phosphate
  modified_base 21: mod_base = OTHER; note = 2'-O-methyladenosine
tcgtttaacctgtccaaacta

SEQ ID NO: 4247 - RNA, 21 nt, synthetic construct
  source 1..21: mol_type = other RNA
  modified_base 1: mod_base = OTHER; note = 2'-O-methylcytidine-3'-phosphate
  modified_base 2: mod_base = OTHER; note = 2'-O-methylguanosine-3'-phosphate
  modified_base 3: mod_base = OTHER; note = 2'-O-methyluridine-3'-phosphate
  modified_base 4: mod_base = OTHER; note = 2'-O-methyluridine-3'-phosphate
  modified_base 5: mod_base = OTHER; note = 2'-O-methyluridine-3'-phosphate
  modified_base 6: mod_base = OTHER; note = 2'-O-methyladenosine-3'-phosphate
  modified_base 7: mod_base = OTHER; note = 2'-deoxy-2'-fluoroadenosine-3'-phosphate
  modified_base 8: mod_base = OTHER; note = 2'-O-methylcytidine-3'-phosphate
  modified_base 9: mod_base = OTHER; note = 2'-deoxy-2'-fluorocytidine-3'-phosphate
  modified_base 10: mod_base = OTHER; note = 2'-deoxy-2'-fluorouridine-3'-phosphate
  modified_base 11: mod_base = OTHER; note = 2'-deoxy-2'-fluoroguanosine-3'-phosphate
  modified_base 12: mod_base = OTHER; note = 2'-O-methyluridine-3'-phosphate
  modified_base 13: mod_base = OTHER; note = 2'-O-methylcytidine-3'-phosphate
  modified_base 14: mod_base = OTHER; note = 2'-O-methylcytidine-3'-phosphate
  modified_base 15: mod_base = OTHER; note = 2'-O-methyladenosine-3'-phosphate
  modified_base 16: mod_base = OTHER; note = 2'-O-methyladenosine-3'-phosphate
  modified_base 17: mod_base = OTHER; note = 2'-O-methyladenosine-3'-phosphate
  modified_base 18: mod_base = OTHER; note = 2'-O-methylcytidine-3'-phosphate
  modified_base 19: mod_base = OTHER; note = 2'-O-methyluridine-3'-phosphate
  modified_base 20: mod_base = OTHER; note = 2'-O-methyluridine-3'-phosphate
  modified_base 21: mod_base = OTHER; note = 2'-O-methyladenosine
cgtttaacctgtccaaactta

SEQ ID NO: 4248 - RNA, 21 nt, synthetic construct
  source 1..21: mol_type = other RNA
  modified_base 1: mod_base = OTHER; note = 2'-O-methylguanosine-3'-phosphate
  modified_base 2: mod_base = OTHER; note = 2'-O-methyluridine-3'-phosphate
  modified_base 3: mod_base = OTHER; note = 2'-O-methyluridine-3'-phosphate
  modified_base 4: mod_base = OTHER; note = 2'-O-methyluridine-3'-phosphate
  modified_base 5: mod_base = OTHER; note = 2'-O-methyladenosine-3'-phosphate
  modified_base 6: mod_base = OTHER; note = 2'-O-methyladenosine-3'-phosphate
  modified_base 7: mod_base = OTHER; note = 2'-deoxy-2'-fluorocytidine-3'-phosphate
  modified_base 8: mod_base = OTHER; note = 2'-O-methylcytidine-3'-phosphate
  modified_base 9: mod_base = OTHER; note = 2'-deoxy-2'-fluorouridine-3'-phosphate
  modified_base 10: mod_base = OTHER; note = 2'-deoxy-2'-fluoroguanosine-3'-phosphate
  modified_base 11: mod_base = OTHER; note = 2'-deoxy-2'-fluorouridine-3'-phosphate
  modified_base 12: mod_base = OTHER; note = 2'-O-methylcytidine-3'-phosphate
  modified_base 13: mod_base = OTHER; note = 2'-O-methylcytidine-3'-phosphate
  modified_base 14: mod_base = OTHER; note = 2'-O-methyladenosine-3'-phosphate
  modified_base 15: mod_base = OTHER; note = 2'-O-methyladenosine-3'-phosphate
  modified_base 16: mod_base = OTHER; note = 2'-O-methyladenosine-3'-phosphate
  modified_base 17: mod_base = OTHER; note = 2'-O-methylcytidine-3'-phosphate
  modified_base 18: mod_base = OTHER; note = 2'-O-methyluridine-3'-phosphate
  modified_base 19: mod_base = OTHER; note = 2'-O-methyluridine-3'-phosphate
  modified_base 20: mod_base = OTHER; note = 2'-O-methylcytidine-3'-phosphate
  modified_base 21: mod_base = OTHER; note = 2'-O-methyladenosine
gtttaacctgtccaaacttca

SEQ ID NO: 4249 - RNA, 21 nt, synthetic construct
  source 1..21: mol_type = other RNA
  modified_base 1: mod_base = OTHER; note = 2'-O-methyluridine-3'-phosphate
  modified_base 2: mod_base = OTHER; note = 2'-O-methyluridine-3'-phosphate
  modified_base 3: mod_base = OTHER; note = 2'-O-methyluridine-3'-phosphate
  modified_base 4: mod_base = OTHER; note = 2'-O-methyladenosine-3'-phosphate
  modified_base 5: mod_base = OTHER; note = 2'-O-methyladenosine-3'-phosphate
  modified_base 6: mod_base = OTHER; note = 2'-O-methylcytidine-3'-phosphate
  modified_base 7: mod_base = OTHER; note = 2'-deoxy-2'-fluorocytidine-3'-phosphate
  modified_base 8: mod_base = OTHER; note = 2'-O-methyluridine-3'-phosphate
  modified_base 9: mod_base = OTHER; note = 2'-deoxy-2'-fluoroguanosine-3'-phosphate
  modified_base 10: mod_base = OTHER; note = 2'-deoxy-2'-fluorouridine-3'-phosphate
  modified_base 11: mod_base = OTHER; note = 2'-deoxy-2'-fluorocytidine-3'-phosphate
  modified_base 12: mod_base = OTHER; note = 2'-O-methylcytidine-3'-phosphate
  modified_base 13: mod_base = OTHER; note = 2'-O-methyladenosine-3'-phosphate
  modified_base 14: mod_base = OTHER; note = 2'-O-methyladenosine-3'-phosphate
  modified_base 15: mod_base = OTHER; note = 2'-O-methyladenosine-3'-phosphate
  modified_base 16: mod_base = OTHER; note = 2'-O-methylcytidine-3'-phosphate
  modified_base 17: mod_base = OTHER; note = 2'-O-methyluridine-3'-phosphate
  modified_base 18: mod_base = OTHER; note = 2'-O-methyluridine-3'-phosphate
  modified_base 19: mod_base = OTHER; note = 2'-O-methylcytidine-3'-phosphate
  modified_base 20: mod_base = OTHER; note = 2'-O-methyluridine-3'-phosphate
  modified_base 21: mod_base = OTHER; note = 2'-O-methyladenosine
tttaacctgtccaaacttcta

SEQ ID NO: 4250 - RNA, 21 nt, synthetic construct
  source 1..21: mol_type = other RNA
  modified_base 1: mod_base = OTHER; note = 2'-O-methyluridine-3'-phosphate
  modified_base 2: mod_base = OTHER; note = 2'-O-methyluridine-3'-phosphate
  modified_base 3: mod_base = OTHER; note = 2'-O-methyladenosine-3'-phosphate
  modified_base 4: mod_base = OTHER; note = 2'-O-methyladenosine-3'-phosphate
  modified_base 5: mod_base = OTHER; note = 2'-O-methylcytidine-3'-phosphate
  modified_base 6: mod_base = OTHER; note = 2'-O-methylcytidine-3'-phosphate
  modified_base 7: mod_base = OTHER; note = 2'-deoxy-2'-fluorouridine-3'-phosphate
  modified_base 8: mod_base = OTHER; note = 2'-O-methylguanosine-3'-phosphate
  modified_base 9: mod_base = OTHER; note = 2'-deoxy-2'-fluorouridine-3'-phosphate
  modified_base 10: mod_base = OTHER; note = 2'-deoxy-2'-fluorocytidine-3'-phosphate
  modified_base 11: mod_base = OTHER; note = 2'-deoxy-2'-fluorocytidine-3'-phosphate
  modified_base 12: mod_base = OTHER; note = 2'-O-methyladenosine-3'-phosphate
  modified_base 13: mod_base = OTHER; note = 2'-O-methyladenosine-3'-phosphate
  modified_base 14: mod_base = OTHER; note = 2'-O-methyladenosine-3'-phosphate
  modified_base 15: mod_base = OTHER; note = 2'-O-methylcytidine-3'-phosphate
  modified_base 16: mod_base = OTHER; note = 2'-O-methyluridine-3'-phosphate
  modified_base 17: mod_base = OTHER; note = 2'-O-methyluridine-3'-phosphate
  modified_base 18: mod_base = OTHER; note = 2'-O-methylcytidine-3'-phosphate
  modified_base 19: mod_base = OTHER; note = 2'-O-methyluridine-3'-phosphate
  modified_base 20: mod_base = OTHER; note = 2'-O-methyladenosine-3'-phosphate
  modified_base 21: mod_base = OTHER; note = 2'-O-methyladenosine
ttaacctgtccaaacttctaa

SEQ ID NO: 4251 - RNA, 21 nt, synthetic construct
  source 1..21: mol_type = other RNA
  modified_base 1: mod_base = OTHER; note = 2'-O-methyluridine-3'-phosphate
  modified_base 2: mod_base = OTHER; note = 2'-O-methyladenosine-3'-phosphate
  modified_base 3: mod_base = OTHER; note = 2'-O-methyladenosine-3'-phosphate
  modified_base 4: mod_base = OTHER; note = 2'-O-methylcytidine-3'-phosphate
  modified_base 5: mod_base = OTHER; note = 2'-O-methylcytidine-3'-phosphate
  modified_base 6: mod_base = OTHER; note = 2'-O-methyluridine-3'-phosphate
  modified_base 7: mod_base = OTHER; note = 2'-deoxy-2'-fluoroguanosine-3'-phosphate
  modified_base 8: mod_base = OTHER; note = 2'-O-methyluridine-3'-phosphate
  modified_base 9: mod_base = OTHER; note = 2'-deoxy-2'-fluorocytidine-3'-phosphate
  modified_base 10: mod_base = OTHER; note = 2'-deoxy-2'-fluorocytidine-3'-phosphate
  modified_base 11: mod_base = OTHER; note = 2'-deoxy-2'-fluoroadenosine-3'-phosphate
  modified_base 12: mod_base = OTHER; note = 2'-O-methyladenosine-3'-phosphate
  modified_base 13: mod_base = OTHER; note = 2'-O-methyladenosine-3'-phosphate
  modified_base 14: mod_base = OTHER; note = 2'-O-methylcytidine-3'-phosphate
  modified_base 15: mod_base = OTHER; note = 2'-O-methyluridine-3'-phosphate
  modified_base 16: mod_base = OTHER; note = 2'-O-methyluridine-3'-phosphate
  modified_base 17: mod_base = OTHER; note = 2'-O-methylcytidine-3'-phosphate
  modified_base 18: mod_base = OTHER; note = 2'-O-methyluridine-3'-phosphate
  modified_base 19: mod_base = OTHER; note = 2'-O-methyladenosine-3'-phosphate
  modified_base 20: mod_base = OTHER; note = 2'-O-methylcytidine-3'-phosphate
  modified_base 21: mod_base = OTHER; note = 2'-O-methyladenosine
taacctgtccaaacttctaca

SEQ ID NO: 4252 - RNA, 21 nt, synthetic construct
  source 1..21: mol_type = other RNA
  modified_base 1: mod_base = OTHER; note = 2'-O-methyladenosine-3'-phosphate
  modified_base 2: mod_base = OTHER; note = 2'-O-methyladenosine-3'-phosphate
  modified_base 3: mod_base = OTHER; note = 2'-O-methylcytidine-3'-phosphate
  modified_base 4: mod_base = OTHER; note = 2'-O-methylcytidine-3'-phosphate
  modified_base 5: mod_base = OTHER; note = 2'-O-methyluridine-3'-phosphate
  modified_base 6: mod_base = OTHER; note = 2'-O-methylguanosine-3'-phosphate
  modified_base 7: mod_base = OTHER; note = 2'-deoxy-2'-fluorouridine-3'-phosphate
  modified_base 8: mod_base = OTHER; note = 2'-O-methylcytidine-3'-phosphate
  modified_base 9: mod_base = OTHER; note = 2'-deoxy-2'-fluorocytidine-3'-phosphate
  modified_base 10: mod_base = OTHER; note = 2'-deoxy-2'-fluoroadenosine-3'-phosphate
  modified_base 11: mod_base = OTHER; note = 2'-deoxy-2'-fluoroadenosine-3'-phosphate
  modified_base 12: mod_base = OTHER; note = 2'-O-methyladenosine-3'-phosphate
  modified_base 13: mod_base = OTHER; note = 2'-O-methylcytidine-3'-phosphate
  modified_base 14: mod_base = OTHER; note = 2'-O-methyluridine-3'-phosphate
  modified_base 15: mod_base = OTHER; note = 2'-O-methyluridine-3'-phosphate
  modified_base 16: mod_base = OTHER; note = 2'-O-methylcytidine-3'-phosphate
  modified_base 17: mod_base = OTHER; note = 2'-O-methyluridine-3'-phosphate
  modified_base 18: mod_base = OTHER; note = 2'-O-methyladenosine-3'-phosphate
  modified_base 19: mod_base = OTHER; note = 2'-O-methylcytidine-3'-phosphate
  modified_base 20: mod_base = OTHER; note = 2'-O-methyladenosine-3'-phosphate
  modified_base 21: mod_base = OTHER; note = 2'-O-methyladenosine
aacctgtccaaacttctacaa

SEQ ID NO: 4253 - RNA, 21 nt, synthetic construct
  source 1..21: mol_type = other RNA
  modified_base 1: mod_base = OTHER; note = 2'-O-methyladenosine-3'-phosphate
  modified_base 2: mod_base = OTHER; note = 2'-O-methylcytidine-3'-phosphate
  modified_base 3: mod_base = OTHER; note = 2'-O-methylcytidine-3'-phosphate
  modified_base 4: mod_base = OTHER; note = 2'-O-methyluridine-3'-phosphate
  modified_base 5: mod_base = OTHER; note = 2'-O-methylguanosine-3'-phosphate
  modified_base 6: mod_base = OTHER; note = 2'-O-methyluridine-3'-phosphate
  modified_base 7: mod_base = OTHER; note = 2'-deoxy-2'-fluorocytidine-3'-phosphate
  modified_base 8: mod_base = OTHER; note = 2'-O-methylcytidine-3'-phosphate
  modified_base 9: mod_base = OTHER; note = 2'-deoxy-2'-fluoroadenosine-3'-phosphate
  modified_base 10: mod_base = OTHER; note = 2'-deoxy-2'-fluoroadenosine-3'-phosphate
  modified_base 11: mod_base = OTHER; note = 2'-deoxy-2'-fluoroadenosine-3'-phosphate
  modified_base 12: mod_base = OTHER; note = 2'-O-methylcytidine-3'-phosphate
  modified_base 13: mod_base = OTHER; note = 2'-O-methyluridine-3'-phosphate
  modified_base 14: mod_base = OTHER; note = 2'-O-methyluridine-3'-phosphate
  modified_base 15: mod_base = OTHER; note = 2'-O-methylcytidine-3'-phosphate
  modified_base 16: mod_base = OTHER; note = 2'-O-methyluridine-3'-phosphate
  modified_base 17: mod_base = OTHER; note = 2'-O-methyladenosine-3'-phosphate
  modified_base 18: mod_base = OTHER; note = 2'-O-methylcytidine-3'-phosphate
  modified_base 19: mod_base = OTHER; note = 2'-O-methyladenosine-3'-phosphate
  modified_base 20: mod_base = OTHER; note = 2'-O-methylcytidine-3'-phosphate
  modified_base 21: mod_base = OTHER; note = 2'-O-methyladenosine
acctgtccaaacttctacaca

SEQ ID NO: 4254 - RNA, 21 nt, synthetic construct
  source 1..21: mol_type = other RNA
  modified_base 1: mod_base = OTHER; note = 2'-O-methylcytidine-3'-phosphate
  modified_base 2: mod_base = OTHER; note = 2'-O-methylcytidine-3'-phosphate
  modified_base 3: mod_base = OTHER; note = 2'-O-methyluridine-3'-phosphate
  modified_base 4: mod_base = OTHER; note = 2'-O-methylguanosine-3'-phosphate
  modified_base 5: mod_base = OTHER; note = 2'-O-methyluridine-3'-phosphate
  modified_base 6: mod_base = OTHER; note = 2'-O-methylcytidine-3'-phosphate
  modified_base 7: mod_base = OTHER; note = 2'-deoxy-2'-fluorocytidine-3'-phosphate
  modified_base 8: mod_base = OTHER; note = 2'-O-methyladenosine-3'-phosphate
  modified_base 9: mod_base = OTHER; note = 2'-deoxy-2'-fluoroadenosine-3'-phosphate
  modified_base 10: mod_base = OTHER; note = 2'-deoxy-2'-fluoroadenosine-3'-phosphate
  modified_base 11: mod_base = OTHER; note = 2'-deoxy-2'-fluorocytidine-3'-phosphate
  modified_base 12: mod_base = OTHER; note = 2'-O-methyluridine-3'-phosphate
  modified_base 13: mod_base = OTHER; note = 2'-O-methyluridine-3'-phosphate
  modified_base 14: mod_base = OTHER; note = 2'-O-methylcytidine-3'-phosphate
  modified_base 15: mod_base = OTHER; note = 2'-O-methyluridine-3'-phosphate
  modified_base 16: mod_base = OTHER; note = 2'-O-methyladenosine-3'-phosphate
  modified_base 17: mod_base = OTHER; note = 2'-O-methylcytidine-3'-phosphate
  modified_base 18: mod_base = OTHER; note = 2'-O-methyladenosine-3'-phosphate
  modified_base 19: mod_base = OTHER; note = 2'-O-methylcytidine-3'-phosphate
  modified_base 20: mod_base = OTHER; note = 2'-O-methyladenosine-3'-phosphate
  modified_base 21: mod_base = OTHER; note = 2'-O-methyladenosine
cctgtccaaacttctacacaa

SEQ ID NO: 4255 - RNA, 21 nt, synthetic construct
  source 1..21: mol_type = other RNA
  modified_base 1: mod_base = OTHER; note = 2'-O-methylcytidine-3'-phosphate
  modified_base 2: mod_base = OTHER; note = 2'-O-methyluridine-3'-phosphate
  modified_base 3: mod_base = OTHER; note = 2'-O-methylguanosine-3'-phosphate
  modified_base 4: mod_base = OTHER; note = 2'-O-methyluridine-3'-phosphate
  modified_base 5: mod_base = OTHER; note = 2'-O-methylcytidine-3'-phosphate
  modified_base 6: mod_base = OTHER; note = 2'-O-methylcytidine-3'-phosphate
  modified_base 7: mod_base = OTHER; note = 2'-deoxy-2'-fluoroadenosine-3'-phosphate
  modified_base 8: mod_base = OTHER; note = 2'-O-methyladenosine-3'-phosphate
  modified_base 9: mod_base = OTHER; note = 2'-deoxy-2'-fluoroadenosine-3'-phosphate
  modified_base 10: mod_base = OTHER; note = 2'-deoxy-2'-fluorocytidine-3'-phosphate
  modified_base 11: mod_base = OTHER; note = 2'-deoxy-2'-fluorouridine-3'-phosphate
  modified_base 12: mod_base = OTHER; note = 2'-O-methyluridine-3'-phosphate
  modified_base 13: mod_base = OTHER; note = 2'-O-methylcytidine-3'-phosphate
  modified_base 14: mod_base = OTHER; note = 2'-O-methyluridine-3'-phosphate
  modified_base 15: mod_base = OTHER; note = 2'-O-methyladenosine-3'-phosphate
  modified_base 16: mod_base = OTHER; note = 2'-O-methylcytidine-3'-phosphate
  modified_base 17: mod_base = OTHER; note = 2'-O-methyladenosine-3'-phosphate
  modified_base 18: mod_base = OTHER; note = 2'-O-methylcytidine-3'-phosphate
  modified_base 19: mod_base = OTHER; note = 2'-O-methyladenosine-3'-phosphate
  modified_base 20: mod_base = OTHER; note = 2'-O-methyladenosine-3'-phosphate
  modified_base 21: mod_base = OTHER; note = 2'-O-methyladenosine
ctgtccaaacttctacacaaa

SEQ ID NO: 4256 - RNA, 21 nt, synthetic construct
  source 1..21: mol_type = other RNA
  modified_base 1: mod_base = OTHER; note = 2'-O-methyluridine-3'-phosphate
  modified_base 2: mod_base = OTHER; note = 2'-O-methylguanosine-3'-phosphate
  modified_base 3: mod_base = OTHER; note = 2'-O-methyluridine-3'-phosphate
  modified_base 4: mod_base = OTHER; note = 2'-O-methylcytidine-3'-phosphate
  modified_base 5: mod_base = OTHER; note = 2'-O-methylcytidine-3'-phosphate
  modified_base 6: mod_base = OTHER; note = 2'-O-methyladenosine-3'-phosphate
  modified_base 7: mod_base = OTHER; note = 2'-deoxy-2'-fluoroadenosine-3'-phosphate
  modified_base 8: mod_base = OTHER; note = 2'-O-methyladenosine-3'-phosphate
  modified_base 9: mod_base = OTHER; note = 2'-deoxy-2'-fluorocytidine-3'-phosphate
  modified_base 10: mod_base = OTHER; note = 2'-deoxy-2'-fluorouridine-3'-phosphate
  modified_base 11: mod_base = OTHER; note = 2'-deoxy-2'-fluorouridine-3'-phosphate
  modified_base 12: mod_base = OTHER; note = 2'-O-methylcytidine-3'-phosphate
  modified_base 13: mod_base = OTHER; note = 2'-O-methyluridine-3'-phosphate
  modified_base 14: mod_base = OTHER; note = 2'-O-methyladenosine-3'-phosphate
  modified_base 15: mod_base = OTHER; note = 2'-O-methylcytidine-3'-phosphate
  modified_base 16: mod_base = OTHER; note = 2'-O-methyladenosine-3'-phosphate
  modified_base 17: mod_base = OTHER; note = 2'-O-methylcytidine-3'-phosphate
  modified_base 18: mod_base = OTHER; note = 2'-O-methyladenosine-3'-phosphate
  modified_base 19: mod_base = OTHER; note = 2'-O-methyladenosine-3'-phosphate
  modified_base 20: mod_base = OTHER; note = 2'-O-methyluridine-3'-phosphate
  modified_base 21: mod_base = OTHER; note = 2'-O-methyladenosine
tgtccaaacttctacacaata

SEQ ID NO: 4257 - RNA, 21 nt, synthetic construct
  source 1..21: mol_type = other RNA
  modified_base 1: mod_base = OTHER; note = 2'-O-methylguanosine-3'-phosphate
  modified_base 2: mod_base = OTHER; note = 2'-O-methyluridine-3'-phosphate
  modified_base 3: mod_base = OTHER; note = 2'-O-methylcytidine-3'-phosphate
  modified_base 4: mod_base = OTHER; note = 2'-O-methylcytidine-3'-phosphate
  modified_base 5: mod_base = OTHER; note = 2'-O-methyladenosine-3'-phosphate
  modified_base 6: mod_base = OTHER; note = 2'-O-methyladenosine-3'-phosphate
  modified_base 7: mod_base = OTHER; note = 2'-deoxy-2'-fluoroadenosine-3'-phosphate
  modified_base 8: mod_base = OTHER; note = 2'-O-methylcytidine-3'-phosphate
  modified_base 9: mod_base = OTHER; note = 2'-deoxy-2'-fluorouridine-3'-phosphate
  modified_base 10: mod_base = OTHER; note = 2'-deoxy-2'-fluorouridine-3'-phosphate
  modified_base 11: mod_base = OTHER; note = 2'-deoxy-2'-fluorocytidine-3'-phosphate
  modified_base 12: mod_base = OTHER; note = 2'-O-methyluridine-3'-phosphate
  modified_base 13: mod_base = OTHER; note = 2'-O-methyladenosine-3'-phosphate
  modified_base 14: mod_base = OTHER; note = 2'-O-methylcytidine-3'-phosphate
  modified_base 15: mod_base = OTHER; note = 2'-O-methyladenosine-3'-phosphate
  modified_base 16: mod_base = OTHER; note = 2'-O-methylcytidine-3'-phosphate
  modified_base 17: mod_base = OTHER; note = 2'-O-methyladenosine-3'-phosphate
  modified_base 18: mod_base = OTHER; note = 2'-O-methyladenosine-3'-phosphate
  modified_base 19: mod_base = OTHER; note = 2'-O-methyluridine-3'-phosphate
  modified_base 20: mod_base = OTHER; note = 2'-O-methylguanosine-3'-phosphate
  modified_base 21: mod_base = OTHER; note = 2'-O-methyladenosine
gtccaaacttctacacaatga

SEQ ID NO: 4258 - RNA, 21 nt, synthetic construct
  source 1..21: mol_type = other RNA
  modified_base 1: mod_base = OTHER; note = 2'-O-methyluridine-3'-phosphate
  modified_base 2: mod_base = OTHER; note = 2'-O-methylcytidine-3'-phosphate
  modified_base 3: mod_base = OTHER; note = 2'-O-methylcytidine-3'-phosphate
  modified_base 4: mod_base = OTHER; note = 2'-O-methyladenosine-3'-phosphate
  modified_base 5: mod_base = OTHER; note = 2'-O-methyladenosine-3'-phosphate
  modified_base 6: mod_base = OTHER; note = 2'-O-methyladenosine-3'-phosphate
  modified_base 7: mod_base = OTHER; note = 2'-deoxy-2'-fluorocytidine-3'-phosphate
  modified_base 8: mod_base = OTHER; note = 2'-O-methyluridine-3'-phosphate
  modified_base 9: mod_base = OTHER; note = 2'-deoxy-2'-fluorouridine-3'-phosphate
  modified_base 10: mod_base = OTHER; note = 2'-deoxy-2'-fluorocytidine-3'-phosphate
  modified_base 11: mod_base = OTHER; note = 2'-deoxy-2'-fluorouridine-3'-phosphate
  modified_base 12: mod_base = OTHER; note = 2'-O-methyladenosine-3'-phosphate
  modified_base 13: mod_base = OTHER; note = 2'-O-methylcytidine-3'-phosphate
  modified_base 14: mod_base = OTHER; note = 2'-O-methyladenosine-3'-phosphate
  modified_base 15: mod_base = OTHER; note = 2'-O-methylcytidine-3'-phosphate
  modified_base 16: mod_base = OTHER; note = 2'-O-methyladenosine-3'-phosphate
  modified_base 17: mod_base = OTHER; note = 2'-O-methyladenosine-3'-phosphate
  modified_base 18: mod_base = OTHER; note = 2'-O-methyluridine-3'-phosphate
  modified_base 19: mod_base = OTHER; note = 2'-O-methylguanosine-3'-phosphate
  modified_base 20: mod_base = OTHER; note = 2'-O-methyladenosine-3'-phosphate
  modified_base 21: mod_base = OTHER; note = 2'-O-methyladenosine
tccaaacttctacacaatgaa

SEQ ID NO: 4259 - RNA, 21 nt, synthetic construct
  source 1..21: mol_type = other RNA
  modified_base 1: mod_base = OTHER; note = 2'-O-methylcytidine-3'-phosphate
  modified_base 2: mod_base = OTHER; note = 2'-O-methylcytidine-3'-phosphate
  modified_base 3: mod_base = OTHER; note = 2'-O-methyladenosine-3'-phosphate
  modified_base 4: mod_base = OTHER; note = 2'-O-methyladenosine-3'-phosphate
  modified_base 5: mod_base = OTHER; note = 2'-O-methyladenosine-3'-phosphate
  modified_base 6: mod_base = OTHER; note = 2'-O-methylcytidine-3'-phosphate
  modified_base 7: mod_base = OTHER; note = 2'-deoxy-2'-fluorouridine-3'-phosphate
  modified_base 8: mod_base = OTHER; note = 2'-O-methyluridine-3'-phosphate
  modified_base 9: mod_base = OTHER; note = 2'-deoxy-2'-fluorocytidine-3'-phosphate
  modified_base 10: mod_base = OTHER; note = 2'-deoxy-2'-fluorouridine-3'-phosphate
  modified_base 11: mod_base = OTHER; note = 2'-deoxy-2'-fluoroadenosine-3'-phosphate
  modified_base 12: mod_base = OTHER; note = 2'-O-methylcytidine-3'-phosphate
  modified_base 13: mod_base = OTHER; note = 2'-O-methyladenosine-3'-phosphate
  modified_base 14: mod_base = OTHER; note = 2'-O-methylcytidine-3'-phosphate
  modified_base 15: mod_base = OTHER; note = 2'-O-methyladenosine-3'-phosphate
  modified_base 16: mod_base = OTHER; note = 2'-O-methyladenosine-3'-phosphate
  modified_base 17: mod_base = OTHER; note = 2'-O-methyluridine-3'-phosphate
  modified_base 18: mod_base = OTHER; note = 2'-O-methylguanosine-3'-phosphate
  modified_base 19: mod_base = OTHER; note = 2'-O-methyladenosine-3'-phosphate
  modified_base 20: mod_base = OTHER; note = 2'-O-methyladenosine-3'-phosphate
  modified_base 21: mod_base = OTHER; note = 2'-O-methyladenosine
ccaaacttctacacaatgaaa

SEQ ID NO: 4260 - RNA, 21 nt, synthetic construct
  source 1..21: mol_type = other RNA
  modified_base 1: mod_base = OTHER; note = 2'-O-methylcytidine-3'-phosphate
  modified_base 2: mod_base = OTHER; note = 2'-O-methyladenosine-3'-phosphate
  modified_base 3: mod_base = OTHER; note = 2'-O-methyladenosine-3'-phosphate
  modified_base 4: mod_base = OTHER; note = 2'-O-methyladenosine-3'-phosphate
  modified_base 5: mod_base = OTHER; note = 2'-O-methylcytidine-3'-phosphate
  modified_base 6: mod_base = OTHER; note = 2'-O-methyluridine-3'-phosphate
  modified_base 7: mod_base = OTHER; note = 2'-deoxy-2'-fluorouridine-3'-phosphate
  modified_base 8: mod_base = OTHER; note = 2'-O-methylcytidine-3'-phosphate
  modified_base 9: mod_base = OTHER; note = 2'-deoxy-2'-fluorouridine-3'-phosphate
  modified_base 10: mod_base = OTHER; note = 2'-deoxy-2'-fluoroadenosine-3'-phosphate
  modified_base 11: mod_base = OTHER; note = 2'-deoxy-2'-fluorocytidine-3'-phosphate
  modified_base 12: mod_base = OTHER; note = 2'-O-methyladenosine-3'-phosphate
  modified_base 13: mod_base = OTHER; note = 2'-O-methylcytidine-3'-phosphate
  modified_base 14: mod_base = OTHER; note = 2'-O-methyladenosine-3'-phosphate
  modified_base 15: mod_base = OTHER; note = 2'-O-methyladenosine-3'-phosphate
  modified_base 16: mod_base = OTHER; note = 2'-O-methyluridine-3'-phosphate
  modified_base 17: mod_base = OTHER; note = 2'-O-methylguanosine-3'-phosphate
  modified_base 18: mod_base = OTHER; note = 2'-O-methyladenosine-3'-phosphate
  modified_base 19: mod_base = OTHER; note = 2'-O-methyladenosine-3'-phosphate
  modified_base 20: mod_base = OTHER; note = 2'-O-methylcytidine-3'-phosphate
  modified_base 21: mod_base = OTHER; note = 2'-O-methyladenosine
caaacttctacacaatgaaca

SEQ ID NO: 4261 - RNA, 21 nt, synthetic construct
  source 1..21: mol_type = other RNA
  modified_base 1: mod_base = OTHER; note = 2'-O-methyladenosine-3'-phosphate
  modified_base 2: mod_base = OTHER; note = 2'-O-methyladenosine-3'-phosphate
  modified_base 3: mod_base = OTHER; note = 2'-O-methyladenosine-3'-phosphate
  modified_base 4: mod_base = OTHER; note = 2'-O-methylcytidine-3'-phosphate
  modified_base 5: mod_base = OTHER; note = 2'-O-methyluridine-3'-phosphate
  modified_base 6: mod_base = OTHER; note = 2'-O-methyluridine-3'-phosphate
  modified_base 7: mod_base = OTHER; note = 2'-deoxy-2'-fluorocytidine-3'-phosphate
  modified_base 8: mod_base = OTHER; note = 2'-O-methyluridine-3'-phosphate
  modified_base 9: mod_base = OTHER; note = 2'-deoxy-2'-fluoroadenosine-3'-phosphate
  modified_base 10: mod_base = OTHER; note = 2'-deoxy-2'-fluorocytidine-3'-phosphate
  modified_base 11: mod_base = OTHER; note = 2'-deoxy-2'-fluoroadenosine-3'-phosphate
  modified_base 12: mod_base = OTHER; note = 2'-O-methylcytidine-3'-phosphate
  modified_base 13: mod_base = OTHER; note = 2'-O-methyladenosine-3'-phosphate
  modified_base 14: mod_base = OTHER; note = 2'-O-methyladenosine-3'-phosphate
  modified_base 15: mod_base = OTHER; note = 2'-O-methyluridine-3'-phosphate
  modified_base 16: mod_base = OTHER; note = 2'-O-methylguanosine-3'-phosphate
  modified_base 17: mod_base = OTHER; note = 2'-O-methyladenosine-3'-phosphate
  modified_base 18: mod_base = OTHER; note = 2'-O-methyladenosine-3'-phosphate
  modified_base 19: mod_base = OTHER; note = 2'-O-methylcytidine-3'-phosphate
  modified_base 20: mod_base = OTHER; note = 2'-O-methyluridine-3'-phosphate
  modified_base 21: mod_base = OTHER; note = 2'-O-methyladenosine
aaacttctacacaatgaacta

SEQ ID NO: 4262 - RNA, 21 nt, synthetic construct
  source 1..21: mol_type = other RNA
  modified_base 1: mod_base = OTHER; note = 2'-O-methyladenosine-3'-phosphate
  modified_base 2: mod_base = OTHER; note = 2'-O-methyladenosine-3'-phosphate
  modified_base 3: mod_base = OTHER; note = 2'-O-methylcytidine-3'-phosphate
  modified_base 4: mod_base = OTHER; note = 2'-O-methyluridine-3'-phosphate
  modified_base 5: mod_base = OTHER; note = 2'-O-methyluridine-3'-phosphate
  modified_base 6: mod_base = OTHER; note = 2'-O-methylcytidine-3'-phosphate
  modified_base 7: mod_base = OTHER; note = 2'-deoxy-2'-fluorouridine-3'-phosphate
  modified_base 8: mod_base = OTHER; note = 2'-O-methyladenosine-3'-phosphate
  modified_base 9: mod_base = OTHER; note = 2'-deoxy-2'-fluorocytidine-3'-phosphate
  modified_base 10: mod_base = OTHER; note = 2'-deoxy-2'-fluoroadenosine-3'-phosphate
  modified_base 11: mod_base = OTHER; note = 2'-deoxy-2'-fluorocytidine-3'-phosphate
  modified_base 12: mod_base = OTHER; note = 2'-O-methyladenosine-3'-phosphate
  modified_base 13: mod_base = OTHER; note = 2'-O-methyladenosine-3'-phosphate
  modified_base 14: mod_base = OTHER; note = 2'-O-methyluridine-3'-phosphate
  modified_base 15: mod_base = OTHER; note = 2'-O-methylguanosine-3'-phosphate
  modified_base 16: mod_base = OTHER; note = 2'-O-methyladenosine-3'-phosphate
  modified_base 17: mod_base = OTHER; note = 2'-O-methyladenosine-3'-phosphate
  modified_base 18: mod_base = OTHER; note = 2'-O-methylcytidine-3'-phosphate
  modified_base 19: mod_base = OTHER; note = 2'-O-methyluridine-3'-phosphate
  modified_base 20: mod_base = OTHER; note = 2'-O-methyluridine-3'-phosphate
  modified_base 21: mod_base = OTHER; note = 2'-O-methyladenosine
aacttctacacaatgaactta

SEQ ID NO: 4263 - RNA, 21 nt, synthetic construct
  source 1..21: mol_type = other RNA
  modified_base 1: mod_base = OTHER; note = 2'-O-methyladenosine-3'-phosphate
  modified_base 2: mod_base = OTHER; note = 2'-O-methylcytidine-3'-phosphate
  modified_base 3: mod_base = OTHER; note = 2'-O-methyluridine-3'-phosphate
  modified_base 4: mod_base = OTHER; note = 2'-O-methyluridine-3'-phosphate
  modified_base 5: mod_base = OTHER; note = 2'-O-methylcytidine-3'-phosphate
  modified_base 6: mod_base = OTHER; note = 2'-O-methyluridine-3'-phosphate
  modified_base 7: mod_base = OTHER; note = 2'-deoxy-2'-fluoroadenosine-3'-phosphate
  modified_base 8: mod_base = OTHER; note = 2'-O-methylcytidine-3'-phosphate
  modified_base 9: mod_base = OTHER; note = 2'-deoxy-2'-fluoroadenosine-3'-phosphate
  modified_base 10: mod_base = OTHER; note = 2'-deoxy-2'-fluorocytidine-3'-phosphate
  modified_base 11: mod_base = OTHER; note = 2'-deoxy-2'-fluoroadenosine-3'-phosphate
  modified_base 12: mod_base = OTHER; note = 2'-O-methyladenosine-3'-phosphate
  modified_base 13: mod_base = OTHER; note = 2'-O-methyluridine-3'-phosphate
  modified_base 14: mod_base = OTHER; note = 2'-O-methylguanosine-3'-phosphate
  modified_base 15: mod_base = OTHER; note = 2'-O-methyladenosine-3'-phosphate
  modified_base 16: mod_base = OTHER; note = 2'-O-methyladenosine-3'-phosphate
  modified_base 17: mod_base = OTHER; note = 2'-O-methylcytidine-3'-phosphate
  modified_base 18: mod_base = OTHER; note = 2'-O-methyluridine-3'-phosphate
  modified_base 19: mod_base = OTHER; note = 2'-O-methyluridine-3'-phosphate
  modified_base 20: mod_base = OTHER; note = 2'-O-methylcytidine-3'-phosphate
  modified_base 21: mod_base = OTHER; note = 2'-O-methyladenosine
acttctacacaatgaacttca

SEQ ID NO: 4264 - RNA, 21 nt, synthetic construct
  source 1..21: mol_type = other RNA
  modified_base 1: mod_base = OTHER; note = 2'-O-methylcytidine-3'-phosphate
  modified_base 2: mod_base = OTHER; note = 2'-O-methyluridine-3'-phosphate
  modified_base 3: mod_base = OTHER; note = 2'-O-methyluridine-3'-phosphate
  modified_base 4: mod_base = OTHER; note = 2'-O-methylcytidine-3'-phosphate
  modified_base 5: mod_base = OTHER; note = 2'-O-methyluridine-3'-phosphate
  modified_base 6: mod_base = OTHER; note = 2'-O-methyladenosine-3'-phosphate
  modified_base 7: mod_base = OTHER; note = 2'-deoxy-2'-fluorocytidine-3'-phosphate
  modified_base 8: mod_base = OTHER; note = 2'-O-methyladenosine-3'-phosphate
  modified_base 9: mod_base = OTHER; note = 2'-deoxy-2'-fluorocytidine-3'-phosphate
  modified_base 10: mod_base = OTHER; note = 2'-deoxy-2'-fluoroadenosine-3'-phosphate
  modified_base 11: mod_base = OTHER; note = 2'-deoxy-2'-fluoroadenosine-3'-phosphate
  modified_base 12: mod_base = OTHER; note = 2'-O-methyluridine-3'-phosphate
  modified_base 13: mod_base = OTHER; note = 2'-O-methylguanosine-3'-phosphate
  modified_base 14: mod_base = OTHER; note = 2'-O-methyladenosine-3'-phosphate
  modified_base 15: mod_base = OTHER; note = 2'-O-methyladenosine-3'-phosphate
  modified_base 16: mod_base = OTHER; note = 2'-O-methylcytidine-3'-phosphate
  modified_base 17: mod_base = OTHER; note = 2'-O-methyluridine-3'-phosphate
  modified_base 18: mod_base = OTHER; note = 2'-O-methyluridine-3'-phosphate
  modified_base 19: mod_base = OTHER; note = 2'-O-methylcytidine-3'-phosphate
  modified_base 20: mod_base = OTHER; note = 2'-O-methyluridine-3'-phosphate
  modified_base 21: mod_base = OTHER; note = 2'-O-methyladenosine
cttctacacaatgaacttcta

SEQ ID NO: 4265 - RNA, 21 nt, synthetic construct
  source 1..21: mol_type = other RNA
  modified_base 1: mod_base = OTHER; note = 2'-O-methyluridine-3'-phosphate
  modified_base 2: mod_base = OTHER; note = 2'-O-methyluridine-3'-phosphate
  modified_base 3: mod_base = OTHER; note = 2'-O-methylcytidine-3'-phosphate
  modified_base 4: mod_base = OTHER; note = 2'-O-methyluridine-3'-phosphate
  modified_base 5: mod_base = OTHER; note = 2'-O-methyladenosine-3'-phosphate
  modified_base 6: mod_base = OTHER; note = 2'-O-methylcytidine-3'-phosphate
  modified_base 7: mod_base = OTHER; note = 2'-deoxy-2'-fluoroadenosine-3'-phosphate
  modified_base 8: mod_base = OTHER; note = 2'-O-methylcytidine-3'-phosphate
  modified_base 9: mod_base = OTHER; note = 2'-deoxy-2'-fluoroadenosine-3'-phosphate
  modified_base 10: mod_base = OTHER; note = 2'-deoxy-2'-fluoroadenosine-3'-phosphate
  modified_base 11: mod_base = OTHER; note = 2'-deoxy-2'-fluorouridine-3'-phosphate
  modified_base 12: mod_base = OTHER; note = 2'-O-methylguanosine-3'-phosphate
  modified_base 13: mod_base = OTHER; note = 2'-O-methyladenosine-3'-phosphate
  modified_base 14: mod_base = OTHER; note = 2'-O-methyladenosine-3'-phosphate
  modified_base 15: mod_base = OTHER; note = 2'-O-methylcytidine-3'-phosphate
  modified_base 16: mod_base = OTHER; note = 2'-O-methyluridine-3'-phosphate
  modified_base 17: mod_base = OTHER; note = 2'-O-methyluridine-3'-phosphate
  modified_base 18: mod_base = OTHER; note = 2'-O-methylcytidine-3'-phosphate
  modified_base 19: mod_base = OTHER; note = 2'-O-methyluridine-3'-phosphate
  modified_base 20: mod_base = OTHER; note = 2'-O-methyluridine-3'-phosphate
  modified_base 21: mod_base = OTHER; note = 2'-O-methyladenosine
ttctacacaatgaacttctta

SEQ ID NO: 4266 - RNA, 21 nt, synthetic construct
  source 1..21: mol_type = other RNA
  modified_base 1: mod_base = OTHER; note = 2'-O-methyluridine-3'-phosphate
  modified_base 2: mod_base = OTHER; note = 2'-O-methylcytidine-3'-phosphate
  modified_base 3: mod_base = OTHER; note = 2'-O-methyluridine-3'-phosphate
  modified_base 4: mod_base = OTHER; note = 2'-O-methyladenosine-3'-phosphate
  modified_base 5: mod_base = OTHER; note = 2'-O-methylcytidine-3'-phosphate
  modified_base 6: mod_base = OTHER; note = 2'-O-methyladenosine-3'-phosphate
  modified_base 7: mod_base = OTHER; note = 2'-deoxy-2'-fluorocytidine-3'-phosphate
  modified_base 8: mod_base = OTHER; note = 2'-O-methyladenosine-3'-phosphate
  modified_base 9: mod_base = OTHER; note = 2'-deoxy-2'-fluoroadenosine-3'-phosphate
  modified_base 10: mod_base = OTHER; note = 2'-deoxy-2'-fluorouridine-3'-phosphate
  modified_base 11: mod_base = OTHER; note = 2'-deoxy-2'-fluoroguanosine-3'-phosphate
  modified_base 12: mod_base = OTHER; note = 2'-O-methyladenosine-3'-phosphate
  modified_base 13: mod_base = OTHER; note = 2'-O-methyladenosine-3'-phosphate
  modified_base 14: mod_base = OTHER; note = 2'-O-methylcytidine-3'-phosphate
  modified_base 15: mod_base = OTHER; note = 2'-O-methyluridine-3'-phosphate
  modified_base 16: mod_base = OTHER; note = 2'-O-methyluridine-3'-phosphate
  modified_base 17: mod_base = OTHER; note = 2'-O-methylcytidine-3'-phosphate
  modified_base 18: mod_base = OTHER; note = 2'-O-methyluridine-3'-phosphate
  modified_base 19: mod_base = OTHER; note = 2'-O-methyluridine-3'-phosphate
  modified_base 20: mod_base = OTHER; note = 2'-O-methyladenosine-3'-phosphate
  modified_base 21: mod_base = OTHER; note = 2'-O-methyladenosine
tctacacaatgaacttcttaa

SEQ ID NO: 4267 - RNA, 21 nt, synthetic construct
  source 1..21: mol_type = other RNA
  modified_base 1: mod_base = OTHER; note = 2'-O-methylcytidine-3'-phosphate
  modified_base 2: mod_base = OTHER; note = 2'-O-methyluridine-3'-phosphate
  modified_base 3: mod_base = OTHER; note = 2'-O-methyladenosine-3'-phosphate
  modified_base 4: mod_base = OTHER; note = 2'-O-methylcytidine-3'-phosphate
  modified_base 5: mod_base = OTHER; note = 2'-O-methyladenosine-3'-phosphate
  modified_base 6: mod_base = OTHER; note = 2'-O-methylcytidine-3'-phosphate
  modified_base 7: mod_base = OTHER; note = 2'-deoxy-2'-fluoroadenosine-3'-phosphate
  modified_base 8: mod_base = OTHER; note = 2'-O-methyladenosine-3'-phosphate
  modified_base 9: mod_base = OTHER; note = 2'-deoxy-2'-fluorouridine-3'-phosphate
  modified_base 10: mod_base = OTHER; note = 2'-deoxy-2'-fluoroguanosine-3'-phosphate
  modified_base 11: mod_base = OTHER; note = 2'-deoxy-2'-fluoroadenosine-3'-phosphate
  modified_base 12: mod_base = OTHER; note = 2'-O-methyladenosine-3'-phosphate
  modified_base 13: mod_base = OTHER; note = 2'-O-methylcytidine-3'-phosphate
  modified_base 14: mod_base = OTHER; note = 2'-O-methyluridine-3'-phosphate
  modified_base 15: mod_base = OTHER; note = 2'-O-methyluridine-3'-phosphate
  modified_base 16: mod_base = OTHER; note = 2'-O-methylcytidine-3'-phosphate
  modified_base 17: mod_base = OTHER; note = 2'-O-methyluridine-3'-phosphate
  modified_base 18: mod_base = OTHER; note = 2'-O-methyluridine-3'-phosphate
  modified_base 19: mod_base = OTHER; note = 2'-O-methyladenosine-3'-phosphate
  modified_base 20: mod_base = OTHER; note = 2'-O-methyladenosine-3'-phosphate
  modified_base 21: mod_base = OTHER; note = 2'-O-methyladenosine
ctacacaatgaacttcttaaa

SEQ ID NO: 4268 - RNA, 21 nt, synthetic construct
  source 1..21: mol_type = other RNA
  modified_base 1: mod_base = OTHER; note = 2'-O-methyluridine-3'-phosphate
  modified_base 2: mod_base = OTHER; note = 2'-O-methyladenosine-3'-phosphate
  modified_base 3: mod_base = OTHER; note = 2'-O-methylcytidine-3'-phosphate
  modified_base 4: mod_base = OTHER; note = 2'-O-methyladenosine-3'-phosphate
  modified_base 5: mod_base = OTHER; note = 2'-O-methylcytidine-3'-phosphate
  modified_base 6: mod_base = OTHER; note = 2'-O-methyladenosine-3'-phosphate
  modified_base 7: mod_base = OTHER; note = 2'-deoxy-2'-fluoroadenosine-3'-phosphate
  modified_base 8: mod_base = OTHER; note = 2'-O-methyluridine-3'-phosphate
  modified_base 9: mod_base = OTHER; note = 2'-deoxy-2'-fluoroguanosine-3'-phosphate
  modified_base 10: mod_base = OTHER; note = 2'-deoxy-2'-fluoroadenosine-3'-phosphate
  modified_base 11: mod_base = OTHER; note = 2'-deoxy-2'-fluoroadenosine-3'-phosphate
  modified_base 12: mod_base = OTHER; note = 2'-O-methylcytidine-3'-phosphate
  modified_base 13: mod_base = OTHER; note = 2'-O-methyluridine-3'-phosphate
  modified_base 14: mod_base = OTHER; note = 2'-O-methyluridine-3'-phosphate
  modified_base 15: mod_base = OTHER; note = 2'-O-methylcytidine-3'-phosphate
  modified_base 16: mod_base = OTHER; note = 2'-O-methyluridine-3'-phosphate
  modified_base 17: mod_base = OTHER; note = 2'-O-methyluridine-3'-phosphate
  modified_base 18: mod_base = OTHER; note = 2'-O-methyladenosine-3'-phosphate
  modified_base 19: mod_base = OTHER; note = 2'-O-methyladenosine-3'-phosphate
  modified_base 20: mod_base = OTHER; note = 2'-O-methylcytidine-3'-phosphate
  modified_base 21: mod_base = OTHER; note = 2'-O-methyladenosine
tacacaatgaacttcttaaca

SEQ ID NO: 4269 - RNA, 21 nt, synthetic construct
  source 1..21: mol_type = other RNA
  modified_base 1: mod_base = OTHER; note = 2'-O-methyladenosine-3'-phosphate
  modified_base 2: mod_base = OTHER; note = 2'-O-methylcytidine-3'-phosphate
  modified_base 3: mod_base = OTHER; note = 2'-O-methyladenosine-3'-phosphate
  modified_base 4: mod_base = OTHER; note = 2'-O-methylcytidine-3'-phosphate
  modified_base 5: mod_base = OTHER; note = 2'-O-methyladenosine-3'-phosphate
  modified_base 6: mod_base = OTHER; note = 2'-O-methyladenosine-3'-phosphate
  modified_base 7: mod_base = OTHER; note = 2'-deoxy-2'-fluorouridine-3'-phosphate
  modified_base 8: mod_base = OTHER; note = 2'-O-methylguanosine-3'-phosphate
  modified_base 9: mod_base = OTHER; note = 2'-deoxy-2'-fluoroadenosine-3'-phosphate
  modified_base 10: mod_base = OTHER; note = 2'-deoxy-2'-fluoroadenosine-3'-phosphate
  modified_base 11: mod_base = OTHER; note = 2'-deoxy-2'-fluorocytidine-3'-phosphate
  modified_base 12: mod_base = OTHER; note = 2'-O-methyluridine-3'-phosphate
  modified_base 13: mod_base = OTHER; note = 2'-O-methyluridine-3'-phosphate
  modified_base 14: mod_base = OTHER; note = 2'-O-methylcytidine-3'-phosphate
  modified_base 15: mod_base = OTHER; note = 2'-O-methyluridine-3'-phosphate
  modified_base 16: mod_base = OTHER; note = 2'-O-methyluridine-3'-phosphate
  modified_base 17: mod_base = OTHER; note = 2'-O-methyladenosine-3'-phosphate
  modified_base 18: mod_base = OTHER; note = 2'-O-methyladenosine-3'-phosphate
  modified_base 19: mod_base = OTHER; note = 2'-O-methylcytidine-3'-phosphate
  modified_base 20: mod_base = OTHER; note = 2'-O-methyladenosine-3'-phosphate
  modified_base 21: mod_base = OTHER; note = 2'-O-methyladenosine
acacaatgaacttcttaacaa

SEQ ID NO: 4270 - RNA, 21 nt, synthetic construct
  source 1..21: mol_type = other RNA
  modified_base 1: mod_base = OTHER; note = 2'-O-methylcytidine-3'-phosphate
  modified_base 2: mod_base = OTHER; note = 2'-O-methyladenosine-3'-phosphate
  modified_base 3: mod_base = OTHER; note = 2'-O-methylcytidine-3'-phosphate
  modified_base 4: mod_base = OTHER; note = 2'-O-methyladenosine-3'-phosphate
  modified_base 5: mod_base = OTHER; note = 2'-O-methyladenosine-3'-phosphate
  modified_base 6: mod_base = OTHER; note = 2'-O-methyluridine-3'-phosphate
  modified_base 7: mod_base = OTHER; note = 2'-deoxy-2'-fluoroguanosine-3'-phosphate
  modified_base 8: mod_base = OTHER; note = 2'-O-methyladenosine-3'-phosphate
  modified_base 9: mod_base = OTHER; note = 2'-deoxy-2'-fluoroadenosine-3'-phosphate
  modified_base 10: mod_base = OTHER; note = 2'-deoxy-2'-fluorocytidine-3'-phosphate
  modified_base 11: mod_base = OTHER; note = 2'-deoxy-2'-fluorouridine-3'-phosphate
  modified_base 12: mod_base = OTHER; note = 2'-O-methyluridine-3'-phosphate
  modified_base 13: mod_base = OTHER; note = 2'-O-methylcytidine-3'-phosphate
  modified_base 14: mod_base = OTHER; note = 2'-O-methyluridine-3'-phosphate
  modified_base 15: mod_base = OTHER; note = 2'-O-methyluridine-3'-phosphate
  modified_base 16: mod_base = OTHER; note = 2'-O-methyladenosine-3'-phosphate
  modified_base 17: mod_base = OTHER; note = 2'-O-methyladenosine-3'-phosphate
  modified_base 18: mod_base = OTHER; note = 2'-O-methylcytidine-3'-phosphate
  modified_base 19: mod_base = OTHER; note = 2'-O-methyladenosine-3'-phosphate
  modified_base 20: mod_base = OTHER; note = 2'-O-methyladenosine-3'-phosphate
  modified_base 21: mod_base = OTHER; note = 2'-O-methyladenosine
cacaatgaacttcttaacaaa

SEQ ID NO: 4271 - RNA, 21 nt, synthetic construct
  source 1..21: mol_type = other RNA
  modified_base 1: mod_base = OTHER; note = 2'-O-methyladenosine-3'-phosphate
  modified_base 2: mod_base = OTHER; note = 2'-O-methylcytidine-3'-phosphate
  modified_base 3: mod_base = OTHER; note = 2'-O-methyladenosine-3'-phosphate
  modified_base 4: mod_base = OTHER; note = 2'-O-methyladenosine-3'-phosphate
  modified_base 5: mod_base = OTHER; note = 2'-O-methyluridine-3'-phosphate
  modified_base 6: mod_base = OTHER; note = 2'-O-methylguanosine-3'-phosphate
  modified_base 7: mod_base = OTHER; note = 2'-deoxy-2'-fluoroadenosine-3'-phosphate
  modified_base 8: mod_base = OTHER; note = 2'-O-methyladenosine-3'-phosphate
  modified_base 9: mod_base = OTHER; note = 2'-deoxy-2'-fluorocytidine-3'-phosphate
  modified_base 10: mod_base = OTHER; note = 2'-deoxy-2'-fluorouridine-3'-phosphate
  modified_base 11: mod_base = OTHER; note = 2'-deoxy-2'-fluorouridine-3'-phosphate
  modified_base 12: mod_base = OTHER; note = 2'-O-methylcytidine-3'-phosphate
  modified_base 13: mod_base = OTHER; note = 2'-O-methyluridine-3'-phosphate
  modified_base 14: mod_base = OTHER; note = 2'-O-methyluridine-3'-phosphate
  modified_base 15: mod_base = OTHER; note = 2'-O-methyladenosine-3'-phosphate
  modified_base 16: mod_base = OTHER; note = 2'-O-methyladenosine-3'-phosphate
  modified_base 17: mod_base = OTHER; note = 2'-O-methylcytidine-3'-phosphate
  modified_base 18: mod_base = OTHER; note = 2'-O-methyladenosine-3'-phosphate
  modified_base 19: mod_base = OTHER; note = 2'-O-methyladenosine-3'-phosphate
  modified_base 20: mod_base = OTHER; note = 2'-O-methylguanosine-3'-phosphate
  modified_base 21: mod_base = OTHER; note = 2'-O-methyladenosine
acaatgaacttcttaacaaga

SEQ ID NO: 4272 - RNA, 21 nt, synthetic construct
  source 1..21: mol_type = other RNA
  modified_base 1: mod_base = OTHER; note = 2'-O-methylcytidine-3'-phosphate
  modified_base 2: mod_base = OTHER; note = 2'-O-methyladenosine-3'-phosphate
  modified_base 3: mod_base = OTHER; note = 2'-O-methyladenosine-3'-phosphate
  modified_base 4: mod_base = OTHER; note = 2'-O-methyluridine-3'-phosphate
  modified_base 5: mod_base = OTHER; note = 2'-O-methylguanosine-3'-phosphate
  modified_base 6: mod_base = OTHER; note = 2'-O-methyladenosine-3'-phosphate
  modified_base 7: mod_base = OTHER; note = 2'-deoxy-2'-fluoroadenosine-3'-phosphate
  modified_base 8: mod_base = OTHER; note = 2'-O-methylcytidine-3'-phosphate
  modified_base 9: mod_base = OTHER; note = 2'-deoxy-2'-fluorouridine-3'-phosphate
  modified_base 10: mod_base = OTHER; note = 2'-deoxy-2'-fluorouridine-3'-phosphate
  modified_base 11: mod_base = OTHER; note = 2'-deoxy-2'-fluorocytidine-3'-phosphate
  modified_base 12: mod_base = OTHER; note = 2'-O-methyluridine-3'-phosphate
  modified_base 13: mod_base = OTHER; note = 2'-O-methyluridine-3'-phosphate
  modified_base 14: mod_base = OTHER; note = 2'-O-methyladenosine-3'-phosphate
  modified_base 15: mod_base = OTHER; note = 2'-O-methyladenosine-3'-phosphate
  modified_base 16: mod_base = OTHER; note = 2'-O-methylcytidine-3'-phosphate
  modified_base 17: mod_base = OTHER; note = 2'-O-methyladenosine-3'-phosphate
  modified_base 18: mod_base = OTHER; note = 2'-O-methyladenosine-3'-phosphate
  modified_base 19: mod_base = OTHER; note = 2'-O-methylguanosine-3'-phosphate
  modified_base 20: mod_base = OTHER; note = 2'-O-methyladenosine-3'-phosphate
  modified_base 21: mod_base = OTHER; note = 2'-O-methyladenosine
caatgaacttcttaacaagaa

SEQ ID NO: 4273 - RNA, 21 nt, synthetic construct
  source 1..21: mol_type = other RNA
  modified_base 1: mod_base = OTHER; note = 2'-O-methyladenosine-3'-phosphate
  modified_base 2: mod_base = OTHER; note = 2'-O-methyladenosine-3'-phosphate
  modified_base 3: mod_base = OTHER; note = 2'-O-methyluridine-3'-phosphate
  modified_base 4: mod_base = OTHER; note = 2'-O-methylguanosine-3'-phosphate
  modified_base 5: mod_base = OTHER; note = 2'-O-methyladenosine-3'-phosphate
  modified_base 6: mod_base = OTHER; note = 2'-O-methyladenosine-3'-phosphate
  modified_base 7: mod_base = OTHER; note = 2'-deoxy-2'-fluorocytidine-3'-phosphate
  modified_base 8: mod_base = OTHER; note = 2'-O-methyluridine-3'-phosphate
  modified_base 9: mod_base = OTHER; note = 2'-deoxy-2'-fluorouridine-3'-phosphate
  modified_base 10: mod_base = OTHER; note = 2'-deoxy-2'-fluorocytidine-3'-phosphate
  modified_base 11: mod_base = OTHER; note = 2'-deoxy-2'-fluorouridine-3'-phosphate
  modified_base 12: mod_base = OTHER; note = 2'-O-methyluridine-3'-phosphate
  modified_base 13: mod_base = OTHER; note = 2'-O-methyladenosine-3'-phosphate
  modified_base 14: mod_base = OTHER; note = 2'-O-methyladenosine-3'-phosphate
  modified_base 15: mod_base = OTHER; note = 2'-O-methylcytidine-3'-phosphate
  modified_base 16: mod_base = OTHER; note = 2'-O-methyladenosine-3'-phosphate
  modified_base 17: mod_base = OTHER; note = 2'-O-methyladenosine-3'-phosphate
  modified_base 18: mod_base = OTHER; note = 2'-O-methylguanosine-3'-phosphate
  modified_base 19: mod_base = OTHER; note = 2'-O-methyladenosine-3'-phosphate
  modified_base 20: mod_base = OTHER; note = 2'-O-methyluridine-3'-phosphate
  modified_base 21: mod_base = OTHER; note = 2'-O-methyladenosine
aatgaacttcttaacaagata

SEQ ID NO: 4274 - RNA, 21 nt, synthetic construct
  source 1..21: mol_type = other RNA
  modified_base 1: mod_base = OTHER; note = 2'-O-methyladenosine-3'-phosphate
  modified_base 2: mod_base = OTHER; note = 2'-O-methyluridine-3'-phosphate
  modified_base 3: mod_base = OTHER; note = 2'-O-methylguanosine-3'-phosphate
  modified_base 4: mod_base = OTHER; note = 2'-O-methyladenosine-3'-phosphate
  modified_base 5: mod_base = OTHER; note = 2'-O-methyladenosine-3'-phosphate
  modified_base 6: mod_base = OTHER; note = 2'-O-methylcytidine-3'-phosphate
  modified_base 7: mod_base = OTHER; note = 2'-deoxy-2'-fluorouridine-3'-phosphate
  modified_base 8: mod_base = OTHER; note = 2'-O-methyluridine-3'-phosphate
  modified_base 9: mod_base = OTHER; note = 2'-deoxy-2'-fluorocytidine-3'-phosphate
  modified_base 10: mod_base = OTHER; note = 2'-deoxy-2'-fluorouridine-3'-phosphate
  modified_base 11: mod_base = OTHER; note = 2'-deoxy-2'-fluorouridine-3'-phosphate
  modified_base 12: mod_base = OTHER; note = 2'-O-methyladenosine-3'-phosphate
  modified_base 13: mod_base = OTHER; note = 2'-O-methyladenosine-3'-phosphate
  modified_base 14: mod_base = OTHER; note = 2'-O-methylcytidine-3'-phosphate
  modified_base 15: mod_base = OTHER; note = 2'-O-methyladenosine-3'-phosphate
  modified_base 16: mod_base = OTHER; note = 2'-O-methyladenosine-3'-phosphate
  modified_base 17: mod_base = OTHER; note = 2'-O-methylguanosine-3'-phosphate
  modified_base 18: mod_base = OTHER; note = 2'-O-methyladenosine-3'-phosphate
  modified_base 19: mod_base = OTHER; note = 2'-O-methyluridine-3'-phosphate
  modified_base 20: mod_base = OTHER; note = 2'-O-methyluridine-3'-phosphate
  modified_base 21: mod_base = OTHER; note = 2'-O-methyladenosine
atgaacttcttaacaagatta

SEQ ID NO: 4275 - RNA, 21 nt, synthetic construct
  source 1..21: mol_type = other RNA
  modified_base 1: mod_base = OTHER; note = 2'-O-methyluridine-3'-phosphate
  modified_base 2: mod_base = OTHER; note = 2'-O-methyladenosine-3'-phosphate
  modified_base 3: mod_base = OTHER; note = 2'-O-methyladenosine-3'-phosphate
  modified_base 4: mod_base = OTHER; note = 2'-O-methylcytidine-3'-phosphate
  modified_base 5: mod_base = OTHER; note = 2'-O-methyladenosine-3'-phosphate
  modified_base 6: mod_base = OTHER; note = 2'-O-methyladenosine-3'-phosphate
  modified_base 7: mod_base = OTHER; note = 2'-deoxy-2'-fluoroguanosine-3'-phosphate
  modified_base 8: mod_base = OTHER; note = 2'-O-methyladenosine-3'-phosphate
  modified_base 9: mod_base = OTHER; note = 2'-deoxy-2'-fluorouridine-3'-phosphate
  modified_base 10: mod_base = OTHER; note = 2'-deoxy-2'-fluorouridine-3'-phosphate
  modified_base 11: mod_base = OTHER; note = 2'-deoxy-2'-fluorouridine-3'-phosphate
  modified_base 12: mod_base = OTHER; note = 2'-O-methyluridine-3'-phosphate
  modified_base 13: mod_base = OTHER; note = 2'-O-methyladenosine-3'-phosphate
  modified_base 14: mod_base = OTHER; note = 2'-O-methyladenosine-3'-phosphate
  modified_base 15: mod_base = OTHER; note = 2'-O-methylguanosine-3'-phosphate
  modified_base 16: mod_base = OTHER; note = 2'-O-methyluridine-3'-phosphate
  modified_base 17: mod_base = OTHER; note = 2'-O-methyluridine-3'-phosphate
  modified_base 18: mod_base = OTHER; note = 2'-O-methylcytidine-3'-phosphate
  modified_base 19: mod_base = OTHER; note = 2'-O-methyluridine-3'-phosphate
  modified_base 20: mod_base = OTHER; note = 2'-O-methylcytidine-3'-phosphate
  modified_base 21: mod_base = OTHER; note = 2'-O-methyladenosine
taacaagattttaagttctca

SEQ ID NO: 4276 - RNA, 21 nt, synthetic construct
  source 1..21: mol_type = other RNA
  modified_base 1: mod_base = OTHER; note = 2'-O-methyladenosine-3'-phosphate
  modified_base 2: mod_base = OTHER; note = 2'-O-methylcytidine-3'-phosphate
  modified_base 3: mod_base = OTHER; note = 2'-O-methyladenosine-3'-phosphate
  modified_base 4: mod_base = OTHER; note = 2'-O-methyladenosine-3'-phosphate
  modified_base 5: mod_base = OTHER; note = 2'-O-methylguanosine-3'-phosphate
  modified_base 6: mod_base = OTHER; note = 2'-O-methyladenosine-3'-phosphate
  modified_base 7: mod_base = OTHER; note = 2'-deoxy-2'-fluorouridine-3'-phosphate
  modified_base 8: mod_base = OTHER; note = 2'-O-methyluridine-3'-phosphate
  modified_base 9: mod_base = OTHER; note = 2'-deoxy-2'-fluorouridine-3'-phosphate
  modified_base 10: mod_base = OTHER; note = 2'-deoxy-2'-fluorouridine-3'-phosphate
  modified_base 11: mod_base = OTHER; note = 2'-deoxy-2'-fluoroadenosine-3'-phosphate
  modified_base 12: mod_base = OTHER; note = 2'-O-methyladenosine-3'-phosphate
  modified_base 13: mod_base = OTHER; note = 2'-O-methylguanosine-3'-phosphate
  modified_base 14: mod_base = OTHER; note = 2'-O-methyluridine-3'-phosphate
  modified_base 15: mod_base = OTHER; note = 2'-O-methyluridine-3'-phosphate
  modified_base 16: mod_base = OTHER; note = 2'-O-methylcytidine-3'-phosphate
  modified_base 17: mod_base = OTHER; note = 2'-O-methyluridine-3'-phosphate
  modified_base 18: mod_base = OTHER; note = 2'-O-methylcytidine-3'-phosphate
  modified_base 19: mod_base = OTHER; note = 2'-O-methyluridine-3'-phosphate
  modified_base 20: mod_base = OTHER; note = 2'-O-methylguanosine-3'-phosphate
  modified_base 21: mod_base = OTHER; note = 2'-O-methyladenosine
acaagattttaagttctctga

SEQ ID NO: 4277 - RNA, 21 nt, synthetic construct
  source 1..21: mol_type = other RNA
  modified_base 1: mod_base = OTHER; note = 2'-O-methyladenosine-3'-phosphate
  modified_base 2: mod_base = OTHER; note = 2'-O-methylguanosine-3'-phosphate
  modified_base 3: mod_base = OTHER; note = 2'-O-methyluridine-3'-phosphate
  modified_base 4: mod_base = OTHER; note = 2'-O-methyluridine-3'-phosphate
  modified_base 5: mod_base = OTHER; note = 2'-O-methylcytidine-3'-phosphate
  modified_base 6: mod_base = OTHER; note = 2'-O-methyluridine-3'-phosphate
  modified_base 7: mod_base = OTHER; note = 2'-deoxy-2'-fluorocytidine-3'-phosphate
  modified_base 8: mod_base = OTHER; note = 2'-O-methyluridine-3'-phosphate
  modified_base 9: mod_base = OTHER; note = 2'-deoxy-2'-fluoroguanosine-3'-phosphate
  modified_base 10: mod_base = OTHER; note = 2'-deoxy-2'-fluorouridine-3'-phosphate
  modified_base 11: mod_base = OTHER; note = 2'-deoxy-2'-fluoroadenosine-3'-phosphate
  modified_base 12: mod_base = OTHER; note = 2'-O-methyluridine-3'-phosphate
  modified_base 13: mod_base = OTHER; note = 2'-O-methyladenosine-3'-phosphate
  modified_base 14: mod_base = OTHER; note = 2'-O-methyladenosine-3'-phosphate
  modified_base 15: mod_base = OTHER; note = 2'-O-methylguanosine-3'-phosphate
  modified_base 16: mod_base = OTHER; note = 2'-O-methyladenosine-3'-phosphate
  modified_base 17: mod_base = OTHER; note = 2'-O-methylguanosine-3'-phosphate
  modified_base 18: mod_base = OTHER; note = 2'-O-methylguanosine-3'-phosphate
  modified_base 19: mod_base = OTHER; note = 2'-O-methyluridine-3'-phosphate
  modified_base 20: mod_base = OTHER; note = 2'-O-methyluridine-3'-phosphate
  modified_base 21: mod_base = OTHER; note = 2'-O-methyladenosine
agttctctgtataagaggtta

SEQ ID NO: 4278 - RNA, 21 nt, synthetic construct
  source 1..21: mol_type = other RNA
  modified_base 1: mod_base = OTHER; note = 2'-O-methylguanosine-3'-phosphate
  modified_base 2: mod_base = OTHER; note = 2'-O-methyluridine-3'-phosphate
  modified_base 3: mod_base = OTHER; note = 2'-O-methyladenosine-3'-phosphate
  modified_base 4: mod_base = OTHER; note = 2'-O-methyluridine-3'-phosphate
  modified_base 5: mod_base = OTHER; note = 2'-O-methyladenosine-3'-phosphate
  modified_base 6: mod_base = OTHER; note = 2'-O-methyladenosine-3'-phosphate
  modified_base 7: mod_base = OTHER; note = 2'-deoxy-2'-fluoroguanosine-3'-phosphate
  modified_base 8: mod_base = OTHER; note = 2'-O-methyladenosine-3'-phosphate
  modified_base 9: mod_base = OTHER; note = 2'-deoxy-2'-fluoroguanosine-3'-phosphate
  modified_base 10: mod_base = OTHER; note = 2'-deoxy-2'-fluoroguanosine-3'-phosphate
  modified_base 11: mod_base = OTHER; note = 2'-deoxy-2'-fluorouridine-3'-phosphate
  modified_base 12: mod_base = OTHER; note = 2'-O-methyluridine-3'-phosphate
  modified_base 13: mod_base = OTHER; note = 2'-O-methyluridine-3'-phosphate
  modified_base 14: mod_base = OTHER; note = 2'-O-methylcytidine-3'-phosphate
  modified_base 15: mod_base = OTHER; note = 2'-O-methyladenosine-3'-phosphate
  modified_base 16: mod_base = OTHER; note = 2'-O-methylcytidine-3'-phosphate
  modified_base 17: mod_base = OTHER; note = 2'-O-methylcytidine-3'-phosphate
  modified_base 18: mod_base = OTHER; note = 2'-O-methyluridine-3'-phosphate
  modified_base 19: mod_base = OTHER; note = 2'-O-methylcytidine-3'-phosphate
  modified_base 20: mod_base = OTHER; note = 2'-O-methyladenosine-3'-phosphate
  modified_base 21: mod_base = OTHER; note = 2'-O-methyladenosine
gtataagaggtttcacctcaa

SEQ ID NO: 4279 - RNA, 21 nt, synthetic construct
  source 1..21: mol_type = other RNA
  modified_base 1: mod_base = OTHER; note = 2'-O-methyladenosine-3'-phosphate
  modified_base 2: mod_base = OTHER; note = 2'-O-methyluridine-3'-phosphate
  modified_base 3: mod_base = OTHER; note = 2'-O-methyluridine-3'-phosphate
  modified_base 4: mod_base = OTHER; note = 2'-O-methyluridine-3'-phosphate
  modified_base 5: mod_base = OTHER; note = 2'-O-methylguanosine-3'-phosphate
  modified_base 6: mod_base = OTHER; note = 2'-O-methylguanosine-3'-phosphate
  modified_base 7: mod_base = OTHER; note = 2'-deoxy-2'-fluorocytidine-3'-phosphate
  modified_base 8: mod_base = OTHER; note = 2'-O-methyladenosine-3'-phosphate
  modified_base 9: mod_base = OTHER; note = 2'-deoxy-2'-fluorocytidine-3'-phosphate
  modified_base 10: mod_base = OTHER; note = 2'-deoxy-2'-fluorouridine-3'-phosphate
  modified_base 11: mod_base = OTHER; note = 2'-deoxy-2'-fluoroadenosine-3'-phosphate
  modified_base 12: mod_base = OTHER; note = 2'-O-methyluridine-3'-phosphate
  modified_base 13: mod_base = OTHER; note = 2'-O-methyladenosine-3'-phosphate
  modified_base 14: mod_base = OTHER; note = 2'-O-methylguanosine-3'-phosphate
  modified_base 15: mod_base = OTHER; note = 2'-O-methyladenosine-3'-phosphate
  modified_base 16: mod_base = OTHER; note = 2'-O-methylguanosine-3'-phosphate
  modified_base 17: mod_base = OTHER; note = 2'-O-methyluridine-3'-phosphate
  modified_base 18: mod_base = OTHER; note = 2'-O-methyladenosine-3'-phosphate
  modified_base 19: mod_base = OTHER; note = 2'-O-methyluridine-3'-phosphate
  modified_base 20: mod_base = OTHER; note = 2'-O-methyluridine-3'-phosphate
  modified_base 21: mod_base = OTHER; note = 2'-O-methyladenosine
atttggcactatagagtatta

SEQ ID NO: 4280 - RNA, 21 nt, synthetic construct
  source 1..21: mol_type = other RNA
  modified_base 1: mod_base = OTHER; note = 2'-O-methyluridine-3'-phosphate
  modified_base 2: mod_base = OTHER; note = 2'-O-methyluridine-3'-phosphate
  modified_base 3: mod_base = OTHER; note = 2'-O-methyluridine-3'-phosphate
  modified_base 4: mod_base = OTHER; note = 2'-O-methylguanosine-3'-phosphate
  modified_base 5: mod_base = OTHER; note = 2'-O-methylguanosine-3'-phosphate
  modified_base 6: mod_base = OTHER; note = 2'-O-methylcytidine-3'-phosphate
  modified_base 7: mod_base = OTHER; note = 2'-deoxy-2'-fluoroadenosine-3'-phosphate
  modified_base 8: mod_base = OTHER; note = 2'-O-methylcytidine-3'-phosphate
  modified_base 9: mod_base = OTHER; note = 2'-deoxy-2'-fluorouridine-3'-phosphate
  modified_base 10: mod_base = OTHER; note = 2'-deoxy-2'-fluoroadenosine-3'-phosphate
  modified_base 11: mod_base = OTHER; note = 2'-deoxy-2'-fluorouridine-3'-phosphate
  modified_base 12: mod_base = OTHER; note = 2'-O-methyladenosine-3'-phosphate
  modified_base 13: mod_base = OTHER; note = 2'-O-methylguanosine-3'-phosphate
  modified_base 14: mod_base = OTHER; note = 2'-O-methyladenosine-3'-phosphate
  modified_base 15: mod_base = OTHER; note = 2'-O-methylguanosine-3'-phosphate
  modified_base 16: mod_base = OTHER; note = 2'-O-methyluridine-3'-phosphate
  modified_base 17: mod_base = OTHER; note = 2'-O-methyladenosine-3'-phosphate
  modified_base 18: mod_base = OTHER; note = 2'-O-methyluridine-3'-phosphate
  modified_base 19: mod_base = OTHER; note = 2'-O-methyluridine-3'-phosphate
  modified_base 20: mod_base = OTHER; note = 2'-O-methyluridine-3'-phosphate
  modified_base 21: mod_base = OTHER; note = 2'-O-methyladenosine
tttggcactatagagtattta

SEQ ID NO: 4281 - RNA, 21 nt, synthetic construct
  source 1..21: mol_type = other RNA
  modified_base 1: mod_base = OTHER; note = 2'-O-methyluridine-3'-phosphate
  modified_base 2: mod_base = OTHER; note = 2'-O-methyluridine-3'-phosphate
  modified_base 3: mod_base = OTHER; note = 2'-O-methylguanosine-3'-phosphate
  modified_base 4: mod_base = OTHER; note = 2'-O-methylguanosine-3'-phosphate
  modified_base 5: mod_base = OTHER; note = 2'-O-methylcytidine-3'-phosphate
  modified_base 6: mod_base = OTHER; note = 2'-O-methyladenosine-3'-phosphate
  modified_base 7: mod_base = OTHER; note = 2'-deoxy-2'-fluorocytidine-3'-phosphate
  modified_base 8: mod_base = OTHER; note = 2'-O-methyluridine-3'-phosphate
  modified_base 9: mod_base = OTHER; note = 2'-deoxy-2'-fluoroadenosine-3'-phosphate
  modified_base 10: mod_base = OTHER; note = 2'-deoxy-2'-fluorouridine-3'-phosphate
  modified_base 11: mod_base = OTHER; note = 2'-deoxy-2'-fluoroadenosine-3'-phosphate
  modified_base 12: mod_base = OTHER; note = 2'-O-methylguanosine-3'-phosphate
  modified_base 13: mod_base = OTHER; note = 2'-O-methyladenosine-3'-phosphate
  modified_base 14: mod_base = OTHER; note = 2'-O-methylguanosine-3'-phosphate
  modified_base 15: mod_base = OTHER; note = 2'-O-methyluridine-3'-phosphate
  modified_base 16: mod_base = OTHER; note = 2'-O-methyladenosine-3'-phosphate
  modified_base 17: mod_base = OTHER; note = 2'-O-methyluridine-3'-phosphate
  modified_base 18: mod_base = OTHER; note = 2'-O-methyluridine-3'-phosphate
  modified_base 19: mod_base = OTHER; note = 2'-O-methyluridine-3'-phosphate
  modified_base 20: mod_base = OTHER; note = 2'-O-methylguanosine-3'-phosphate
  modified_base 21: mod_base = OTHER; note = 2'-O-methyladenosine
ttggcactatagagtatttga

SEQ ID NO: 4282 - RNA, 21 nt, synthetic construct
  source 1..21: mol_type = other RNA
  modified_base 1: mod_base = OTHER; note = 2'-O-methyluridine-3'-phosphate
  modified_base 2: mod_base = OTHER; note = 2'-O-methylguanosine-3'-phosphate
  modified_base 3: mod_base = OTHER; note = 2'-O-methylguanosine-3'-phosphate
  modified_base 4: mod_base = OTHER; note = 2'-O-methylcytidine-3'-phosphate
  modified_base 5: mod_base = OTHER; note = 2'-O-methyladenosine-3'-phosphate
  modified_base 6: mod_base = OTHER; note = 2'-O-methylcytidine-3'-phosphate
  modified_base 7: mod_base = OTHER; note = 2'-deoxy-2'-fluorouridine-3'-phosphate
  modified_base 8: mod_base = OTHER; note = 2'-O-methyladenosine-3'-phosphate
  modified_base 9: mod_base = OTHER; note = 2'-deoxy-2'-fluorouridine-3'-phosphate
  modified_base 10: mod_base = OTHER; note = 2'-deoxy-2'-fluoroadenosine-3'-phosphate
  modified_base 11: mod_base = OTHER; note = 2'-deoxy-2'-fluoroguanosine-3'-phosphate
  modified_base 12: mod_base = OTHER; note = 2'-O-methyladenosine-3'-phosphate
  modified_base 13: mod_base = OTHER; note = 2'-O-methylguanosine-3'-phosphate
  modified_base 14: mod_base = OTHER; note = 2'-O-methyluridine-3'-phosphate
  modified_base 15: mod_base = OTHER; note = 2'-O-methyladenosine-3'-phosphate
  modified_base 16: mod_base = OTHER; note = 2'-O-methyluridine-3'-phosphate
  modified_base 17: mod_base = OTHER; note = 2'-O-methyluridine-3'-phosphate
  modified_base 18: mod_base = OTHER; note = 2'-O-methyluridine-3'-phosphate
  modified_base 19: mod_base = OTHER; note = 2'-O-methylguanosine-3'-phosphate
  modified_base 20: mod_base = OTHER; note = 2'-O-methyluridine-3'-phosphate
  modified_base 21: mod_base = OTHER; note = 2'-O-methyladenosine
tggcactatagagtatttgta

SEQ ID NO: 4283 - RNA, 21 nt, synthetic construct
  source 1..21: mol_type = other RNA
  modified_base 1: mod_base = OTHER; note = 2'-O-methylguanosine-3'-phosphate
  modified_base 2: mod_base = OTHER; note = 2'-O-methylguanosine-3'-phosphate
  modified_base 3: mod_base = OTHER; note = 2'-O-methylcytidine-3'-phosphate
  modified_base 4: mod_base = OTHER; note = 2'-O-methyladenosine-3'-phosphate
  modified_base 5: mod_base = OTHER; note = 2'-O-methylcytidine-3'-phosphate
  modified_base 6: mod_base = OTHER; note = 2'-O-methyluridine-3'-phosphate
  modified_base 7: mod_base = OTHER; note = 2'-deoxy-2'-fluoroadenosine-3'-phosphate
  modified_base 8: mod_base = OTHER; note = 2'-O-methyluridine-3'-phosphate
  modified_base 9: mod_base = OTHER; note = 2'-deoxy-2'-fluoroadenosine-3'-phosphate
  modified_base 10: mod_base = OTHER; note = 2'-deoxy-2'-fluoroguanosine-3'-phosphate
  modified_base 11: mod_base = OTHER; note = 2'-deoxy-2'-fluoroadenosine-3'-phosphate
  modified_base 12: mod_base = OTHER; note = 2'-O-methylguanosine-3'-phosphate
  modified_base 13: mod_base = OTHER; note = 2'-O-methyluridine-3'-phosphate
  modified_base 14: mod_base = OTHER; note = 2'-O-methyladenosine-3'-phosphate
  modified_base 15: mod_base = OTHER; note = 2'-O-methyluridine-3'-phosphate
  modified_base 16: mod_base = OTHER; note = 2'-O-methyluridine-3'-phosphate
  modified_base 17: mod_base = OTHER; note = 2'-O-methyluridine-3'-phosphate
  modified_base 18: mod_base = OTHER; note = 2'-O-methylguanosine-3'-phosphate
  modified_base 19: mod_base = OTHER; note = 2'-O-methyluridine-3'-phosphate
  modified_base 20: mod_base = OTHER; note = 2'-O-methyluridine-3'-phosphate
  modified_base 21: mod_base = OTHER; note = 2'-O-methyladenosine
ggcactatagagtatttgtta

SEQ ID NO: 4284 - RNA, 21 nt, synthetic construct
  source 1..21: mol_type = other RNA
  modified_base 1: mod_base = OTHER; note = 2'-O-methylguanosine-3'-phosphate
  modified_base 2: mod_base = OTHER; note = 2'-O-methylcytidine-3'-phosphate
  modified_base 3: mod_base = OTHER; note = 2'-O-methyladenosine-3'-phosphate
  modified_base 4: mod_base = OTHER; note = 2'-O-methylcytidine-3'-phosphate
  modified_base 5: mod_base = OTHER; note = 2'-O-methyluridine-3'-phosphate
  modified_base 6: mod_base = OTHER; note = 2'-O-methyladenosine-3'-phosphate
  modified_base 7: mod_base = OTHER; note = 2'-deoxy-2'-fluorouridine-3'-phosphate
  modified_base 8: mod_base = OTHER; note = 2'-O-methyladenosine-3'-phosphate
  modified_base 9: mod_base = OTHER; note = 2'-deoxy-2'-fluoroguanosine-3'-phosphate
  modified_base 10: mod_base = OTHER; note = 2'-deoxy-2'-fluoroadenosine-3'-phosphate
  modified_base 11: mod_base = OTHER; note = 2'-deoxy-2'-fluoroguanosine-3'-phosphate
  modified_base 12: mod_base = OTHER; note = 2'-O-methyluridine-3'-phosphate
  modified_base 13: mod_base = OTHER; note = 2'-O-methyladenosine-3'-phosphate
  modified_base 14: mod_base = OTHER; note = 2'-O-methyluridine-3'-phosphate
  modified_base 15: mod_base = OTHER; note = 2'-O-methyluridine-3'-phosphate
  modified_base 16: mod_base = OTHER; note = 2'-O-methyluridine-3'-phosphate
  modified_base 17: mod_base = OTHER; note = 2'-O-methylguanosine-3'-phosphate
  modified_base 18: mod_base = OTHER; note = 2'-O-methyluridine-3'-phosphate
  modified_base 19: mod_base = OTHER; note = 2'-O-methyluridine-3'-phosphate
  modified_base 20: mod_base = OTHER; note = 2'-O-methyladenosine-3'-phosphate
  modified_base 21: mod_base = OTHER; note = 2'-O-methyladenosine
gcactatagagtatttgttaa

SEQ ID NO: 4285 - RNA, 21 nt, synthetic construct
  source 1..21: mol_type = other RNA
  modified_base 1: mod_base = OTHER; note = 2'-O-methylcytidine-3'-phosphate
  modified_base 2: mod_base = OTHER; note = 2'-O-methyladenosine-3'-phosphate
  modified_base 3: mod_base = OTHER; note = 2'-O-methylcytidine-3'-phosphate
  modified_base 4: mod_base = OTHER; note = 2'-O-methyluridine-3'-phosphate
  modified_base 5: mod_base = OTHER; note = 2'-O-methyladenosine-3'-phosphate
  modified_base 6: mod_base = OTHER; note = 2'-O-methyluridine-3'-phosphate
  modified_base 7: mod_base = OTHER; note = 2'-deoxy-2'-fluoroadenosine-3'-phosphate
  modified_base 8: mod_base = OTHER; note = 2'-O-methylguanosine-3'-phosphate
  modified_base 9: mod_base = OTHER; note = 2'-deoxy-2'-fluoroadenosine-3'-phosphate
  modified_base 10: mod_base = OTHER; note = 2'-deoxy-2'-fluoroguanosine-3'-phosphate
  modified_base 11: mod_base = OTHER; note = 2'-deoxy-2'-fluorouridine-3'-phosphate
  modified_base 12: mod_base = OTHER; note = 2'-O-methyladenosine-3'-phosphate
  modified_base 13: mod_base = OTHER; note = 2'-O-methyluridine-3'-phosphate
  modified_base 14: mod_base = OTHER; note = 2'-O-methyluridine-3'-phosphate
  modified_base 15: mod_base = OTHER; note = 2'-O-methyluridine-3'-phosphate
  modified_base 16: mod_base = OTHER; note = 2'-O-methylguanosine-3'-phosphate
  modified_base 17: mod_base = OTHER; note = 2'-O-methyluridine-3'-phosphate
  modified_base 18: mod_base = OTHER; note = 2'-O-methyluridine-3'-phosphate
  modified_base 19: mod_base = OTHER; note = 2'-O-methyladenosine-3'-phosphate
  modified_base 20: mod_base = OTHER; note = 2'-O-methyladenosine-3'-phosphate
  modified_base 21: mod_base = OTHER; note = 2'-O-methyladenosine
cactatagagtatttgttaaa

SEQ ID NO: 4286 - RNA, 21 nt, synthetic construct
  source 1..21: mol_type = other RNA
  modified_base 1: mod_base = OTHER; note = 2'-O-methyladenosine-3'-phosphate
  modified_base 2: mod_base = OTHER; note = 2'-O-methylcytidine-3'-phosphate
  modified_base 3: mod_base = OTHER; note = 2'-O-methyluridine-3'-phosphate
  modified_base 4: mod_base = OTHER; note = 2'-O-methyladenosine-3'-phosphate
  modified_base 5: mod_base = OTHER; note = 2'-O-methyluridine-3'-phosphate
  modified_base 6: mod_base = OTHER; note = 2'-O-methyladenosine-3'-phosphate
  modified_base 7: mod_base = OTHER; note = 2'-deoxy-2'-fluoroguanosine-3'-phosphate
  modified_base 8: mod_base = OTHER; note = 2'-O-methyladenosine-3'-phosphate
  modified_base 9: mod_base = OTHER; note = 2'-deoxy-2'-fluoroguanosine-3'-phosphate
  modified_base 10: mod_base = OTHER; note = 2'-deoxy-2'-fluorouridine-3'-phosphate
  modified_base 11: mod_base = OTHER; note = 2'-deoxy-2'-fluoroadenosine-3'-phosphate
  modified_base 12: mod_base = OTHER; note = 2'-O-methyluridine-3'-phosphate
  modified_base 13: mod_base = OTHER; note = 2'-O-methyluridine-3'-phosphate
  modified_base 14: mod_base = OTHER; note = 2'-O-methyluridine-3'-phosphate
  modified_base 15: mod_base = OTHER; note = 2'-O-methylguanosine-3'-phosphate
  modified_base 16: mod_base = OTHER; note = 2'-O-methyluridine-3'-phosphate
  modified_base 17: mod_base = OTHER; note = 2'-O-methyluridine-3'-phosphate
  modified_base 18: mod_base = OTHER; note = 2'-O-methyladenosine-3'-phosphate
  modified_base 19: mod_base = OTHER; note = 2'-O-methyladenosine-3'-phosphate
  modified_base 20: mod_base = OTHER; note = 2'-O-methyluridine-3'-phosphate
  modified_base 21: mod_base = OTHER; note = 2'-O-methyladenosine
actatagagtatttgttaata

SEQ ID NO: 4287 - RNA, 21 nt, synthetic construct
  source 1..21: mol_type = other RNA
  modified_base 1: mod_base = OTHER; note = 2'-O-methylcytidine-3'-phosphate
  modified_base 2: mod_base = OTHER; note = 2'-O-methyluridine-3'-phosphate
  modified_base 3: mod_base = OTHER; note = 2'-O-methyladenosine-3'-phosphate
  modified_base 4: mod_base = OTHER; note = 2'-O-methyluridine-3'-phosphate
  modified_base 5: mod_base = OTHER; note = 2'-O-methyladenosine-3'-phosphate
  modified_base 6: mod_base = OTHER; note = 2'-O-methylguanosine-3'-phosphate
  modified_base 7: mod_base = OTHER; note = 2'-deoxy-2'-fluoroadenosine-3'-phosphate
  modified_base 8: mod_base = OTHER; note = 2'-O-methylguanosine-3'-phosphate
  modified_base 9: mod_base = OTHER; note = 2'-deoxy-2'-fluorouridine-3'-phosphate
  modified_base 10: mod_base = OTHER; note = 2'-deoxy-2'-fluoroadenosine-3'-phosphate
  modified_base 11: mod_base = OTHER; note = 2'-deoxy-2'-fluorouridine-3'-phosphate
  modified_base 12: mod_base = OTHER; note = 2'-O-methyluridine-3'-phosphate
  modified_base 13: mod_base = OTHER; note = 2'-O-methyluridine-3'-phosphate
  modified_base 14: mod_base = OTHER; note = 2'-O-methylguanosine-3'-phosphate
  modified_base 15: mod_base = OTHER; note = 2'-O-methyluridine-3'-phosphate
  modified_base 16: mod_base = OTHER; note = 2'-O-methyluridine-3'-phosphate
  modified_base 17: mod_base = OTHER; note = 2'-O-methyladenosine-3'-phosphate
  modified_base 18: mod_base = OTHER; note = 2'-O-methyladenosine-3'-phosphate
  modified_base 19: mod_base = OTHER; note = 2'-O-methyluridine-3'-phosphate
  modified_base 20: mod_base = OTHER; note = 2'-O-methylguanosine-3'-phosphate
  modified_base 21: mod_base = OTHER; note = 2'-O-methyladenosine
ctatagagtatttgttaatga

SEQ ID NO: 4288 - RNA, 21 nt, synthetic construct
  source 1..21: mol_type = other RNA
  modified_base 1: mod_base = OTHER; note = 2'-O-methyluridine-3'-phosphate
  modified_base 2: mod_base = OTHER; note = 2'-O-methyladenosine-3'-phosphate
  modified_base 3: mod_base = OTHER; note = 2'-O-methyluridine-3'-phosphate
  modified_base 4: mod_base = OTHER; note = 2'-O-methyladenosine-3'-phosphate
  modified_base 5: mod_base = OTHER; note = 2'-O-methylguanosine-3'-phosphate
  modified_base 6: mod_base = OTHER; note = 2'-O-methyladenosine-3'-phosphate
  modified_base 7: mod_base = OTHER; note = 2'-deoxy-2'-fluoroguanosine-3'-phosphate
  modified_base 8: mod_base = OTHER; note = 2'-O-methyluridine-3'-phosphate
  modified_base 9: mod_base = OTHER; note = 2'-deoxy-2'-fluoroadenosine-3'-phosphate
  modified_base 10: mod_base = OTHER; note = 2'-deoxy-2'-fluorouridine-3'-phosphate
  modified_base 11: mod_base = OTHER; note = 2'-deoxy-2'-fluorouridine-3'-phosphate
  modified_base 12: mod_base = OTHER; note = 2'-O-methyluridine-3'-phosphate
  modified_base 13: mod_base = OTHER; note = 2'-O-methylguanosine-3'-phosphate
  modified_base 14: mod_base = OTHER; note = 2'-O-methyluridine-3'-phosphate
  modified_base 15: mod_base = OTHER; note = 2'-O-methyluridine-3'-phosphate
  modified_base 16: mod_base = OTHER; note = 2'-O-methyladenosine-3'-phosphate
  modified_base 17: mod_base = OTHER; note = 2'-O-methyladenosine-3'-phosphate
  modified_base 18: mod_base = OTHER; note = 2'-O-methyluridine-3'-phosphate
  modified_base 19: mod_base = OTHER; note = 2'-O-methylguanosine-3'-phosphate
  modified_base 20: mod_base = OTHER; note = 2'-O-methylguanosine-3'-phosphate
  modified_base 21: mod_base = OTHER; note = 2'-O-methyladenosine
tatagagtatttgttaatgga

SEQ ID NO: 4289 - RNA, 21 nt, synthetic construct
  source 1..21: mol_type = other RNA
  modified_base 1: mod_base = OTHER; note = 2'-O-methyladenosine-3'-phosphate
  modified_base 2: mod_base = OTHER; note = 2'-O-methyluridine-3'-phosphate
  modified_base 3: mod_base = OTHER; note = 2'-O-methyladenosine-3'-phosphate
  modified_base 4: mod_base = OTHER; note = 2'-O-methylguanosine-3'-phosphate
  modified_base 5: mod_base = OTHER; note = 2'-O-methyladenosine-3'-phosphate
  modified_base 6: mod_base = OTHER; note = 2'-O-methylguanosine-3'-phosphate
  modified_base 7: mod_base = OTHER; note = 2'-deoxy-2'-fluorouridine-3'-phosphate
  modified_base 8: mod_base = OTHER; note = 2'-O-methyladenosine-3'-phosphate
  modified_base 9: mod_base = OTHER; note = 2'-deoxy-2'-fluorouridine-3'-phosphate
  modified_base 10: mod_base = OTHER; note = 2'-deoxy-2'-fluorouridine-3'-phosphate
  modified_base 11: mod_base = OTHER; note = 2'-deoxy-2'-fluorouridine-3'-phosphate
  modified_base 12: mod_base = OTHER; note = 2'-O-methylguanosine-3'-phosphate
  modified_base 13: mod_base = OTHER; note = 2'-O-methyluridine-3'-phosphate
  modified_base 14: mod_base = OTHER; note = 2'-O-methyluridine-3'-phosphate
  modified_base 15: mod_base = OTHER; note = 2'-O-methyladenosine-3'-phosphate
  modified_base 16: mod_base = OTHER; note = 2'-O-methyladenosine-3'-phosphate
  modified_base 17: mod_base = OTHER; note = 2'-O-methyluridine-3'-phosphate
  modified_base 18: mod_base = OTHER; note = 2'-O-methylguanosine-3'-phosphate
  modified_base 19: mod_base = OTHER; note = 2'-O-methylguanosine-3'-phosphate
  modified_base 20: mod_base = OTHER; note = 2'-O-methylcytidine-3'-phosphate
  modified_base 21: mod_base = OTHER; note = 2'-O-methyladenosine
atagagtatttgttaatggca

SEQ ID NO: 4290 - RNA, 21 nt, synthetic construct
  source 1..21: mol_type = other RNA
  modified_base 1: mod_base = OTHER; note = 2'-O-methyluridine-3'-phosphate
  modified_base 2: mod_base = OTHER; note = 2'-O-methyladenosine-3'-phosphate
  modified_base 3: mod_base = OTHER; note = 2'-O-methylguanosine-3'-phosphate
  modified_base 4: mod_base = OTHER; note = 2'-O-methyladenosine-3'-phosphate
  modified_base 5: mod_base = OTHER; note = 2'-O-methylguanosine-3'-phosphate
  modified_base 6: mod_base = OTHER; note = 2'-O-methyluridine-3'-phosphate
  modified_base 7: mod_base = OTHER; note = 2'-deoxy-2'-fluoroadenosine-3'-phosphate
  modified_base 8: mod_base = OTHER; note = 2'-O-methyluridine-3'-phosphate
  modified_base 9: mod_base = OTHER; note = 2'-deoxy-2'-fluorouridine-3'-phosphate
  modified_base 10: mod_base = OTHER; note = 2'-deoxy-2'-fluorouridine-3'-phosphate
  modified_base 11: mod_base = OTHER; note = 2'-deoxy-2'-fluoroguanosine-3'-phosphate
  modified_base 12: mod_base = OTHER; note = 2'-O-methyluridine-3'-phosphate
  modified_base 13: mod_base = OTHER; note = 2'-O-methyluridine-3'-phosphate
  modified_base 14: mod_base = OTHER; note = 2'-O-methyladenosine-3'-phosphate
  modified_base 15: mod_base = OTHER; note = 2'-O-methyladenosine-3'-phosphate
  modified_base 16: mod_base = OTHER; note = 2'-O-methyluridine-3'-phosphate
  modified_base 17: mod_base = OTHER; note = 2'-O-methylguanosine-3'-phosphate
  modified_base 18: mod_base = OTHER; note = 2'-O-methylguanosine-3'-phosphate
  modified_base 19: mod_base = OTHER; note = 2'-O-methylcytidine-3'-phosphate
  modified_base 20: mod_base = OTHER; note = 2'-O-methyladenosine-3'-phosphate
  modified_base 21: mod_base = OTHER; note = 2'-O-methyladenosine
tagagtatttgttaatggcaa

SEQ ID NO: 4291 - RNA, 21 nt, synthetic construct
  source 1..21: mol_type = other RNA
  modified_base 1: mod_base = OTHER; note = 2'-O-methyladenosine-3'-phosphate
  modified_base 2: mod_base = OTHER; note = 2'-O-methylguanosine-3'-phosphate
  modified_base 3: mod_base = OTHER; note = 2'-O-methyladenosine-3'-phosphate
  modified_base 4: mod_base = OTHER; note = 2'-O-methylguanosine-3'-phosphate
  modified_base 5: mod_base = OTHER; note = 2'-O-methyluridine-3'-phosphate
  modified_base 6: mod_base = OTHER; note = 2'-O-methyladenosine-3'-phosphate
  modified_base 7: mod_base = OTHER; note = 2'-deoxy-2'-fluorouridine-3'-phosphate
  modified_base 8: mod_base = OTHER; note = 2'-O-methyluridine-3'-phosphate
  modified_base 9: mod_base = OTHER; note = 2'-deoxy-2'-fluorouridine-3'-phosphate
  modified_base 10: mod_base = OTHER; note = 2'-deoxy-2'-fluoroguanosine-3'-phosphate
  modified_base 11: mod_base = OTHER; note = 2'-deoxy-2'-fluorouridine-3'-phosphate
  modified_base 12: mod_base = OTHER; note = 2'-O-methyluridine-3'-phosphate
  modified_base 13: mod_base = OTHER; note = 2'-O-methyladenosine-3'-phosphate
  modified_base 14: mod_base = OTHER; note = 2'-O-methyladenosine-3'-phosphate
  modified_base 15: mod_base = OTHER; note = 2'-O-methyluridine-3'-phosphate
  modified_base 16: mod_base = OTHER; note = 2'-O-methylguanosine-3'-phosphate
  modified_base 17: mod_base = OTHER; note = 2'-O-methylguanosine-3'-phosphate
  modified_base 18: mod_base = OTHER; note = 2'-O-methylcytidine-3'-phosphate
  modified_base 19: mod_base = OTHER; note = 2'-O-methyladenosine-3'-phosphate
  modified_base 20: mod_base = OTHER; note = 2'-O-methylguanosine-3'-phosphate
  modified_base 21: mod_base = OTHER; note = 2'-O-methyladenosine
agagtatttgttaatggcaga

SEQ ID NO: 4292 - RNA, 21 nt, synthetic construct
  source 1..21: mol_type = other RNA
  modified_base 1: mod_base = OTHER; note = 2'-O-methylguanosine-3'-phosphate
  modified_base 2: mod_base = OTHER; note = 2'-O-methyladenosine-3'-phosphate
  modified_base 3: mod_base = OTHER; note = 2'-O-methylguanosine-3'-phosphate
  modified_base 4: mod_base = OTHER; note = 2'-O-methyluridine-3'-phosphate
  modified_base 5: mod_base = OTHER; note = 2'-O-methyladenosine-3'-phosphate
  modified_base 6: mod_base = OTHER; note = 2'-O-methyluridine-3'-phosphate
  modified_base 7: mod_base = OTHER; note = 2'-deoxy-2'-fluorouridine-3'-phosphate
  modified_base 8: mod_base = OTHER; note = 2'-O-methyluridine-3'-phosphate
  modified_base 9: mod_base = OTHER; note = 2'-deoxy-2'-fluoroguanosine-3'-phosphate
  modified_base 10: mod_base = OTHER; note = 2'-deoxy-2'-fluorouridine-3'-phosphate
  modified_base 11: mod_base = OTHER; note = 2'-deoxy-2'-fluorouridine-3'-phosphate
  modified_base 12: mod_base = OTHER; note = 2'-O-methyladenosine-3'-phosphate
  modified_base 13: mod_base = OTHER; note = 2'-O-methyladenosine-3'-phosphate
  modified_base 14: mod_base = OTHER; note = 2'-O-methyluridine-3'-phosphate
  modified_base 15: mod_base = OTHER; note = 2'-O-methylguanosine-3'-phosphate
  modified_base 16: mod_base = OTHER; note = 2'-O-methylguanosine-3'-phosphate
  modified_base 17: mod_base = OTHER; note = 2'-O-methylcytidine-3'-phosphate
  modified_base 18: mod_base = OTHER; note = 2'-O-methyladenosine-3'-phosphate
  modified_base 19: mod_base = OTHER; note = 2'-O-methylguanosine-3'-phosphate
  modified_base 20: mod_base = OTHER; note = 2'-O-methyladenosine-3'-phosphate
  modified_base 21: mod_base = OTHER; note = 2'-O-methyladenosine
gagtatttgttaatggcagaa

SEQ ID NO: 4293 - RNA, 21 nt, synthetic construct
  source 1..21: mol_type = other RNA
  modified_base 1: mod_base = OTHER; note = 2'-O-methylguanosine-3'-phosphate
  modified_base 2: mod_base = OTHER; note = 2'-O-methylcytidine-3'-phosphate
  modified_base 3: mod_base = OTHER; note = 2'-O-methyladenosine-3'-phosphate
  modified_base 4: mod_base = OTHER; note = 2'-O-methylguanosine-3'-phosphate
  modified_base 5: mod_base = OTHER; note = 2'-O-methyladenosine-3'-phosphate
  modified_base 6: mod_base = OTHER; note = 2'-O-methylguanosine-3'-phosphate
  modified_base 7: mod_base = OTHER; note = 2'-deoxy-2'-fluoroadenosine-3'-phosphate
  modified_base 8: mod_base = OTHER; note = 2'-O-methyluridine-3'-phosphate
  modified_base 9: mod_base = OTHER; note = 2'-deoxy-2'-fluoroguanosine-3'-phosphate
  modified_base 10: mod_base = OTHER; note = 2'-deoxy-2'-fluoroadenosine-3'-phosphate
  modified_base 11: mod_base = OTHER; note = 2'-deoxy-2'-fluorouridine-3'-phosphate
  modified_base 12: mod_base = OTHER; note = 2'-O-methyluridine-3'-phosphate
  modified_base 13: mod_base = OTHER; note = 2'-O-methyluridine-3'-phosphate
  modified_base 14: mod_base = OTHER; note = 2'-O-methyluridine-3'-phosphate
  modified_base 15: mod_base = OTHER; note = 2'-O-methyluridine-3'-phosphate
  modified_base 16: mod_base = OTHER; note = 2'-O-methylcytidine-3'-phosphate
  modified_base 17: mod_base = OTHER; note = 2'-O-methyluridine-3'-phosphate
  modified_base 18: mod_base = OTHER; note = 2'-O-methyluridine-3'-phosphate
  modified_base 19: mod_base = OTHER; note = 2'-O-methyluridine-3'-phosphate
  modified_base 20: mod_base = OTHER; note = 2'-O-methyluridine-3'-phosphate
  modified_base 21: mod_base = OTHER; note = 2'-O-methyladenosine
gcagagatgatttttctttta

SEQ ID NO: 4294 - RNA, 21 nt, synthetic construct
  source 1..21: mol_type = other RNA
  modified_base 1: mod_base = OTHER; note = 2'-O-methylcytidine-3'-phosphate
  modified_base 2: mod_base = OTHER; note = 2'-O-methyladenosine-3'-phosphate
  modified_base 3: mod_base = OTHER; note = 2'-O-methylguanosine-3'-phosphate
  modified_base 4: mod_base = OTHER; note = 2'-O-methyladenosine-3'-phosphate
  modified_base 5: mod_base = OTHER; note = 2'-O-methylguanosine-3'-phosphate
  modified_base 6: mod_base = OTHER; note = 2'-O-methyladenosine-3'-phosphate
  modified_base 7: mod_base = OTHER; note = 2'-deoxy-2'-fluorouridine-3'-phosphate
  modified_base 8: mod_base = OTHER; note = 2'-O-methylguanosine-3'-phosphate
  modified_base 9: mod_base = OTHER; note = 2'-deoxy-2'-fluoroadenosine-3'-phosphate
  modified_base 10: mod_base = OTHER; note = 2'-deoxy-2'-fluorouridine-3'-phosphate
  modified_base 11: mod_base = OTHER; note = 2'-deoxy-2'-fluorouridine-3'-phosphate
  modified_base 12: mod_base = OTHER; note = 2'-O-methyluridine-3'-phosphate
  modified_base 13: mod_base = OTHER; note = 2'-O-methyluridine-3'-phosphate
  modified_base 14: mod_base = OTHER; note = 2'-O-methyluridine-3'-phosphate
  modified_base 15: mod_base = OTHER; note = 2'-O-methylcytidine-3'-phosphate
  modified_base 16: mod_base = OTHER; note = 2'-O-methyluridine-3'-phosphate
  modified_base 17: mod_base = OTHER; note = 2'-O-methyluridine-3'-phosphate
  modified_base 18: mod_base = OTHER; note = 2'-O-methyluridine-3'-phosphate
  modified_base 19: mod_base = OTHER; note = 2'-O-methyluridine-3'-phosphate
  modified_base 20: mod_base = OTHER; note = 2'-O-methyladenosine-3'-phosphate
  modified_base 21: mod_base = OTHER; note = 2'-O-methyladenosine
cagagatgatttttcttttaa

SEQ ID NO: 4295 - RNA, 21 nt, synthetic construct
  source 1..21: mol_type = other RNA
  modified_base 1: mod_base = OTHER; note = 2'-O-methyladenosine-3'-phosphate
  modified_base 2: mod_base = OTHER; note = 2'-O-methylguanosine-3'-phosphate
  modified_base 3: mod_base = OTHER; note = 2'-O-methyladenosine-3'-phosphate
  modified_base 4: mod_base = OTHER; note = 2'-O-methylguanosine-3'-phosphate
  modified_base 5: mod_base = OTHER; note = 2'-O-methyladenosine-3'-phosphate
  modified_base 6: mod_base = OTHER; note = 2'-O-methyluridine-3'-phosphate
  modified_base 7: mod_base = OTHER; note = 2'-deoxy-2'-fluoroguanosine-3'-phosphate
  modified_base 8: mod_base = OTHER; note = 2'-O-methyladenosine-3'-phosphate
  modified_base 9: mod_base = OTHER; note = 2'-deoxy-2'-fluorouridine-3'-phosphate
  modified_base 10: mod_base = OTHER; note = 2'-deoxy-2'-fluorouridine-3'-phosphate
  modified_base 11: mod_base = OTHER; note = 2'-deoxy-2'-fluorouridine-3'-phosphate
  modified_base 12: mod_base = OTHER; note = 2'-O-methyluridine-3'-phosphate
  modified_base 13: mod_base = OTHER; note = 2'-O-methyluridine-3'-phosphate
  modified_base 14: mod_base = OTHER; note = 2'-O-methylcytidine-3'-phosphate
  modified_base 15: mod_base = OTHER; note = 2'-O-methyluridine-3'-phosphate
  modified_base 16: mod_base = OTHER; note = 2'-O-methyluridine-3'-phosphate
  modified_base 17: mod_base = OTHER; note = 2'-O-methyluridine-3'-phosphate
  modified_base 18: mod_base = OTHER; note = 2'-O-methyluridine-3'-phosphate
  modified_base 19: mod_base = OTHER; note = 2'-O-methyladenosine-3'-phosphate
  modified_base 20: mod_base = OTHER; note = 2'-O-methyladenosine-3'-phosphate
  modified_base 21: mod_base = OTHER; note = 2'-O-methyladenosine
agagatgatttttcttttaaa

SEQ ID NO: 4296 - RNA, 21 nt, synthetic construct
  source 1..21: mol_type = other RNA
  modified_base 1: mod_base = OTHER; note = 2'-O-methyladenosine-3'-phosphate
  modified_base 2: mod_base = OTHER; note = 2'-O-methylguanosine-3'-phosphate
  modified_base 3: mod_base = OTHER; note = 2'-O-methyladenosine-3'-phosphate
  modified_base 4: mod_base = OTHER; note = 2'-O-methylcytidine-3'-phosphate
  modified_base 5: mod_base = OTHER; note = 2'-O-methyluridine-3'-phosphate
  modified_base 6: mod_base = OTHER; note = 2'-O-methyladenosine-3'-phosphate
  modified_base 7: mod_base = OTHER; note = 2'-deoxy-2'-fluoroguanosine-3'-phosphate
  modified_base 8: mod_base = OTHER; note = 2'-O-methylcytidine-3'-phosphate
  modified_base 9: mod_base = OTHER; note = 2'-deoxy-2'-fluorouridine-3'-phosphate
  modified_base 10: mod_base = OTHER; note = 2'-deoxy-2'-fluoroguanosine-3'-phosphate
  modified_base 11: mod_base = OTHER; note = 2'-deoxy-2'-fluorouridine-3'-phosphate
  modified_base 12: mod_base = OTHER; note = 2'-O-methyluridine-3'-phosphate
  modified_base 13: mod_base = OTHER; note = 2'-O-methyladenosine-3'-phosphate
  modified_base 14: mod_base = OTHER; note = 2'-O-methyluridine-3'-phosphate
  modified_base 15: mod_base = OTHER; note = 2'-O-methyluridine-3'-phosphate
  modified_base 16: mod_base = OTHER; note = 2'-O-methyluridine-3'-phosphate
  modified_base 17: mod_base = OTHER; note = 2'-O-methylguanosine-3'-phosphate
  modified_base 18: mod_base = OTHER; note = 2'-O-methyluridine-3'-phosphate
  modified_base 19: mod_base = OTHER; note = 2'-O-methyladenosine-3'-phosphate
  modified_base 20: mod_base = OTHER; note = 2'-O-methyluridine-3'-phosphate
  modified_base 21: mod_base = OTHER; note = 2'-O-methyladenosine
agactagctgttatttgtata

SEQ ID NO: 4297 - RNA, 21 nt, synthetic construct
  source 1..21: mol_type = other RNA
  modified_base 1: mod_base = OTHER; note = 2'-O-methylguanosine-3'-phosphate
  modified_base 2: mod_base = OTHER; note = 2'-O-methylcytidine-3'-phosphate
  modified_base 3: mod_base = OTHER; note = 2'-O-methyluridine-3'-phosphate
  modified_base 4: mod_base = OTHER; note = 2'-O-methyladenosine-3'-phosphate
  modified_base 5: mod_base = OTHER; note = 2'-O-methyladenosine-3'-phosphate
  modified_base 6: mod_base = OTHER; note = 2'-O-methylcytidine-3'-phosphate
  modified_base 7: mod_base = OTHER; note = 2'-deoxy-2'-fluoroadenosine-3'-phosphate
  modified_base 8: mod_base = OTHER; note = 2'-O-methyluridine-3'-phosphate
  modified_base 9: mod_base = OTHER; note = 2'-deoxy-2'-fluoroadenosine-3'-phosphate
  modified_base 10: mod_base = OTHER; note = 2'-deoxy-2'-fluorouridine-3'-phosphate
  modified_base 11: mod_base = OTHER; note = 2'-deoxy-2'-fluoroadenosine-3'-phosphate
  modified_base 12: mod_base = OTHER; note = 2'-O-methyladenosine-3'-phosphate
  modified_base 13: mod_base = OTHER; note = 2'-O-methyladenosine-3'-phosphate
  modified_base 14: mod_base = OTHER; note = 2'-O-methylguanosine-3'-phosphate
  modified_base 15: mod_base = OTHER; note = 2'-O-methyladenosine-3'-phosphate
  modified_base 16: mod_base = OTHER; note = 2'-O-methyladenosine-3'-phosphate
  modified_base 17: mod_base = OTHER; note = 2'-O-methyluridine-3'-phosphate
  modified_base 18: mod_base = OTHER; note = 2'-O-methylguanosine-3'-phosphate
  modified_base 19: mod_base = OTHER; note = 2'-O-methyluridine-3'-phosphate
  modified_base 20: mod_base = OTHER; note = 2'-O-methylcytidine-3'-phosphate
  modified_base 21: mod_base = OTHER; note = 2'-O-methyladenosine
gctaacatataaagaatgtca

SEQ ID NO: 4298 - RNA, 21 nt, synthetic construct
  source 1..21: mol_type = other RNA
  modified_base 1: mod_base = OTHER; note = 2'-O-methyladenosine-3'-phosphate
  modified_base 2: mod_base = OTHER; note = 2'-O-methyladenosine-3'-phosphate
  modified_base 3: mod_base = OTHER; note = 2'-O-methylguanosine-3'-phosphate
  modified_base 4: mod_base = OTHER; note = 2'-O-methyladenosine-3'-phosphate
  modified_base 5: mod_base = OTHER; note = 2'-O-methyladenosine-3'-phosphate
  modified_base 6: mod_base = OTHER; note = 2'-O-methyluridine-3'-phosphate
  modified_base 7: mod_base = OTHER; note = 2'-deoxy-2'-fluoroguanosine-3'-phosphate
  modified_base 8: mod_base = OTHER; note = 2'-O-methyluridine-3'-phosphate
  modified_base 9: mod_base = OTHER; note = 2'-deoxy-2'-fluorocytidine-3'-phosphate
  modified_base 10: mod_base = OTHER; note = 2'-deoxy-2'-fluorouridine-3'-phosphate
  modified_base 11: mod_base = OTHER; note = 2'-deoxy-2'-fluoroadenosine-3'-phosphate
  modified_base 12: mod_base = OTHER; note = 2'-O-methylcytidine-3'-phosphate
  modified_base 13: mod_base = OTHER; note = 2'-O-methyluridine-3'-phosphate
  modified_base 14: mod_base = OTHER; note = 2'-O-methyluridine-3'-phosphate
  modified_base 15: mod_base = OTHER; note = 2'-O-methyluridine-3'-phosphate
  modified_base 16: mod_base = OTHER; note = 2'-O-methyluridine-3'-phosphate
  modified_base 17: mod_base = OTHER; note = 2'-O-methylguanosine-3'-phosphate
  modified_base 18: mod_base = OTHER; note = 2'-O-methylcytidine-3'-phosphate
  modified_base 19: mod_base = OTHER; note = 2'-O-methyluridine-3'-phosphate
  modified_base 20: mod_base = OTHER; note = 2'-O-methyluridine-3'-phosphate
  modified_base 21: mod_base = OTHER; note = 2'-O-methyladenosine
aagaatgtctacttttgctta

SEQ ID NO: 4299 - RNA, 21 nt, synthetic construct
  source 1..21: mol_type = other RNA
  modified_base 1: mod_base = OTHER; note = 2'-O-methyladenosine-3'-phosphate
  modified_base 2: mod_base = OTHER; note = 2'-O-methyladenosine-3'-phosphate
  modified_base 3: mod_base = OTHER; note = 2'-O-methyluridine-3'-phosphate
  modified_base 4: mod_base = OTHER; note = 2'-O-methylguanosine-3'-phosphate
  modified_base 5: mod_base = OTHER; note = 2'-O-methyluridine-3'-phosphate
  modified_base 6: mod_base = OTHER; note = 2'-O-methylcytidine-3'-phosphate
  modified_base 7: mod_base = OTHER; note = 2'-deoxy-2'-fluorouridine-3'-phosphate
  modified_base 8: mod_base = OTHER; note = 2'-O-methyladenosine-3'-phosphate
  modified_base 9: mod_base = OTHER; note = 2'-deoxy-2'-fluorocytidine-3'-phosphate
  modified_base 10: mod_base = OTHER; note = 2'-deoxy-2'-fluorouridine-3'-phosphate
  modified_base 11: mod_base = OTHER; note = 2'-deoxy-2'-fluorouridine-3'-phosphate
  modified_base 12: mod_base = OTHER; note = 2'-O-methyluridine-3'-phosphate
  modified_base 13: mod_base = OTHER; note = 2'-O-methyluridine-3'-phosphate
  modified_base 14: mod_base = OTHER; note = 2'-O-methylguanosine-3'-phosphate
  modified_base 15: mod_base = OTHER; note = 2'-O-methylcytidine-3'-phosphate
  modified_base 16: mod_base = OTHER; note = 2'-O-methyluridine-3'-phosphate
  modified_base 17: mod_base = OTHER; note = 2'-O-methyluridine-3'-phosphate
  modified_base 18: mod_base = OTHER; note = 2'-O-methyluridine-3'-phosphate
  modified_base 19: mod_base = OTHER; note = 2'-O-methyladenosine-3'-phosphate
  modified_base 20: mod_base = OTHER; note = 2'-O-methyladenosine-3'-phosphate
  modified_base 21: mod_base = OTHER; note = 2'-O-methyladenosine
aatgtctacttttgctttaaa

SEQ ID NO: 4300 - RNA, 21 nt, synthetic construct
  source 1..21: mol_type = other RNA
  modified_base 1: mod_base = OTHER; note = 2'-O-methylcytidine-3'-phosphate
  modified_base 2: mod_base = OTHER; note = 2'-O-methyluridine-3'-phosphate
  modified_base 3: mod_base = OTHER; note = 2'-O-methyladenosine-3'-phosphate
  modified_base 4: mod_base = OTHER; note = 2'-O-methyladenosine-3'-phosphate
  modified_base 5: mod_base = OTHER; note = 2'-O-methylguanosine-3'-phosphate
  modified_base 6: mod_base = OTHER; note = 2'-O-methylcytidine-3'-phosphate
  modified_base 7: mod_base = OTHER; note = 2'-deoxy-2'-fluorocytidine-3'-phosphate
  modified_base 8: mod_base = OTHER; note = 2'-O-methyladenosine-3'-phosphate
  modified_base 9: mod_base = OTHER; note = 2'-deoxy-2'-fluorouridine-3'-phosphate
  modified_base 10: mod_base = OTHER; note = 2'-deoxy-2'-fluorouridine-3'-phosphate
  modified_base 11: mod_base = OTHER; note = 2'-deoxy-2'-fluoroadenosine-3'-phosphate
  modified_base 12: mod_base = OTHER; note = 2'-O-methyluridine-3'-phosphate
  modified_base 13: mod_base = OTHER; note = 2'-O-methylguanosine-3'-phosphate
  modified_base 14: mod_base = OTHER; note = 2'-O-methylcytidine-3'-phosphate
  modified_base 15: mod_base = OTHER; note = 2'-O-methyluridine-3'-phosphate
  modified_base 16: mod_base = OTHER; note = 2'-O-methyladenosine-3'-phosphate
  modified_base 17: mod_base = OTHER; note = 2'-O-methyluridine-3'-phosphate
  modified_base 18: mod_base = OTHER; note = 2'-O-methyluridine-3'-phosphate
  modified_base 19: mod_base = OTHER; note = 2'-O-methyladenosine-3'-phosphate
  modified_base 20: mod_base = OTHER; note = 2'-O-methylguanosine-3'-phosphate
  modified_base 21: mod_base = OTHER; note = 2'-O-methyladenosine
ctaagccattatgctattaga

SEQ ID NO: 4301 - RNA, 21 nt, synthetic construct
  source 1..21: mol_type = other RNA
  modified_base 1: mod_base = OTHER; note = 2'-O-methyluridine-3'-phosphate
  modified_base 2: mod_base = OTHER; note = 2'-O-methyluridine-3'-phosphate
  modified_base 3: mod_base = OTHER; note = 2'-O-methyladenosine-3'-phosphate
  modified_base 4: mod_base = OTHER; note = 2'-O-methylguanosine-3'-phosphate
  modified_base 5: mod_base = OTHER; note = 2'-O-methylguanosine-3'-phosphate
  modified_base 6: mod_base = OTHER; note = 2'-O-methyluridine-3'-phosphate
  modified_base 7: mod_base = OTHER; note = 2'-deoxy-2'-fluoroadenosine-3'-phosphate
  modified_base 8: mod_base = OTHER; note = 2'-O-methyladenosine-3'-phosphate
  modified_base 9: mod_base = OTHER; note = 2'-deoxy-2'-fluorocytidine-3'-phosphate
  modified_base 10: mod_base = OTHER; note = 2'-deoxy-2'-fluoroadenosine-3'-phosphate
  modified_base 11: mod_base = OTHER; note = 2'-deoxy-2'-fluoroadenosine-3'-phosphate
  modified_base 12: mod_base = OTHER; note = 2'-O-methyluridine-3'-phosphate
  modified_base 13: mod_base = OTHER; note = 2'-O-methylcytidine-3'-phosphate
  modified_base 14: mod_base = OTHER; note = 2'-O-methylcytidine-3'-phosphate
  modified_base 15: mod_base = OTHER; note = 2'-O-methylcytidine-3'-phosphate
  modified_base 16: mod_base = OTHER; note = 2'-O-methyluridine-3'-phosphate
  modified_base 17: mod_base = OTHER; note = 2'-O-methyladenosine-3'-phosphate
  modified_base 18: mod_base = OTHER; note = 2'-O-methyluridine-3'-phosphate
  modified_base 19: mod_base = OTHER; note = 2'-O-methyluridine-3'-phosphate
  modified_base 20: mod_base = OTHER; note = 2'-O-methyluridine-3'-phosphate
  modified_base 21: mod_base = OTHER; note = 2'-O-methyladenosine
ttaggtaacaatccctattta

SEQ ID NO: 4302 - RNA, 21 nt, synthetic construct
  source 1..21: mol_type = other RNA
  modified_base 1: mod_base = OTHER; note = 2'-O-methyluridine-3'-phosphate
  modified_base 2: mod_base = OTHER; note = 2'-O-methyladenosine-3'-phosphate
  modified_base 3: mod_base = OTHER; note = 2'-O-methylguanosine-3'-phosphate
  modified_base 4: mod_base = OTHER; note = 2'-O-methylguanosine-3'-phosphate
  modified_base 5: mod_base = OTHER; note = 2'-O-methyluridine-3'-phosphate
  modified_base 6: mod_base = OTHER; note = 2'-O-methyladenosine-3'-phosphate
  modified_base 7: mod_base = OTHER; note = 2'-deoxy-2'-fluoroadenosine-3'-phosphate
  modified_base 8: mod_base = OTHER; note = 2'-O-methylcytidine-3'-phosphate
  modified_base 9: mod_base = OTHER; note = 2'-deoxy-2'-fluoroadenosine-3'-phosphate
  modified_base 10: mod_base = OTHER; note = 2'-deoxy-2'-fluoroadenosine-3'-phosphate
  modified_base 11: mod_base = OTHER; note = 2'-deoxy-2'-fluorouridine-3'-phosphate
  modified_base 12: mod_base = OTHER; note = 2'-O-methylcytidine-3'-phosphate
  modified_base 13: mod_base = OTHER; note = 2'-O-methylcytidine-3'-phosphate
  modified_base 14: mod_base = OTHER; note = 2'-O-methylcytidine-3'-phosphate
  modified_base 15: mod_base = OTHER; note = 2'-O-methyluridine-3'-phosphate
  modified_base 16: mod_base = OTHER; note = 2'-O-methyladenosine-3'-phosphate
  modified_base 17: mod_base = OTHER; note = 2'-O-methyluridine-3'-phosphate
  modified_base 18: mod_base = OTHER; note = 2'-O-methyluridine-3'-phosphate
  modified_base 19: mod_base = OTHER; note = 2'-O-methyluridine-3'-phosphate
  modified_base 20: mod_base = OTHER; note = 2'-O-methyluridine-3'-phosphate
  modified_base 21: mod_base = OTHER; note = 2'-O-methyladenosine
taggtaacaatccctatttta

SEQ ID NO: 4303 - RNA, 21 nt, synthetic construct
  source 1..21: mol_type = other RNA
  modified_base 1: mod_base = OTHER; note = 2'-O-methyladenosine-3'-phosphate
  modified_base 2: mod_base = OTHER; note = 2'-O-methylguanosine-3'-phosphate
  modified_base 3: mod_base = OTHER; note = 2'-O-methylguanosine-3'-phosphate
  modified_base 4: mod_base = OTHER; note = 2'-O-methyluridine-3'-phosphate
  modified_base 5: mod_base = OTHER; note = 2'-O-methyladenosine-3'-phosphate
  modified_base 6: mod_base = OTHER; note = 2'-O-methyladenosine-3'-phosphate
  modified_base 7: mod_base = OTHER; note = 2'-deoxy-2'-fluorocytidine-3'-phosphate
  modified_base 8: mod_base = OTHER; note = 2'-O-methyladenosine-3'-phosphate
  modified_base 9: mod_base = OTHER; note = 2'-deoxy-2'-fluoroadenosine-3'-phosphate
  modified_base 10: mod_base = OTHER; note = 2'-deoxy-2'-fluorouridine-3'-phosphate
  modified_base 11: mod_base = OTHER; note = 2'-deoxy-2'-fluorocytidine-3'-phosphate
  modified_base 12: mod_base = OTHER; note = 2'-O-methylcytidine-3'-phosphate
  modified_base 13: mod_base = OTHER; note = 2'-O-methylcytidine-3'-phosphate
  modified_base 14: mod_base = OTHER; note = 2'-O-methyluridine-3'-phosphate
  modified_base 15: mod_base = OTHER; note = 2'-O-methyladenosine-3'-phosphate
  modified_base 16: mod_base = OTHER; note = 2'-O-methyluridine-3'-phosphate
  modified_base 17: mod_base = OTHER; note = 2'-O-methyluridine-3'-phosphate
  modified_base 18: mod_base = OTHER; note = 2'-O-methyluridine-3'-phosphate
  modified_base 19: mod_base = OTHER; note = 2'-O-methyluridine-3'-phosphate
  modified_base 20: mod_base = OTHER; note = 2'-O-methyladenosine-3'-phosphate
  modified_base 21: mod_base = OTHER; note = 2'-O-methyladenosine
aggtaacaatccctattttaa

SEQ ID NO: 4304 - RNA, 21 nt, synthetic construct
  source 1..21: mol_type = other RNA
  modified_base 1: mod_base = OTHER; note = 2'-O-methylguanosine-3'-phosphate
  modified_base 2: mod_base = OTHER; note = 2'-O-methylguanosine-3'-phosphate
  modified_base 3: mod_base = OTHER; note = 2'-O-methyluridine-3'-phosphate
  modified_base 4: mod_base = OTHER; note = 2'-O-methyladenosine-3'-phosphate
  modified_base 5: mod_base = OTHER; note = 2'-O-methyladenosine-3'-phosphate
  modified_base 6: mod_base = OTHER; note = 2'-O-methylcytidine-3'-phosphate
  modified_base 7: mod_base = OTHER; note = 2'-deoxy-2'-fluoroadenosine-3'-phosphate
  modified_base 8: mod_base = OTHER; note = 2'-O-methyladenosine-3'-phosphate
  modified_base 9: mod_base = OTHER; note = 2'-deoxy-2'-fluorouridine-3'-phosphate
  modified_base 10: mod_base = OTHER; note = 2'-deoxy-2'-fluorocytidine-3'-phosphate
  modified_base 11: mod_base = OTHER; note = 2'-deoxy-2'-fluorocytidine-3'-phosphate
  modified_base 12: mod_base = OTHER; note = 2'-O-methylcytidine-3'-phosphate
  modified_base 13: mod_base = OTHER; note = 2'-O-methyluridine-3'-phosphate
  modified_base 14: mod_base = OTHER; note = 2'-O-methyladenosine-3'-phosphate
  modified_base 15: mod_base = OTHER; note = 2'-O-methyluridine-3'-phosphate
  modified_base 16: mod_base = OTHER; note = 2'-O-methyluridine-3'-phosphate
  modified_base 17: mod_base = OTHER; note = 2'-O-methyluridine-3'-phosphate
  modified_base 18: mod_base = OTHER; note = 2'-O-methyluridine-3'-phosphate
  modified_base 19: mod_base = OTHER; note = 2'-O-methyladenosine-3'-phosphate
  modified_base 20: mod_base = OTHER; note = 2'-O-methyladenosine-3'-phosphate
  modified_base 21: mod_base = OTHER; note = 2'-O-methyladenosine
ggtaacaatccctattttaaa

SEQ ID NO: 4305 - RNA, 21 nt, synthetic construct
  source 1..21: mol_type = other RNA
  modified_base 1: mod_base = OTHER; note = 2'-O-methylguanosine-3'-phosphate
  modified_base 2: mod_base = OTHER; note = 2'-O-methyluridine-3'-phosphate
  modified_base 3: mod_base = OTHER; note = 2'-O-methyladenosine-3'-phosphate
  modified_base 4: mod_base = OTHER; note = 2'-O-methyladenosine-3'-phosphate
  modified_base 5: mod_base = OTHER; note = 2'-O-methylcytidine-3'-phosphate
  modified_base 6: mod_base = OTHER; note = 2'-O-methyladenosine-3'-phosphate
  modified_base 7: mod_base = OTHER; note = 2'-deoxy-2'-fluoroadenosine-3'-phosphate
  modified_base 8: mod_base = OTHER; note = 2'-O-methyluridine-3'-phosphate
  modified_base 9: mod_base = OTHER; note = 2'-deoxy-2'-fluorocytidine-3'-phosphate
  modified_base 10: mod_base = OTHER; note = 2'-deoxy-2'-fluorocytidine-3'-phosphate
  modified_base 11: mod_base = OTHER; note = 2'-deoxy-2'-fluorocytidine-3'-phosphate
  modified_base 12: mod_base = OTHER; note = 2'-O-methyluridine-3'-phosphate
  modified_base 13: mod_base = OTHER; note = 2'-O-methyladenosine-3'-phosphate
  modified_base 14: mod_base = OTHER; note = 2'-O-methyluridine-3'-phosphate
  modified_base 15: mod_base = OTHER; note = 2'-O-methyluridine-3'-phosphate
  modified_base 16: mod_base = OTHER; note = 2'-O-methyluridine-3'-phosphate
  modified_base 17: mod_base = OTHER; note = 2'-O-methyluridine-3'-phosphate
  modified_base 18: mod_base = OTHER; note = 2'-O-methyladenosine-3'-phosphate
  modified_base 19: mod_base = OTHER; note = 2'-O-methyladenosine-3'-phosphate
  modified_base 20: mod_base = OTHER; note = 2'-O-methyladenosine-3'-phosphate
  modified_base 21: mod_base = OTHER; note = 2'-O-methyladenosine
gtaacaatccctattttaaaa

SEQ ID NO: 4306 - RNA, 21 nt, synthetic construct
  source 1..21: mol_type = other RNA
  modified_base 1: mod_base = OTHER; note = 2'-O-methyluridine-3'-phosphate
  modified_base 2: mod_base = OTHER; note = 2'-O-methyladenosine-3'-phosphate
  modified_base 3: mod_base = OTHER; note = 2'-O-methyladenosine-3'-phosphate
  modified_base 4: mod_base = OTHER; note = 2'-O-methylcytidine-3'-phosphate
  modified_base 5: mod_base = OTHER; note = 2'-O-methyladenosine-3'-phosphate
  modified_base 6: mod_base = OTHER; note = 2'-O-methyladenosine-3'-phosphate
  modified_base 7: mod_base = OTHER; note = 2'-deoxy-2'-fluorouridine-3'-phosphate
  modified_base 8: mod_base = OTHER; note = 2'-O-methylcytidine-3'-phosphate
  modified_base 9: mod_base = OTHER; note = 2'-deoxy-2'-fluorocytidine-3'-phosphate
  modified_base 10: mod_base = OTHER; note = 2'-deoxy-2'-fluorocytidine-3'-phosphate
  modified_base 11: mod_base = OTHER; note = 2'-deoxy-2'-fluorouridine-3'-phosphate
  modified_base 12: mod_base = OTHER; note = 2'-O-methyladenosine-3'-phosphate
  modified_base 13: mod_base = OTHER; note = 2'-O-methyluridine-3'-phosphate
  modified_base 14: mod_base = OTHER; note = 2'-O-methyluridine-3'-phosphate
  modified_base 15: mod_base = OTHER; note = 2'-O-methyluridine-3'-phosphate
  modified_base 16: mod_base = OTHER; note = 2'-O-methyluridine-3'-phosphate
  modified_base 17: mod_base = OTHER; note = 2'-O-methyladenosine-3'-phosphate
  modified_base 18: mod_base = OTHER; note = 2'-O-methyladenosine-3'-phosphate
  modified_base 19: mod_base = OTHER; note = 2'-O-methyladenosine-3'-phosphate
  modified_base 20: mod_base = OTHER; note = 2'-O-methyladenosine-3'-phosphate
  modified_base 21: mod_base = OTHER; note = 2'-O-methyladenosine
taacaatccctattttaaaaa

SEQ ID NO: 4307 - RNA, 21 nt, synthetic construct
  source 1..21: mol_type = other RNA
  modified_base 1: mod_base = OTHER; note = 2'-O-methyladenosine-3'-phosphate
  modified_base 2: mod_base = OTHER; note = 2'-O-methyladenosine-3'-phosphate
  modified_base 3: mod_base = OTHER; note = 2'-O-methyluridine-3'-phosphate
  modified_base 4: mod_base = OTHER; note = 2'-O-methylcytidine-3'-phosphate
  modified_base 5: mod_base = OTHER; note = 2'-O-methylcytidine-3'-phosphate
  modified_base 6: mod_base = OTHER; note = 2'-O-methylcytidine-3'-phosphate
  modified_base 7: mod_base = OTHER; note = 2'-deoxy-2'-fluorouridine-3'-phosphate
  modified_base 8: mod_base = OTHER; note = 2'-O-methyladenosine-3'-phosphate
  modified_base 9: mod_base = OTHER; note = 2'-deoxy-2'-fluorouridine-3'-phosphate
  modified_base 10: mod_base = OTHER; note = 2'-deoxy-2'-fluorouridine-3'-phosphate
  modified_base 11: mod_base = OTHER; note = 2'-deoxy-2'-fluorouridine-3'-phosphate
  modified_base 12: mod_base = OTHER; note = 2'-O-methyluridine-3'-phosphate
  modified_base 13: mod_base = OTHER; note = 2'-O-methyladenosine-3'-phosphate
  modified_base 14: mod_base = OTHER; note = 2'-O-methyladenosine-3'-phosphate
  modified_base 15: mod_base = OTHER; note = 2'-O-methyladenosine-3'-phosphate
  modified_base 16: mod_base = OTHER; note = 2'-O-methyladenosine-3'-phosphate
  modified_base 17: mod_base = OTHER; note = 2'-O-methyluridine-3'-phosphate
  modified_base 18: mod_base = OTHER; note = 2'-O-methyluridine-3'-phosphate
  modified_base 19: mod_base = OTHER; note = 2'-O-methylcytidine-3'-phosphate
  modified_base 20: mod_base = OTHER; note = 2'-O-methylcytidine-3'-phosphate
  modified_base 21: mod_base = OTHER; note = 2'-O-methyladenosine
aatccctattttaaaattcca

SEQ ID NO: 4308 - RNA, 21 nt, synthetic construct
  source 1..21: mol_type = other RNA
  modified_base 1: mod_base = OTHER; note = 2'-O-methylcytidine-3'-phosphate
  modified_base 2: mod_base = OTHER; note = 2'-O-methyluridine-3'-phosphate
  modified_base 3: mod_base = OTHER; note = 2'-O-methyladenosine-3'-phosphate
  modified_base 4: mod_base = OTHER; note = 2'-O-methyladenosine-3'-phosphate
  modified_base 5: mod_base = OTHER; note = 2'-O-methylcytidine-3'-phosphate
  modified_base 6: mod_base = OTHER; note = 2'-O-methyladenosine-3'-phosphate
  modified_base 7: mod_base = OTHER; note = 2'-deoxy-2'-fluoroadenosine-3'-phosphate
  modified_base 8: mod_base = OTHER; note = 2'-O-methyluridine-3'-phosphate
  modified_base 9: mod_base = OTHER; note = 2'-deoxy-2'-fluoroadenosine-3'-phosphate
  modified_base 10: mod_base = OTHER; note = 2'-deoxy-2'-fluoroadenosine-3'-phosphate
  modified_base 11: mod_base = OTHER; note = 2'-deoxy-2'-fluorouridine-3'-phosphate
  modified_base 12: mod_base = OTHER; note = 2'-O-methyladenosine-3'-phosphate
  modified_base 13: mod_base = OTHER; note = 2'-O-methylguanosine-3'-phosphate
  modified_base 14: mod_base = OTHER; note = 2'-O-methyladenosine-3'-phosphate
  modified_base 15: mod_base = OTHER; note = 2'-O-methyladenosine-3'-phosphate
  modified_base 16: mod_base = OTHER; note = 2'-O-methylcytidine-3'-phosphate
  modified_base 17: mod_base = OTHER; note = 2'-O-methyluridine-3'-phosphate
  modified_base 18: mod_base = OTHER; note = 2'-O-methylguanosine-3'-phosphate
  modified_base 19: mod_base = OTHER; note = 2'-O-methylcytidine-3'-phosphate
  modified_base 20: mod_base = OTHER; note = 2'-O-methylcytidine-3'-phosphate
  modified_base 21: mod_base = OTHER; note = 2'-O-methyladenosine
ctaacaataatagaactgcca

SEQ ID NO: 4309 - RNA, 21 nt, synthetic construct
  source 1..21: mol_type = other RNA
  modified_base 1: mod_base = OTHER; note = 2'-O-methyluridine-3'-phosphate
  modified_base 2: mod_base = OTHER; note = 2'-O-methyladenosine-3'-phosphate
  modified_base 3: mod_base = OTHER; note = 2'-O-methyladenosine-3'-phosphate
  modified_base 4: mod_base = OTHER; note = 2'-O-methylcytidine-3'-phosphate
  modified_base 5: mod_base = OTHER; note = 2'-O-methyladenosine-3'-phosphate
  modified_base 6: mod_base = OTHER; note = 2'-O-methyladenosine-3'-phosphate
  modified_base 7: mod_base = OTHER; note = 2'-deoxy-2'-fluorouridine-3'-phosphate
  modified_base 8: mod_base = OTHER; note = 2'-O-methyladenosine-3'-phosphate
  modified_base 9: mod_base = OTHER; note = 2'-deoxy-2'-fluoroadenosine-3'-phosphate
  modified_base 10: mod_base = OTHER; note = 2'-deoxy-2'-fluorouridine-3'-phosphate
  modified_base 11: mod_base = OTHER; note = 2'-deoxy-2'-fluoroadenosine-3'-phosphate
  modified_base 12: mod_base = OTHER; note = 2'-O-methylguanosine-3'-phosphate
  modified_base 13: mod_base = OTHER; note = 2'-O-methyladenosine-3'-phosphate
  modified_base 14: mod_base = OTHER; note = 2'-O-methyladenosine-3'-phosphate
  modified_base 15: mod_base = OTHER; note = 2'-O-methylcytidine-3'-phosphate
  modified_base 16: mod_base = OTHER; note = 2'-O-methyluridine-3'-phosphate
  modified_base 17: mod_base = OTHER; note = 2'-O-methylguanosine-3'-phosphate
  modified_base 18: mod_base = OTHER; note = 2'-O-methylcytidine-3'-phosphate
  modified_base 19: mod_base = OTHER; note = 2'-O-methylcytidine-3'-phosphate
  modified_base 20: mod_base = OTHER; note = 2'-O-methyladenosine-3'-phosphate
  modified_base 21: mod_base = OTHER; note = 2'-O-methyladenosine
taacaataatagaactgccaa

SEQ ID NO: 4310 - RNA, 21 nt, synthetic construct
  source 1..21: mol_type = other RNA
  modified_base 1: mod_base = OTHER; note = 2'-O-methyladenosine-3'-phosphate
  modified_base 2: mod_base = OTHER; note = 2'-O-methylcytidine-3'-phosphate
  modified_base 3: mod_base = OTHER; note = 2'-O-methyladenosine-3'-phosphate
  modified_base 4: mod_base = OTHER; note = 2'-O-methyladenosine-3'-phosphate
  modified_base 5: mod_base = OTHER; note = 2'-O-methyluridine-3'-phosphate
  modified_base 6: mod_base = OTHER; note = 2'-O-methyladenosine-3'-phosphate
  modified_base 7: mod_base = OTHER; note = 2'-deoxy-2'-fluoroadenosine-3'-phosphate
  modified_base 8: mod_base = OTHER; note = 2'-O-methyluridine-3'-phosphate
  modified_base 9: mod_base = OTHER; note = 2'-deoxy-2'-fluoroadenosine-3'-phosphate
  modified_base 10: mod_base = OTHER; note = 2'-deoxy-2'-fluoroguanosine-3'-phosphate
  modified_base 11: mod_base = OTHER; note = 2'-deoxy-2'-fluoroadenosine-3'-phosphate
  modified_base 12: mod_base = OTHER; note = 2'-O-methyladenosine-3'-phosphate
  modified_base 13: mod_base = OTHER; note = 2'-O-methylcytidine-3'-phosphate
  modified_base 14: mod_base = OTHER; note = 2'-O-methyluridine-3'-phosphate
  modified_base 15: mod_base = OTHER; note = 2'-O-methylguanosine-3'-phosphate
  modified_base 16: mod_base = OTHER; note = 2'-O-methylcytidine-3'-phosphate
  modified_base 17: mod_base = OTHER; note = 2'-O-methylcytidine-3'-phosphate
  modified_base 18: mod_base = OTHER; note = 2'-O-methyladenosine-3'-phosphate
  modified_base 19: mod_base = OTHER; note = 2'-O-methylguanosine-3'-phosphate
  modified_base 20: mod_base = OTHER; note = 2'-O-methylcytidine-3'-phosphate
  modified_base 21: mod_base = OTHER; note = 2'-O-methyladenosine
acaataatagaactgccagca

SEQ ID NO: 4311 - RNA, 21 nt, synthetic construct
  source 1..21: mol_type = other RNA
  modified_base 1: mod_base = OTHER; note = 2'-O-methyladenosine-3'-phosphate
  modified_base 2: mod_base = OTHER; note = 2'-O-methyladenosine-3'-phosphate
  modified_base 3: mod_base = OTHER; note = 2'-O-methylcytidine-3'-phosphate
  modified_base 4: mod_base = OTHER; note = 2'-O-methyluridine-3'-phosphate
  modified_base 5: mod_base = OTHER; note = 2'-O-methylguanosine-3'-phosphate
  modified_base 6: mod_base = OTHER; note = 2'-O-methylcytidine-3'-phosphate
  modified_base 7: mod_base = OTHER; note = 2'-deoxy-2'-fluorocytidine-3'-phosphate
  modified_base 8: mod_base = OTHER; note = 2'-O-methyladenosine-3'-phosphate
  modified_base 9: mod_base = OTHER; note = 2'-deoxy-2'-fluoroguanosine-3'-phosphate
  modified_base 10: mod_base = OTHER; note = 2'-deoxy-2'-fluorocytidine-3'-phosphate
  modified_base 11: mod_base = OTHER; note = 2'-deoxy-2'-fluoroadenosine-3'-phosphate
  modified_base 12: mod_base = OTHER; note = 2'-O-methyluridine-3'-phosphate
  modified_base 13: mod_base = OTHER; note = 2'-O-methyladenosine-3'-phosphate
  modified_base 14: mod_base = OTHER; note = 2'-O-methylcytidine-3'-phosphate
  modified_base 15: mod_base = OTHER; note = 2'-O-methyluridine-3'-phosphate
  modified_base 16: mod_base = OTHER; note = 2'-O-methyluridine-3'-phosphate
  modified_base 17: mod_base = OTHER; note = 2'-O-methyluridine-3'-phosphate
  modified_base 18: mod_base = OTHER; note = 2'-O-methyluridine-3'-phosphate
  modified_base 19: mod_base = OTHER; note = 2'-O-methylcytidine-3'-phosphate
  modified_base 20: mod_base = OTHER; note = 2'-O-methyluridine-3'-phosphate
  modified_base 21: mod_base = OTHER; note = 2'-O-methyladenosine
aactgccagcatacttttcta

SEQ ID NO: 4312 - RNA, 21 nt, synthetic construct
  source 1..21: mol_type = other RNA
  modified_base 1: mod_base = OTHER; note = 2'-O-methyladenosine-3'-phosphate
  modified_base 2: mod_base = OTHER; note = 2'-O-methylcytidine-3'-phosphate
  modified_base 3: mod_base = OTHER; note = 2'-O-methyluridine-3'-phosphate
  modified_base 4: mod_base = OTHER; note = 2'-O-methylguanosine-3'-phosphate
  modified_base 5: mod_base = OTHER; note = 2'-O-methylcytidine-3'-phosphate
  modified_base 6: mod_base = OTHER; note = 2'-O-methylcytidine-3'-phosphate
  modified_base 7: mod_base = OTHER; note = 2'-deoxy-2'-fluoroadenosine-3'-phosphate
  modified_base 8: mod_base = OTHER; note = 2'-O-methylguanosine-3'-phosphate
  modified_base 9: mod_base = OTHER; note = 2'-deoxy-2'-fluorocytidine-3'-phosphate
  modified_base 10: mod_base = OTHER; note = 2'-deoxy-2'-fluoroadenosine-3'-phosphate
  modified_base 11: mod_base = OTHER; note = 2'-deoxy-2'-fluorouridine-3'-phosphate
  modified_base 12: mod_base = OTHER; note = 2'-O-methyladenosine-3'-phosphate
  modified_base 13: mod_base = OTHER; note = 2'-O-methylcytidine-3'-phosphate
  modified_base 14: mod_base = OTHER; note = 2'-O-methyluridine-3'-phosphate
  modified_base 15: mod_base = OTHER; note = 2'-O-methyluridine-3'-phosphate
  modified_base 16: mod_base = OTHER; note = 2'-O-methyluridine-3'-phosphate
  modified_base 17: mod_base = OTHER; note = 2'-O-methyluridine-3'-phosphate
  modified_base 18: mod_base = OTHER; note = 2'-O-methylcytidine-3'-phosphate
  modified_base 19: mod_base = OTHER; note = 2'-O-methyluridine-3'-phosphate
  modified_base 20: mod_base = OTHER; note = 2'-O-methylcytidine-3'-phosphate
  modified_base 21: mod_base = OTHER; note = 2'-O-methyladenosine
actgccagcatacttttctca

SEQ ID NO: 4313 - RNA, 21 nt, synthetic construct
  source 1..21: mol_type = other RNA
  modified_base 1: mod_base = OTHER; note = 2'-O-methylcytidine-3'-phosphate
  modified_base 2: mod_base = OTHER; note = 2'-O-methyluridine-3'-phosphate
  modified_base 3: mod_base = OTHER; note = 2'-O-methylguanosine-3'-phosphate
  modified_base 4: mod_base = OTHER; note = 2'-O-methylcytidine-3'-phosphate
  modified_base 5: mod_base = OTHER; note = 2'-O-methylcytidine-3'-phosphate
  modified_base 6: mod_base = OTHER; note = 2'-O-methyladenosine-3'-phosphate
  modified_base 7: mod_base = OTHER; note = 2'-deoxy-2'-fluoroguanosine-3'-phosphate
  modified_base 8: mod_base = OTHER; note = 2'-O-methylcytidine-3'-phosphate
  modified_base 9: mod_base = OTHER; note = 2'-deoxy-2'-fluoroadenosine-3'-phosphate
  modified_base 10: mod_base = OTHER; note = 2'-deoxy-2'-fluorouridine-3'-phosphate
  modified_base 11: mod_base = OTHER; note = 2'-deoxy-2'-fluoroadenosine-3'-phosphate
  modified_base 12: mod_base = OTHER; note = 2'-O-methylcytidine-3'-phosphate
  modified_base 13: mod_base = OTHER; note = 2'-O-methyluridine-3'-phosphate
  modified_base 14: mod_base = OTHER; note = 2'-O-methyluridine-3'-phosphate
  modified_base 15: mod_base = OTHER; note = 2'-O-methyluridine-3'-phosphate
  modified_base 16: mod_base = OTHER; note = 2'-O-methyluridine-3'-phosphate
  modified_base 17: mod_base = OTHER; note = 2'-O-methylcytidine-3'-phosphate
  modified_base 18: mod_base = OTHER; note = 2'-O-methyluridine-3'-phosphate
  modified_base 19: mod_base = OTHER; note = 2'-O-methylcytidine-3'-phosphate
  modified_base 20: mod_base = OTHER; note = 2'-O-methyluridine-3'-phosphate
  modified_base 21: mod_base = OTHER; note = 2'-O-methyladenosine
ctgccagcatacttttctcta

SEQ ID NO: 4314 - RNA, 21 nt, synthetic construct
  source 1..21: mol_type = other RNA
  modified_base 1: mod_base = OTHER; note = 2'-O-methyluridine-3'-phosphate
  modified_base 2: mod_base = OTHER; note = 2'-O-methylguanosine-3'-phosphate
  modified_base 3: mod_base = OTHER; note = 2'-O-methylcytidine-3'-phosphate
  modified_base 4: mod_base = OTHER; note = 2'-O-methylcytidine-3'-phosphate
  modified_base 5: mod_base = OTHER; note = 2'-O-methyladenosine-3'-phosphate
  modified_base 6: mod_base = OTHER; note = 2'-O-methylguanosine-3'-phosphate
  modified_base 7: mod_base = OTHER; note = 2'-deoxy-2'-fluorocytidine-3'-phosphate
  modified_base 8: mod_base = OTHER; note = 2'-O-methyladenosine-3'-phosphate
  modified_base 9: mod_base = OTHER; note = 2'-deoxy-2'-fluorouridine-3'-phosphate
  modified_base 10: mod_base = OTHER; note = 2'-deoxy-2'-fluoroadenosine-3'-phosphate
  modified_base 11: mod_base = OTHER; note = 2'-deoxy-2'-fluorocytidine-3'-phosphate
  modified_base 12: mod_base = OTHER; note = 2'-O-methyluridine-3'-phosphate
  modified_base 13: mod_base = OTHER; note = 2'-O-methyluridine-3'-phosphate
  modified_base 14: mod_base = OTHER; note = 2'-O-methyluridine-3'-phosphate
  modified_base 15: mod_base = OTHER; note = 2'-O-methyluridine-3'-phosphate
  modified_base 16: mod_base = OTHER; note = 2'-O-methylcytidine-3'-phosphate
  modified_base 17: mod_base = OTHER; note = 2'-O-methyluridine-3'-phosphate
  modified_base 18: mod_base = OTHER; note = 2'-O-methylcytidine-3'-phosphate
  modified_base 19: mod_base = OTHER; note = 2'-O-methyluridine-3'-phosphate
  modified_base 20: mod_base = OTHER; note = 2'-O-methyluridine-3'-phosphate
  modified_base 21: mod_base = OTHER; note = 2'-O-methyladenosine
tgccagcatacttttctctta

SEQ ID NO: 4315 - RNA, 21 nt, synthetic construct
  source 1..21: mol_type = other RNA
  modified_base 1: mod_base = OTHER; note = 2'-O-methylguanosine-3'-phosphate
  modified_base 2: mod_base = OTHER; note = 2'-O-methylcytidine-3'-phosphate
  modified_base 3: mod_base = OTHER; note = 2'-O-methylcytidine-3'-phosphate
  modified_base 4: mod_base = OTHER; note = 2'-O-methyladenosine-3'-phosphate
  modified_base 5: mod_base = OTHER; note = 2'-O-methylguanosine-3'-phosphate
  modified_base 6: mod_base = OTHER; note = 2'-O-methylcytidine-3'-phosphate
  modified_base 7: mod_base = OTHER; note = 2'-deoxy-2'-fluoroadenosine-3'-phosphate
  modified_base 8: mod_base = OTHER; note = 2'-O-methyluridine-3'-phosphate
  modified_base 9: mod_base = OTHER; note = 2'-deoxy-2'-fluoroadenosine-3'-phosphate
  modified_base 10: mod_base = OTHER; note = 2'-deoxy-2'-fluorocytidine-3'-phosphate
  modified_base 11: mod_base = OTHER; note = 2'-deoxy-2'-fluorouridine-3'-phosphate
  modified_base 12: mod_base = OTHER; note = 2'-O-methyluridine-3'-phosphate
  modified_base 13: mod_base = OTHER; note = 2'-O-methyluridine-3'-phosphate
  modified_base 14: mod_base = OTHER; note = 2'-O-methyluridine-3'-phosphate
  modified_base 15: mod_base = OTHER; note = 2'-O-methylcytidine-3'-phosphate
  modified_base 16: mod_base = OTHER; note = 2'-O-methyluridine-3'-phosphate
  modified_base 17: mod_base = OTHER; note = 2'-O-methylcytidine-3'-phosphate
  modified_base 18: mod_base = OTHER; note = 2'-O-methyluridine-3'-phosphate
  modified_base 19: mod_base = OTHER; note = 2'-O-methyluridine-3'-phosphate
  modified_base 20: mod_base = OTHER; note = 2'-O-methyluridine-3'-phosphate
  modified_base 21: mod_base = OTHER; note = 2'-O-methyladenosine
gccagcatacttttctcttta

SEQ ID NO: 4316 - RNA, 21 nt, synthetic construct
  source 1..21: mol_type = other RNA
  modified_base 1: mod_base = OTHER; note = 2'-O-methylcytidine-3'-phosphate
  modified_base 2: mod_base = OTHER; note = 2'-O-methylcytidine-3'-phosphate
  modified_base 3: mod_base = OTHER; note = 2'-O-methyladenosine-3'-phosphate
  modified_base 4: mod_base = OTHER; note = 2'-O-methylguanosine-3'-phosphate
  modified_base 5: mod_base = OTHER; note = 2'-O-methylcytidine-3'-phosphate
  modified_base 6: mod_base = OTHER; note = 2'-O-methyladenosine-3'-phosphate
  modified_base 7: mod_base = OTHER; note = 2'-deoxy-2'-fluorouridine-3'-phosphate
  modified_base 8: mod_base = OTHER; note = 2'-O-methyladenosine-3'-phosphate
  modified_base 9: mod_base = OTHER; note = 2'-deoxy-2'-fluorocytidine-3'-phosphate
  modified_base 10: mod_base = OTHER; note = 2'-deoxy-2'-fluorouridine-3'-phosphate
  modified_base 11: mod_base = OTHER; note = 2'-deoxy-2'-fluorouridine-3'-phosphate
  modified_base 12: mod_base = OTHER; note = 2'-O-methyluridine-3'-phosphate
  modified_base 13: mod_base = OTHER; note = 2'-O-methyluridine-3'-phosphate
  modified_base 14: mod_base = OTHER; note = 2'-O-methylcytidine-3'-phosphate
  modified_base 15: mod_base = OTHER; note = 2'-O-methyluridine-3'-phosphate
  modified_base 16: mod_base = OTHER; note = 2'-O-methylcytidine-3'-phosphate
  modified_base 17: mod_base = OTHER; note = 2'-O-methyluridine-3'-phosphate
  modified_base 18: mod_base = OTHER; note = 2'-O-methyluridine-3'-phosphate
  modified_base 19: mod_base = OTHER; note = 2'-O-methyluridine-3'-phosphate
  modified_base 20: mod_base = OTHER; note = 2'-O-methylcytidine-3'-phosphate
  modified_base 21: mod_base = OTHER; note = 2'-O-methyladenosine
ccagcatacttttctctttca

SEQ ID NO: 4317 - RNA, 21 nt, synthetic construct
  source 1..21: mol_type = other RNA
  modified_base 1: mod_base = OTHER; note = 2'-O-methylcytidine-3'-phosphate
  modified_base 2: mod_base = OTHER; note = 2'-O-methyladenosine-3'-phosphate
  modified_base 3: mod_base = OTHER; note = 2'-O-methylguanosine-3'-phosphate
  modified_base 4: mod_base = OTHER; note = 2'-O-methylcytidine-3'-phosphate
  modified_base 5: mod_base = OTHER; note = 2'-O-methyladenosine-3'-phosphate
  modified_base 6: mod_base = OTHER; note = 2'-O-methyluridine-3'-phosphate
  modified_base 7: mod_base = OTHER; note = 2'-deoxy-2'-fluoroadenosine-3'-phosphate
  modified_base 8: mod_base = OTHER; note = 2'-O-methylcytidine-3'-phosphate
  modified_base 9: mod_base = OTHER; note = 2'-deoxy-2'-fluorouridine-3'-phosphate
  modified_base 10: mod_base = OTHER; note = 2'-deoxy-2'-fluorouridine-3'-phosphate
  modified_base 11: mod_base = OTHER; note = 2'-deoxy-2'-fluorouridine-3'-phosphate
  modified_base 12: mod_base = OTHER; note = 2'-O-methyluridine-3'-phosphate
  modified_base 13: mod_base = OTHER; note = 2'-O-methylcytidine-3'-phosphate
  modified_base 14: mod_base = OTHER; note = 2'-O-methyluridine-3'-phosphate
  modified_base 15: mod_base = OTHER; note = 2'-O-methylcytidine-3'-phosphate
  modified_base 16: mod_base = OTHER; note = 2'-O-methyluridine-3'-phosphate
  modified_base 17: mod_base = OTHER; note = 2'-O-methyluridine-3'-phosphate
  modified_base 18: mod_base = OTHER; note = 2'-O-methyluridine-3'-phosphate
  modified_base 19: mod_base = OTHER; note = 2'-O-methylcytidine-3'-phosphate
  modified_base 20: mod_base = OTHER; note = 2'-O-methyladenosine-3'-phosphate
  modified_base 21: mod_base = OTHER; note = 2'-O-methyladenosine
cagcatacttttctctttcaa

SEQ ID NO: 4318 - RNA, 21 nt, synthetic construct
  source 1..21: mol_type = other RNA
  modified_base 1: mod_base = OTHER; note = 2'-O-methyladenosine-3'-phosphate
  modified_base 2: mod_base = OTHER; note = 2'-O-methylguanosine-3'-phosphate
  modified_base 3: mod_base = OTHER; note = 2'-O-methylcytidine-3'-phosphate
  modified_base 4: mod_base = OTHER; note = 2'-O-methyladenosine-3'-phosphate
  modified_base 5: mod_base = OTHER; note = 2'-O-methyluridine-3'-phosphate
  modified_base 6: mod_base = OTHER; note = 2'-O-methyladenosine-3'-phosphate
  modified_base 7: mod_base = OTHER; note = 2'-deoxy-2'-fluorocytidine-3'-phosphate
  modified_base 8: mod_base = OTHER; note = 2'-O-methyluridine-3'-phosphate
  modified_base 9: mod_base = OTHER; note = 2'-deoxy-2'-fluorouridine-3'-phosphate
  modified_base 10: mod_base = OTHER; note = 2'-deoxy-2'-fluorouridine-3'-phosphate
  modified_base 11: mod_base = OTHER; note = 2'-deoxy-2'-fluorouridine-3'-phosphate
  modified_base 12: mod_base = OTHER; note = 2'-O-methylcytidine-3'-phosphate
  modified_base 13: mod_base = OTHER; note = 2'-O-methyluridine-3'-phosphate
  modified_base 14: mod_base = OTHER; note = 2'-O-methylcytidine-3'-phosphate
  modified_base 15: mod_base = OTHER; note = 2'-O-methyluridine-3'-phosphate
  modified_base 16: mod_base = OTHER; note = 2'-O-methyluridine-3'-phosphate
  modified_base 17: mod_base = OTHER; note = 2'-O-methyluridine-3'-phosphate
  modified_base 18: mod_base = OTHER; note = 2'-O-methylcytidine-3'-phosphate
  modified_base 19: mod_base = OTHER; note = 2'-O-methyladenosine-3'-phosphate
  modified_base 20: mod_base = OTHER; note = 2'-O-methylguanosine-3'-phosphate
  modified_base 21: mod_base = OTHER; note = 2'-O-methyladenosine
agcatacttttctctttcaga

SEQ ID NO: 4319 - RNA, 21 nt, synthetic construct
  source 1..21: mol_type = other RNA
  modified_base 1: mod_base = OTHER; note = 2'-O-methylguanosine-3'-phosphate
  modified_base 2: mod_base = OTHER; note = 2'-O-methylcytidine-3'-phosphate
  modified_base 3: mod_base = OTHER; note = 2'-O-methyladenosine-3'-phosphate
  modified_base 4: mod_base = OTHER; note = 2'-O-methyluridine-3'-phosphate
  modified_base 5: mod_base = OTHER; note = 2'-O-methyladenosine-3'-phosphate
  modified_base 6: mod_base = OTHER; note = 2'-O-methylcytidine-3'-phosphate
  modified_base 7: mod_base = OTHER; note = 2'-deoxy-2'-fluorouridine-3'-phosphate
  modified_base 8: mod_base = OTHER; note = 2'-O-methyluridine-3'-phosphate
  modified_base 9: mod_base = OTHER; note = 2'-deoxy-2'-fluorouridine-3'-phosphate
  modified_base 10: mod_base = OTHER; note = 2'-deoxy-2'-fluorouridine-3'-phosphate
  modified_base 11: mod_base = OTHER; note = 2'-deoxy-2'-fluorocytidine-3'-phosphate
  modified_base 12: mod_base = OTHER; note = 2'-O-methyluridine-3'-phosphate
  modified_base 13: mod_base = OTHER; note = 2'-O-methylcytidine-3'-phosphate
  modified_base 14: mod_base = OTHER; note = 2'-O-methyluridine-3'-phosphate
  modified_base 15: mod_base = OTHER; note = 2'-O-methyluridine-3'-phosphate
  modified_base 16: mod_base = OTHER; note = 2'-O-methyluridine-3'-phosphate
  modified_base 17: mod_base = OTHER; note = 2'-O-methylcytidine-3'-phosphate
  modified_base 18: mod_base = OTHER; note = 2'-O-methyladenosine-3'-phosphate
  modified_base 19: mod_base = OTHER; note = 2'-O-methylguanosine-3'-phosphate
  modified_base 20: mod_base = OTHER; note = 2'-O-methyluridine-3'-phosphate
  modified_base 21: mod_base = OTHER; note = 2'-O-methyladenosine
gcatacttttctctttcagta

SEQ ID NO: 4320 - RNA, 21 nt, synthetic construct
  source 1..21: mol_type = other RNA
  modified_base 1: mod_base = OTHER; note = 2'-O-methylcytidine-3'-phosphate
  modified_base 2: mod_base = OTHER; note = 2'-O-methyladenosine-3'-phosphate
  modified_base 3: mod_base = OTHER; note = 2'-O-methyluridine-3'-phosphate
  modified_base 4: mod_base = OTHER; note = 2'-O-methyladenosine-3'-phosphate
  modified_base 5: mod_base = OTHER; note = 2'-O-methylcytidine-3'-phosphate
  modified_base 6: mod_base = OTHER; note = 2'-O-methyluridine-3'-phosphate
  modified_base 7: mod_base = OTHER; note = 2'-deoxy-2'-fluorouridine-3'-phosphate
  modified_base 8: mod_base = OTHER; note = 2'-O-methyluridine-3'-phosphate
  modified_base 9: mod_base = OTHER; note = 2'-deoxy-2'-fluorouridine-3'-phosphate
  modified_base 10: mod_base = OTHER; note = 2'-deoxy-2'-fluorocytidine-3'-phosphate
  modified_base 11: mod_base = OTHER; note = 2'-deoxy-2'-fluorouridine-3'-phosphate
  modified_base 12: mod_base = OTHER; note = 2'-O-methylcytidine-3'-phosphate
  modified_base 13: mod_base = OTHER; note = 2'-O-methyluridine-3'-phosphate
  modified_base 14: mod_base = OTHER; note = 2'-O-methyluridine-3'-phosphate
  modified_base 15: mod_base = OTHER; note = 2'-O-methyluridine-3'-phosphate
  modified_base 16: mod_base = OTHER; note = 2'-O-methylcytidine-3'-phosphate
  modified_base 17: mod_base = OTHER; note = 2'-O-methyladenosine-3'-phosphate
  modified_base 18: mod_base = OTHER; note = 2'-O-methylguanosine-3'-phosphate
  modified_base 19: mod_base = OTHER; note = 2'-O-methyluridine-3'-phosphate
  modified_base 20: mod_base = OTHER; note = 2'-O-methyluridine-3'-phosphate
  modified_base 21: mod_base = OTHER; note = 2'-O-methyladenosine
catacttttctctttcagtta

SEQ ID NO: 4321 - RNA, 21 nt, synthetic construct
  source 1..21: mol_type = other RNA
  modified_base 1: mod_base = OTHER; note = 2'-O-methyladenosine-3'-phosphate
  modified_base 2: mod_base = OTHER; note = 2'-O-methyluridine-3'-phosphate
  modified_base 3: mod_base = OTHER; note = 2'-O-methyladenosine-3'-phosphate
  modified_base 4: mod_base = OTHER; note = 2'-O-methylcytidine-3'-phosphate
  modified_base 5: mod_base = OTHER; note = 2'-O-methyluridine-3'-phosphate
  modified_base 6: mod_base = OTHER; note = 2'-O-methyluridine-3'-phosphate
  modified_base 7: mod_base = OTHER; note = 2'-deoxy-2'-fluorouridine-3'-phosphate
  modified_base 8: mod_base = OTHER; note = 2'-O-methyluridine-3'-phosphate
  modified_base 9: mod_base = OTHER; note = 2'-deoxy-2'-fluorocytidine-3'-phosphate
  modified_base 10: mod_base = OTHER; note = 2'-deoxy-2'-fluorouridine-3'-phosphate
  modified_base 11: mod_base = OTHER; note = 2'-deoxy-2'-fluorocytidine-3'-phosphate
  modified_base 12: mod_base = OTHER; note = 2'-O-methyluridine-3'-phosphate
  modified_base 13: mod_base = OTHER; note = 2'-O-methyluridine-3'-phosphate
  modified_base 14: mod_base = OTHER; note = 2'-O-methyluridine-3'-phosphate
  modified_base 15: mod_base = OTHER; note = 2'-O-methylcytidine-3'-phosphate
  modified_base 16: mod_base = OTHER; note = 2'-O-methyladenosine-3'-phosphate
  modified_base 17: mod_base = OTHER; note = 2'-O-methylguanosine-3'-phosphate
  modified_base 18: mod_base = OTHER; note = 2'-O-methyluridine-3'-phosphate
  modified_base 19: mod_base = OTHER; note = 2'-O-methyluridine-3'-phosphate
  modified_base 20: mod_base = OTHER; note = 2'-O-methylguanosine-3'-phosphate
  modified_base 21: mod_base = OTHER; note = 2'-O-methyladenosine
atacttttctctttcagttga

SEQ ID NO: 4322 - RNA, 21 nt, synthetic construct
  source 1..21: mol_type = other RNA
  modified_base 1: mod_base = OTHER; note = 2'-O-methyluridine-3'-phosphate
  modified_base 2: mod_base = OTHER; note = 2'-O-methyladenosine-3'-phosphate
  modified_base 3: mod_base = OTHER; note = 2'-O-methylcytidine-3'-phosphate
  modified_base 4: mod_base = OTHER; note = 2'-O-methyluridine-3'-phosphate
  modified_base 5: mod_base = OTHER; note = 2'-O-methyluridine-3'-phosphate
  modified_base 6: mod_base = OTHER; note = 2'-O-methyluridine-3'-phosphate
  modified_base 7: mod_base = OTHER; note = 2'-deoxy-2'-fluorouridine-3'-phosphate
  modified_base 8: mod_base = OTHER; note = 2'-O-methylcytidine-3'-phosphate
  modified_base 9: mod_base = OTHER; note = 2'-deoxy-2'-fluorouridine-3'-phosphate
  modified_base 10: mod_base = OTHER; note = 2'-deoxy-2'-fluorocytidine-3'-phosphate
  modified_base 11: mod_base = OTHER; note = 2'-deoxy-2'-fluorouridine-3'-phosphate
  modified_base 12: mod_base = OTHER; note = 2'-O-methyluridine-3'-phosphate
  modified_base 13: mod_base = OTHER; note = 2'-O-methyluridine-3'-phosphate
  modified_base 14: mod_base = OTHER; note = 2'-O-methylcytidine-3'-phosphate
  modified_base 15: mod_base = OTHER; note = 2'-O-methyladenosine-3'-phosphate
  modified_base 16: mod_base = OTHER; note = 2'-O-methylguanosine-3'-phosphate
  modified_base 17: mod_base = OTHER; note = 2'-O-methyluridine-3'-phosphate
  modified_base 18: mod_base = OTHER; note = 2'-O-methyluridine-3'-phosphate
  modified_base 19: mod_base = OTHER; note = 2'-O-methylguanosine-3'-phosphate
  modified_base 20: mod_base = OTHER; note = 2'-O-methyluridine-3'-phosphate
  modified_base 21: mod_base = OTHER; note = 2'-O-methyladenosine
tacttttctctttcagttgta

SEQ ID NO: 4323 - RNA, 21 nt, synthetic construct
  source 1..21: mol_type = other RNA
  modified_base 1: mod_base = OTHER; note = 2'-O-methyladenosine-3'-phosphate
  modified_base 2: mod_base = OTHER; note = 2'-O-methylcytidine-3'-phosphate
  modified_base 3: mod_base = OTHER; note = 2'-O-methyluridine-3'-phosphate
  modified_base 4: mod_base = OTHER; note = 2'-O-methyluridine-3'-phosphate
  modified_base 5: mod_base = OTHER; note = 2'-O-methyluridine-3'-phosphate
  modified_base 6: mod_base = OTHER; note = 2'-O-methyluridine-3'-phosphate
  modified_base 7: mod_base = OTHER; note = 2'-deoxy-2'-fluorocytidine-3'-phosphate
  modified_base 8: mod_base = OTHER; note = 2'-O-methyluridine-3'-phosphate
  modified_base 9: mod_base = OTHER; note = 2'-deoxy-2'-fluorocytidine-3'-phosphate
  modified_base 10: mod_base = OTHER; note = 2'-deoxy-2'-fluorouridine-3'-phosphate
  modified_base 11: mod_base = OTHER; note = 2'-deoxy-2'-fluorouridine-3'-phosphate
  modified_base 12: mod_base = OTHER; note = 2'-O-methyluridine-3'-phosphate
  modified_base 13: mod_base = OTHER; note = 2'-O-methylcytidine-3'-phosphate
  modified_base 14: mod_base = OTHER; note = 2'-O-methyladenosine-3'-phosphate
  modified_base 15: mod_base = OTHER; note = 2'-O-methylguanosine-3'-phosphate
  modified_base 16: mod_base = OTHER; note = 2'-O-methyluridine-3'-phosphate
  modified_base 17: mod_base = OTHER; note = 2'-O-methyluridine-3'-phosphate
  modified_base 18: mod_base = OTHER; note = 2'-O-methylguanosine-3'-phosphate
  modified_base 19: mod_base = OTHER; note = 2'-O-methyluridine-3'-phosphate
  modified_base 20: mod_base = OTHER; note = 2'-O-methyladenosine-3'-phosphate
  modified_base 21: mod_base = OTHER; note = 2'-O-methyladenosine
acttttctctttcagttgtaa

SEQ ID NO: 4324 - RNA, 21 nt, synthetic construct
  source 1..21: mol_type = other RNA
  modified_base 1: mod_base = OTHER; note = 2'-O-methyluridine-3'-phosphate
  modified_base 2: mod_base = OTHER; note = 2'-O-methylcytidine-3'-phosphate
  modified_base 3: mod_base = OTHER; note = 2'-O-methyladenosine-3'-phosphate
  modified_base 4: mod_base = OTHER; note = 2'-O-methylguanosine-3'-phosphate
  modified_base 5: mod_base = OTHER; note = 2'-O-methyluridine-3'-phosphate
  modified_base 6: mod_base = OTHER; note = 2'-O-methyluridine-3'-phosphate
  modified_base 7: mod_base = OTHER; note = 2'-deoxy-2'-fluoroguanosine-3'-phosphate
  modified_base 8: mod_base = OTHER; note = 2'-O-methyluridine-3'-phosphate
  modified_base 9: mod_base = OTHER; note = 2'-deoxy-2'-fluoroadenosine-3'-phosphate
  modified_base 10: mod_base = OTHER; note = 2'-deoxy-2'-fluoroguanosine-3'-phosphate
  modified_base 11: mod_base = OTHER; note = 2'-deoxy-2'-fluoroadenosine-3'-phosphate
  modified_base 12: mod_base = OTHER; note = 2'-O-methyluridine-3'-phosphate
  modified_base 13: mod_base = OTHER; note = 2'-O-methylguanosine-3'-phosphate
  modified_base 14: mod_base = OTHER; note = 2'-O-methyladenosine-3'-phosphate
  modified_base 15: mod_base = OTHER; note = 2'-O-methyladenosine-3'-phosphate
  modified_base 16: mod_base = OTHER; note = 2'-O-methyluridine-3'-phosphate
  modified_base 17: mod_base = OTHER; note = 2'-O-methyladenosine-3'-phosphate
  modified_base 18: mod_base = OTHER; note = 2'-O-methylcytidine-3'-phosphate
  modified_base 19: mod_base = OTHER; note = 2'-O-methyladenosine-3'-phosphate
  modified_base 20: mod_base = OTHER; note = 2'-O-methyluridine-3'-phosphate
  modified_base 21: mod_base = OTHER; note = 2'-O-methyladenosine
tcagttgtagatgaatacata

SEQ ID NO: 4325 - RNA, 21 nt, synthetic construct
  source 1..21: mol_type = other RNA
  modified_base 1: mod_base = OTHER; note = 2'-O-methylcytidine-3'-phosphate
  modified_base 2: mod_base = OTHER; note = 2'-O-methyladenosine-3'-phosphate
  modified_base 3: mod_base = OTHER; note = 2'-O-methylguanosine-3'-phosphate
  modified_base 4: mod_base = OTHER; note = 2'-O-methyluridine-3'-phosphate
  modified_base 5: mod_base = OTHER; note = 2'-O-methyluridine-3'-phosphate
  modified_base 6: mod_base = OTHER; note = 2'-O-methylguanosine-3'-phosphate
  modified_base 7: mod_base = OTHER; note = 2'-deoxy-2'-fluorouridine-3'-phosphate
  modified_base 8: mod_base = OTHER; note = 2'-O-methyladenosine-3'-phosphate
  modified_base 9: mod_base = OTHER; note = 2'-deoxy-2'-fluoroguanosine-3'-phosphate
  modified_base 10: mod_base = OTHER; note = 2'-deoxy-2'-fluoroadenosine-3'-phosphate
  modified_base 11: mod_base = OTHER; note = 2'-deoxy-2'-fluorouridine-3'-phosphate
  modified_base 12: mod_base = OTHER; note = 2'-O-methylguanosine-3'-phosphate
  modified_base 13: mod_base = OTHER; note = 2'-O-methyladenosine-3'-phosphate
  modified_base 14: mod_base = OTHER; note = 2'-O-methyladenosine-3'-phosphate
  modified_base 15: mod_base = OTHER; note = 2'-O-methyluridine-3'-phosphate
  modified_base 16: mod_base = OTHER; note = 2'-O-methyladenosine-3'-phosphate
  modified_base 17: mod_base = OTHER; note = 2'-O-methylcytidine-3'-phosphate
  modified_base 18: mod_base = OTHER; note = 2'-O-methyladenosine-3'-phosphate
  modified_base 19: mod_base = OTHER; note = 2'-O-methyluridine-3'-phosphate
  modified_base 20: mod_base = OTHER; note = 2'-O-methyluridine-3'-phosphate
  modified_base 21: mod_base = OTHER; note = 2'-O-methyladenosine
cagttgtagatgaatacatta

SEQ ID NO: 4326 - RNA, 21 nt, synthetic construct
  source 1..21: mol_type = other RNA
  modified_base 1: mod_base = OTHER; note = 2'-O-methyluridine-3'-phosphate
  modified_base 2: mod_base = OTHER; note = 2'-O-methyluridine-3'-phosphate
  modified_base 3: mod_base = OTHER; note = 2'-O-methyluridine-3'-phosphate
  modified_base 4: mod_base = OTHER; note = 2'-O-methyluridine-3'-phosphate
  modified_base 5: mod_base = OTHER; note = 2'-O-methylcytidine-3'-phosphate
  modified_base 6: mod_base = OTHER; note = 2'-O-methyladenosine-3'-phosphate
  modified_base 7: mod_base = OTHER; note = 2'-deoxy-2'-fluoroguanosine-3'-phosphate
  modified_base 8: mod_base = OTHER; note = 2'-O-methyladenosine-3'-phosphate
  modified_base 9: mod_base = OTHER; note = 2'-deoxy-2'-fluorouridine-3'-phosphate
  modified_base 10: mod_base = OTHER; note = 2'-deoxy-2'-fluoroguanosine-3'-phosphate
  modified_base 11: mod_base = OTHER; note = 2'-deoxy-2'-fluorouridine-3'-phosphate
  modified_base 12: mod_base = OTHER; note = 2'-O-methylguanosine-3'-phosphate
  modified_base 13: mod_base = OTHER; note = 2'-O-methyladenosine-3'-phosphate
  modified_base 14: mod_base = OTHER; note = 2'-O-methylcytidine-3'-phosphate
  modified_base 15: mod_base = OTHER; note = 2'-O-methyluridine-3'-phosphate
  modified_base 16: mod_base = OTHER; note = 2'-O-methylguanosine-3'-phosphate
  modified_base 17: mod_base = OTHER; note = 2'-O-methyluridine-3'-phosphate
  modified_base 18: mod_base = OTHER; note = 2'-O-methyladenosine-3'-phosphate
  modified_base 19: mod_base = OTHER; note = 2'-O-methyluridine-3'-phosphate
  modified_base 20: mod_base = OTHER; note = 2'-O-methyluridine-3'-phosphate
  modified_base 21: mod_base = OTHER; note = 2'-O-methyladenosine
ttttcagatgtgactgtatta

SEQ ID NO: 4327 - RNA, 21 nt, synthetic construct
  source 1..21: mol_type = other RNA
  modified_base 1: mod_base = OTHER; note = 2'-O-methyluridine-3'-phosphate
  modified_base 2: mod_base = OTHER; note = 2'-O-methyluridine-3'-phosphate
  modified_base 3: mod_base = OTHER; note = 2'-O-methyluridine-3'-phosphate
  modified_base 4: mod_base = OTHER; note = 2'-O-methylcytidine-3'-phosphate
  modified_base 5: mod_base = OTHER; note = 2'-O-methyladenosine-3'-phosphate
  modified_base 6: mod_base = OTHER; note = 2'-O-methylguanosine-3'-phosphate
  modified_base 7: mod_base = OTHER; note = 2'-deoxy-2'-fluoroadenosine-3'-phosphate
  modified_base 8: mod_base = OTHER; note = 2'-O-methyluridine-3'-phosphate
  modified_base 9: mod_base = OTHER; note = 2'-deoxy-2'-fluoroguanosine-3'-phosphate
  modified_base 10: mod_base = OTHER; note = 2'-deoxy-2'-fluorouridine-3'-phosphate
  modified_base 11: mod_base = OTHER; note = 2'-deoxy-2'-fluoroguanosine-3'-phosphate
  modified_base 12: mod_base = OTHER; note = 2'-O-methyladenosine-3'-phosphate
  modified_base 13: mod_base = OTHER; note = 2'-O-methylcytidine-3'-phosphate
  modified_base 14: mod_base = OTHER; note = 2'-O-methyluridine-3'-phosphate
  modified_base 15: mod_base = OTHER; note = 2'-O-methylguanosine-3'-phosphate
  modified_base 16: mod_base = OTHER; note = 2'-O-methyluridine-3'-phosphate
  modified_base 17: mod_base = OTHER; note = 2'-O-methyladenosine-3'-phosphate
  modified_base 18: mod_base = OTHER; note = 2'-O-methyluridine-3'-phosphate
  modified_base 19: mod_base = OTHER; note = 2'-O-methyluridine-3'-phosphate
  modified_base 20: mod_base = OTHER; note = 2'-O-methyluridine-3'-phosphate
  modified_base 21: mod_base = OTHER; note = 2'-O-methyladenosine
tttcagatgtgactgtattta

SEQ ID NO: 4328 - RNA, 21 nt, synthetic construct
  source 1..21: mol_type = other RNA
  modified_base 1: mod_base = OTHER; note = 2'-O-methyluridine-3'-phosphate
  modified_base 2: mod_base = OTHER; note = 2'-O-methyluridine-3'-phosphate
  modified_base 3: mod_base = OTHER; note = 2'-O-methylcytidine-3'-phosphate
  modified_base 4: mod_base = OTHER; note = 2'-O-methyladenosine-3'-phosphate
  modified_base 5: mod_base = OTHER; note = 2'-O-methylguanosine-3'-phosphate
  modified_base 6: mod_base = OTHER; note = 2'-O-methyladenosine-3'-phosphate
  modified_base 7: mod_base = OTHER; note = 2'-deoxy-2'-fluorouridine-3'-phosphate
  modified_base 8: mod_base = OTHER; note = 2'-O-methylguanosine-3'-phosphate
  modified_base 9: mod_base = OTHER; note = 2'-deoxy-2'-fluorouridine-3'-phosphate
  modified_base 10: mod_base = OTHER; note = 2'-deoxy-2'-fluoroguanosine-3'-phosphate
  modified_base 11: mod_base = OTHER; note = 2'-deoxy-2'-fluoroadenosine-3'-phosphate
  modified_base 12: mod_base = OTHER; note = 2'-O-methylcytidine-3'-phosphate
  modified_base 13: mod_base = OTHER; note = 2'-O-methyluridine-3'-phosphate
  modified_base 14: mod_base = OTHER; note = 2'-O-methylguanosine-3'-phosphate
  modified_base 15: mod_base = OTHER; note = 2'-O-methyluridine-3'-phosphate
  modified_base 16: mod_base = OTHER; note = 2'-O-methyladenosine-3'-phosphate
  modified_base 17: mod_base = OTHER; note = 2'-O-methyluridine-3'-phosphate
  modified_base 18: mod_base = OTHER; note = 2'-O-methyluridine-3'-phosphate
  modified_base 19: mod_base = OTHER; note = 2'-O-methyluridine-3'-phosphate
  modified_base 20: mod_base = OTHER; note = 2'-O-methylcytidine-3'-phosphate
  modified_base 21: mod_base = OTHER; note = 2'-O-methyladenosine
ttcagatgtgactgtatttca

SEQ ID NO: 4329 - RNA, 21 nt, synthetic construct
  source 1..21: mol_type = other RNA
  modified_base 1: mod_base = OTHER; note = 2'-O-methyluridine-3'-phosphate
  modified_base 2: mod_base = OTHER; note = 2'-O-methylcytidine-3'-phosphate
  modified_base 3: mod_base = OTHER; note = 2'-O-methyladenosine-3'-phosphate
  modified_base 4: mod_base = OTHER; note = 2'-O-methylguanosine-3'-phosphate
  modified_base 5: mod_base = OTHER; note = 2'-O-methyladenosine-3'-phosphate
  modified_base 6: mod_base = OTHER; note = 2'-O-methyluridine-3'-phosphate
  modified_base 7: mod_base = OTHER; note = 2'-deoxy-2'-fluoroguanosine-3'-phosphate
  modified_base 8: mod_base = OTHER; note = 2'-O-methyluridine-3'-phosphate
  modified_base 9: mod_base = OTHER; note = 2'-deoxy-2'-fluoroguanosine-3'-phosphate
  modified_base 10: mod_base = OTHER; note = 2'-deoxy-2'-fluoroadenosine-3'-phosphate
  modified_base 11: mod_base = OTHER; note = 2'-deoxy-2'-fluorocytidine-3'-phosphate
  modified_base 12: mod_base = OTHER; note = 2'-O-methyluridine-3'-phosphate
  modified_base 13: mod_base = OTHER; note = 2'-O-methylguanosine-3'-phosphate
  modified_base 14: mod_base = OTHER; note = 2'-O-methyluridine-3'-phosphate
  modified_base 15: mod_base = OTHER; note = 2'-O-methyladenosine-3'-phosphate
  modified_base 16: mod_base = OTHER; note = 2'-O-methyluridine-3'-phosphate
  modified_base 17: mod_base = OTHER; note = 2'-O-methyluridine-3'-phosphate
  modified_base 18: mod_base = OTHER; note = 2'-O-methyluridine-3'-phosphate
  modified_base 19: mod_base = OTHER; note = 2'-O-methylcytidine-3'-phosphate
  modified_base 20: mod_base = OTHER; note = 2'-O-methylcytidine-3'-phosphate
  modified_base 21: mod_base = OTHER; note = 2'-O-methyladenosine
tcagatgtgactgtatttcca

SEQ ID NO: 4330 - RNA, 21 nt, synthetic construct
  source 1..21: mol_type = other RNA
  modified_base 1: mod_base = OTHER; note = 2'-O-methylcytidine-3'-phosphate
  modified_base 2: mod_base = OTHER; note = 2'-O-methyladenosine-3'-phosphate
  modified_base 3: mod_base = OTHER; note = 2'-O-methylguanosine-3'-phosphate
  modified_base 4: mod_base = OTHER; note = 2'-O-methyladenosine-3'-phosphate
  modified_base 5: mod_base = OTHER; note = 2'-O-methyluridine-3'-phosphate
  modified_base 6: mod_base = OTHER; note = 2'-O-methylguanosine-3'-phosphate
  modified_base 7: mod_base = OTHER; note = 2'-deoxy-2'-fluorouridine-3'-phosphate
  modified_base 8: mod_base = OTHER; note = 2'-O-methylguanosine-3'-phosphate
  modified_base 9: mod_base = OTHER; note = 2'-deoxy-2'-fluoroadenosine-3'-phosphate
  modified_base 10: mod_base = OTHER; note = 2'-deoxy-2'-fluorocytidine-3'-phosphate
  modified_base 11: mod_base = OTHER; note = 2'-deoxy-2'-fluorouridine-3'-phosphate
  modified_base 12: mod_base = OTHER; note = 2'-O-methylguanosine-3'-phosphate
  modified_base 13: mod_base = OTHER; note = 2'-O-methyluridine-3'-phosphate
  modified_base 14: mod_base = OTHER; note = 2'-O-methyladenosine-3'-phosphate
  modified_base 15: mod_base = OTHER; note = 2'-O-methyluridine-3'-phosphate
  modified_base 16: mod_base = OTHER; note = 2'-O-methyluridine-3'-phosphate
  modified_base 17: mod_base = OTHER; note = 2'-O-methyluridine-3'-phosphate
  modified_base 18: mod_base = OTHER; note = 2'-O-methylcytidine-3'-phosphate
  modified_base 19: mod_base = OTHER; note = 2'-O-methylcytidine-3'-phosphate
  modified_base 20: mod_base = OTHER; note = 2'-O-methyluridine-3'-phosphate
  modified_base 21: mod_base = OTHER; note = 2'-O-methyladenosine
cagatgtgactgtatttccta

SEQ ID NO: 4331 - RNA, 21 nt, synthetic construct
  source 1..21: mol_type = other RNA
  modified_base 1: mod_base = OTHER; note = 2'-O-methyladenosine-3'-phosphate
  modified_base 2: mod_base = OTHER; note = 2'-O-methylguanosine-3'-phosphate
  modified_base 3: mod_base = OTHER; note = 2'-O-methyladenosine-3'-phosphate
  modified_base 4: mod_base = OTHER; note = 2'-O-methyluridine-3'-phosphate
  modified_base 5: mod_base = OTHER; note = 2'-O-methylguanosine-3'-phosphate
  modified_base 6: mod_base = OTHER; note = 2'-O-methyluridine-3'-phosphate
  modified_base 7: mod_base = OTHER; note = 2'-deoxy-2'-fluoroguanosine-3'-phosphate
  modified_base 8: mod_base = OTHER; note = 2'-O-methyladenosine-3'-phosphate
  modified_base 9: mod_base = OTHER; note = 2'-deoxy-2'-fluorocytidine-3'-phosphate
  modified_base 10: mod_base = OTHER; note = 2'-deoxy-2'-fluorouridine-3'-phosphate
  modified_base 11: mod_base = OTHER; note = 2'-deoxy-2'-fluoroguanosine-3'-phosphate
  modified_base 12: mod_base = OTHER; note = 2'-O-methyluridine-3'-phosphate
  modified_base 13: mod_base = OTHER; note = 2'-O-methyladenosine-3'-phosphate
  modified_base 14: mod_base = OTHER; note = 2'-O-methyluridine-3'-phosphate
  modified_base 15: mod_base = OTHER; note = 2'-O-methyluridine-3'-phosphate
  modified_base 16: mod_base = OTHER; note = 2'-O-methyluridine-3'-phosphate
  modified_base 17: mod_base = OTHER; note = 2'-O-methylcytidine-3'-phosphate
  modified_base 18: mod_base = OTHER; note = 2'-O-methylcytidine-3'-phosphate
  modified_base 19: mod_base = OTHER; note = 2'-O-methyluridine-3'-phosphate
  modified_base 20: mod_base = OTHER; note = 2'-O-methylguanosine-3'-phosphate
  modified_base 21: mod_base = OTHER; note = 2'-O-methyladenosine
agatgtgactgtatttcctga

SEQ ID NO: 4332 - RNA, 21 nt, synthetic construct
  source 1..21: mol_type = other RNA
  modified_base 1: mod_base = OTHER; note = 2'-O-methylguanosine-3'-phosphate
  modified_base 2: mod_base = OTHER; note = 2'-O-methyladenosine-3'-phosphate
  modified_base 3: mod_base = OTHER; note = 2'-O-methyluridine-3'-phosphate
  modified_base 4: mod_base = OTHER; note = 2'-O-methylguanosine-3'-phosphate
  modified_base 5: mod_base = OTHER; note = 2'-O-methyluridine-3'-phosphate
  modified_base 6: mod_base = OTHER; note = 2'-O-methylguanosine-3'-phosphate
  modified_base 7: mod_base = OTHER; note = 2'-deoxy-2'-fluoroadenosine-3'-phosphate
  modified_base 8: mod_base = OTHER; note = 2'-O-methylcytidine-3'-phosphate
  modified_base 9: mod_base = OTHER; note = 2'-deoxy-2'-fluorouridine-3'-phosphate
  modified_base 10: mod_base = OTHER; note = 2'-deoxy-2'-fluoroguanosine-3'-phosphate
  modified_base 11: mod_base = OTHER; note = 2'-deoxy-2'-fluorouridine-3'-phosphate
  modified_base 12: mod_base = OTHER; note = 2'-O-methyladenosine-3'-phosphate
  modified_base 13: mod_base = OTHER; note = 2'-O-methyluridine-3'-phosphate
  modified_base 14: mod_base = OTHER; note = 2'-O-methyluridine-3'-phosphate
  modified_base 15: mod_base = OTHER; note = 2'-O-methyluridine-3'-phosphate
  modified_base 16: mod_base = OTHER; note = 2'-O-methylcytidine-3'-phosphate
  modified_base 17: mod_base = OTHER; note = 2'-O-methylcytidine-3'-phosphate
  modified_base 18: mod_base = OTHER; note = 2'-O-methyluridine-3'-phosphate
  modified_base 19: mod_base = OTHER; note = 2'-O-methylguanosine-3'-phosphate
  modified_base 20: mod_base = OTHER; note = 2'-O-methyladenosine-3'-phosphate
  modified_base 21: mod_base = OTHER; note = 2'-O-methyladenosine
gatgtgactgtatttcctgaa

SEQ ID NO: 4333 - RNA, 21 nt, synthetic construct
  source 1..21: mol_type = other RNA
  modified_base 1: mod_base = OTHER; note = 2'-O-methyladenosine-3'-phosphate
  modified_base 2: mod_base = OTHER; note = 2'-O-methyluridine-3'-phosphate
  modified_base 3: mod_base = OTHER; note = 2'-O-methylguanosine-3'-phosphate
  modified_base 4: mod_base = OTHER; note = 2'-O-methyluridine-3'-phosphate
  modified_base 5: mod_base = OTHER; note = 2'-O-methylguanosine-3'-phosphate
  modified_base 6: mod_base = OTHER; note = 2'-O-methyladenosine-3'-phosphate
  modified_base 7: mod_base = OTHER; note = 2'-deoxy-2'-fluorocytidine-3'-phosphate
  modified_base 8: mod_base = OTHER; note = 2'-O-methyluridine-3'-phosphate
  modified_base 9: mod_base = OTHER; note = 2'-deoxy-2'-fluoroguanosine-3'-phosphate
  modified_base 10: mod_base = OTHER; note = 2'-deoxy-2'-fluorouridine-3'-phosphate
  modified_base 11: mod_base = OTHER; note = 2'-deoxy-2'-fluoroadenosine-3'-phosphate
  modified_base 12: mod_base = OTHER; note = 2'-O-methyluridine-3'-phosphate
  modified_base 13: mod_base = OTHER; note = 2'-O-methyluridine-3'-phosphate
  modified_base 14: mod_base = OTHER; note = 2'-O-methyluridine-3'-phosphate
  modified_base 15: mod_base = OTHER; note = 2'-O-methylcytidine-3'-phosphate
  modified_base 16: mod_base = OTHER; note = 2'-O-methylcytidine-3'-phosphate
  modified_base 17: mod_base = OTHER; note = 2'-O-methyluridine-3'-phosphate
  modified_base 18: mod_base = OTHER; note = 2'-O-methylguanosine-3'-phosphate
  modified_base 19: mod_base = OTHER; note = 2'-O-methyladenosine-3'-phosphate
  modified_base 20: mod_base = OTHER; note = 2'-O-methyluridine-3'-phosphate
  modified_base 21: mod_base = OTHER; note = 2'-O-methyladenosine
atgtgactgtatttcctgata

SEQ ID NO: 4334 - RNA, 21 nt, synthetic construct
  source 1..21: mol_type = other RNA
  modified_base 1: mod_base = OTHER; note = 2'-O-methyluridine-3'-phosphate
  modified_base 2: mod_base = OTHER; note = 2'-O-methylguanosine-3'-phosphate
  modified_base 3: mod_base = OTHER; note = 2'-O-methyluridine-3'-phosphate
  modified_base 4: mod_base = OTHER; note = 2'-O-methylguanosine-3'-phosphate
  modified_base 5: mod_base = OTHER; note = 2'-O-methyladenosine-3'-phosphate
  modified_base 6: mod_base = OTHER; note = 2'-O-methylcytidine-3'-phosphate
  modified_base 7: mod_base = OTHER; note = 2'-deoxy-2'-fluorouridine-3'-phosphate
  modified_base 8: mod_base = OTHER; note = 2'-O-methylguanosine-3'-phosphate
  modified_base 9: mod_base = OTHER; note = 2'-deoxy-2'-fluorouridine-3'-phosphate
  modified_base 10: mod_base = OTHER; note = 2'-deoxy-2'-fluoroadenosine-3'-phosphate
  modified_base 11: mod_base = OTHER; note = 2'-deoxy-2'-fluorouridine-3'-phosphate
  modified_base 12: mod_base = OTHER; note = 2'-O-methyluridine-3'-phosphate
  modified_base 13: mod_base = OTHER; note = 2'-O-methyluridine-3'-phosphate
  modified_base 14: mod_base = OTHER; note = 2'-O-methylcytidine-3'-phosphate
  modified_base 15: mod_base = OTHER; note = 2'-O-methylcytidine-3'-phosphate
  modified_base 16: mod_base = OTHER; note = 2'-O-methyluridine-3'-phosphate
  modified_base 17: mod_base = OTHER; note = 2'-O-methylguanosine-3'-phosphate
  modified_base 18: mod_base = OTHER; note = 2'-O-methyladenosine-3'-phosphate
  modified_base 19: mod_base = OTHER; note = 2'-O-methyluridine-3'-phosphate
  modified_base 20: mod_base = OTHER; note = 2'-O-methylcytidine-3'-phosphate
  modified_base 21: mod_base = OTHER; note = 2'-O-methyladenosine
tgtgactgtatttcctgatca

SEQ ID NO: 4335 - RNA, 21 nt, synthetic construct
  source 1..21: mol_type = other RNA
  modified_base 1: mod_base = OTHER; note = 2'-O-methylguanosine-3'-phosphate
  modified_base 2: mod_base = OTHER; note = 2'-O-methyluridine-3'-phosphate
  modified_base 3: mod_base = OTHER; note = 2'-O-methylguanosine-3'-phosphate
  modified_base 4: mod_base = OTHER; note = 2'-O-methyladenosine-3'-phosphate
  modified_base 5: mod_base = OTHER; note = 2'-O-methylcytidine-3'-phosphate
  modified_base 6: mod_base = OTHER; note = 2'-O-methyluridine-3'-phosphate
  modified_base 7: mod_base = OTHER; note = 2'-deoxy-2'-fluoroguanosine-3'-phosphate
  modified_base 8: mod_base = OTHER; note = 2'-O-methyluridine-3'-phosphate
  modified_base 9: mod_base = OTHER; note = 2'-deoxy-2'-fluoroadenosine-3'-phosphate
  modified_base 10: mod_base = OTHER; note = 2'-deoxy-2'-fluorouridine-3'-phosphate
  modified_base 11: mod_base = OTHER; note = 2'-deoxy-2'-fluorouridine-3'-phosphate
  modified_base 12: mod_base = OTHER; note = 2'-O-methyluridine-3'-phosphate
  modified_base 13: mod_base = OTHER; note = 2'-O-methylcytidine-3'-phosphate
  modified_base 14: mod_base = OTHER; note = 2'-O-methylcytidine-3'-phosphate
  modified_base 15: mod_base = OTHER; note = 2'-O-methyluridine-3'-phosphate
  modified_base 16: mod_base = OTHER; note = 2'-O-methylguanosine-3'-phosphate
  modified_base 17: mod_base = OTHER; note = 2'-O-methyladenosine-3'-phosphate
  modified_base 18: mod_base = OTHER; note = 2'-O-methyluridine-3'-phosphate
  modified_base 19: mod_base = OTHER; note = 2'-O-methylcytidine-3'-phosphate
  modified_base 20: mod_base = OTHER; note = 2'-O-methyladenosine-3'-phosphate
  modified_base 21: mod_base = OTHER; note = 2'-O-methyladenosine
gtgactgtatttcctgatcaa

SEQ ID NO: 4336 - RNA, 21 nt, synthetic construct
  source 1..21: mol_type = other RNA
  modified_base 1: mod_base = OTHER; note = 2'-O-methyluridine-3'-phosphate
  modified_base 2: mod_base = OTHER; note = 2'-O-methylguanosine-3'-phosphate
  modified_base 3: mod_base = OTHER; note = 2'-O-methyladenosine-3'-phosphate
  modified_base 4: mod_base = OTHER; note = 2'-O-methylcytidine-3'-phosphate
  modified_base 5: mod_base = OTHER; note = 2'-O-methyluridine-3'-phosphate
  modified_base 6: mod_base = OTHER; note = 2'-O-methylguanosine-3'-phosphate
  modified_base 7: mod_base = OTHER; note = 2'-deoxy-2'-fluorouridine-3'-phosphate
  modified_base 8: mod_base = OTHER; note = 2'-O-methyladenosine-3'-phosphate
  modified_base 9: mod_base = OTHER; note = 2'-deoxy-2'-fluorouridine-3'-phosphate
  modified_base 10: mod_base = OTHER; note = 2'-deoxy-2'-fluorouridine-3'-phosphate
  modified_base 11: mod_base = OTHER; note = 2'-deoxy-2'-fluorouridine-3'-phosphate
  modified_base 12: mod_base = OTHER; note = 2'-O-methylcytidine-3'-phosphate
  modified_base 13: mod_base = OTHER; note = 2'-O-methylcytidine-3'-phosphate
  modified_base 14: mod_base = OTHER; note = 2'-O-methyluridine-3'-phosphate
  modified_base 15: mod_base = OTHER; note = 2'-O-methylguanosine-3'-phosphate
  modified_base 16: mod_base = OTHER; note = 2'-O-methyladenosine-3'-phosphate
  modified_base 17: mod_base = OTHER; note = 2'-O-methyluridine-3'-phosphate
  modified_base 18: mod_base = OTHER; note = 2'-O-methylcytidine-3'-phosphate
  modified_base 19: mod_base = OTHER; note = 2'-O-methyladenosine-3'-phosphate
  modified_base 20: mod_base = OTHER; note = 2'-O-methyluridine-3'-phosphate
  modified_base 21: mod_base = OTHER; note = 2'-O-methyladenosine
tgactgtatttcctgatcata

SEQ ID NO: 4337 - RNA, 21 nt, synthetic construct
  source 1..21: mol_type = other RNA
  modified_base 1: mod_base = OTHER; note = 2'-O-methylguanosine-3'-phosphate
  modified_base 2: mod_base = OTHER; note = 2'-O-methyladenosine-3'-phosphate
  modified_base 3: mod_base = OTHER; note = 2'-O-methylcytidine-3'-phosphate
  modified_base 4: mod_base = OTHER; note = 2'-O-methyluridine-3'-phosphate
  modified_base 5: mod_base = OTHER; note = 2'-O-methylguanosine-3'-phosphate
  modified_base 6: mod_base = OTHER; note = 2'-O-methyluridine-3'-phosphate
  modified_base 7: mod_base = OTHER; note = 2'-deoxy-2'-fluoroadenosine-3'-phosphate
  modified_base 8: mod_base = OTHER; note = 2'-O-methyluridine-3'-phosphate
  modified_base 9: mod_base = OTHER; note = 2'-deoxy-2'-fluorouridine-3'-phosphate
  modified_base 10: mod_base = OTHER; note = 2'-deoxy-2'-fluorouridine-3'-phosphate
  modified_base 11: mod_base = OTHER; note = 2'-deoxy-2'-fluorocytidine-3'-phosphate
  modified_base 12: mod_base = OTHER; note = 2'-O-methylcytidine-3'-phosphate
  modified_base 13: mod_base = OTHER; note = 2'-O-methyluridine-3'-phosphate
  modified_base 14: mod_base = OTHER; note = 2'-O-methylguanosine-3'-phosphate
  modified_base 15: mod_base = OTHER; note = 2'-O-methyladenosine-3'-phosphate
  modified_base 16: mod_base = OTHER; note = 2'-O-methyluridine-3'-phosphate
  modified_base 17: mod_base = OTHER; note = 2'-O-methylcytidine-3'-phosphate
  modified_base 18: mod_base = OTHER; note = 2'-O-methyladenosine-3'-phosphate
  modified_base 19: mod_base = OTHER; note = 2'-O-methyluridine-3'-phosphate
  modified_base 20: mod_base = OTHER; note = 2'-O-methyluridine-3'-phosphate
  modified_base 21: mod_base = OTHER; note = 2'-O-methyladenosine
gactgtatttcctgatcatta

SEQ ID NO: 4338 - RNA, 21 nt, synthetic construct
  source 1..21: mol_type = other RNA
  modified_base 1: mod_base = OTHER; note = 2'-O-methyladenosine-3'-phosphate
  modified_base 2: mod_base = OTHER; note = 2'-O-methylcytidine-3'-phosphate
  modified_base 3: mod_base = OTHER; note = 2'-O-methyluridine-3'-phosphate
  modified_base 4: mod_base = OTHER; note = 2'-O-methylguanosine-3'-phosphate
  modified_base 5: mod_base = OTHER; note = 2'-O-methyluridine-3'-phosphate
  modified_base 6: mod_base = OTHER; note = 2'-O-methyladenosine-3'-phosphate
  modified_base 7: mod_base = OTHER; note = 2'-deoxy-2'-fluorouridine-3'-phosphate
  modified_base 8: mod_base = OTHER; note = 2'-O-methyluridine-3'-phosphate
  modified_base 9: mod_base = OTHER; note = 2'-deoxy-2'-fluorouridine-3'-phosphate
  modified_base 10: mod_base = OTHER; note = 2'-deoxy-2'-fluorocytidine-3'-phosphate
  modified_base 11: mod_base = OTHER; note = 2'-deoxy-2'-fluorocytidine-3'-phosphate
  modified_base 12: mod_base = OTHER; note = 2'-O-methyluridine-3'-phosphate
  modified_base 13: mod_base = OTHER; note = 2'-O-methylguanosine-3'-phosphate
  modified_base 14: mod_base = OTHER; note = 2'-O-methyladenosine-3'-phosphate
  modified_base 15: mod_base = OTHER; note = 2'-O-methyluridine-3'-phosphate
  modified_base 16: mod_base = OTHER; note = 2'-O-methylcytidine-3'-phosphate
  modified_base 17: mod_base = OTHER; note = 2'-O-methyladenosine-3'-phosphate
  modified_base 18: mod_base = OTHER; note = 2'-O-methyluridine-3'-phosphate
  modified_base 19: mod_base = OTHER; note = 2'-O-methyluridine-3'-phosphate
  modified_base 20: mod_base = OTHER; note = 2'-O-methylguanosine-3'-phosphate
  modified_base 21: mod_base = OTHER; note = 2'-O-methyladenosine
actgtatttcctgatcattga

SEQ ID NO: 4339 - RNA, 21 nt, synthetic construct
  source 1..21: mol_type = other RNA
  modified_base 1: mod_base = OTHER; note = 2'-O-methylcytidine-3'-phosphate
  modified_base 2: mod_base = OTHER; note = 2'-O-methyluridine-3'-phosphate
  modified_base 3: mod_base = OTHER; note = 2'-O-methylguanosine-3'-phosphate
  modified_base 4: mod_base = OTHER; note = 2'-O-methyluridine-3'-phosphate
  modified_base 5: mod_base = OTHER; note = 2'-O-methyladenosine-3'-phosphate
  modified_base 6: mod_base = OTHER; note = 2'-O-methyluridine-3'-phosphate
  modified_base 7: mod_base = OTHER; note = 2'-deoxy-2'-fluorouridine-3'-phosphate
  modified_base 8: mod_base = OTHER; note = 2'-O-methyluridine-3'-phosphate
  modified_base 9: mod_base = OTHER; note = 2'-deoxy-2'-fluorocytidine-3'-phosphate
  modified_base 10: mod_base = OTHER; note = 2'-deoxy-2'-fluorocytidine-3'-phosphate
  modified_base 11: mod_base = OTHER; note = 2'-deoxy-2'-fluorouridine-3'-phosphate
  modified_base 12: mod_base = OTHER; note = 2'-O-methylguanosine-3'-phosphate
  modified_base 13: mod_base = OTHER; note = 2'-O-methyladenosine-3'-phosphate
  modified_base 14: mod_base = OTHER; note = 2'-O-methyluridine-3'-phosphate
  modified_base 15: mod_base = OTHER; note = 2'-O-methylcytidine-3'-phosphate
  modified_base 16: mod_base = OTHER; note = 2'-O-methyladenosine-3'-phosphate
  modified_base 17: mod_base = OTHER; note = 2'-O-methyluridine-3'-phosphate
  modified_base 18: mod_base = OTHER; note = 2'-O-methyluridine-3'-phosphate
  modified_base 19: mod_base = OTHER; note = 2'-O-methylguanosine-3'-phosphate
  modified_base 20: mod_base = OTHER; note = 2'-O-methylguanosine-3'-phosphate
  modified_base 21: mod_base = OTHER; note = 2'-O-methyladenosine
ctgtatttcctgatcattgga

SEQ ID NO: 4340 - RNA, 21 nt, synthetic construct
  source 1..21: mol_type = other RNA
  modified_base 1: mod_base = OTHER; note = 2'-O-methyluridine-3'-phosphate
  modified_base 2: mod_base = OTHER; note = 2'-O-methylguanosine-3'-phosphate
  modified_base 3: mod_base = OTHER; note = 2'-O-methyluridine-3'-phosphate
  modified_base 4: mod_base = OTHER; note = 2'-O-methyladenosine-3'-phosphate
  modified_base 5: mod_base = OTHER; note = 2'-O-methyluridine-3'-phosphate
  modified_base 6: mod_base = OTHER; note = 2'-O-methyluridine-3'-phosphate
  modified_base 7: mod_base = OTHER; note = 2'-deoxy-2'-fluorouridine-3'-phosphate
  modified_base 8: mod_base = OTHER; note = 2'-O-methylcytidine-3'-phosphate
  modified_base 9: mod_base = OTHER; note = 2'-deoxy-2'-fluorocytidine-3'-phosphate
  modified_base 10: mod_base = OTHER; note = 2'-deoxy-2'-fluorouridine-3'-phosphate
  modified_base 11: mod_base = OTHER; note = 2'-deoxy-2'-fluoroguanosine-3'-phosphate
  modified_base 12: mod_base = OTHER; note = 2'-O-methyladenosine-3'-phosphate
  modified_base 13: mod_base = OTHER; note = 2'-O-methyluridine-3'-phosphate
  modified_base 14: mod_base = OTHER; note = 2'-O-methylcytidine-3'-phosphate
  modified_base 15: mod_base = OTHER; note = 2'-O-methyladenosine-3'-phosphate
  modified_base 16: mod_base = OTHER; note = 2'-O-methyluridine-3'-phosphate
  modified_base 17: mod_base = OTHER; note = 2'-O-methyluridine-3'-phosphate
  modified_base 18: mod_base = OTHER; note = 2'-O-methylguanosine-3'-phosphate
  modified_base 19: mod_base = OTHER; note = 2'-O-methylguanosine-3'-phosphate
  modified_base 20: mod_base = OTHER; note = 2'-O-methyluridine-3'-phosphate
  modified_base 21: mod_base = OTHER; note = 2'-O-methyladenosine
tgtatttcctgatcattggta

SEQ ID NO: 4341 - RNA, 21 nt, synthetic construct
  source 1..21: mol_type = other RNA
  modified_base 1: mod_base = OTHER; note = 2'-O-methylguanosine-3'-phosphate
  modified_base 2: mod_base = OTHER; note = 2'-O-methyluridine-3'-phosphate
  modified_base 3: mod_base = OTHER; note = 2'-O-methyladenosine-3'-phosphate
  modified_base 4: mod_base = OTHER; note = 2'-O-methyluridine-3'-phosphate
  modified_base 5: mod_base = OTHER; note = 2'-O-methyluridine-3'-phosphate
  modified_base 6: mod_base = OTHER; note = 2'-O-methyluridine-3'-phosphate
  modified_base 7: mod_base = OTHER; note = 2'-deoxy-2'-fluorocytidine-3'-phosphate
  modified_base 8: mod_base = OTHER; note = 2'-O-methylcytidine-3'-phosphate
  modified_base 9: mod_base = OTHER; note = 2'-deoxy-2'-fluorouridine-3'-phosphate
  modified_base 10: mod_base = OTHER; note = 2'-deoxy-2'-fluoroguanosine-3'-phosphate
  modified_base 11: mod_base = OTHER; note = 2'-deoxy-2'-fluoroadenosine-3'-phosphate
  modified_base 12: mod_base = OTHER; note = 2'-O-methyluridine-3'-phosphate
  modified_base 13: mod_base = OTHER; note = 2'-O-methylcytidine-3'-phosphate
  modified_base 14: mod_base = OTHER; note = 2'-O-methyladenosine-3'-phosphate
  modified_base 15: mod_base = OTHER; note = 2'-O-methyluridine-3'-phosphate
  modified_base 16: mod_base = OTHER; note = 2'-O-methyluridine-3'-phosphate
  modified_base 17: mod_base = OTHER; note = 2'-O-methylguanosine-3'-phosphate
  modified_base 18: mod_base = OTHER; note = 2'-O-methylguanosine-3'-phosphate
  modified_base 19: mod_base = OTHER; note = 2'-O-methyluridine-3'-phosphate
  modified_base 20: mod_base = OTHER; note = 2'-O-methylcytidine-3'-phosphate
  modified_base 21: mod_base = OTHER; note = 2'-O-methyladenosine
gtatttcctgatcattggtca

SEQ ID NO: 4342 - RNA, 21 nt, synthetic construct
  source 1..21: mol_type = other RNA
  modified_base 1: mod_base = OTHER; note = 2'-O-methylguanosine-3'-phosphate
  modified_base 2: mod_base = OTHER; note = 2'-O-methylguanosine-3'-phosphate
  modified_base 3: mod_base = OTHER; note = 2'-O-methyladenosine-3'-phosphate
  modified_base 4: mod_base = OTHER; note = 2'-O-methylguanosine-3'-phosphate
  modified_base 5: mod_base = OTHER; note = 2'-O-methyladenosine-3'-phosphate
  modified_base 6: mod_base = OTHER; note = 2'-O-methyluridine-3'-phosphate
  modified_base 7: mod_base = OTHER; note = 2'-deoxy-2'-fluorouridine-3'-phosphate
  modified_base 8: mod_base = OTHER; note = 2'-O-methyladenosine-3'-phosphate
  modified_base 9: mod_base = OTHER; note = 2'-deoxy-2'-fluorocytidine-3'-phosphate
  modified_base 10: mod_base = OTHER; note = 2'-deoxy-2'-fluorocytidine-3'-phosphate
  modified_base 11: mod_base = OTHER; note = 2'-deoxy-2'-fluorocytidine-3'-phosphate
  modified_base 12: mod_base = OTHER; note = 2'-O-methyluridine-3'-phosphate
  modified_base 13: mod_base = OTHER; note = 2'-O-methyluridine-3'-phosphate
  modified_base 14: mod_base = OTHER; note = 2'-O-methyladenosine-3'-phosphate
  modified_base 15: mod_base = OTHER; note = 2'-O-methyluridine-3'-phosphate
  modified_base 16: mod_base = OTHER; note = 2'-O-methyladenosine-3'-phosphate
  modified_base 17: mod_base = OTHER; note = 2'-O-methylcytidine-3'-phosphate
  modified_base 18: mod_base = OTHER; note = 2'-O-methylcytidine-3'-phosphate
  modified_base 19: mod_base = OTHER; note = 2'-O-methylcytidine-3'-phosphate
  modified_base 20: mod_base = OTHER; note = 2'-O-methyladenosine-3'-phosphate
  modified_base 21: mod_base = OTHER; note = 2'-O-methyladenosine
ggagattacccttatacccaa

SEQ ID NO: 4343 - RNA, 21 nt, synthetic construct
  source 1..21: mol_type = other RNA
  modified_base 1: mod_base = OTHER; note = 2'-O-methylguanosine-3'-phosphate
  modified_base 2: mod_base = OTHER; note = 2'-O-methyluridine-3'-phosphate
  modified_base 3: mod_base = OTHER; note = 2'-O-methylguanosine-3'-phosphate
  modified_base 4: mod_base = OTHER; note = 2'-O-methylcytidine-3'-phosphate
  modified_base 5: mod_base = OTHER; note = 2'-O-methylguanosine-3'-phosphate
  modified_base 6: mod_base = OTHER; note = 2'-O-methylguanosine-3'-phosphate
  modified_base 7: mod_base = OTHER; note = 2'-deoxy-2'-fluoroguanosine-3'-phosphate
  modified_base 8: mod_base = OTHER; note = 2'-O-methylcytidine-3'-phosphate
  modified_base 9: mod_base = OTHER; note = 2'-deoxy-2'-fluorouridine-3'-phosphate
  modified_base 10: mod_base = OTHER; note = 2'-deoxy-2'-fluoroadenosine-3'-phosphate
  modified_base 11: mod_base = OTHER; note = 2'-deoxy-2'-fluoroadenosine-3'-phosphate
  modified_base 12: mod_base = OTHER; note = 2'-O-methyladenosine-3'-phosphate
  modified_base 13: mod_base = OTHER; note = 2'-O-methyladenosine-3'-phosphate
  modified_base 14: mod_base = OTHER; note = 2'-O-methyluridine-3'-phosphate
  modified_base 15: mod_base = OTHER; note = 2'-O-methylcytidine-3'-phosphate
  modified_base 16: mod_base = OTHER; note = 2'-O-methylcytidine-3'-phosphate
  modified_base 17: mod_base = OTHER; note = 2'-O-methyladenosine-3'-phosphate
  modified_base 18: mod_base = OTHER; note = 2'-O-methyladenosine-3'-phosphate
  modified_base 19: mod_base = OTHER; note = 2'-O-methylcytidine-3'-phosphate
  modified_base 20: mod_base = OTHER; note = 2'-O-methyluridine-3'-phosphate
  modified_base 21: mod_base = OTHER; note = 2'-O-methyladenosine
gtgcgggctaaaatccaacta

SEQ ID NO: 4344 - RNA, 21 nt, synthetic construct
  source 1..21: mol_type = other RNA
  modified_base 1: mod_base = OTHER; note = 2'-O-methyluridine-3'-phosphate
  modified_base 2: mod_base = OTHER; note = 2'-O-methylguanosine-3'-phosphate
  modified_base 3: mod_base = OTHER; note = 2'-O-methylcytidine-3'-phosphate
  modified_base 4: mod_base = OTHER; note = 2'-O-methylguanosine-3'-phosphate
  modified_base 5: mod_base = OTHER; note = 2'-O-methylguanosine-3'-phosphate
  modified_base 6: mod_base = OTHER; note = 2'-O-methylguanosine-3'-phosphate
  modified_base 7: mod_base = OTHER; note = 2'-deoxy-2'-fluorocytidine-3'-phosphate
  modified_base 8: mod_base = OTHER; note = 2'-O-methyluridine-3'-phosphate
  modified_base 9: mod_base = OTHER; note = 2'-deoxy-2'-fluoroadenosine-3'-phosphate
  modified_base 10: mod_base = OTHER; note = 2'-deoxy-2'-fluoroadenosine-3'-phosphate
  modified_base 11: mod_base = OTHER; note = 2'-deoxy-2'-fluoroadenosine-3'-phosphate
  modified_base 12: mod_base = OTHER; note = 2'-O-methyladenosine-3'-phosphate
  modified_base 13: mod_base = OTHER; note = 2'-O-methyluridine-3'-phosphate
  modified_base 14: mod_base = OTHER; note = 2'-O-methylcytidine-3'-phosphate
  modified_base 15: mod_base = OTHER; note = 2'-O-methylcytidine-3'-phosphate
  modified_base 16: mod_base = OTHER; note = 2'-O-methyladenosine-3'-phosphate
  modified_base 17: mod_base = OTHER; note = 2'-O-methyladenosine-3'-phosphate
  modified_base 18: mod_base = OTHER; note = 2'-O-methylcytidine-3'-phosphate
  modified_base 19: mod_base = OTHER; note = 2'-O-methyluridine-3'-phosphate
  modified_base 20: mod_base = OTHER; note = 2'-O-methylguanosine-3'-phosphate
  modified_base 21: mod_base = OTHER; note = 2'-O-methyladenosine
tgcgggctaaaatccaactga

SEQ ID NO: 4345 - RNA, 21 nt, synthetic construct
  source 1..21: mol_type = other RNA
  modified_base 1: mod_base = OTHER; note = 2'-O-methylguanosine-3'-phosphate
  modified_base 2: mod_base = OTHER; note = 2'-O-methylcytidine-3'-phosphate
  modified_base 3: mod_base = OTHER; note = 2'-O-methylguanosine-3'-phosphate
  modified_base 4: mod_base = OTHER; note = 2'-O-methylguanosine-3'-phosphate
  modified_base 5: mod_base = OTHER; note = 2'-O-methylguanosine-3'-phosphate
  modified_base 6: mod_base = OTHER; note = 2'-O-methylcytidine-3'-phosphate
  modified_base 7: mod_base = OTHER; note = 2'-deoxy-2'-fluorouridine-3'-phosphate
  modified_base 8: mod_base = OTHER; note = 2'-O-methyladenosine-3'-phosphate
  modified_base 9: mod_base = OTHER; note = 2'-deoxy-2'-fluoroadenosine-3'-phosphate
  modified_base 10: mod_base = OTHER; note = 2'-deoxy-2'-fluoroadenosine-3'-phosphate
  modified_base 11: mod_base = OTHER; note = 2'-deoxy-2'-fluoroadenosine-3'-phosphate
  modified_base 12: mod_base = OTHER; note = 2'-O-methyluridine-3'-phosphate
  modified_base 13: mod_base = OTHER; note = 2'-O-methylcytidine-3'-phosphate
  modified_base 14: mod_base = OTHER; note = 2'-O-methylcytidine-3'-phosphate
  modified_base 15: mod_base = OTHER; note = 2'-O-methyladenosine-3'-phosphate
  modified_base 16: mod_base = OTHER; note = 2'-O-methyladenosine-3'-phosphate
  modified_base 17: mod_base = OTHER; note = 2'-O-methylcytidine-3'-phosphate
  modified_base 18: mod_base = OTHER; note = 2'-O-methyluridine-3'-phosphate
  modified_base 19: mod_base = OTHER; note = 2'-O-methylguanosine-3'-phosphate
  modified_base 20: mod_base = OTHER; note = 2'-O-methylcytidine-3'-phosphate
  modified_base 21: mod_base = OTHER; note = 2'-O-methyladenosine
gcgggctaaaatccaactgca

SEQ ID NO: 4346 - RNA, 21 nt, synthetic construct
  source 1..21: mol_type = other RNA
  modified_base 1: mod_base = OTHER; note = 2'-O-methylcytidine-3'-phosphate
  modified_base 2: mod_base = OTHER; note = 2'-O-methylguanosine-3'-phosphate
  modified_base 3: mod_base = OTHER; note = 2'-O-methylguanosine-3'-phosphate
  modified_base 4: mod_base = OTHER; note = 2'-O-methylguanosine-3'-phosphate
  modified_base 5: mod_base = OTHER; note = 2'-O-methylcytidine-3'-phosphate
  modified_base 6: mod_base = OTHER; note = 2'-O-methyluridine-3'-phosphate
  modified_base 7: mod_base = OTHER; note = 2'-deoxy-2'-fluoroadenosine-3'-phosphate
  modified_base 8: mod_base = OTHER; note = 2'-O-methyladenosine-3'-phosphate
  modified_base 9: mod_base = OTHER; note = 2'-deoxy-2'-fluoroadenosine-3'-phosphate
  modified_base 10: mod_base = OTHER; note = 2'-deoxy-2'-fluoroadenosine-3'-phosphate
  modified_base 11: mod_base = OTHER; note = 2'-deoxy-2'-fluorouridine-3'-phosphate
  modified_base 12: mod_base = OTHER; note = 2'-O-methylcytidine-3'-phosphate
  modified_base 13: mod_base = OTHER; note = 2'-O-methylcytidine-3'-phosphate
  modified_base 14: mod_base = OTHER; note = 2'-O-methyladenosine-3'-phosphate
  modified_base 15: mod_base = OTHER; note = 2'-O-methyladenosine-3'-phosphate
  modified_base 16: mod_base = OTHER; note = 2'-O-methylcytidine-3'-phosphate
  modified_base 17: mod_base = OTHER; note = 2'-O-methyluridine-3'-phosphate
  modified_base 18: mod_base = OTHER; note = 2'-O-methylguanosine-3'-phosphate
  modified_base 19: mod_base = OTHER; note = 2'-O-methylcytidine-3'-phosphate
  modified_base 20: mod_base = OTHER; note = 2'-O-methyladenosine-3'-phosphate
  modified_base 21: mod_base = OTHER; note = 2'-O-methyladenosine
cgggctaaaatccaactgcaa

SEQ ID NO: 4347 - RNA, 21 nt, synthetic construct
  source 1..21: mol_type = other RNA
  modified_base 1: mod_base = OTHER; note = 2'-O-methylguanosine-3'-phosphate
  modified_base 2: mod_base = OTHER; note = 2'-O-methylguanosine-3'-phosphate
  modified_base 3: mod_base = OTHER; note = 2'-O-methylguanosine-3'-phosphate
  modified_base 4: mod_base = OTHER; note = 2'-O-methylcytidine-3'-phosphate
  modified_base 5: mod_base = OTHER; note = 2'-O-methyluridine-3'-phosphate
  modified_base 6: mod_base = OTHER; note = 2'-O-methyladenosine-3'-phosphate
  modified_base 7: mod_base = OTHER; note = 2'-deoxy-2'-fluoroadenosine-3'-phosphate
  modified_base 8: mod_base = OTHER; note = 2'-O-methyladenosine-3'-phosphate
  modified_base 9: mod_base = OTHER; note = 2'-deoxy-2'-fluoroadenosine-3'-phosphate
  modified_base 10: mod_base = OTHER; note = 2'-deoxy-2'-fluorouridine-3'-phosphate
  modified_base 11: mod_base = OTHER; note = 2'-deoxy-2'-fluorocytidine-3'-phosphate
  modified_base 12: mod_base = OTHER; note = 2'-O-methylcytidine-3'-phosphate
  modified_base 13: mod_base = OTHER; note = 2'-O-methyladenosine-3'-phosphate
  modified_base 14: mod_base = OTHER; note = 2'-O-methyladenosine-3'-phosphate
  modified_base 15: mod_base = OTHER; note = 2'-O-methylcytidine-3'-phosphate
  modified_base 16: mod_base = OTHER; note = 2'-O-methyluridine-3'-phosphate
  modified_base 17: mod_base = OTHER; note = 2'-O-methylguanosine-3'-phosphate
  modified_base 18: mod_base = OTHER; note = 2'-O-methylcytidine-3'-phosphate
  modified_base 19: mod_base = OTHER; note = 2'-O-methyladenosine-3'-phosphate
  modified_base 20: mod_base = OTHER; note = 2'-O-methyladenosine-3'-phosphate
  modified_base 21: mod_base = OTHER; note = 2'-O-methyladenosine
gggctaaaatccaactgcaaa

SEQ ID NO: 4348 - RNA, 21 nt, synthetic construct
  source 1..21: mol_type = other RNA
  modified_base 1: mod_base = OTHER; note = 2'-O-methylguanosine-3'-phosphate
  modified_base 2: mod_base = OTHER; note = 2'-O-methylguanosine-3'-phosphate
  modified_base 3: mod_base = OTHER; note = 2'-O-methylcytidine-3'-phosphate
  modified_base 4: mod_base = OTHER; note = 2'-O-methyluridine-3'-phosphate
  modified_base 5: mod_base = OTHER; note = 2'-O-methyladenosine-3'-phosphate
  modified_base 6: mod_base = OTHER; note = 2'-O-methyladenosine-3'-phosphate
  modified_base 7: mod_base = OTHER; note = 2'-deoxy-2'-fluoroadenosine-3'-phosphate
  modified_base 8: mod_base = OTHER; note = 2'-O-methyladenosine-3'-phosphate
  modified_base 9: mod_base = OTHER; note = 2'-deoxy-2'-fluorouridine-3'-phosphate
  modified_base 10: mod_base = OTHER; note = 2'-deoxy-2'-fluorocytidine-3'-phosphate
  modified_base 11: mod_base = OTHER; note = 2'-deoxy-2'-fluorocytidine-3'-phosphate
  modified_base 12: mod_base = OTHER; note = 2'-O-methyladenosine-3'-phosphate
  modified_base 13: mod_base = OTHER; note = 2'-O-methyladenosine-3'-phosphate
  modified_base 14: mod_base = OTHER; note = 2'-O-methylcytidine-3'-phosphate
  modified_base 15: mod_base = OTHER; note = 2'-O-methyluridine-3'-phosphate
  modified_base 16: mod_base = OTHER; note = 2'-O-methylguanosine-3'-phosphate
  modified_base 17: mod_base = OTHER; note = 2'-O-methylcytidine-3'-phosphate
  modified_base 18: mod_base = OTHER; note = 2'-O-methyladenosine-3'-phosphate
  modified_base 19: mod_base = OTHER; note = 2'-O-methyladenosine-3'-phosphate
  modified_base 20: mod_base = OTHER; note = 2'-O-methyluridine-3'-phosphate
  modified_base 21: mod_base = OTHER; note = 2'-O-methyladenosine
ggctaaaatccaactgcaata

SEQ ID NO: 4349 - RNA, 21 nt, synthetic construct
  source 1..21: mol_type = other RNA
  modified_base 1: mod_base = OTHER; note = 2'-O-methylguanosine-3'-phosphate
  modified_base 2: mod_base = OTHER; note = 2'-O-methylcytidine-3'-phosphate
  modified_base 3: mod_base = OTHER; note = 2'-O-methyluridine-3'-phosphate
  modified_base 4: mod_base = OTHER; note = 2'-O-methyladenosine-3'-phosphate
  modified_base 5: mod_base = OTHER; note = 2'-O-methyladenosine-3'-phosphate
  modified_base 6: mod_base = OTHER; note = 2'-O-methyladenosine-3'-phosphate
  modified_base 7: mod_base = OTHER; note = 2'-deoxy-2'-fluoroadenosine-3'-phosphate
  modified_base 8: mod_base = OTHER; note = 2'-O-methyluridine-3'-phosphate
  modified_base 9: mod_base = OTHER; note = 2'-deoxy-2'-fluorocytidine-3'-phosphate
  modified_base 10: mod_base = OTHER; note = 2'-deoxy-2'-fluorocytidine-3'-phosphate
  modified_base 11: mod_base = OTHER; note = 2'-deoxy-2'-fluoroadenosine-3'-phosphate
  modified_base 12: mod_base = OTHER; note = 2'-O-methyladenosine-3'-phosphate
  modified_base 13: mod_base = OTHER; note = 2'-O-methylcytidine-3'-phosphate
  modified_base 14: mod_base = OTHER; note = 2'-O-methyluridine-3'-phosphate
  modified_base 15: mod_base = OTHER; note = 2'-O-methylguanosine-3'-phosphate
  modified_base 16: mod_base = OTHER; note = 2'-O-methylcytidine-3'-phosphate
  modified_base 17: mod_base = OTHER; note = 2'-O-methyladenosine-3'-phosphate
  modified_base 18: mod_base = OTHER; note = 2'-O-methyladenosine-3'-phosphate
  modified_base 19: mod_base = OTHER; note = 2'-O-methyluridine-3'-phosphate
  modified_base 20: mod_base = OTHER; note = 2'-O-methyluridine-3'-phosphate
  modified_base 21: mod_base = OTHER; note = 2'-O-methyladenosine
gctaaaatccaactgcaatta

SEQ ID NO: 4350 - RNA, 21 nt, synthetic construct
  source 1..21: mol_type = other RNA
  modified_base 1: mod_base = OTHER; note = 2'-O-methylcytidine-3'-phosphate
  modified_base 2: mod_base = OTHER; note = 2'-O-methyluridine-3'-phosphate
  modified_base 3: mod_base = OTHER; note = 2'-O-methyladenosine-3'-phosphate
  modified_base 4: mod_base = OTHER; note = 2'-O-methyladenosine-3'-phosphate
  modified_base 5: mod_base = OTHER; note = 2'-O-methyladenosine-3'-phosphate
  modified_base 6: mod_base = OTHER; note = 2'-O-methyladenosine-3'-phosphate
  modified_base 7: mod_base = OTHER; note = 2'-deoxy-2'-fluorouridine-3'-phosphate
  modified_base 8: mod_base = OTHER; note = 2'-O-methylcytidine-3'-phosphate
  modified_base 9: mod_base = OTHER; note = 2'-deoxy-2'-fluorocytidine-3'-phosphate
  modified_base 10: mod_base = OTHER; note = 2'-deoxy-2'-fluoroadenosine-3'-phosphate
  modified_base 11: mod_base = OTHER; note = 2'-deoxy-2'-fluoroadenosine-3'-phosphate
  modified_base 12: mod_base = OTHER; note = 2'-O-methylcytidine-3'-phosphate
  modified_base 13: mod_base = OTHER; note = 2'-O-methyluridine-3'-phosphate
  modified_base 14: mod_base = OTHER; note = 2'-O-methylguanosine-3'-phosphate
  modified_base 15: mod_base = OTHER; note = 2'-O-methylcytidine-3'-phosphate
  modified_base 16: mod_base = OTHER; note = 2'-O-methyladenosine-3'-phosphate
  modified_base 17: mod_base = OTHER; note = 2'-O-methyladenosine-3'-phosphate
  modified_base 18: mod_base = OTHER; note = 2'-O-methyluridine-3'-phosphate
  modified_base 19: mod_base = OTHER; note = 2'-O-methyluridine-3'-phosphate
  modified_base 20: mod_base = OTHER; note = 2'-O-methylguanosine-3'-phosphate
  modified_base 21: mod_base = OTHER; note = 2'-O-methyladenosine
ctaaaatccaactgcaattga

SEQ ID NO: 4351 - RNA, 21 nt, synthetic construct
  source 1..21: mol_type = other RNA
  modified_base 1: mod_base = OTHER; note = 2'-O-methyluridine-3'-phosphate
  modified_base 2: mod_base = OTHER; note = 2'-O-methyladenosine-3'-phosphate
  modified_base 3: mod_base = OTHER; note = 2'-O-methyladenosine-3'-phosphate
  modified_base 4: mod_base = OTHER; note = 2'-O-methyladenosine-3'-phosphate
  modified_base 5: mod_base = OTHER; note = 2'-O-methyladenosine-3'-phosphate
  modified_base 6: mod_base = OTHER; note = 2'-O-methyluridine-3'-phosphate
  modified_base 7: mod_base = OTHER; note = 2'-deoxy-2'-fluorocytidine-3'-phosphate
  modified_base 8: mod_base = OTHER; note = 2'-O-methylcytidine-3'-phosphate
  modified_base 9: mod_base = OTHER; note = 2'-deoxy-2'-fluoroadenosine-3'-phosphate
  modified_base 10: mod_base = OTHER; note = 2'-deoxy-2'-fluoroadenosine-3'-phosphate
  modified_base 11: mod_base = OTHER; note = 2'-deoxy-2'-fluorocytidine-3'-phosphate
  modified_base 12: mod_base = OTHER; note = 2'-O-methyluridine-3'-phosphate
  modified_base 13: mod_base = OTHER; note = 2'-O-methylguanosine-3'-phosphate
  modified_base 14: mod_base = OTHER; note = 2'-O-methylcytidine-3'-phosphate
  modified_base 15: mod_base = OTHER; note = 2'-O-methyladenosine-3'-phosphate
  modified_base 16: mod_base = OTHER; note = 2'-O-methyladenosine-3'-phosphate
  modified_base 17: mod_base = OTHER; note = 2'-O-methyluridine-3'-phosphate
  modified_base 18: mod_base = OTHER; note = 2'-O-methyluridine-3'-phosphate
  modified_base 19: mod_base = OTHER; note = 2'-O-methylguanosine-3'-phosphate
  modified_base 20: mod_base = OTHER; note = 2'-O-methylguanosine-3'-phosphate
  modified_base 21: mod_base = OTHER; note = 2'-O-methyladenosine
taaaatccaactgcaattgga

SEQ ID NO: 4352 - RNA, 21 nt, synthetic construct
  source 1..21: mol_type = other RNA
  modified_base 1: mod_base = OTHER; note = 2'-O-methyladenosine-3'-phosphate
  modified_base 2: mod_base = OTHER; note = 2'-O-methyladenosine-3'-phosphate
  modified_base 3: mod_base = OTHER; note = 2'-O-methyladenosine-3'-phosphate
  modified_base 4: mod_base = OTHER; note = 2'-O-methyladenosine-3'-phosphate
  modified_base 5: mod_base = OTHER; note = 2'-O-methyluridine-3'-phosphate
  modified_base 6: mod_base = OTHER; note = 2'-O-methylcytidine-3'-phosphate
  modified_base 7: mod_base = OTHER; note = 2'-deoxy-2'-fluorocytidine-3'-phosphate
  modified_base 8: mod_base = OTHER; note = 2'-O-methyladenosine-3'-phosphate
  modified_base 9: mod_base = OTHER; note = 2'-deoxy-2'-fluoroadenosine-3'-phosphate
  modified_base 10: mod_base = OTHER; note = 2'-deoxy-2'-fluorocytidine-3'-phosphate
  modified_base 11: mod_base = OTHER; note = 2'-deoxy-2'-fluorouridine-3'-phosphate
  modified_base 12: mod_base = OTHER; note = 2'-O-methylguanosine-3'-phosphate
  modified_base 13: mod_base = OTHER; note = 2'-O-methylcytidine-3'-phosphate
  modified_base 14: mod_base = OTHER; note = 2'-O-methyladenosine-3'-phosphate
  modified_base 15: mod_base = OTHER; note = 2'-O-methyladenosine-3'-phosphate
  modified_base 16: mod_base = OTHER; note = 2'-O-methyluridine-3'-phosphate
  modified_base 17: mod_base = OTHER; note = 2'-O-methyluridine-3'-phosphate
  modified_base 18: mod_base = OTHER; note = 2'-O-methylguanosine-3'-phosphate
  modified_base 19: mod_base = OTHER; note = 2'-O-methylguanosine-3'-phosphate
  modified_base 20: mod_base = OTHER; note = 2'-O-methylcytidine-3'-phosphate
  modified_base 21: mod_base = OTHER; note = 2'-O-methyladenosine
aaaatccaactgcaattggca

SEQ ID NO: 4353 - RNA, 21 nt, synthetic construct
  source 1..21: mol_type = other RNA
  modified_base 1: mod_base = OTHER; note = 2'-O-methyladenosine-3'-phosphate
  modified_base 2: mod_base = OTHER; note = 2'-O-methyladenosine-3'-phosphate
  modified_base 3: mod_base = OTHER; note = 2'-O-methyladenosine-3'-phosphate
  modified_base 4: mod_base = OTHER; note = 2'-O-methyluridine-3'-phosphate
  modified_base 5: mod_base = OTHER; note = 2'-O-methylcytidine-3'-phosphate
  modified_base 6: mod_base = OTHER; note = 2'-O-methylcytidine-3'-phosphate
  modified_base 7: mod_base = OTHER; note = 2'-deoxy-2'-fluoroadenosine-3'-phosphate
  modified_base 8: mod_base = OTHER; note = 2'-O-methyladenosine-3'-phosphate
  modified_base 9: mod_base = OTHER; note = 2'-deoxy-2'-fluorocytidine-3'-phosphate
  modified_base 10: mod_base = OTHER; note = 2'-deoxy-2'-fluorouridine-3'-phosphate
  modified_base 11: mod_base = OTHER; note = 2'-deoxy-2'-fluoroguanosine-3'-phosphate
  modified_base 12: mod_base = OTHER; note = 2'-O-methylcytidine-3'-phosphate
  modified_base 13: mod_base = OTHER; note = 2'-O-methyladenosine-3'-phosphate
  modified_base 14: mod_base = OTHER; note = 2'-O-methyladenosine-3'-phosphate
  modified_base 15: mod_base = OTHER; note = 2'-O-methyluridine-3'-phosphate
  modified_base 16: mod_base = OTHER; note = 2'-O-methyluridine-3'-phosphate
  modified_base 17: mod_base = OTHER; note = 2'-O-methylguanosine-3'-phosphate
  modified_base 18: mod_base = OTHER; note = 2'-O-methylguanosine-3'-phosphate
  modified_base 19: mod_base = OTHER; note = 2'-O-methylcytidine-3'-phosphate
  modified_base 20: mod_base = OTHER; note = 2'-O-methyluridine-3'-phosphate
  modified_base 21: mod_base = OTHER; note = 2'-O-methyladenosine
aaatccaactgcaattggcta

SEQ ID NO: 4354 - RNA, 21 nt, synthetic construct
  source 1..21: mol_type = other RNA
  modified_base 1: mod_base = OTHER; note = 2'-O-methyladenosine-3'-phosphate
  modified_base 2: mod_base = OTHER; note = 2'-O-methyladenosine-3'-phosphate
  modified_base 3: mod_base = OTHER; note = 2'-O-methyluridine-3'-phosphate
  modified_base 4: mod_base = OTHER; note = 2'-O-methylcytidine-3'-phosphate
  modified_base 5: mod_base = OTHER; note = 2'-O-methylcytidine-3'-phosphate
  modified_base 6: mod_base = OTHER; note = 2'-O-methyladenosine-3'-phosphate
  modified_base 7: mod_base = OTHER; note = 2'-deoxy-2'-fluoroadenosine-3'-phosphate
  modified_base 8: mod_base = OTHER; note = 2'-O-methylcytidine-3'-phosphate
  modified_base 9: mod_base = OTHER; note = 2'-deoxy-2'-fluorouridine-3'-phosphate
  modified_base 10: mod_base = OTHER; note = 2'-deoxy-2'-fluoroguanosine-3'-phosphate
  modified_base 11: mod_base = OTHER; note = 2'-deoxy-2'-fluorocytidine-3'-phosphate
  modified_base 12: mod_base = OTHER; note = 2'-O-methyladenosine-3'-phosphate
  modified_base 13: mod_base = OTHER; note = 2'-O-methyladenosine-3'-phosphate
  modified_base 14: mod_base = OTHER; note = 2'-O-methyluridine-3'-phosphate
  modified_base 15: mod_base = OTHER; note = 2'-O-methyluridine-3'-phosphate
  modified_base 16: mod_base = OTHER; note = 2'-O-methylguanosine-3'-phosphate
  modified_base 17: mod_base = OTHER; note = 2'-O-methylguanosine-3'-phosphate
  modified_base 18: mod_base = OTHER; note = 2'-O-methylcytidine-3'-phosphate
  modified_base 19: mod_base = OTHER; note = 2'-O-methyluridine-3'-phosphate
  modified_base 20: mod_base = OTHER; note = 2'-O-methylcytidine-3'-phosphate
  modified_base 21: mod_base = OTHER; note = 2'-O-methyladenosine
aatccaactgcaattggctca

SEQ ID NO: 4355 - RNA, 21 nt, synthetic construct
  source 1..21: mol_type = other RNA
  modified_base 1: mod_base = OTHER; note = 2'-O-methyladenosine-3'-phosphate
  modified_base 2: mod_base = OTHER; note = 2'-O-methyluridine-3'-phosphate
  modified_base 3: mod_base = OTHER; note = 2'-O-methylcytidine-3'-phosphate
  modified_base 4: mod_base = OTHER; note = 2'-O-methylcytidine-3'-phosphate
  modified_base 5: mod_base = OTHER; note = 2'-O-methyladenosine-3'-phosphate
  modified_base 6: mod_base = OTHER; note = 2'-O-methyladenosine-3'-phosphate
  modified_base 7: mod_base = OTHER; note = 2'-deoxy-2'-fluorocytidine-3'-phosphate
  modified_base 8: mod_base = OTHER; note = 2'-O-methyluridine-3'-phosphate
  modified_base 9: mod_base = OTHER; note = 2'-deoxy-2'-fluoroguanosine-3'-phosphate
  modified_base 10: mod_base = OTHER; note = 2'-deoxy-2'-fluorocytidine-3'-phosphate
  modified_base 11: mod_base = OTHER; note = 2'-deoxy-2'-fluoroadenosine-3'-phosphate
  modified_base 12: mod_base = OTHER; note = 2'-O-methyladenosine-3'-phosphate
  modified_base 13: mod_base = OTHER; note = 2'-O-methyluridine-3'-phosphate
  modified_base 14: mod_base = OTHER; note = 2'-O-methyluridine-3'-phosphate
  modified_base 15: mod_base = OTHER; note = 2'-O-methylguanosine-3'-phosphate
  modified_base 16: mod_base = OTHER; note = 2'-O-methylguanosine-3'-phosphate
  modified_base 17: mod_base = OTHER; note = 2'-O-methylcytidine-3'-phosphate
  modified_base 18: mod_base = OTHER; note = 2'-O-methyluridine-3'-phosphate
  modified_base 19: mod_base = OTHER; note = 2'-O-methylcytidine-3'-phosphate
  modified_base 20: mod_base = OTHER; note = 2'-O-methylcytidine-3'-phosphate
  modified_base 21: mod_base = OTHER; note = 2'-O-methyladenosine
atccaactgcaattggctcca

SEQ ID NO: 4356 - RNA, 21 nt, synthetic construct
  source 1..21: mol_type = other RNA
  modified_base 1: mod_base = OTHER; note = 2'-O-methyluridine-3'-phosphate
  modified_base 2: mod_base = OTHER; note = 2'-O-methylcytidine-3'-phosphate
  modified_base 3: mod_base = OTHER; note = 2'-O-methylcytidine-3'-phosphate
  modified_base 4: mod_base = OTHER; note = 2'-O-methyladenosine-3'-phosphate
  modified_base 5: mod_base = OTHER; note = 2'-O-methyladenosine-3'-phosphate
  modified_base 6: mod_base = OTHER; note = 2'-O-methylcytidine-3'-phosphate
  modified_base 7: mod_base = OTHER; note = 2'-deoxy-2'-fluorouridine-3'-phosphate
  modified_base 8: mod_base = OTHER; note = 2'-O-methylguanosine-3'-phosphate
  modified_base 9: mod_base = OTHER; note = 2'-deoxy-2'-fluorocytidine-3'-phosphate
  modified_base 10: mod_base = OTHER; note = 2'-deoxy-2'-fluoroadenosine-3'-phosphate
  modified_base 11: mod_base = OTHER; note = 2'-deoxy-2'-fluoroadenosine-3'-phosphate
  modified_base 12: mod_base = OTHER; note = 2'-O-methyluridine-3'-phosphate
  modified_base 13: mod_base = OTHER; note = 2'-O-methyluridine-3'-phosphate
  modified_base 14: mod_base = OTHER; note = 2'-O-methylguanosine-3'-phosphate
  modified_base 15: mod_base = OTHER; note = 2'-O-methylguanosine-3'-phosphate
  modified_base 16: mod_base = OTHER; note = 2'-O-methylcytidine-3'-phosphate
  modified_base 17: mod_base = OTHER; note = 2'-O-methyluridine-3'-phosphate
  modified_base 18: mod_base = OTHER; note = 2'-O-methylcytidine-3'-phosphate
  modified_base 19: mod_base = OTHER; note = 2'-O-methylcytidine-3'-phosphate
  modified_base 20: mod_base = OTHER; note = 2'-O-methylcytidine-3'-phosphate
  modified_base 21: mod_base = OTHER; note = 2'-O-methyladenosine
tccaactgcaattggctccca

SEQ ID NO: 4357 - RNA, 21 nt, synthetic construct
  source 1..21: mol_type = other RNA
  modified_base 1: mod_base = OTHER; note = 2'-O-methylguanosine-3'-phosphate
  modified_base 2: mod_base = OTHER; note = 2'-O-methyladenosine-3'-phosphate
  modified_base 3: mod_base = OTHER; note = 2'-O-methylguanosine-3'-phosphate
  modified_base 4: mod_base = OTHER; note = 2'-O-methyladenosine-3'-phosphate
  modified_base 5: mod_base = OTHER; note = 2'-O-methyladenosine-3'-phosphate
  modified_base 6: mod_base = OTHER; note = 2'-O-methylguanosine-3'-phosphate
  modified_base 7: mod_base = OTHER; note = 2'-deoxy-2'-fluorocytidine-3'-phosphate
  modified_base 8: mod_base = OTHER; note = 2'-O-methyladenosine-3'-phosphate
  modified_base 9: mod_base = OTHER; note = 2'-deoxy-2'-fluorouridine-3'-phosphate
  modified_base 10: mod_base = OTHER; note = 2'-deoxy-2'-fluorocytidine-3'-phosphate
  modified_base 11: mod_base = OTHER; note = 2'-deoxy-2'-fluorouridine-3'-phosphate
  modified_base 12: mod_base = OTHER; note = 2'-O-methyluridine-3'-phosphate
  modified_base 13: mod_base = OTHER; note = 2'-O-methyladenosine-3'-phosphate
  modified_base 14: mod_base = OTHER; note = 2'-O-methyluridine-3'-phosphate
  modified_base 15: mod_base = OTHER; note = 2'-O-methyluridine-3'-phosphate
  modified_base 16: mod_base = OTHER; note = 2'-O-methylguanosine-3'-phosphate
  modified_base 17: mod_base = OTHER; note = 2'-O-methylguanosine-3'-phosphate
  modified_base 18: mod_base = OTHER; note = 2'-O-methylcytidine-3'-phosphate
  modified_base 19: mod_base = OTHER; note = 2'-O-methyluridine-3'-phosphate
  modified_base 20: mod_base = OTHER; note = 2'-O-methyluridine-3'-phosphate
  modified_base 21: mod_base = OTHER; note = 2'-O-methyladenosine
gagaagcatcttattggctta

SEQ ID NO: 4358 - RNA, 21 nt, synthetic construct
  source 1..21: mol_type = other RNA
  modified_base 1: mod_base = OTHER; note = 2'-O-methyladenosine-3'-phosphate
  modified_base 2: mod_base = OTHER; note = 2'-O-methyladenosine-3'-phosphate
  modified_base 3: mod_base = OTHER; note = 2'-O-methylguanosine-3'-phosphate
  modified_base 4: mod_base = OTHER; note = 2'-O-methylcytidine-3'-phosphate
  modified_base 5: mod_base = OTHER; note = 2'-O-methyladenosine-3'-phosphate
  modified_base 6: mod_base = OTHER; note = 2'-O-methyluridine-3'-phosphate
  modified_base 7: mod_base = OTHER; note = 2'-deoxy-2'-fluorocytidine-3'-phosphate
  modified_base 8: mod_base = OTHER; note = 2'-O-methyluridine-3'-phosphate
  modified_base 9: mod_base = OTHER; note = 2'-deoxy-2'-fluorouridine-3'-phosphate
  modified_base 10: mod_base = OTHER; note = 2'-deoxy-2'-fluoroadenosine-3'-phosphate
  modified_base 11: mod_base = OTHER; note = 2'-deoxy-2'-fluorouridine-3'-phosphate
  modified_base 12: mod_base = OTHER; note = 2'-O-methyluridine-3'-phosphate
  modified_base 13: mod_base = OTHER; note = 2'-O-methylguanosine-3'-phosphate
  modified_base 14: mod_base = OTHER; note = 2'-O-methylguanosine-3'-phosphate
  modified_base 15: mod_base = OTHER; note = 2'-O-methylcytidine-3'-phosphate
  modified_base 16: mod_base = OTHER; note = 2'-O-methyluridine-3'-phosphate
  modified_base 17: mod_base = OTHER; note = 2'-O-methyluridine-3'-phosphate
  modified_base 18: mod_base = OTHER; note = 2'-O-methyladenosine-3'-phosphate
  modified_base 19: mod_base = OTHER; note = 2'-O-methyluridine-3'-phosphate
  modified_base 20: mod_base = OTHER; note = 2'-O-methyladenosine-3'-phosphate
  modified_base 21: mod_base = OTHER; note = 2'-O-methyladenosine
aagcatcttattggcttataa

SEQ ID NO: 4359 - RNA, 21 nt, synthetic construct
  source 1..21: mol_type = other RNA
  modified_base 1: mod_base = OTHER; note = 2'-O-methyladenosine-3'-phosphate
  modified_base 2: mod_base = OTHER; note = 2'-O-methylguanosine-3'-phosphate
  modified_base 3: mod_base = OTHER; note = 2'-O-methylcytidine-3'-phosphate
  modified_base 4: mod_base = OTHER; note = 2'-O-methyladenosine-3'-phosphate
  modified_base 5: mod_base = OTHER; note = 2'-O-methyluridine-3'-phosphate
  modified_base 6: mod_base = OTHER; note = 2'-O-methylcytidine-3'-phosphate
  modified_base 7: mod_base = OTHER; note = 2'-deoxy-2'-fluorouridine-3'-phosphate
  modified_base 8: mod_base = OTHER; note = 2'-O-methyluridine-3'-phosphate
  modified_base 9: mod_base = OTHER; note = 2'-deoxy-2'-fluoroadenosine-3'-phosphate
  modified_base 10: mod_base = OTHER; note = 2'-deoxy-2'-fluorouridine-3'-phosphate
  modified_base 11: mod_base = OTHER; note = 2'-deoxy-2'-fluorouridine-3'-phosphate
  modified_base 12: mod_base = OTHER; note = 2'-O-methylguanosine-3'-phosphate
  modified_base 13: mod_base = OTHER; note = 2'-O-methylguanosine-3'-phosphate
  modified_base 14: mod_base = OTHER; note = 2'-O-methylcytidine-3'-phosphate
  modified_base 15: mod_base = OTHER; note = 2'-O-methyluridine-3'-phosphate
  modified_base 16: mod_base = OTHER; note = 2'-O-methyluridine-3'-phosphate
  modified_base 17: mod_base = OTHER; note = 2'-O-methyladenosine-3'-phosphate
  modified_base 18: mod_base = OTHER; note = 2'-O-methyluridine-3'-phosphate
  modified_base 19: mod_base = OTHER; note = 2'-O-methyladenosine-3'-phosphate
  modified_base 20: mod_base = OTHER; note = 2'-O-methyluridine-3'-phosphate
  modified_base 21: mod_base = OTHER; note = 2'-O-methyladenosine
agcatcttattggcttatata

SEQ ID NO: 4360 - RNA, 21 nt, synthetic construct
  source 1..21: mol_type = other RNA
  modified_base 1: mod_base = OTHER; note = 2'-O-methyluridine-3'-phosphate
  modified_base 2: mod_base = OTHER; note = 2'-O-methyladenosine-3'-phosphate
  modified_base 3: mod_base = OTHER; note = 2'-O-methylcytidine-3'-phosphate
  modified_base 4: mod_base = OTHER; note = 2'-O-methyladenosine-3'-phosphate
  modified_base 5: mod_base = OTHER; note = 2'-O-methyluridine-3'-phosphate
  modified_base 6: mod_base = OTHER; note = 2'-O-methylcytidine-3'-phosphate
  modified_base 7: mod_base = OTHER; note = 2'-deoxy-2'-fluorouridine-3'-phosphate
  modified_base 8: mod_base = OTHER; note = 2'-O-methyluridine-3'-phosphate
  modified_base 9: mod_base = OTHER; note = 2'-deoxy-2'-fluorocytidine-3'-phosphate
  modified_base 10: mod_base = OTHER; note = 2'-deoxy-2'-fluoroadenosine-3'-phosphate
  modified_base 11: mod_base = OTHER; note = 2'-deoxy-2'-fluoroguanosine-3'-phosphate
  modified_base 12: mod_base = OTHER; note = 2'-O-methyladenosine-3'-phosphate
  modified_base 13: mod_base = OTHER; note = 2'-O-methyladenosine-3'-phosphate
  modified_base 14: mod_base = OTHER; note = 2'-O-methyladenosine-3'-phosphate
  modified_base 15: mod_base = OTHER; note = 2'-O-methyladenosine-3'-phosphate
  modified_base 16: mod_base = OTHER; note = 2'-O-methyluridine-3'-phosphate
  modified_base 17: mod_base = OTHER; note = 2'-O-methylguanosine-3'-phosphate
  modified_base 18: mod_base = OTHER; note = 2'-O-methyladenosine-3'-phosphate
  modified_base 19: mod_base = OTHER; note = 2'-O-methylguanosine-3'-phosphate
  modified_base 20: mod_base = OTHER; note = 2'-O-methyladenosine-3'-phosphate
  modified_base 21: mod_base = OTHER; note = 2'-O-methyladenosine
tacatcttcagaaaatgagaa

SEQ ID NO: 4361 - RNA, 21 nt, synthetic construct
  source 1..21: mol_type = other RNA
  modified_base 1: mod_base = OTHER; note = 2'-O-methyladenosine-3'-phosphate
  modified_base 2: mod_base = OTHER; note = 2'-O-methylcytidine-3'-phosphate
  modified_base 3: mod_base = OTHER; note = 2'-O-methyladenosine-3'-phosphate
  modified_base 4: mod_base = OTHER; note = 2'-O-methyluridine-3'-phosphate
  modified_base 5: mod_base = OTHER; note = 2'-O-methylcytidine-3'-phosphate
  modified_base 6: mod_base = OTHER; note = 2'-O-methyluridine-3'-phosphate
  modified_base 7: mod_base = OTHER; note = 2'-deoxy-2'-fluorouridine-3'-phosphate
  modified_base 8: mod_base = OTHER; note = 2'-O-methylcytidine-3'-phosphate
  modified_base 9: mod_base = OTHER; note = 2'-deoxy-2'-fluoroadenosine-3'-phosphate
  modified_base 10: mod_base = OTHER; note = 2'-deoxy-2'-fluoroguanosine-3'-phosphate
  modified_base 11: mod_base = OTHER; note = 2'-deoxy-2'-fluoroadenosine-3'-phosphate
  modified_base 12: mod_base = OTHER; note = 2'-O-methyladenosine-3'-phosphate
  modified_base 13: mod_base = OTHER; note = 2'-O-methyladenosine-3'-phosphate
  modified_base 14: mod_base = OTHER; note = 2'-O-methyladenosine-3'-phosphate
  modified_base 15: mod_base = OTHER; note = 2'-O-methyluridine-3'-phosphate
  modified_base 16: mod_base = OTHER; note = 2'-O-methylguanosine-3'-phosphate
  modified_base 17: mod_base = OTHER; note = 2'-O-methyladenosine-3'-phosphate
  modified_base 18: mod_base = OTHER; note = 2'-O-methylguanosine-3'-phosphate
  modified_base 19: mod_base = OTHER; note = 2'-O-methyladenosine-3'-phosphate
  modified_base 20: mod_base = OTHER; note = 2'-O-methyladenosine-3'-phosphate
  modified_base 21: mod_base = OTHER; note = 2'-O-methyladenosine
acatcttcagaaaatgagaaa

SEQ ID NO: 4362 - RNA, 21 nt, synthetic construct
  source 1..21: mol_type = other RNA
  modified_base 1: mod_base = OTHER; note = 2'-O-methylcytidine-3'-phosphate
  modified_base 2: mod_base = OTHER; note = 2'-O-methyladenosine-3'-phosphate
  modified_base 3: mod_base = OTHER; note = 2'-O-methyluridine-3'-phosphate
  modified_base 4: mod_base = OTHER; note = 2'-O-methylcytidine-3'-phosphate
  modified_base 5: mod_base = OTHER; note = 2'-O-methyluridine-3'-phosphate
  modified_base 6: mod_base = OTHER; note = 2'-O-methyluridine-3'-phosphate
  modified_base 7: mod_base = OTHER; note = 2'-deoxy-2'-fluorocytidine-3'-phosphate
  modified_base 8: mod_base = OTHER; note = 2'-O-methyladenosine-3'-phosphate
  modified_base 9: mod_base = OTHER; note = 2'-deoxy-2'-fluoroguanosine-3'-phosphate
  modified_base 10: mod_base = OTHER; note = 2'-deoxy-2'-fluoroadenosine-3'-phosphate
  modified_base 11: mod_base = OTHER; note = 2'-deoxy-2'-fluoroadenosine-3'-phosphate
  modified_base 12: mod_base = OTHER; note = 2'-O-methyladenosine-3'-phosphate
  modified_base 13: mod_base = OTHER; note = 2'-O-methyladenosine-3'-phosphate
  modified_base 14: mod_base = OTHER; note = 2'-O-methyluridine-3'-phosphate
  modified_base 15: mod_base = OTHER; note = 2'-O-methylguanosine-3'-phosphate
  modified_base 16: mod_base = OTHER; note = 2'-O-methyladenosine-3'-phosphate
  modified_base 17: mod_base = OTHER; note = 2'-O-methylguanosine-3'-phosphate
  modified_base 18: mod_base = OTHER; note = 2'-O-methyladenosine-3'-phosphate
  modified_base 19: mod_base = OTHER; note = 2'-O-methyladenosine-3'-phosphate
  modified_base 20: mod_base = OTHER; note = 2'-O-methyluridine-3'-phosphate
  modified_base 21: mod_base = OTHER; note = 2'-O-methyladenosine
catcttcagaaaatgagaata

SEQ ID NO: 4363 - RNA, 21 nt, synthetic construct
  source 1..21: mol_type = other RNA
  modified_base 1: mod_base = OTHER; note = 2'-O-methyladenosine-3'-phosphate
  modified_base 2: mod_base = OTHER; note = 2'-O-methyluridine-3'-phosphate
  modified_base 3: mod_base = OTHER; note = 2'-O-methylcytidine-3'-phosphate
  modified_base 4: mod_base = OTHER; note = 2'-O-methyluridine-3'-phosphate
  modified_base 5: mod_base = OTHER; note = 2'-O-methyluridine-3'-phosphate
  modified_base 6: mod_base = OTHER; note = 2'-O-methylcytidine-3'-phosphate
  modified_base 7: mod_base = OTHER; note = 2'-deoxy-2'-fluoroadenosine-3'-phosphate
  modified_base 8: mod_base = OTHER; note = 2'-O-methylguanosine-3'-phosphate
  modified_base 9: mod_base = OTHER; note = 2'-deoxy-2'-fluoroadenosine-3'-phosphate
  modified_base 10: mod_base = OTHER; note = 2'-deoxy-2'-fluoroadenosine-3'-phosphate
  modified_base 11: mod_base = OTHER; note = 2'-deoxy-2'-fluoroadenosine-3'-phosphate
  modified_base 12: mod_base = OTHER; note = 2'-O-methyladenosine-3'-phosphate
  modified_base 13: mod_base = OTHER; note = 2'-O-methyluridine-3'-phosphate
  modified_base 14: mod_base = OTHER; note = 2'-O-methylguanosine-3'-phosphate
  modified_base 15: mod_base = OTHER; note = 2'-O-methyladenosine-3'-phosphate
  modified_base 16: mod_base = OTHER; note = 2'-O-methylguanosine-3'-phosphate
  modified_base 17: mod_base = OTHER; note = 2'-O-methyladenosine-3'-phosphate
  modified_base 18: mod_base = OTHER; note = 2'-O-methyladenosine-3'-phosphate
  modified_base 19: mod_base = OTHER; note = 2'-O-methyluridine-3'-phosphate
  modified_base 20: mod_base = OTHER; note = 2'-O-methyluridine-3'-phosphate
  modified_base 21: mod_base = OTHER; note = 2'-O-methyladenosine
atcttcagaaaatgagaatta

SEQ ID NO: 4364 - RNA, 21 nt, synthetic construct
  source 1..21: mol_type = other RNA
  modified_base 1: mod_base = OTHER; note = 2'-O-methyluridine-3'-phosphate
  modified_base 2: mod_base = OTHER; note = 2'-O-methylcytidine-3'-phosphate
  modified_base 3: mod_base = OTHER; note = 2'-O-methyluridine-3'-phosphate
  modified_base 4: mod_base = OTHER; note = 2'-O-methyluridine-3'-phosphate
  modified_base 5: mod_base = OTHER; note = 2'-O-methylcytidine-3'-phosphate
  modified_base 6: mod_base = OTHER; note = 2'-O-methyladenosine-3'-phosphate
  modified_base 7: mod_base = OTHER; note = 2'-deoxy-2'-fluoroguanosine-3'-phosphate
  modified_base 8: mod_base = OTHER; note = 2'-O-methyladenosine-3'-phosphate
  modified_base 9: mod_base = OTHER; note = 2'-deoxy-2'-fluoroadenosine-3'-phosphate
  modified_base 10: mod_base = OTHER; note = 2'-deoxy-2'-fluoroadenosine-3'-phosphate
  modified_base 11: mod_base = OTHER; note = 2'-deoxy-2'-fluoroadenosine-3'-phosphate
  modified_base 12: mod_base = OTHER; note = 2'-O-methyluridine-3'-phosphate
  modified_base 13: mod_base = OTHER; note = 2'-O-methylguanosine-3'-phosphate
  modified_base 14: mod_base = OTHER; note = 2'-O-methyladenosine-3'-phosphate
  modified_base 15: mod_base = OTHER; note = 2'-O-methylguanosine-3'-phosphate
  modified_base 16: mod_base = OTHER; note = 2'-O-methyladenosine-3'-phosphate
  modified_base 17: mod_base = OTHER; note = 2'-O-methyladenosine-3'-phosphate
  modified_base 18: mod_base = OTHER; note = 2'-O-methyluridine-3'-phosphate
  modified_base 19: mod_base = OTHER; note = 2'-O-methyluridine-3'-phosphate
  modified_base 20: mod_base = OTHER; note = 2'-O-methyladenosine-3'-phosphate
  modified_base 21: mod_base = OTHER; note = 2'-O-methyladenosine
tcttcagaaaatgagaattaa

SEQ ID NO: 4365 - RNA, 21 nt, synthetic construct
  source 1..21: mol_type = other RNA
  modified_base 1: mod_base = OTHER; note = 2'-O-methyladenosine-3'-phosphate
  modified_base 2: mod_base = OTHER; note = 2'-O-methylcytidine-3'-phosphate
  modified_base 3: mod_base = OTHER; note = 2'-O-methyladenosine-3'-phosphate
  modified_base 4: mod_base = OTHER; note = 2'-O-methylguanosine-3'-phosphate
  modified_base 5: mod_base = OTHER; note = 2'-O-methyladenosine-3'-phosphate
  modified_base 6: mod_base = OTHER; note = 2'-O-methyluridine-3'-phosphate
  modified_base 7: mod_base = OTHER; note = 2'-deoxy-2'-fluorouridine-3'-phosphate
  modified_base 8: mod_base = OTHER; note = 2'-O-methylguanosine-3'-phosphate
  modified_base 9: mod_base = OTHER; note = 2'-deoxy-2'-fluoroadenosine-3'-phosphate
  modified_base 10: mod_base = OTHER; note = 2'-deoxy-2'-fluoroadenosine-3'-phosphate
  modified_base 11: mod_base = OTHER; note = 2'-deoxy-2'-fluorocytidine-3'-phosphate
  modified_base 12: mod_base = OTHER; note = 2'-O-methyladenosine-3'-phosphate
  modified_base 13: mod_base = OTHER; note = 2'-O-methyladenosine-3'-phosphate
  modified_base 14: mod_base = OTHER; note = 2'-O-methyladenosine-3'-phosphate
  modified_base 15: mod_base = OTHER; note = 2'-O-methylguanosine-3'-phosphate
  modified_base 16: mod_base = OTHER; note = 2'-O-methyladenosine-3'-phosphate
  modified_base 17: mod_base = OTHER; note = 2'-O-methyladenosine-3'-phosphate
  modified_base 18: mod_base = OTHER; note = 2'-O-methylcytidine-3'-phosphate
  modified_base 19: mod_base = OTHER; note = 2'-O-methyluridine-3'-phosphate
  modified_base 20: mod_base = OTHER; note = 2'-O-methyluridine-3'-phosphate
  modified_base 21: mod_base = OTHER; note = 2'-O-methyladenosine
acagattgaacaaagaactta

SEQ ID NO: 4366 - RNA, 21 nt, synthetic construct
  source 1..21: mol_type = other RNA
  modified_base 1: mod_base = OTHER; note = 2'-O-methylcytidine-3'-phosphate
  modified_base 2: mod_base = OTHER; note = 2'-O-methyladenosine-3'-phosphate
  modified_base 3: mod_base = OTHER; note = 2'-O-methylguanosine-3'-phosphate
  modified_base 4: mod_base = OTHER; note = 2'-O-methyladenosine-3'-phosphate
  modified_base 5: mod_base = OTHER; note = 2'-O-methyluridine-3'-phosphate
  modified_base 6: mod_base = OTHER; note = 2'-O-methyluridine-3'-phosphate
  modified_base 7: mod_base = OTHER; note = 2'-deoxy-2'-fluoroguanosine-3'-phosphate
  modified_base 8: mod_base = OTHER; note = 2'-O-methyladenosine-3'-phosphate
  modified_base 9: mod_base = OTHER; note = 2'-deoxy-2'-fluoroadenosine-3'-phosphate
  modified_base 10: mod_base = OTHER; note = 2'-deoxy-2'-fluorocytidine-3'-phosphate
  modified_base 11: mod_base = OTHER; note = 2'-deoxy-2'-fluoroadenosine-3'-phosphate
  modified_base 12: mod_base = OTHER; note = 2'-O-methyladenosine-3'-phosphate
  modified_base 13: mod_base = OTHER; note = 2'-O-methyladenosine-3'-phosphate
  modified_base 14: mod_base = OTHER; note = 2'-O-methylguanosine-3'-phosphate
  modified_base 15: mod_base = OTHER; note = 2'-O-methyladenosine-3'-phosphate
  modified_base 16: mod_base = OTHER; note = 2'-O-methyladenosine-3'-phosphate
  modified_base 17: mod_base = OTHER; note = 2'-O-methylcytidine-3'-phosphate
  modified_base 18: mod_base = OTHER; note = 2'-O-methyluridine-3'-phosphate
  modified_base 19: mod_base = OTHER; note = 2'-O-methyluridine-3'-phosphate
  modified_base 20: mod_base = OTHER; note = 2'-O-methyladenosine-3'-phosphate
  modified_base 21: mod_base = OTHER; note = 2'-O-methyladenosine
cagattgaacaaagaacttaa

SEQ ID NO: 4367 - RNA, 21 nt, synthetic construct
  source 1..21: mol_type = other RNA
  modified_base 1: mod_base = OTHER; note = 2'-O-methyladenosine-3'-phosphate
  modified_base 2: mod_base = OTHER; note = 2'-O-methylguanosine-3'-phosphate
  modified_base 3: mod_base = OTHER; note = 2'-O-methyladenosine-3'-phosphate
  modified_base 4: mod_base = OTHER; note = 2'-O-methyluridine-3'-phosphate
  modified_base 5: mod_base = OTHER; note = 2'-O-methyluridine-3'-phosphate
  modified_base 6: mod_base = OTHER; note = 2'-O-methylguanosine-3'-phosphate
  modified_base 7: mod_base = OTHER; note = 2'-deoxy-2'-fluoroadenosine-3'-phosphate
  modified_base 8: mod_base = OTHER; note = 2'-O-methyladenosine-3'-phosphate
  modified_base 9: mod_base = OTHER; note = 2'-deoxy-2'-fluorocytidine-3'-phosphate
  modified_base 10: mod_base = OTHER; note = 2'-deoxy-2'-fluoroadenosine-3'-phosphate
  modified_base 11: mod_base = OTHER; note = 2'-deoxy-2'-fluoroadenosine-3'-phosphate
  modified_base 12: mod_base = OTHER; note = 2'-O-methyladenosine-3'-phosphate
  modified_base 13: mod_base = OTHER; note = 2'-O-methylguanosine-3'-phosphate
  modified_base 14: mod_base = OTHER; note = 2'-O-methyladenosine-3'-phosphate
  modified_base 15: mod_base = OTHER; note = 2'-O-methyladenosine-3'-phosphate
  modified_base 16: mod_base = OTHER; note = 2'-O-methylcytidine-3'-phosphate
  modified_base 17: mod_base = OTHER; note = 2'-O-methyluridine-3'-phosphate
  modified_base 18: mod_base = OTHER; note = 2'-O-methyluridine-3'-phosphate
  modified_base 19: mod_base = OTHER; note = 2'-O-methyladenosine-3'-phosphate
  modified_base 20: mod_base = OTHER; note = 2'-O-methylguanosine-3'-phosphate
  modified_base 21: mod_base = OTHER; note = 2'-O-methyladenosine
agattgaacaaagaacttaga

SEQ ID NO: 4368 - RNA, 21 nt, synthetic construct
  source 1..21: mol_type = other RNA
  modified_base 1: mod_base = OTHER; note = 2'-O-methylguanosine-3'-phosphate
  modified_base 2: mod_base = OTHER; note = 2'-O-methyladenosine-3'-phosphate
  modified_base 3: mod_base = OTHER; note = 2'-O-methyluridine-3'-phosphate
  modified_base 4: mod_base = OTHER; note = 2'-O-methyluridine-3'-phosphate
  modified_base 5: mod_base = OTHER; note = 2'-O-methylguanosine-3'-phosphate
  modified_base 6: mod_base = OTHER; note = 2'-O-methyladenosine-3'-phosphate
  modified_base 7: mod_base = OTHER; note = 2'-deoxy-2'-fluoroadenosine-3'-phosphate
  modified_base 8: mod_base = OTHER; note = 2'-O-methylcytidine-3'-phosphate
  modified_base 9: mod_base = OTHER; note = 2'-deoxy-2'-fluoroadenosine-3'-phosphate
  modified_base 10: mod_base = OTHER; note = 2'-deoxy-2'-fluoroadenosine-3'-phosphate
  modified_base 11: mod_base = OTHER; note = 2'-deoxy-2'-fluoroadenosine-3'-phosphate
  modified_base 12: mod_base = OTHER; note = 2'-O-methylguanosine-3'-phosphate
  modified_base 13: mod_base = OTHER; note = 2'-O-methyladenosine-3'-phosphate
  modified_base 14: mod_base = OTHER; note = 2'-O-methyladenosine-3'-phosphate
  modified_base 15: mod_base = OTHER; note = 2'-O-methylcytidine-3'-phosphate
  modified_base 16: mod_base = OTHER; note = 2'-O-methyluridine-3'-phosphate
  modified_base 17: mod_base = OTHER; note = 2'-O-methyluridine-3'-phosphate
  modified_base 18: mod_base = OTHER; note = 2'-O-methyladenosine-3'-phosphate
  modified_base 19: mod_base = OTHER; note = 2'-O-methylguanosine-3'-phosphate
  modified_base 20: mod_base = OTHER; note = 2'-O-methyladenosine-3'-phosphate
  modified_base 21: mod_base = OTHER; note = 2'-O-methyladenosine
gattgaacaaagaacttagaa

SEQ ID NO: 4369 - RNA, 21 nt, synthetic construct
  source 1..21: mol_type = other RNA
  modified_base 1: mod_base = OTHER; note = 2'-O-methyladenosine-3'-phosphate
  modified_base 2: mod_base = OTHER; note = 2'-O-methyluridine-3'-phosphate
  modified_base 3: mod_base = OTHER; note = 2'-O-methyluridine-3'-phosphate
  modified_base 4: mod_base = OTHER; note = 2'-O-methylguanosine-3'-phosphate
  modified_base 5: mod_base = OTHER; note = 2'-O-methyladenosine-3'-phosphate
  modified_base 6: mod_base = OTHER; note = 2'-O-methyladenosine-3'-phosphate
  modified_base 7: mod_base = OTHER; note = 2'-deoxy-2'-fluorocytidine-3'-phosphate
  modified_base 8: mod_base = OTHER; note = 2'-O-methyladenosine-3'-phosphate
  modified_base 9: mod_base = OTHER; note = 2'-deoxy-2'-fluoroadenosine-3'-phosphate
  modified_base 10: mod_base = OTHER; note = 2'-deoxy-2'-fluoroadenosine-3'-phosphate
  modified_base 11: mod_base = OTHER; note = 2'-deoxy-2'-fluoroguanosine-3'-phosphate
  modified_base 12: mod_base = OTHER; note = 2'-O-methyladenosine-3'-phosphate
  modified_base 13: mod_base = OTHER; note = 2'-O-methyladenosine-3'-phosphate
  modified_base 14: mod_base = OTHER; note = 2'-O-methylcytidine-3'-phosphate
  modified_base 15: mod_base = OTHER; note = 2'-O-methyluridine-3'-phosphate
  modified_base 16: mod_base = OTHER; note = 2'-O-methyluridine-3'-phosphate
  modified_base 17: mod_base = OTHER; note = 2'-O-methyladenosine-3'-phosphate
  modified_base 18: mod_base = OTHER; note = 2'-O-methylguanosine-3'-phosphate
  modified_base 19: mod_base = OTHER; note = 2'-O-methyladenosine-3'-phosphate
  modified_base 20: mod_base = OTHER; note = 2'-O-methyladenosine-3'-phosphate
  modified_base 21: mod_base = OTHER; note = 2'-O-methyladenosine
attgaacaaagaacttagaaa

SEQ ID NO: 4370 - RNA, 21 nt, synthetic construct
  source 1..21: mol_type = other RNA
  modified_base 1: mod_base = OTHER; note = 2'-O-methyluridine-3'-phosphate
  modified_base 2: mod_base = OTHER; note = 2'-O-methyluridine-3'-phosphate
  modified_base 3: mod_base = OTHER; note = 2'-O-methylguanosine-3'-phosphate
  modified_base 4: mod_base = OTHER; note = 2'-O-methyladenosine-3'-phosphate
  modified_base 5: mod_base = OTHER; note = 2'-O-methyladenosine-3'-phosphate
  modified_base 6: mod_base = OTHER; note = 2'-O-methylcytidine-3'-phosphate
  modified_base 7: mod_base = OTHER; note = 2'-deoxy-2'-fluoroadenosine-3'-phosphate
  modified_base 8: mod_base = OTHER; note = 2'-O-methyladenosine-3'-phosphate
  modified_base 9: mod_base = OTHER; note = 2'-deoxy-2'-fluoroadenosine-3'-phosphate
  modified_base 10: mod_base = OTHER; note = 2'-deoxy-2'-fluoroguanosine-3'-phosphate
  modified_base 11: mod_base = OTHER; note = 2'-deoxy-2'-fluoroadenosine-3'-phosphate
  modified_base 12: mod_base = OTHER; note = 2'-O-methyladenosine-3'-phosphate
  modified_base 13: mod_base = OTHER; note = 2'-O-methylcytidine-3'-phosphate
  modified_base 14: mod_base = OTHER; note = 2'-O-methyluridine-3'-phosphate
  modified_base 15: mod_base = OTHER; note = 2'-O-methyluridine-3'-phosphate
  modified_base 16: mod_base = OTHER; note = 2'-O-methyladenosine-3'-phosphate
  modified_base 17: mod_base = OTHER; note = 2'-O-methylguanosine-3'-phosphate
  modified_base 18: mod_base = OTHER; note = 2'-O-methyladenosine-3'-phosphate
  modified_base 19: mod_base = OTHER; note = 2'-O-methyladenosine-3'-phosphate
  modified_base 20: mod_base = OTHER; note = 2'-O-methylguanosine-3'-phosphate
  modified_base 21: mod_base = OTHER; note = 2'-O-methyladenosine
ttgaacaaagaacttagaaga

SEQ ID NO: 4371 - RNA, 21 nt, synthetic construct
  source 1..21: mol_type = other RNA
  modified_base 1: mod_base = OTHER; note = 2'-O-methyluridine-3'-phosphate
  modified_base 2: mod_base = OTHER; note = 2'-O-methylcytidine-3'-phosphate
  modified_base 3: mod_base = OTHER; note = 2'-O-methylcytidine-3'-phosphate
  modified_base 4: mod_base = OTHER; note = 2'-O-methyluridine-3'-phosphate
  modified_base 5: mod_base = OTHER; note = 2'-O-methylguanosine-3'-phosphate
  modified_base 6: mod_base = OTHER; note = 2'-O-methyladenosine-3'-phosphate
  modified_base 7: mod_base = OTHER; note = 2'-deoxy-2'-fluoroguanosine-3'-phosphate
  modified_base 8: mod_base = OTHER; note = 2'-O-methyladenosine-3'-phosphate
  modified_base 9: mod_base = OTHER; note = 2'-deoxy-2'-fluoroguanosine-3'-phosphate
  modified_base 10: mod_base = OTHER; note = 2'-deoxy-2'-fluoroadenosine-3'-phosphate
  modified_base 11: mod_base = OTHER; note = 2'-deoxy-2'-fluoroadenosine-3'-phosphate
  modified_base 12: mod_base = OTHER; note = 2'-O-methylguanosine-3'-phosphate
  modified_base 13: mod_base = OTHER; note = 2'-O-methyladenosine-3'-phosphate
  modified_base 14: mod_base = OTHER; note = 2'-O-methylguanosine-3'-phosphate
  modified_base 15: mod_base = OTHER; note = 2'-O-methyladenosine-3'-phosphate
  modified_base 16: mod_base = OTHER; note = 2'-O-methyladenosine-3'-phosphate
  modified_base 17: mod_base = OTHER; note = 2'-O-methyladenosine-3'-phosphate
  modified_base 18: mod_base = OTHER; note = 2'-O-methyluridine-3'-phosphate
  modified_base 19: mod_base = OTHER; note = 2'-O-methyluridine-3'-phosphate
  modified_base 20: mod_base = OTHER; note = 2'-O-methylguanosine-3'-phosphate
  modified_base 21: mod_base = OTHER; note = 2'-O-methyladenosine
tcctgagagaagagaaattga

SEQ ID NO: 4372 - RNA, 21 nt, synthetic construct
  source 1..21: mol_type = other RNA
  modified_base 1: mod_base = OTHER; note = 2'-O-methylcytidine-3'-phosphate
  modified_base 2: mod_base = OTHER; note = 2'-O-methylcytidine-3'-phosphate
  modified_base 3: mod_base = OTHER; note = 2'-O-methyluridine-3'-phosphate
  modified_base 4: mod_base = OTHER; note = 2'-O-methylguanosine-3'-phosphate
  modified_base 5: mod_base = OTHER; note = 2'-O-methyladenosine-3'-phosphate
  modified_base 6: mod_base = OTHER; note = 2'-O-methylguanosine-3'-phosphate
  modified_base 7: mod_base = OTHER; note = 2'-deoxy-2'-fluoroadenosine-3'-phosphate
  modified_base 8: mod_base = OTHER; note = 2'-O-methylguanosine-3'-phosphate
  modified_base 9: mod_base = OTHER; note = 2'-deoxy-2'-fluoroadenosine-3'-phosphate
  modified_base 10: mod_base = OTHER; note = 2'-deoxy-2'-fluoroadenosine-3'-phosphate
  modified_base 11: mod_base = OTHER; note = 2'-deoxy-2'-fluoroguanosine-3'-phosphate
  modified_base 12: mod_base = OTHER; note = 2'-O-methyladenosine-3'-phosphate
  modified_base 13: mod_base = OTHER; note = 2'-O-methylguanosine-3'-phosphate
  modified_base 14: mod_base = OTHER; note = 2'-O-methyladenosine-3'-phosphate
  modified_base 15: mod_base = OTHER; note = 2'-O-methyladenosine-3'-phosphate
  modified_base 16: mod_base = OTHER; note = 2'-O-methyladenosine-3'-phosphate
  modified_base 17: mod_base = OTHER; note = 2'-O-methyluridine-3'-phosphate
  modified_base 18: mod_base = OTHER; note = 2'-O-methyluridine-3'-phosphate
  modified_base 19: mod_base = OTHER; note = 2'-O-methylguanosine-3'-phosphate
  modified_base 20: mod_base = OTHER; note = 2'-O-methyladenosine-3'-phosphate
  modified_base 21: mod_base = OTHER; note = 2'-O-methyladenosine
cctgagagaagagaaattgaa

SEQ ID NO: 4373 - RNA, 21 nt, synthetic construct
  source 1..21: mol_type = other RNA
  modified_base 1: mod_base = OTHER; note = 2'-O-methylcytidine-3'-phosphate
  modified_base 2: mod_base = OTHER; note = 2'-O-methyluridine-3'-phosphate
  modified_base 3: mod_base = OTHER; note = 2'-O-methylguanosine-3'-phosphate
  modified_base 4: mod_base = OTHER; note = 2'-O-methyladenosine-3'-phosphate
  modified_base 5: mod_base = OTHER; note = 2'-O-methylguanosine-3'-phosphate
  modified_base 6: mod_base = OTHER; note = 2'-O-methyladenosine-3'-phosphate
  modified_base 7: mod_base = OTHER; note = 2'-deoxy-2'-fluoroguanosine-3'-phosphate
  modified_base 8: mod_base = OTHER; note = 2'-O-methyladenosine-3'-phosphate
  modified_base 9: mod_base = OTHER; note = 2'-deoxy-2'-fluoroadenosine-3'-phosphate
  modified_base 10: mod_base = OTHER; note = 2'-deoxy-2'-fluoroguanosine-3'-phosphate
  modified_base 11: mod_base = OTHER; note = 2'-deoxy-2'-fluoroadenosine-3'-phosphate
  modified_base 12: mod_base = OTHER; note = 2'-O-methylguanosine-3'-phosphate
  modified_base 13: mod_base = OTHER; note = 2'-O-methyladenosine-3'-phosphate
  modified_base 14: mod_base = OTHER; note = 2'-O-methyladenosine-3'-phosphate
  modified_base 15: mod_base = OTHER; note = 2'-O-methyladenosine-3'-phosphate
  modified_base 16: mod_base = OTHER; note = 2'-O-methyluridine-3'-phosphate
  modified_base 17: mod_base = OTHER; note = 2'-O-methyluridine-3'-phosphate
  modified_base 18: mod_base = OTHER; note = 2'-O-methylguanosine-3'-phosphate
  modified_base 19: mod_base = OTHER; note = 2'-O-methyladenosine-3'-phosphate
  modified_base 20: mod_base = OTHER; note = 2'-O-methyluridine-3'-phosphate
  modified_base 21: mod_base = OTHER; note = 2'-O-methyladenosine
ctgagagaagagaaattgata

SEQ ID NO: 4374 - RNA, 21 nt, synthetic construct
  source 1..21: mol_type = other RNA
  modified_base 1: mod_base = OTHER; note = 2'-O-methyluridine-3'-phosphate
  modified_base 2: mod_base = OTHER; note = 2'-O-methylguanosine-3'-phosphate
  modified_base 3: mod_base = OTHER; note = 2'-O-methyladenosine-3'-phosphate
  modified_base 4: mod_base = OTHER; note = 2'-O-methylguanosine-3'-phosphate
  modified_base 5: mod_base = OTHER; note = 2'-O-methyladenosine-3'-phosphate
  modified_base 6: mod_base = OTHER; note = 2'-O-methylguanosine-3'-phosphate
  modified_base 7: mod_base = OTHER; note = 2'-deoxy-2'-fluoroadenosine-3'-phosphate
  modified_base 8: mod_base = OTHER; note = 2'-O-methyladenosine-3'-phosphate
  modified_base 9: mod_base = OTHER; note = 2'-deoxy-2'-fluoroguanosine-3'-phosphate
  modified_base 10: mod_base = OTHER; note = 2'-deoxy-2'-fluoroadenosine-3'-phosphate
  modified_base 11: mod_base = OTHER; note = 2'-deoxy-2'-fluoroguanosine-3'-phosphate
  modified_base 12: mod_base = OTHER; note = 2'-O-methyladenosine-3'-phosphate
  modified_base 13: mod_base = OTHER; note = 2'-O-methyladenosine-3'-phosphate
  modified_base 14: mod_base = OTHER; note = 2'-O-methyladenosine-3'-phosphate
  modified_base 15: mod_base = OTHER; note = 2'-O-methyluridine-3'-phosphate
  modified_base 16: mod_base = OTHER; note = 2'-O-methyluridine-3'-phosphate
  modified_base 17: mod_base = OTHER; note = 2'-O-methylguanosine-3'-phosphate
  modified_base 18: mod_base = OTHER; note = 2'-O-methyladenosine-3'-phosphate
  modified_base 19: mod_base = OTHER; note = 2'-O-methyluridine-3'-phosphate
  modified_base 20: mod_base = OTHER; note = 2'-O-methyluridine-3'-phosphate
  modified_base 21: mod_base = OTHER; note = 2'-O-methyladenosine
tgagagaagagaaattgatta

SEQ ID NO: 4375 - RNA, 21 nt, synthetic construct
  source 1..21: mol_type = other RNA
  modified_base 1: mod_base = OTHER; note = 2'-O-methylguanosine-3'-phosphate
  modified_base 2: mod_base = OTHER; note = 2'-O-methyladenosine-3'-phosphate
  modified_base 3: mod_base = OTHER; note = 2'-O-methylguanosine-3'-phosphate
  modified_base 4: mod_base = OTHER; note = 2'-O-methyladenosine-3'-phosphate
  modified_base 5: mod_base = OTHER; note = 2'-O-methylguanosine-3'-phosphate
  modified_base 6: mod_base = OTHER; note = 2'-O-methyladenosine-3'-phosphate
  modified_base 7: mod_base = OTHER; note = 2'-deoxy-2'-fluoroadenosine-3'-phosphate
  modified_base 8: mod_base = OTHER; note = 2'-O-methylguanosine-3'-phosphate
  modified_base 9: mod_base = OTHER; note = 2'-deoxy-2'-fluoroadenosine-3'-phosphate
  modified_base 10: mod_base = OTHER; note = 2'-deoxy-2'-fluoroguanosine-3'-phosphate
  modified_base 11: mod_base = OTHER; note = 2'-deoxy-2'-fluoroadenosine-3'-phosphate
  modified_base 12: mod_base = OTHER; note = 2'-O-methyladenosine-3'-phosphate
  modified_base 13: mod_base = OTHER; note = 2'-O-methyladenosine-3'-phosphate
  modified_base 14: mod_base = OTHER; note = 2'-O-methyluridine-3'-phosphate
  modified_base 15: mod_base = OTHER; note = 2'-O-methyluridine-3'-phosphate
  modified_base 16: mod_base = OTHER; note = 2'-O-methylguanosine-3'-phosphate
  modified_base 17: mod_base = OTHER; note = 2'-O-methyladenosine-3'-phosphate
  modified_base 18: mod_base = OTHER; note = 2'-O-methyluridine-3'-phosphate
  modified_base 19: mod_base = OTHER; note = 2'-O-methyluridine-3'-phosphate
  modified_base 20: mod_base = OTHER; note = 2'-O-methylguanosine-3'-phosphate
  modified_base 21: mod_base = OTHER; note = 2'-O-methyladenosine
gagagaagagaaattgattga

SEQ ID NO: 4376 - RNA, 21 nt, synthetic construct
  source 1..21: mol_type = other RNA
  modified_base 1: mod_base = OTHER; note = 2'-O-methyladenosine-3'-phosphate
  modified_base 2: mod_base = OTHER; note = 2'-O-methylguanosine-3'-phosphate
  modified_base 3: mod_base = OTHER; note = 2'-O-methyladenosine-3'-phosphate
  modified_base 4: mod_base = OTHER; note = 2'-O-methylguanosine-3'-phosphate
  modified_base 5: mod_base = OTHER; note = 2'-O-methyladenosine-3'-phosphate
  modified_base 6: mod_base = OTHER; note = 2'-O-methyladenosine-3'-phosphate
  modified_base 7: mod_base = OTHER; note = 2'-deoxy-2'-fluoroguanosine-3'-phosphate
  modified_base 8: mod_base = OTHER; note = 2'-O-methyladenosine-3'-phosphate
  modified_base 9: mod_base = OTHER; note = 2'-deoxy-2'-fluoroguanosine-3'-phosphate
  modified_base 10: mod_base = OTHER; note = 2'-deoxy-2'-fluoroadenosine-3'-phosphate
  modified_base 11: mod_base = OTHER; note = 2'-deoxy-2'-fluoroadenosine-3'-phosphate
  modified_base 12: mod_base = OTHER; note = 2'-O-methyladenosine-3'-phosphate
  modified_base 13: mod_base = OTHER; note = 2'-O-methyluridine-3'-phosphate
  modified_base 14: mod_base = OTHER; note = 2'-O-methyluridine-3'-phosphate
  modified_base 15: mod_base = OTHER; note = 2'-O-methylguanosine-3'-phosphate
  modified_base 16: mod_base = OTHER; note = 2'-O-methyladenosine-3'-phosphate
  modified_base 17: mod_base = OTHER; note = 2'-O-methyluridine-3'-phosphate
  modified_base 18: mod_base = OTHER; note = 2'-O-methyluridine-3'-phosphate
  modified_base 19: mod_base = OTHER; note = 2'-O-methylguanosine-3'-phosphate
  modified_base 20: mod_base = OTHER; note = 2'-O-methyluridine-3'-phosphate
  modified_base 21: mod_base = OTHER; note = 2'-O-methyladenosine
agagaagagaaattgattgta

SEQ ID NO: 4377 - RNA, 21 nt, synthetic construct
  source 1..21: mol_type = other RNA
  modified_base 1: mod_base = OTHER; note = 2'-O-methylguanosine-3'-phosphate
  modified_base 2: mod_base = OTHER; note = 2'-O-methyladenosine-3'-phosphate
  modified_base 3: mod_base = OTHER; note = 2'-O-methylguanosine-3'-phosphate
  modified_base 4: mod_base = OTHER; note = 2'-O-methyladenosine-3'-phosphate
  modified_base 5: mod_base = OTHER; note = 2'-O-methyladenosine-3'-phosphate
  modified_base 6: mod_base = OTHER; note = 2'-O-methylguanosine-3'-phosphate
  modified_base 7: mod_base = OTHER; note = 2'-deoxy-2'-fluoroadenosine-3'-phosphate
  modified_base 8: mod_base = OTHER; note = 2'-O-methylguanosine-3'-phosphate
  modified_base 9: mod_base = OTHER; note = 2'-deoxy-2'-fluoroadenosine-3'-phosphate
  modified_base 10: mod_base = OTHER; note = 2'-deoxy-2'-fluoroadenosine-3'-phosphate
  modified_base 11: mod_base = OTHER; note = 2'-deoxy-2'-fluoroadenosine-3'-phosphate
  modified_base 12: mod_base = OTHER; note = 2'-O-methyluridine-3'-phosphate
  modified_base 13: mod_base = OTHER; note = 2'-O-methyluridine-3'-phosphate
  modified_base 14: mod_base = OTHER; note = 2'-O-methylguanosine-3'-phosphate
  modified_base 15: mod_base = OTHER; note = 2'-O-methyladenosine-3'-phosphate
  modified_base 16: mod_base = OTHER; note = 2'-O-methyluridine-3'-phosphate
  modified_base 17: mod_base = OTHER; note = 2'-O-methyluridine-3'-phosphate
  modified_base 18: mod_base = OTHER; note = 2'-O-methylguanosine-3'-phosphate
  modified_base 19: mod_base = OTHER; note = 2'-O-methyluridine-3'-phosphate
  modified_base 20: mod_base = OTHER; note = 2'-O-methyluridine-3'-phosphate
  modified_base 21: mod_base = OTHER; note = 2'-O-methyladenosine
gagaagagaaattgattgtta

SEQ ID NO: 4378 - RNA, 21 nt, synthetic construct
  source 1..21: mol_type = other RNA
  modified_base 1: mod_base = OTHER; note = 2'-O-methyladenosine-3'-phosphate
  modified_base 2: mod_base = OTHER; note = 2'-O-methylguanosine-3'-phosphate
  modified_base 3: mod_base = OTHER; note = 2'-O-methyladenosine-3'-phosphate
  modified_base 4: mod_base = OTHER; note = 2'-O-methyladenosine-3'-phosphate
  modified_base 5: mod_base = OTHER; note = 2'-O-methylguanosine-3'-phosphate
  modified_base 6: mod_base = OTHER; note = 2'-O-methyladenosine-3'-phosphate
  modified_base 7: mod_base = OTHER; note = 2'-deoxy-2'-fluoroguanosine-3'-phosphate
  modified_base 8: mod_base = OTHER; note = 2'-O-methyladenosine-3'-phosphate
  modified_base 9: mod_base = OTHER; note = 2'-deoxy-2'-fluoroadenosine-3'-phosphate
  modified_base 10: mod_base = OTHER; note = 2'-deoxy-2'-fluoroadenosine-3'-phosphate
  modified_base 11: mod_base = OTHER; note = 2'-deoxy-2'-fluorouridine-3'-phosphate
  modified_base 12: mod_base = OTHER; note = 2'-O-methyluridine-3'-phosphate
  modified_base 13: mod_base = OTHER; note = 2'-O-methylguanosine-3'-phosphate
  modified_base 14: mod_base = OTHER; note = 2'-O-methyladenosine-3'-phosphate
  modified_base 15: mod_base = OTHER; note = 2'-O-methyluridine-3'-phosphate
  modified_base 16: mod_base = OTHER; note = 2'-O-methyluridine-3'-phosphate
  modified_base 17: mod_base = OTHER; note = 2'-O-methylguanosine-3'-phosphate
  modified_base 18: mod_base = OTHER; note = 2'-O-methyluridine-3'-phosphate
  modified_base 19: mod_base = OTHER; note = 2'-O-methyluridine-3'-phosphate
  modified_base 20: mod_base = OTHER; note = 2'-O-methyluridine-3'-phosphate
  modified_base 21: mod_base = OTHER; note = 2'-O-methyladenosine
agaagagaaattgattgttta

SEQ ID NO: 4379 - RNA, 21 nt, synthetic construct
  source 1..21: mol_type = other RNA
  modified_base 1: mod_base = OTHER; note = 2'-O-methylguanosine-3'-phosphate
  modified_base 2: mod_base = OTHER; note = 2'-O-methyladenosine-3'-phosphate
  modified_base 3: mod_base = OTHER; note = 2'-O-methyladenosine-3'-phosphate
  modified_base 4: mod_base = OTHER; note = 2'-O-methylguanosine-3'-phosphate
  modified_base 5: mod_base = OTHER; note = 2'-O-methyladenosine-3'-phosphate
  modified_base 6: mod_base = OTHER; note = 2'-O-methylguanosine-3'-phosphate
  modified_base 7: mod_base = OTHER; note = 2'-deoxy-2'-fluoroadenosine-3'-phosphate
  modified_base 8: mod_base = OTHER; note = 2'-O-methyladenosine-3'-phosphate
  modified_base 9: mod_base = OTHER; note = 2'-deoxy-2'-fluoroadenosine-3'-phosphate
  modified_base 10: mod_base = OTHER; note = 2'-deoxy-2'-fluorouridine-3'-phosphate
  modified_base 11: mod_base = OTHER; note = 2'-deoxy-2'-fluorouridine-3'-phosphate
  modified_base 12: mod_base = OTHER; note = 2'-O-methylguanosine-3'-phosphate
  modified_base 13: mod_base = OTHER; note = 2'-O-methyladenosine-3'-phosphate
  modified_base 14: mod_base = OTHER; note = 2'-O-methyluridine-3'-phosphate
  modified_base 15: mod_base = OTHER; note = 2'-O-methyluridine-3'-phosphate
  modified_base 16: mod_base = OTHER; note = 2'-O-methylguanosine-3'-phosphate
  modified_base 17: mod_base = OTHER; note = 2'-O-methyluridine-3'-phosphate
  modified_base 18: mod_base = OTHER; note = 2'-O-methyluridine-3'-phosphate
  modified_base 19: mod_base = OTHER; note = 2'-O-methyluridine-3'-phosphate
  modified_base 20: mod_base = OTHER; note = 2'-O-methyladenosine-3'-phosphate
  modified_base 21: mod_base = OTHER; note = 2'-O-methyladenosine
gaagagaaattgattgtttaa

SEQ ID NO: 4380 - RNA, 21 nt, synthetic construct
  source 1..21: mol_type = other RNA
  modified_base 1: mod_base = OTHER; note = 2'-O-methyladenosine-3'-phosphate
  modified_base 2: mod_base = OTHER; note = 2'-O-methylguanosine-3'-phosphate
  modified_base 3: mod_base = OTHER; note = 2'-O-methyladenosine-3'-phosphate
  modified_base 4: mod_base = OTHER; note = 2'-O-methylguanosine-3'-phosphate
  modified_base 5: mod_base = OTHER; note = 2'-O-methyladenosine-3'-phosphate
  modified_base 6: mod_base = OTHER; note = 2'-O-methyladenosine-3'-phosphate
  modified_base 7: mod_base = OTHER; note = 2'-deoxy-2'-fluoroadenosine-3'-phosphate
  modified_base 8: mod_base = OTHER; note = 2'-O-methyluridine-3'-phosphate
  modified_base 9: mod_base = OTHER; note = 2'-deoxy-2'-fluorouridine-3'-phosphate
  modified_base 10: mod_base = OTHER; note = 2'-deoxy-2'-fluoroguanosine-3'-phosphate
  modified_base 11: mod_base = OTHER; note = 2'-deoxy-2'-fluoroadenosine-3'-phosphate
  modified_base 12: mod_base = OTHER; note = 2'-O-methyluridine-3'-phosphate
  modified_base 13: mod_base = OTHER; note = 2'-O-methyluridine-3'-phosphate
  modified_base 14: mod_base = OTHER; note = 2'-O-methylguanosine-3'-phosphate
  modified_base 15: mod_base = OTHER; note = 2'-O-methyluridine-3'-phosphate
  modified_base 16: mod_base = OTHER; note = 2'-O-methyluridine-3'-phosphate
  modified_base 17: mod_base = OTHER; note = 2'-O-methyluridine-3'-phosphate
  modified_base 18: mod_base = OTHER; note = 2'-O-methyladenosine-3'-phosphate
  modified_base 19: mod_base = OTHER; note = 2'-O-methyluridine-3'-phosphate
  modified_base 20: mod_base = OTHER; note = 2'-O-methylcytidine-3'-phosphate
  modified_base 21: mod_base = OTHER; note = 2'-O-methyladenosine
agagaaattgattgtttatca

SEQ ID NO: 4381 - RNA, 21 nt, synthetic construct
  source 1..21: mol_type = other RNA
  modified_base 1: mod_base = OTHER; note = 2'-O-methyluridine-3'-phosphate
  modified_base 2: mod_base = OTHER; note = 2'-O-methylguanosine-3'-phosphate
  modified_base 3: mod_base = OTHER; note = 2'-O-methyluridine-3'-phosphate
  modified_base 4: mod_base = OTHER; note = 2'-O-methyluridine-3'-phosphate
  modified_base 5: mod_base = OTHER; note = 2'-O-methylguanosine-3'-phosphate
  modified_base 6: mod_base = OTHER; note = 2'-O-methylguanosine-3'-phosphate
  modified_base 7: mod_base = OTHER; note = 2'-deoxy-2'-fluorouridine-3'-phosphate
  modified_base 8: mod_base = OTHER; note = 2'-O-methyluridine-3'-phosphate
  modified_base 9: mod_base = OTHER; note = 2'-deoxy-2'-fluorouridine-3'-phosphate
  modified_base 10: mod_base = OTHER; note = 2'-deoxy-2'-fluoroadenosine-3'-phosphate
  modified_base 11: mod_base = OTHER; note = 2'-deoxy-2'-fluoroadenosine-3'-phosphate
  modified_base 12: mod_base = OTHER; note = 2'-O-methyluridine-3'-phosphate
  modified_base 13: mod_base = OTHER; note = 2'-O-methyluridine-3'-phosphate
  modified_base 14: mod_base = OTHER; note = 2'-O-methyluridine-3'-phosphate
  modified_base 15: mod_base = OTHER; note = 2'-O-methyluridine-3'-phosphate
  modified_base 16: mod_base = OTHER; note = 2'-O-methyluridine-3'-phosphate
  modified_base 17: mod_base = OTHER; note = 2'-O-methylcytidine-3'-phosphate
  modified_base 18: mod_base = OTHER; note = 2'-O-methyladenosine-3'-phosphate
  modified_base 19: mod_base = OTHER; note = 2'-O-methyladenosine-3'-phosphate
  modified_base 20: mod_base = OTHER; note = 2'-O-methylcytidine-3'-phosphate
  modified_base 21: mod_base = OTHER; note = 2'-O-methyladenosine
tgttggtttaatttttcaaca

SEQ ID NO: 4382 - RNA, 21 nt, synthetic construct
  source 1..21: mol_type = other RNA
  modified_base 1: mod_base = OTHER; note = 2'-O-methylguanosine-3'-phosphate
  modified_base 2: mod_base = OTHER; note = 2'-O-methyluridine-3'-phosphate
  modified_base 3: mod_base = OTHER; note = 2'-O-methyluridine-3'-phosphate
  modified_base 4: mod_base = OTHER; note = 2'-O-methylguanosine-3'-phosphate
  modified_base 5: mod_base = OTHER; note = 2'-O-methylguanosine-3'-phosphate
  modified_base 6: mod_base = OTHER; note = 2'-O-methyluridine-3'-phosphate
  modified_base 7: mod_base = OTHER; note = 2'-deoxy-2'-fluorouridine-3'-phosphate
  modified_base 8: mod_base = OTHER; note = 2'-O-methyluridine-3'-phosphate
  modified_base 9: mod_base = OTHER; note = 2'-deoxy-2'-fluoroadenosine-3'-phosphate
  modified_base 10: mod_base = OTHER; note = 2'-deoxy-2'-fluoroadenosine-3'-phosphate
  modified_base 11: mod_base = OTHER; note = 2'-deoxy-2'-fluorouridine-3'-phosphate
  modified_base 12: mod_base = OTHER; note = 2'-O-methyluridine-3'-phosphate
  modified_base 13: mod_base = OTHER; note = 2'-O-methyluridine-3'-phosphate
  modified_base 14: mod_base = OTHER; note = 2'-O-methyluridine-3'-phosphate
  modified_base 15: mod_base = OTHER; note = 2'-O-methyluridine-3'-phosphate
  modified_base 16: mod_base = OTHER; note = 2'-O-methylcytidine-3'-phosphate
  modified_base 17: mod_base = OTHER; note = 2'-O-methyladenosine-3'-phosphate
  modified_base 18: mod_base = OTHER; note = 2'-O-methyladenosine-3'-phosphate
  modified_base 19: mod_base = OTHER; note = 2'-O-methylcytidine-3'-phosphate
  modified_base 20: mod_base = OTHER; note = 2'-O-methylcytidine-3'-phosphate
  modified_base 21: mod_base = OTHER; note = 2'-O-methyladenosine
gttggtttaatttttcaacca

SEQ ID NO: 4383 - RNA, 21 nt, synthetic construct
  source 1..21: mol_type = other RNA
  modified_base 1: mod_base = OTHER; note = 2'-O-methyluridine-3'-phosphate
  modified_base 2: mod_base = OTHER; note = 2'-O-methyluridine-3'-phosphate
  modified_base 3: mod_base = OTHER; note = 2'-O-methylguanosine-3'-phosphate
  modified_base 4: mod_base = OTHER; note = 2'-O-methylguanosine-3'-phosphate
  modified_base 5: mod_base = OTHER; note = 2'-O-methyluridine-3'-phosphate
  modified_base 6: mod_base = OTHER; note = 2'-O-methyluridine-3'-phosphate
  modified_base 7: mod_base = OTHER; note = 2'-deoxy-2'-fluorouridine-3'-phosphate
  modified_base 8: mod_base = OTHER; note = 2'-O-methyladenosine-3'-phosphate
  modified_base 9: mod_base = OTHER; note = 2'-deoxy-2'-fluoroadenosine-3'-phosphate
  modified_base 10: mod_base = OTHER; note = 2'-deoxy-2'-fluorouridine-3'-phosphate
  modified_base 11: mod_base = OTHER; note = 2'-deoxy-2'-fluorouridine-3'-phosphate
  modified_base 12: mod_base = OTHER; note = 2'-O-methyluridine-3'-phosphate
  modified_base 13: mod_base = OTHER; note = 2'-O-methyluridine-3'-phosphate
  modified_base 14: mod_base = OTHER; note = 2'-O-methyluridine-3'-phosphate
  modified_base 15: mod_base = OTHER; note = 2'-O-methylcytidine-3'-phosphate
  modified_base 16: mod_base = OTHER; note = 2'-O-methyladenosine-3'-phosphate
  modified_base 17: mod_base = OTHER; note = 2'-O-methyladenosine-3'-phosphate
  modified_base 18: mod_base = OTHER; note = 2'-O-methylcytidine-3'-phosphate
  modified_base 19: mod_base = OTHER; note = 2'-O-methylcytidine-3'-phosphate
  modified_base 20: mod_base = OTHER; note = 2'-O-methylcytidine-3'-phosphate
  modified_base 21: mod_base = OTHER; note = 2'-O-methyladenosine
ttggtttaatttttcaaccca

SEQ ID NO: 4384 - RNA, 21 nt, synthetic construct
  source 1..21: mol_type = other RNA
  modified_base 1: mod_base = OTHER; note = 2'-O-methyluridine-3'-phosphate
  modified_base 2: mod_base = OTHER; note = 2'-O-methylguanosine-3'-phosphate
  modified_base 3: mod_base = OTHER; note = 2'-O-methylguanosine-3'-phosphate
  modified_base 4: mod_base = OTHER; note = 2'-O-methyluridine-3'-phosphate
  modified_base 5: mod_base = OTHER; note = 2'-O-methyluridine-3'-phosphate
  modified_base 6: mod_base = OTHER; note = 2'-O-methyluridine-3'-phosphate
  modified_base 7: mod_base = OTHER; note = 2'-deoxy-2'-fluoroadenosine-3'-phosphate
  modified_base 8: mod_base = OTHER; note = 2'-O-methyladenosine-3'-phosphate
  modified_base 9: mod_base = OTHER; note = 2'-deoxy-2'-fluorouridine-3'-phosphate
  modified_base 10: mod_base = OTHER; note = 2'-deoxy-2'-fluorouridine-3'-phosphate
  modified_base 11: mod_base = OTHER; note = 2'-deoxy-2'-fluorouridine-3'-phosphate
  modified_base 12: mod_base = OTHER; note = 2'-O-methyluridine-3'-phosphate
  modified_base 13: mod_base = OTHER; note = 2'-O-methyluridine-3'-phosphate
  modified_base 14: mod_base = OTHER; note = 2'-O-methylcytidine-3'-phosphate
  modified_base 15: mod_base = OTHER; note = 2'-O-methyladenosine-3'-phosphate
  modified_base 16: mod_base = OTHER; note = 2'-O-methyladenosine-3'-phosphate
  modified_base 17: mod_base = OTHER; note = 2'-O-methylcytidine-3'-phosphate
  modified_base 18: mod_base = OTHER; note = 2'-O-methylcytidine-3'-phosphate
  modified_base 19: mod_base = OTHER; note = 2'-O-methylcytidine-3'-phosphate
  modified_base 20: mod_base = OTHER; note = 2'-O-methyladenosine-3'-phosphate
  modified_base 21: mod_base = OTHER; note = 2'-O-methyladenosine
tggtttaatttttcaacccaa

SEQ ID NO: 4385 - RNA, 21 nt, synthetic construct
  source 1..21: mol_type = other RNA
  modified_base 1: mod_base = OTHER; note = 2'-O-methyluridine-3'-phosphate
  modified_base 2: mod_base = OTHER; note = 2'-O-methylcytidine-3'-phosphate
  modified_base 3: mod_base = OTHER; note = 2'-O-methylguanosine-3'-phosphate
  modified_base 4: mod_base = OTHER; note = 2'-O-methyluridine-3'-phosphate
  modified_base 5: mod_base = OTHER; note = 2'-O-methylcytidine-3'-phosphate
  modified_base 6: mod_base = OTHER; note = 2'-O-methylcytidine-3'-phosphate
  modified_base 7: mod_base = OTHER; note = 2'-deoxy-2'-fluoroadenosine-3'-phosphate
  modified_base 8: mod_base = OTHER; note = 2'-O-methyluridine-3'-phosphate
  modified_base 9: mod_base = OTHER; note = 2'-deoxy-2'-fluoroadenosine-3'-phosphate
  modified_base 10: mod_base = OTHER; note = 2'-deoxy-2'-fluorocytidine-3'-phosphate
  modified_base 11: mod_base = OTHER; note = 2'-deoxy-2'-fluoroadenosine-3'-phosphate
  modified_base 12: mod_base = OTHER; note = 2'-O-methylguanosine-3'-phosphate
  modified_base 13: mod_base = OTHER; note = 2'-O-methyluridine-3'-phosphate
  modified_base 14: mod_base = OTHER; note = 2'-O-methyluridine-3'-phosphate
  modified_base 15: mod_base = OTHER; note = 2'-O-methyluridine-3'-phosphate
  modified_base 16: mod_base = OTHER; note = 2'-O-methyluridine-3'-phosphate
  modified_base 17: mod_base = OTHER; note = 2'-O-methylcytidine-3'-phosphate
  modified_base 18: mod_base = OTHER; note = 2'-O-methyladenosine-3'-phosphate
  modified_base 19: mod_base = OTHER; note = 2'-O-methyluridine-3'-phosphate
  modified_base 20: mod_base = OTHER; note = 2'-O-methyluridine-3'-phosphate
  modified_base 21: mod_base = OTHER; note = 2'-O-methyladenosine
tcgtccatacagttttcatta

SEQ ID NO: 4386 - RNA, 21 nt, synthetic construct
  source 1..21: mol_type = other RNA
  modified_base 1: mod_base = OTHER; note = 2'-O-methylcytidine-3'-phosphate
  modified_base 2: mod_base = OTHER; note = 2'-O-methylguanosine-3'-phosphate
  modified_base 3: mod_base = OTHER; note = 2'-O-methyluridine-3'-phosphate
  modified_base 4: mod_base = OTHER; note = 2'-O-methylcytidine-3'-phosphate
  modified_base 5: mod_base = OTHER; note = 2'-O-methylcytidine-3'-phosphate
  modified_base 6: mod_base = OTHER; note = 2'-O-methyladenosine-3'-phosphate
  modified_base 7: mod_base = OTHER; note = 2'-deoxy-2'-fluorouridine-3'-phosphate
  modified_base 8: mod_base = OTHER; note = 2'-O-methyladenosine-3'-phosphate
  modified_base 9: mod_base = OTHER; note = 2'-deoxy-2'-fluorocytidine-3'-phosphate
  modified_base 10: mod_base = OTHER; note = 2'-deoxy-2'-fluoroadenosine-3'-phosphate
  modified_base 11: mod_base = OTHER; note = 2'-deoxy-2'-fluoroguanosine-3'-phosphate
  modified_base 12: mod_base = OTHER; note = 2'-O-methyluridine-3'-phosphate
  modified_base 13: mod_base = OTHER; note = 2'-O-methyluridine-3'-phosphate
  modified_base 14: mod_base = OTHER; note = 2'-O-methyluridine-3'-phosphate
  modified_base 15: mod_base = OTHER; note = 2'-O-methyluridine-3'-phosphate
  modified_base 16: mod_base = OTHER; note = 2'-O-methylcytidine-3'-phosphate
  modified_base 17: mod_base = OTHER; note = 2'-O-methyladenosine-3'-phosphate
  modified_base 18: mod_base = OTHER; note = 2'-O-methyluridine-3'-phosphate
  modified_base 19: mod_base = OTHER; note = 2'-O-methyluridine-3'-phosphate
  modified_base 20: mod_base = OTHER; note = 2'-O-methylcytidine-3'-phosphate
  modified_base 21: mod_base = OTHER; note = 2'-O-methyladenosine
cgtccatacagttttcattca

SEQ ID NO: 4387 - RNA, 21 nt, synthetic construct
  source 1..21: mol_type = other RNA
  modified_base 1: mod_base = OTHER; note = 2'-O-methylguanosine-3'-phosphate
  modified_base 2: mod_base = OTHER; note = 2'-O-methyluridine-3'-phosphate
  modified_base 3: mod_base = OTHER; note = 2'-O-methylcytidine-3'-phosphate
  modified_base 4: mod_base = OTHER; note = 2'-O-methylcytidine-3'-phosphate
  modified_base 5: mod_base = OTHER; note = 2'-O-methyladenosine-3'-phosphate
  modified_base 6: mod_base = OTHER; note = 2'-O-methyluridine-3'-phosphate
  modified_base 7: mod_base = OTHER; note = 2'-deoxy-2'-fluoroadenosine-3'-phosphate
  modified_base 8: mod_base = OTHER; note = 2'-O-methylcytidine-3'-phosphate
  modified_base 9: mod_base = OTHER; note = 2'-deoxy-2'-fluoroadenosine-3'-phosphate
  modified_base 10: mod_base = OTHER; note = 2'-deoxy-2'-fluoroguanosine-3'-phosphate
  modified_base 11: mod_base = OTHER; note = 2'-deoxy-2'-fluorouridine-3'-phosphate
  modified_base 12: mod_base = OTHER; note = 2'-O-methyluridine-3'-phosphate
  modified_base 13: mod_base = OTHER; note = 2'-O-methyluridine-3'-phosphate
  modified_base 14: mod_base = OTHER; note = 2'-O-methyluridine-3'-phosphate
  modified_base 15: mod_base = OTHER; note = 2'-O-methylcytidine-3'-phosphate
  modified_base 16: mod_base = OTHER; note = 2'-O-methyladenosine-3'-phosphate
  modified_base 17: mod_base = OTHER; note = 2'-O-methyluridine-3'-phosphate
  modified_base 18: mod_base = OTHER; note = 2'-O-methyluridine-3'-phosphate
  modified_base 19: mod_base = OTHER; note = 2'-O-methylcytidine-3'-phosphate
  modified_base 20: mod_base = OTHER; note = 2'-O-methyluridine-3'-phosphate
  modified_base 21: mod_base = OTHER; note = 2'-O-methyladenosine
gtccatacagttttcattcta

SEQ ID NO: 4388 - RNA, 21 nt, synthetic construct
  source 1..21: mol_type = other RNA
  modified_base 1: mod_base = OTHER; note = 2'-O-methyluridine-3'-phosphate
  modified_base 2: mod_base = OTHER; note = 2'-O-methylcytidine-3'-phosphate
  modified_base 3: mod_base = OTHER; note = 2'-O-methylcytidine-3'-phosphate
  modified_base 4: mod_base = OTHER; note = 2'-O-methyladenosine-3'-phosphate
  modified_base 5: mod_base = OTHER; note = 2'-O-methyluridine-3'-phosphate
  modified_base 6: mod_base = OTHER; note = 2'-O-methyladenosine-3'-phosphate
  modified_base 7: mod_base = OTHER; note = 2'-deoxy-2'-fluorocytidine-3'-phosphate
  modified_base 8: mod_base = OTHER; note = 2'-O-methyladenosine-3'-phosphate
  modified_base 9: mod_base = OTHER; note = 2'-deoxy-2'-fluoroguanosine-3'-phosphate
  modified_base 10: mod_base = OTHER; note = 2'-deoxy-2'-fluorouridine-3'-phosphate
  modified_base 11: mod_base = OTHER; note = 2'-deoxy-2'-fluorouridine-3'-phosphate
  modified_base 12: mod_base = OTHER; note = 2'-O-methyluridine-3'-phosphate
  modified_base 13: mod_base = OTHER; note = 2'-O-methyluridine-3'-phosphate
  modified_base 14: mod_base = OTHER; note = 2'-O-methylcytidine-3'-phosphate
  modified_base 15: mod_base = OTHER; note = 2'-O-methyladenosine-3'-phosphate
  modified_base 16: mod_base = OTHER; note = 2'-O-methyluridine-3'-phosphate
  modified_base 17: mod_base = OTHER; note = 2'-O-methyluridine-3'-phosphate
  modified_base 18: mod_base = OTHER; note = 2'-O-methylcytidine-3'-phosphate
  modified_base 19: mod_base = OTHER; note = 2'-O-methyluridine-3'-phosphate
  modified_base 20: mod_base = OTHER; note = 2'-O-methyladenosine-3'-phosphate
  modified_base 21: mod_base = OTHER; note = 2'-O-methyladenosine
tccatacagttttcattctaa

SEQ ID NO: 4389 - RNA, 21 nt, synthetic construct
  source 1..21: mol_type = other RNA
  modified_base 1: mod_base = OTHER; note = 2'-O-methylcytidine-3'-phosphate
  modified_base 2: mod_base = OTHER; note = 2'-O-methylcytidine-3'-phosphate
  modified_base 3: mod_base = OTHER; note = 2'-O-methyladenosine-3'-phosphate
  modified_base 4: mod_base = OTHER; note = 2'-O-methyluridine-3'-phosphate
  modified_base 5: mod_base = OTHER; note = 2'-O-methyladenosine-3'-phosphate
  modified_base 6: mod_base = OTHER; note = 2'-O-methylcytidine-3'-phosphate
  modified_base 7: mod_base = OTHER; note = 2'-deoxy-2'-fluoroadenosine-3'-phosphate
  modified_base 8: mod_base = OTHER; note = 2'-O-methylguanosine-3'-phosphate
  modified_base 9: mod_base = OTHER; note = 2'-deoxy-2'-fluorouridine-3'-phosphate
  modified_base 10: mod_base = OTHER; note = 2'-deoxy-2'-fluorouridine-3'-phosphate
  modified_base 11: mod_base = OTHER; note = 2'-deoxy-2'-fluorouridine-3'-phosphate
  modified_base 12: mod_base = OTHER; note = 2'-O-methyluridine-3'-phosphate
  modified_base 13: mod_base = OTHER; note = 2'-O-methylcytidine-3'-phosphate
  modified_base 14: mod_base = OTHER; note = 2'-O-methyladenosine-3'-phosphate
  modified_base 15: mod_base = OTHER; note = 2'-O-methyluridine-3'-phosphate
  modified_base 16: mod_base = OTHER; note = 2'-O-methyluridine-3'-phosphate
  modified_base 17: mod_base = OTHER; note = 2'-O-methylcytidine-3'-phosphate
  modified_base 18: mod_base = OTHER; note = 2'-O-methyluridine-3'-phosphate
  modified_base 19: mod_base = OTHER; note = 2'-O-methyladenosine-3'-phosphate
  modified_base 20: mod_base = OTHER; note = 2'-O-methyluridine-3'-phosphate
  modified_base 21: mod_base = OTHER; note = 2'-O-methyladenosine
ccatacagttttcattctata

SEQ ID NO: 4390 - RNA, 21 nt, synthetic construct
  source 1..21: mol_type = other RNA
  modified_base 1: mod_base = OTHER; note = 2'-O-methylcytidine-3'-phosphate
  modified_base 2: mod_base = OTHER; note = 2'-O-methyladenosine-3'-phosphate
  modified_base 3: mod_base = OTHER; note = 2'-O-methyluridine-3'-phosphate
  modified_base 4: mod_base = OTHER; note = 2'-O-methyladenosine-3'-phosphate
  modified_base 5: mod_base = OTHER; note = 2'-O-methylcytidine-3'-phosphate
  modified_base 6: mod_base = OTHER; note = 2'-O-methyladenosine-3'-phosphate
  modified_base 7: mod_base = OTHER; note = 2'-deoxy-2'-fluoroguanosine-3'-phosphate
  modified_base 8: mod_base = OTHER; note = 2'-O-methyluridine-3'-phosphate
  modified_base 9: mod_base = OTHER; note = 2'-deoxy-2'-fluorouridine-3'-phosphate
  modified_base 10: mod_base = OTHER; note = 2'-deoxy-2'-fluorouridine-3'-phosphate
  modified_base 11: mod_base = OTHER; note = 2'-deoxy-2'-fluorouridine-3'-phosphate
  modified_base 12: mod_base = OTHER; note = 2'-O-methylcytidine-3'-phosphate
  modified_base 13: mod_base = OTHER; note = 2'-O-methyladenosine-3'-phosphate
  modified_base 14: mod_base = OTHER; note = 2'-O-methyluridine-3'-phosphate
  modified_base 15: mod_base = OTHER; note = 2'-O-methyluridine-3'-phosphate
  modified_base 16: mod_base = OTHER; note = 2'-O-methylcytidine-3'-phosphate
  modified_base 17: mod_base = OTHER; note = 2'-O-methyluridine-3'-phosphate
  modified_base 18: mod_base = OTHER; note = 2'-O-methyladenosine-3'-phosphate
  modified_base 19: mod_base = OTHER; note = 2'-O-methyluridine-3'-phosphate
  modified_base 20: mod_base = OTHER; note = 2'-O-methylguanosine-3'-phosphate
  modified_base 21: mod_base = OTHER; note = 2'-O-methyladenosine
catacagttttcattctatga

SEQ ID NO: 4391 - RNA, 21 nt, synthetic construct
  source 1..21: mol_type = other RNA
  modified_base 1: mod_base = OTHER; note = 2'-O-methyladenosine-3'-phosphate
  modified_base 2: mod_base = OTHER; note = 2'-O-methyluridine-3'-phosphate
  modified_base 3: mod_base = OTHER; note = 2'-O-methyladenosine-3'-phosphate
  modified_base 4: mod_base = OTHER; note = 2'-O-methylcytidine-3'-phosphate
  modified_base 5: mod_base = OTHER; note = 2'-O-methyladenosine-3'-phosphate
  modified_base 6: mod_base = OTHER; note = 2'-O-methylguanosine-3'-phosphate
  modified_base 7: mod_base = OTHER; note = 2'-deoxy-2'-fluorouridine-3'-phosphate
  modified_base 8: mod_base = OTHER; note = 2'-O-methyluridine-3'-phosphate
  modified_base 9: mod_base = OTHER; note = 2'-deoxy-2'-fluorouridine-3'-phosphate
  modified_base 10: mod_base = OTHER; note = 2'-deoxy-2'-fluorouridine-3'-phosphate
  modified_base 11: mod_base = OTHER; note = 2'-deoxy-2'-fluorocytidine-3'-phosphate
  modified_base 12: mod_base = OTHER; note = 2'-O-methyladenosine-3'-phosphate
  modified_base 13: mod_base = OTHER; note = 2'-O-methyluridine-3'-phosphate
  modified_base 14: mod_base = OTHER; note = 2'-O-methyluridine-3'-phosphate
  modified_base 15: mod_base = OTHER; note = 2'-O-methylcytidine-3'-phosphate
  modified_base 16: mod_base = OTHER; note = 2'-O-methyluridine-3'-phosphate
  modified_base 17: mod_base = OTHER; note = 2'-O-methyladenosine-3'-phosphate
  modified_base 18: mod_base = OTHER; note = 2'-O-methyluridine-3'-phosphate
  modified_base 19: mod_base = OTHER; note = 2'-O-methylguanosine-3'-phosphate
  modified_base 20: mod_base = OTHER; note = 2'-O-methylcytidine-3'-phosphate
  modified_base 21: mod_base = OTHER; note = 2'-O-methyladenosine
atacagttttcattctatgca

SEQ ID NO: 4392 - RNA, 21 nt, synthetic construct
  source 1..21: mol_type = other RNA
  modified_base 1: mod_base = OTHER; note = 2'-O-methyluridine-3'-phosphate
  modified_base 2: mod_base = OTHER; note = 2'-O-methyladenosine-3'-phosphate
  modified_base 3: mod_base = OTHER; note = 2'-O-methylcytidine-3'-phosphate
  modified_base 4: mod_base = OTHER; note = 2'-O-methyladenosine-3'-phosphate
  modified_base 5: mod_base = OTHER; note = 2'-O-methylguanosine-3'-phosphate
  modified_base 6: mod_base = OTHER; note = 2'-O-methyluridine-3'-phosphate
  modified_base 7: mod_base = OTHER; note = 2'-deoxy-2'-fluorouridine-3'-phosphate
  modified_base 8: mod_base = OTHER; note = 2'-O-methyluridine-3'-phosphate
  modified_base 9: mod_base = OTHER; note = 2'-deoxy-2'-fluorouridine-3'-phosphate
  modified_base 10: mod_base = OTHER; note = 2'-deoxy-2'-fluorocytidine-3'-phosphate
  modified_base 11: mod_base = OTHER; note = 2'-deoxy-2'-fluoroadenosine-3'-phosphate
  modified_base 12: mod_base = OTHER; note = 2'-O-methyluridine-3'-phosphate
  modified_base 13: mod_base = OTHER; note = 2'-O-methyluridine-3'-phosphate
  modified_base 14: mod_base = OTHER; note = 2'-O-methylcytidine-3'-phosphate
  modified_base 15: mod_base = OTHER; note = 2'-O-methyluridine-3'-phosphate
  modified_base 16: mod_base = OTHER; note = 2'-O-methyladenosine-3'-phosphate
  modified_base 17: mod_base = OTHER; note = 2'-O-methyluridine-3'-phosphate
  modified_base 18: mod_base = OTHER; note = 2'-O-methylguanosine-3'-phosphate
  modified_base 19: mod_base = OTHER; note = 2'-O-methylcytidine-3'-phosphate
  modified_base 20: mod_base = OTHER; note = 2'-O-methyladenosine-3'-phosphate
  modified_base 21: mod_base = OTHER; note = 2'-O-methyladenosine
tacagttttcattctatgcaa

SEQ ID NO: 4393 - RNA, 21 nt, synthetic construct
  source 1..21: mol_type = other RNA
  modified_base 1: mod_base = OTHER; note = 2'-O-methyladenosine-3'-phosphate
  modified_base 2: mod_base = OTHER; note = 2'-O-methylcytidine-3'-phosphate
  modified_base 3: mod_base = OTHER; note = 2'-O-methyladenosine-3'-phosphate
  modified_base 4: mod_base = OTHER; note = 2'-O-methylguanosine-3'-phosphate
  modified_base 5: mod_base = OTHER; note = 2'-O-methyluridine-3'-phosphate
  modified_base 6: mod_base = OTHER; note = 2'-O-methyluridine-3'-phosphate
  modified_base 7: mod_base = OTHER; note = 2'-deoxy-2'-fluorouridine-3'-phosphate
  modified_base 8: mod_base = OTHER; note = 2'-O-methyluridine-3'-phosphate
  modified_base 9: mod_base = OTHER; note = 2'-deoxy-2'-fluorocytidine-3'-phosphate
  modified_base 10: mod_base = OTHER; note = 2'-deoxy-2'-fluoroadenosine-3'-phosphate
  modified_base 11: mod_base = OTHER; note = 2'-deoxy-2'-fluorouridine-3'-phosphate
  modified_base 12: mod_base = OTHER; note = 2'-O-methyluridine-3'-phosphate
  modified_base 13: mod_base = OTHER; note = 2'-O-methylcytidine-3'-phosphate
  modified_base 14: mod_base = OTHER; note = 2'-O-methyluridine-3'-phosphate
  modified_base 15: mod_base = OTHER; note = 2'-O-methyladenosine-3'-phosphate
  modified_base 16: mod_base = OTHER; note = 2'-O-methyluridine-3'-phosphate
  modified_base 17: mod_base = OTHER; note = 2'-O-methylguanosine-3'-phosphate
  modified_base 18: mod_base = OTHER; note = 2'-O-methylcytidine-3'-phosphate
  modified_base 19: mod_base = OTHER; note = 2'-O-methyladenosine-3'-phosphate
  modified_base 20: mod_base = OTHER; note = 2'-O-methyluridine-3'-phosphate
  modified_base 21: mod_base = OTHER; note = 2'-O-methyladenosine
acagttttcattctatgcata

SEQ ID NO: 4394 - RNA, 21 nt, synthetic construct
  source 1..21: mol_type = other RNA
  modified_base 1: mod_base = OTHER; note = 2'-O-methylcytidine-3'-phosphate
  modified_base 2: mod_base = OTHER; note = 2'-O-methyladenosine-3'-phosphate
  modified_base 3: mod_base = OTHER; note = 2'-O-methylguanosine-3'-phosphate
  modified_base 4: mod_base = OTHER; note = 2'-O-methyluridine-3'-phosphate
  modified_base 5: mod_base = OTHER; note = 2'-O-methyluridine-3'-phosphate
  modified_base 6: mod_base = OTHER; note = 2'-O-methyluridine-3'-phosphate
  modified_base 7: mod_base = OTHER; note = 2'-deoxy-2'-fluorouridine-3'-phosphate
  modified_base 8: mod_base = OTHER; note = 2'-O-methylcytidine-3'-phosphate
  modified_base 9: mod_base = OTHER; note = 2'-deoxy-2'-fluoroadenosine-3'-phosphate
  modified_base 10: mod_base = OTHER; note = 2'-deoxy-2'-fluorouridine-3'-phosphate
  modified_base 11: mod_base = OTHER; note = 2'-deoxy-2'-fluorouridine-3'-phosphate
  modified_base 12: mod_base = OTHER; note = 2'-O-methylcytidine-3'-phosphate
  modified_base 13: mod_base = OTHER; note = 2'-O-methyluridine-3'-phosphate
  modified_base 14: mod_base = OTHER; note = 2'-O-methyladenosine-3'-phosphate
  modified_base 15: mod_base = OTHER; note = 2'-O-methyluridine-3'-phosphate
  modified_base 16: mod_base = OTHER; note = 2'-O-methylguanosine-3'-phosphate
  modified_base 17: mod_base = OTHER; note = 2'-O-methylcytidine-3'-phosphate
  modified_base 18: mod_base = OTHER; note = 2'-O-methyladenosine-3'-phosphate
  modified_base 19: mod_base = OTHER; note = 2'-O-methyluridine-3'-phosphate
  modified_base 20: mod_base = OTHER; note = 2'-O-methylguanosine-3'-phosphate
  modified_base 21: mod_base = OTHER; note = 2'-O-methyladenosine
cagttttcattctatgcatga

SEQ ID NO: 4395 - RNA, 21 nt, synthetic construct
  source 1..21: mol_type = other RNA
  modified_base 1: mod_base = OTHER; note = 2'-O-methyladenosine-3'-phosphate
  modified_base 2: mod_base = OTHER; note = 2'-O-methylguanosine-3'-phosphate
  modified_base 3: mod_base = OTHER; note = 2'-O-methyluridine-3'-phosphate
  modified_base 4: mod_base = OTHER; note = 2'-O-methyluridine-3'-phosphate
  modified_base 5: mod_base = OTHER; note = 2'-O-methyluridine-3'-phosphate
  modified_base 6: mod_base = OTHER; note = 2'-O-methyluridine-3'-phosphate
  modified_base 7: mod_base = OTHER; note = 2'-deoxy-2'-fluorocytidine-3'-phosphate
  modified_base 8: mod_base = OTHER; note = 2'-O-methyladenosine-3'-phosphate
  modified_base 9: mod_base = OTHER; note = 2'-deoxy-2'-fluorouridine-3'-phosphate
  modified_base 10: mod_base = OTHER; note = 2'-deoxy-2'-fluorouridine-3'-phosphate
  modified_base 11: mod_base = OTHER; note = 2'-deoxy-2'-fluorocytidine-3'-phosphate
  modified_base 12: mod_base = OTHER; note = 2'-O-methyluridine-3'-phosphate
  modified_base 13: mod_base = OTHER; note = 2'-O-methyladenosine-3'-phosphate
  modified_base 14: mod_base = OTHER; note = 2'-O-methyluridine-3'-phosphate
  modified_base 15: mod_base = OTHER; note = 2'-O-methylguanosine-3'-phosphate
  modified_base 16: mod_base = OTHER; note = 2'-O-methylcytidine-3'-phosphate
  modified_base 17: mod_base = OTHER; note = 2'-O-methyladenosine-3'-phosphate
  modified_base 18: mod_base = OTHER; note = 2'-O-methyluridine-3'-phosphate
  modified_base 19: mod_base = OTHER; note = 2'-O-methylguanosine-3'-phosphate
  modified_base 20: mod_base = OTHER; note = 2'-O-methylguanosine-3'-phosphate
  modified_base 21: mod_base = OTHER; note = 2'-O-methyladenosine
agttttcattctatgcatgga

SEQ ID NO: 4396 - RNA, 21 nt, synthetic construct
  source 1..21: mol_type = other RNA
  modified_base 1: mod_base = OTHER; note = 2'-O-methylguanosine-3'-phosphate
  modified_base 2: mod_base = OTHER; note = 2'-O-methylguanosine-3'-phosphate
  modified_base 3: mod_base = OTHER; note = 2'-O-methyladenosine-3'-phosphate
  modified_base 4: mod_base = OTHER; note = 2'-O-methyluridine-3'-phosphate
  modified_base 5: mod_base = OTHER; note = 2'-O-methyluridine-3'-phosphate
  modified_base 6: mod_base = OTHER; note = 2'-O-methylguanosine-3'-phosphate
  modified_base 7: mod_base = OTHER; note = 2'-deoxy-2'-fluorouridine-3'-phosphate
  modified_base 8: mod_base = OTHER; note = 2'-O-methylguanosine-3'-phosphate
  modified_base 9: mod_base = OTHER; note = 2'-deoxy-2'-fluorouridine-3'-phosphate
  modified_base 10: mod_base = OTHER; note = 2'-deoxy-2'-fluoroguanosine-3'-phosphate
  modified_base 11: mod_base = OTHER; note = 2'-deoxy-2'-fluorocytidine-3'-phosphate
  modified_base 12: mod_base = OTHER; note = 2'-O-methylcytidine-3'-phosphate
  modified_base 13: mod_base = OTHER; note = 2'-O-methyluridine-3'-phosphate
  modified_base 14: mod_base = OTHER; note = 2'-O-methyladenosine-3'-phosphate
  modified_base 15: mod_base = OTHER; note = 2'-O-methyladenosine-3'-phosphate
  modified_base 16: mod_base = OTHER; note = 2'-O-methyladenosine-3'-phosphate
  modified_base 17: mod_base = OTHER; note = 2'-O-methyluridine-3'-phosphate
  modified_base 18: mod_base = OTHER; note = 2'-O-methyluridine-3'-phosphate
  modified_base 19: mod_base = OTHER; note = 2'-O-methyluridine-3'-phosphate
  modified_base 20: mod_base = OTHER; note = 2'-O-methyluridine-3'-phosphate
  modified_base 21: mod_base = OTHER; note = 2'-O-methyladenosine
ggattgtgtgcctaaatttta

SEQ ID NO: 4397 - RNA, 21 nt, synthetic construct
  source 1..21: mol_type = other RNA
  modified_base 1: mod_base = OTHER; note = 2'-O-methyluridine-3'-phosphate
  modified_base 2: mod_base = OTHER; note = 2'-O-methylguanosine-3'-phosphate
  modified_base 3: mod_base = OTHER; note = 2'-O-methylcytidine-3'-phosphate
  modified_base 4: mod_base = OTHER; note = 2'-O-methylcytidine-3'-phosphate
  modified_base 5: mod_base = OTHER; note = 2'-O-methyluridine-3'-phosphate
  modified_base 6: mod_base = OTHER; note = 2'-O-methyladenosine-3'-phosphate
  modified_base 7: mod_base = OTHER; note = 2'-deoxy-2'-fluoroadenosine-3'-phosphate
  modified_base 8: mod_base = OTHER; note = 2'-O-methyladenosine-3'-phosphate
  modified_base 9: mod_base = OTHER; note = 2'-deoxy-2'-fluorouridine-3'-phosphate
  modified_base 10: mod_base = OTHER; note = 2'-deoxy-2'-fluorouridine-3'-phosphate
  modified_base 11: mod_base = OTHER; note = 2'-deoxy-2'-fluorouridine-3'-phosphate
  modified_base 12: mod_base = OTHER; note = 2'-O-methyluridine-3'-phosphate
  modified_base 13: mod_base = OTHER; note = 2'-O-methylguanosine-3'-phosphate
  modified_base 14: mod_base = OTHER; note = 2'-O-methyluridine-3'-phosphate
  modified_base 15: mod_base = OTHER; note = 2'-O-methylcytidine-3'-phosphate
  modified_base 16: mod_base = OTHER; note = 2'-O-methyluridine-3'-phosphate
  modified_base 17: mod_base = OTHER; note = 2'-O-methyladenosine-3'-phosphate
  modified_base 18: mod_base = OTHER; note = 2'-O-methyladenosine-3'-phosphate
  modified_base 19: mod_base = OTHER; note = 2'-O-methylcytidine-3'-phosphate
  modified_base 20: mod_base = OTHER; note = 2'-O-methyladenosine-3'-phosphate
  modified_base 21: mod_base = OTHER; note = 2'-O-methyladenosine
tgcctaaattttgtctaacaa

SEQ ID NO: 4398 - RNA, 21 nt, synthetic construct
  source 1..21: mol_type = other RNA
  modified_base 1: mod_base = OTHER; note = 2'-O-methylcytidine-3'-phosphate
  modified_base 2: mod_base = OTHER; note = 2'-O-methyluridine-3'-phosphate
  modified_base 3: mod_base = OTHER; note = 2'-O-methyladenosine-3'-phosphate
  modified_base 4: mod_base = OTHER; note = 2'-O-methyladenosine-3'-phosphate
  modified_base 5: mod_base = OTHER; note = 2'-O-methyladenosine-3'-phosphate
  modified_base 6: mod_base = OTHER; note = 2'-O-methyluridine-3'-phosphate
  modified_base 7: mod_base = OTHER; note = 2'-deoxy-2'-fluorouridine-3'-phosphate
  modified_base 8: mod_base = OTHER; note = 2'-O-methyluridine-3'-phosphate
  modified_base 9: mod_base = OTHER; note = 2'-deoxy-2'-fluorouridine-3'-phosphate
  modified_base 10: mod_base = OTHER; note = 2'-deoxy-2'-fluoroguanosine-3'-phosphate
  modified_base 11: mod_base = OTHER; note = 2'-deoxy-2'-fluorouridine-3'-phosphate
  modified_base 12: mod_base = OTHER; note = 2'-O-methylcytidine-3'-phosphate
  modified_base 13: mod_base = OTHER; note = 2'-O-methyluridine-3'-phosphate
  modified_base 14: mod_base = OTHER; note = 2'-O-methyladenosine-3'-phosphate
  modified_base 15: mod_base = OTHER; note = 2'-O-methyladenosine-3'-phosphate
  modified_base 16: mod_base = OTHER; note = 2'-O-methylcytidine-3'-phosphate
  modified_base 17: mod_base = OTHER; note = 2'-O-methyladenosine-3'-phosphate
  modified_base 18: mod_base = OTHER; note = 2'-O-methyladenosine-3'-phosphate
  modified_base 19: mod_base = OTHER; note = 2'-O-methyladenosine-3'-phosphate
  modified_base 20: mod_base = OTHER; note = 2'-O-methyluridine-3'-phosphate
  modified_base 21: mod_base = OTHER; note = 2'-O-methyladenosine
ctaaattttgtctaacaaata

SEQ ID NO: 4399 - RNA, 21 nt, synthetic construct
  source 1..21: mol_type = other RNA
  modified_base 1: mod_base = OTHER; note = 2'-O-methyluridine-3'-phosphate
  modified_base 2: mod_base = OTHER; note = 2'-O-methyladenosine-3'-phosphate
  modified_base 3: mod_base = OTHER; note = 2'-O-methyladenosine-3'-phosphate
  modified_base 4: mod_base = OTHER; note = 2'-O-methyladenosine-3'-phosphate
  modified_base 5: mod_base = OTHER; note = 2'-O-methyluridine-3'-phosphate
  modified_base 6: mod_base = OTHER; note = 2'-O-methyluridine-3'-phosphate
  modified_base 7: mod_base = OTHER; note = 2'-deoxy-2'-fluorouridine-3'-phosphate
  modified_base 8: mod_base = OTHER; note = 2'-O-methyluridine-3'-phosphate
  modified_base 9: mod_base = OTHER; note = 2'-deoxy-2'-fluoroguanosine-3'-phosphate
  modified_base 10: mod_base = OTHER; note = 2'-deoxy-2'-fluorouridine-3'-phosphate
  modified_base 11: mod_base = OTHER; note = 2'-deoxy-2'-fluorocytidine-3'-phosphate
  modified_base 12: mod_base = OTHER; note = 2'-O-methyluridine-3'-phosphate
  modified_base 13: mod_base = OTHER; note = 2'-O-methyladenosine-3'-phosphate
  modified_base 14: mod_base = OTHER; note = 2'-O-methyladenosine-3'-phosphate
  modified_base 15: mod_base = OTHER; note = 2'-O-methylcytidine-3'-phosphate
  modified_base 16: mod_base = OTHER; note = 2'-O-methyladenosine-3'-phosphate
  modified_base 17: mod_base = OTHER; note = 2'-O-methyladenosine-3'-phosphate
  modified_base 18: mod_base = OTHER; note = 2'-O-methyladenosine-3'-phosphate
  modified_base 19: mod_base = OTHER; note = 2'-O-methyluridine-3'-phosphate
  modified_base 20: mod_base = OTHER; note = 2'-O-methylguanosine-3'-phosphate
  modified_base 21: mod_base = OTHER; note = 2'-O-methyladenosine
taaattttgtctaacaaatga

SEQ ID NO: 4400 - RNA, 21 nt, synthetic construct
  source 1..21: mol_type = other RNA
  modified_base 1: mod_base = OTHER; note = 2'-O-methyladenosine-3'-phosphate
  modified_base 2: mod_base = OTHER; note = 2'-O-methyladenosine-3'-phosphate
  modified_base 3: mod_base = OTHER; note = 2'-O-methyladenosine-3'-phosphate
  modified_base 4: mod_base = OTHER; note = 2'-O-methyluridine-3'-phosphate
  modified_base 5: mod_base = OTHER; note = 2'-O-methyluridine-3'-phosphate
  modified_base 6: mod_base = OTHER; note = 2'-O-methyluridine-3'-phosphate
  modified_base 7: mod_base = OTHER; note = 2'-deoxy-2'-fluorouridine-3'-phosphate
  modified_base 8: mod_base = OTHER; note = 2'-O-methylguanosine-3'-phosphate
  modified_base 9: mod_base = OTHER; note = 2'-deoxy-2'-fluorouridine-3'-phosphate
  modified_base 10: mod_base = OTHER; note = 2'-deoxy-2'-fluorocytidine-3'-phosphate
  modified_base 11: mod_base = OTHER; note = 2'-deoxy-2'-fluorouridine-3'-phosphate
  modified_base 12: mod_base = OTHER; note = 2'-O-methyladenosine-3'-phosphate
  modified_base 13: mod_base = OTHER; note = 2'-O-methyladenosine-3'-phosphate
  modified_base 14: mod_base = OTHER; note = 2'-O-methylcytidine-3'-phosphate
  modified_base 15: mod_base = OTHER; note = 2'-O-methyladenosine-3'-phosphate
  modified_base 16: mod_base = OTHER; note = 2'-O-methyladenosine-3'-phosphate
  modified_base 17: mod_base = OTHER; note = 2'-O-methyladenosine-3'-phosphate
  modified_base 18: mod_base = OTHER; note = 2'-O-methyluridine-3'-phosphate
  modified_base 19: mod_base = OTHER; note = 2'-O-methylguanosine-3'-phosphate
  modified_base 20: mod_base = OTHER; note = 2'-O-methylcytidine-3'-phosphate
  modified_base 21: mod_base = OTHER; note = 2'-O-methyladenosine
aaattttgtctaacaaatgca

SEQ ID NO: 4401 - RNA, 21 nt, synthetic construct
  source 1..21: mol_type = other RNA
  modified_base 1: mod_base = OTHER; note = 2'-O-methyluridine-3'-phosphate
  modified_base 2: mod_base = OTHER; note = 2'-O-methyluridine-3'-phosphate
  modified_base 3: mod_base = OTHER; note = 2'-O-methyluridine-3'-phosphate
  modified_base 4: mod_base = OTHER; note = 2'-O-methyluridine-3'-phosphate
  modified_base 5: mod_base = OTHER; note = 2'-O-methylguanosine-3'-phosphate
  modified_base 6: mod_base = OTHER; note = 2'-O-methyluridine-3'-phosphate
  modified_base 7: mod_base = OTHER; note = 2'-deoxy-2'-fluorocytidine-3'-phosphate
  modified_base 8: mod_base = OTHER; note = 2'-O-methyluridine-3'-phosphate
  modified_base 9: mod_base = OTHER; note = 2'-deoxy-2'-fluoroadenosine-3'-phosphate
  modified_base 10: mod_base = OTHER; note = 2'-deoxy-2'-fluoroadenosine-3'-phosphate
  modified_base 11: mod_base = OTHER; note = 2'-deoxy-2'-fluorocytidine-3'-phosphate
  modified_base 12: mod_base = OTHER; note = 2'-O-methyladenosine-3'-phosphate
  modified_base 13: mod_base = OTHER; note = 2'-O-methyladenosine-3'-phosphate
  modified_base 14: mod_base = OTHER; note = 2'-O-methyladenosine-3'-phosphate
  modified_base 15: mod_base = OTHER; note = 2'-O-methyluridine-3'-phosphate
  modified_base 16: mod_base = OTHER; note = 2'-O-methylguanosine-3'-phosphate
  modified_base 17: mod_base = OTHER; note = 2'-O-methylcytidine-3'-phosphate
  modified_base 18: mod_base = OTHER; note = 2'-O-methyladenosine-3'-phosphate
  modified_base 19: mod_base = OTHER; note = 2'-O-methyladenosine-3'-phosphate
  modified_base 20: mod_base = OTHER; note = 2'-O-methylguanosine-3'-phosphate
  modified_base 21: mod_base = OTHER; note = 2'-O-methyladenosine
ttttgtctaacaaatgcaaga

SEQ ID NO: 4402 - RNA, 21 nt, synthetic construct
  source 1..21: mol_type = other RNA
  modified_base 1: mod_base = OTHER; note = 2'-O-methyluridine-3'-phosphate
  modified_base 2: mod_base = OTHER; note = 2'-O-methyladenosine-3'-phosphate
  modified_base 3: mod_base = OTHER; note = 2'-O-methylguanosine-3'-phosphate
  modified_base 4: mod_base = OTHER; note = 2'-O-methyladenosine-3'-phosphate
  modified_base 5: mod_base = OTHER; note = 2'-O-methyladenosine-3'-phosphate
  modified_base 6: mod_base = OTHER; note = 2'-O-methyluridine-3'-phosphate
  modified_base 7: mod_base = OTHER; note = 2'-deoxy-2'-fluoroguanosine-3'-phosphate
  modified_base 8: mod_base = OTHER; note = 2'-O-methyladenosine-3'-phosphate
  modified_base 9: mod_base = OTHER; note = 2'-deoxy-2'-fluorocytidine-3'-phosphate
  modified_base 10: mod_base = OTHER; note = 2'-deoxy-2'-fluoroadenosine-3'-phosphate
  modified_base 11: mod_base = OTHER; note = 2'-deoxy-2'-fluorouridine-3'-phosphate
  modified_base 12: mod_base = OTHER; note = 2'-O-methyluridine-3'-phosphate
  modified_base 13: mod_base = OTHER; note = 2'-O-methyluridine-3'-phosphate
  modified_base 14: mod_base = OTHER; note = 2'-O-methyladenosine-3'-phosphate
  modified_base 15: mod_base = OTHER; note = 2'-O-methylcytidine-3'-phosphate
  modified_base 16: mod_base = OTHER; note = 2'-O-methyluridine-3'-phosphate
  modified_base 17: mod_base = OTHER; note = 2'-O-methyladenosine-3'-phosphate
  modified_base 18: mod_base = OTHER; note = 2'-O-methyladenosine-3'-phosphate
  modified_base 19: mod_base = OTHER; note = 2'-O-methyluridine-3'-phosphate
  modified_base 20: mod_base = OTHER; note = 2'-O-methyladenosine-3'-phosphate
  modified_base 21: mod_base = OTHER; note = 2'-O-methyladenosine
tagaatgacatttactaataa

SEQ ID NO: 4403 - RNA, 21 nt, synthetic construct
  source 1..21: mol_type = other RNA
  modified_base 1: mod_base = OTHER; note = 2'-O-methylcytidine-3'-phosphate
  modified_base 2: mod_base = OTHER; note = 2'-O-methyluridine-3'-phosphate
  modified_base 3: mod_base = OTHER; note = 2'-O-methyluridine-3'-phosphate
  modified_base 4: mod_base = OTHER; note = 2'-O-methylcytidine-3'-phosphate
  modified_base 5: mod_base = OTHER; note = 2'-O-methylcytidine-3'-phosphate
  modified_base 6: mod_base = OTHER; note = 2'-O-methyladenosine-3'-phosphate
  modified_base 7: mod_base = OTHER; note = 2'-deoxy-2'-fluorouridine-3'-phosphate
  modified_base 8: mod_base = OTHER; note = 2'-O-methyladenosine-3'-phosphate
  modified_base 9: mod_base = OTHER; note = 2'-deoxy-2'-fluoroguanosine-3'-phosphate
  modified_base 10: mod_base = OTHER; note = 2'-deoxy-2'-fluoroguanosine-3'-phosphate
  modified_base 11: mod_base = OTHER; note = 2'-deoxy-2'-fluorocytidine-3'-phosphate
  modified_base 12: mod_base = OTHER; note = 2'-O-methyluridine-3'-phosphate
  modified_base 13: mod_base = OTHER; note = 2'-O-methyladenosine-3'-phosphate
  modified_base 14: mod_base = OTHER; note = 2'-O-methyladenosine-3'-phosphate
  modified_base 15: mod_base = OTHER; note = 2'-O-methyladenosine-3'-phosphate
  modified_base 16: mod_base = OTHER; note = 2'-O-methyluridine-3'-phosphate
  modified_base 17: mod_base = OTHER; note = 2'-O-methyladenosine-3'-phosphate
  modified_base 18: mod_base = OTHER; note = 2'-O-methyladenosine-3'-phosphate
  modified_base 19: mod_base = OTHER; note = 2'-O-methyluridine-3'-phosphate
  modified_base 20: mod_base = OTHER; note = 2'-O-methyladenosine-3'-phosphate
  modified_base 21: mod_base = OTHER; note = 2'-O-methyladenosine
cttccataggctaaataataa

SEQ ID NO: 4404 - RNA, 21 nt, synthetic construct
  source 1..21: mol_type = other RNA
  modified_base 1: mod_base = OTHER; note = 2'-O-methylguanosine-3'-phosphate
  modified_base 2: mod_base = OTHER; note = 2'-O-methylcytidine-3'-phosphate
  modified_base 3: mod_base = OTHER; note = 2'-O-methylcytidine-3'-phosphate
  modified_base 4: mod_base = OTHER; note = 2'-O-methyladenosine-3'-phosphate
  modified_base 5: mod_base = OTHER; note = 2'-O-methyladenosine-3'-phosphate
  modified_base 6: mod_base = OTHER; note = 2'-O-methyladenosine-3'-phosphate
  modified_base 7: mod_base = OTHER; note = 2'-deoxy-2'-fluoroadenosine-3'-phosphate
  modified_base 8: mod_base = OTHER; note = 2'-O-methyluridine-3'-phosphate
  modified_base 9: mod_base = OTHER; note = 2'-deoxy-2'-fluoroadenosine-3'-phosphate
  modified_base 10: mod_base = OTHER; note = 2'-deoxy-2'-fluorouridine-3'-phosphate
  modified_base 11: mod_base = OTHER; note = 2'-deoxy-2'-fluorouridine-3'-phosphate
  modified_base 12: mod_base = OTHER; note = 2'-O-methyladenosine-3'-phosphate
  modified_base 13: mod_base = OTHER; note = 2'-O-methyladenosine-3'-phosphate
  modified_base 14: mod_base = OTHER; note = 2'-O-methyladenosine-3'-phosphate
  modified_base 15: mod_base = OTHER; note = 2'-O-methyluridine-3'-phosphate
  modified_base 16: mod_base = OTHER; note = 2'-O-methyluridine-3'-phosphate
  modified_base 17: mod_base = OTHER; note = 2'-O-methylcytidine-3'-phosphate
  modified_base 18: mod_base = OTHER; note = 2'-O-methyluridine-3'-phosphate
  modified_base 19: mod_base = OTHER; note = 2'-O-methyladenosine-3'-phosphate
  modified_base 20: mod_base = OTHER; note = 2'-O-methylguanosine-3'-phosphate
  modified_base 21: mod_base = OTHER; note = 2'-O-methyladenosine
gccaaaatattaaattctaga

SEQ ID NO: 4405 - RNA, 21 nt, synthetic construct
  source 1..21: mol_type = other RNA
  modified_base 1: mod_base = OTHER; note = 2'-O-methyluridine-3'-phosphate
  modified_base 2: mod_base = OTHER; note = 2'-O-methyladenosine-3'-phosphate
  modified_base 3: mod_base = OTHER; note = 2'-O-methyladenosine-3'-phosphate
  modified_base 4: mod_base = OTHER; note = 2'-O-methyladenosine-3'-phosphate
  modified_base 5: mod_base = OTHER; note = 2'-O-methyluridine-3'-phosphate
  modified_base 6: mod_base = OTHER; note = 2'-O-methyluridine-3'-phosphate
  modified_base 7: mod_base = OTHER; note = 2'-deoxy-2'-fluorocytidine-3'-phosphate
  modified_base 8: mod_base = OTHER; note = 2'-O-methyluridine-3'-phosphate
  modified_base 9: mod_base = OTHER; note = 2'-deoxy-2'-fluoroadenosine-3'-phosphate
  modified_base 10: mod_base = OTHER; note = 2'-deoxy-2'-fluoroguanosine-3'-phosphate
  modified_base 11: mod_base = OTHER; note = 2'-deoxy-2'-fluorouridine-3'-phosphate
  modified_base 12: mod_base = OTHER; note = 2'-O-methyluridine-3'-phosphate
  modified_base 13: mod_base = OTHER; note = 2'-O-methylcytidine-3'-phosphate
  modified_base 14: mod_base = OTHER; note = 2'-O-methyluridine-3'-phosphate
  modified_base 15: mod_base = OTHER; note = 2'-O-methyluridine-3'-phosphate
  modified_base 16: mod_base = OTHER; note = 2'-O-methyluridine-3'-phosphate
  modified_base 17: mod_base = OTHER; note = 2'-O-methyluridine-3'-phosphate
  modified_base 18: mod_base = OTHER; note = 2'-O-methylcytidine-3'-phosphate
  modified_base 19: mod_base = OTHER; note = 2'-O-methylcytidine-3'-phosphate
  modified_base 20: mod_base = OTHER; note = 2'-O-methylguanosine-3'-phosphate
  modified_base 21: mod_base = OTHER; note = 2'-O-methyladenosine
taaattctagttcttttccga

SEQ ID NO: 4406 - RNA, 21 nt, synthetic construct
  source 1..21: mol_type = other RNA
  modified_base 1: mod_base = OTHER; note = 2'-O-methyladenosine-3'-phosphate
  modified_base 2: mod_base = OTHER; note = 2'-O-methyladenosine-3'-phosphate
  modified_base 3: mod_base = OTHER; note = 2'-O-methyladenosine-3'-phosphate
  modified_base 4: mod_base = OTHER; note = 2'-O-methyluridine-3'-phosphate
  modified_base 5: mod_base = OTHER; note = 2'-O-methyluridine-3'-phosphate
  modified_base 6: mod_base = OTHER; note = 2'-O-methylcytidine-3'-phosphate
  modified_base 7: mod_base = OTHER; note = 2'-deoxy-2'-fluorouridine-3'-phosphate
  modified_base 8: mod_base = OTHER; note = 2'-O-methyladenosine-3'-phosphate
  modified_base 9: mod_base = OTHER; note = 2'-deoxy-2'-fluoroguanosine-3'-phosphate
  modified_base 10: mod_base = OTHER; note = 2'-deoxy-2'-fluorouridine-3'-phosphate
  modified_base 11: mod_base = OTHER; note = 2'-deoxy-2'-fluorouridine-3'-phosphate
  modified_base 12: mod_base = OTHER; note = 2'-O-methylcytidine-3'-phosphate
  modified_base 13: mod_base = OTHER; note = 2'-O-methyluridine-3'-phosphate
  modified_base 14: mod_base = OTHER; note = 2'-O-methyluridine-3'-phosphate
  modified_base 15: mod_base = OTHER; note = 2'-O-methyluridine-3'-phosphate
  modified_base 16: mod_base = OTHER; note = 2'-O-methyluridine-3'-phosphate
  modified_base 17: mod_base = OTHER; note = 2'-O-methylcytidine-3'-phosphate
  modified_base 18: mod_base = OTHER; note = 2'-O-methylcytidine-3'-phosphate
  modified_base 19: mod_base = OTHER; note = 2'-O-methylguanosine-3'-phosphate
  modified_base 20: mod_base = OTHER; note = 2'-O-methylcytidine-3'-phosphate
  modified_base 21: mod_base = OTHER; note = 2'-O-methyladenosine
aaattctagttcttttccgca

SEQ ID NO: 4407 - RNA, 21 nt, synthetic construct
  source 1..21: mol_type = other RNA
  modified_base 1: mod_base = OTHER; note = 2'-O-methyladenosine-3'-phosphate
  modified_base 2: mod_base = OTHER; note = 2'-O-methyladenosine-3'-phosphate
  modified_base 3: mod_base = OTHER; note = 2'-O-methyluridine-3'-phosphate
  modified_base 4: mod_base = OTHER; note = 2'-O-methyluridine-3'-phosphate
  modified_base 5: mod_base = OTHER; note = 2'-O-methylcytidine-3'-phosphate
  modified_base 6: mod_base = OTHER; note = 2'-O-methyluridine-3'-phosphate
  modified_base 7: mod_base = OTHER; note = 2'-deoxy-2'-fluoroadenosine-3'-phosphate
  modified_base 8: mod_base = OTHER; note = 2'-O-methylguanosine-3'-phosphate
  modified_base 9: mod_base = OTHER; note = 2'-deoxy-2'-fluorouridine-3'-phosphate
  modified_base 10: mod_base = OTHER; note = 2'-deoxy-2'-fluorouridine-3'-phosphate
  modified_base 11: mod_base = OTHER; note = 2'-deoxy-2'-fluorocytidine-3'-phosphate
  modified_base 12: mod_base = OTHER; note = 2'-O-methyluridine-3'-phosphate
  modified_base 13: mod_base = OTHER; note = 2'-O-methyluridine-3'-phosphate
  modified_base 14: mod_base = OTHER; note = 2'-O-methyluridine-3'-phosphate
  modified_base 15: mod_base = OTHER; note = 2'-O-methyluridine-3'-phosphate
  modified_base 16: mod_base = OTHER; note = 2'-O-methylcytidine-3'-phosphate
  modified_base 17: mod_base = OTHER; note = 2'-O-methylcytidine-3'-phosphate
  modified_base 18: mod_base = OTHER; note = 2'-O-methylguanosine-3'-phosphate
  modified_base 19: mod_base = OTHER; note = 2'-O-methylcytidine-3'-phosphate
  modified_base 20: mod_base = OTHER; note = 2'-O-methyladenosine-3'-phosphate
  modified_base 21: mod_base = OTHER; note = 2'-O-methyladenosine
aattctagttcttttccgcaa

SEQ ID NO: 4408 - RNA, 21 nt, synthetic construct
  source 1..21: mol_type = other RNA
  modified_base 1: mod_base = OTHER; note = 2'-O-methyladenosine-3'-phosphate
  modified_base 2: mod_base = OTHER; note = 2'-O-methyluridine-3'-phosphate
  modified_base 3: mod_base = OTHER; note = 2'-O-methyluridine-3'-phosphate
  modified_base 4: mod_base = OTHER; note = 2'-O-methylcytidine-3'-phosphate
  modified_base 5: mod_base = OTHER; note = 2'-O-methyluridine-3'-phosphate
  modified_base 6: mod_base = OTHER; note = 2'-O-methyladenosine-3'-phosphate
  modified_base 7: mod_base = OTHER; note = 2'-deoxy-2'-fluoroguanosine-3'-phosphate
  modified_base 8: mod_base = OTHER; note = 2'-O-methyluridine-3'-phosphate
  modified_base 9: mod_base = OTHER; note = 2'-deoxy-2'-fluorouridine-3'-phosphate
  modified_base 10: mod_base = OTHER; note = 2'-deoxy-2'-fluorocytidine-3'-phosphate
  modified_base 11: mod_base = OTHER; note = 2'-deoxy-2'-fluorouridine-3'-phosphate
  modified_base 12: mod_base = OTHER; note = 2'-O-methyluridine-3'-phosphate
  modified_base 13: mod_base = OTHER; note = 2'-O-methyluridine-3'-phosphate
  modified_base 14: mod_base = OTHER; note = 2'-O-methyluridine-3'-phosphate
  modified_base 15: mod_base = OTHER; note = 2'-O-methylcytidine-3'-phosphate
  modified_base 16: mod_base = OTHER; note = 2'-O-methylcytidine-3'-phosphate
  modified_base 17: mod_base = OTHER; note = 2'-O-methylguanosine-3'-phosphate
  modified_base 18: mod_base = OTHER; note = 2'-O-methylcytidine-3'-phosphate
  modified_base 19: mod_base = OTHER; note = 2'-O-methyladenosine-3'-phosphate
  modified_base 20: mod_base = OTHER; note = 2'-O-methyladenosine-3'-phosphate
  modified_base 21: mod_base = OTHER; note = 2'-O-methyladenosine
attctagttcttttccgcaaa

SEQ ID NO: 4409 - RNA, 21 nt, synthetic construct
  source 1..21: mol_type = other RNA
  modified_base 1: mod_base = OTHER; note = 2'-O-methyluridine-3'-phosphate
  modified_base 2: mod_base = OTHER; note = 2'-O-methyluridine-3'-phosphate
  modified_base 3: mod_base = OTHER; note = 2'-O-methylcytidine-3'-phosphate
  modified_base 4: mod_base = OTHER; note = 2'-O-methyluridine-3'-phosphate
  modified_base 5: mod_base = OTHER; note = 2'-O-methyladenosine-3'-phosphate
  modified_base 6: mod_base = OTHER; note = 2'-O-methylguanosine-3'-phosphate
  modified_base 7: mod_base = OTHER; note = 2'-deoxy-2'-fluorouridine-3'-phosphate
  modified_base 8: mod_base = OTHER; note = 2'-O-methyluridine-3'-phosphate
  modified_base 9: mod_base = OTHER; note = 2'-deoxy-2'-fluorocytidine-3'-phosphate
  modified_base 10: mod_base = OTHER; note = 2'-deoxy-2'-fluorouridine-3'-phosphate
  modified_base 11: mod_base = OTHER; note = 2'-deoxy-2'-fluorouridine-3'-phosphate
  modified_base 12: mod_base = OTHER; note = 2'-O-methyluridine-3'-phosphate
  modified_base 13: mod_base = OTHER; note = 2'-O-methyluridine-3'-phosphate
  modified_base 14: mod_base = OTHER; note = 2'-O-methylcytidine-3'-phosphate
  modified_base 15: mod_base = OTHER; note = 2'-O-methylcytidine-3'-phosphate
  modified_base 16: mod_base = OTHER; note = 2'-O-methylguanosine-3'-phosphate
  modified_base 17: mod_base = OTHER; note = 2'-O-methylcytidine-3'-phosphate
  modified_base 18: mod_base = OTHER; note = 2'-O-methyladenosine-3'-phosphate
  modified_base 19: mod_base = OTHER; note = 2'-O-methyladenosine-3'-phosphate
  modified_base 20: mod_base = OTHER; note = 2'-O-methyluridine-3'-phosphate
  modified_base 21: mod_base = OTHER; note = 2'-O-methyladenosine
ttctagttcttttccgcaata

SEQ ID NO: 4410 - RNA, 21 nt, synthetic construct
  source 1..21: mol_type = other RNA
  modified_base 1: mod_base = OTHER; note = 2'-O-methyluridine-3'-phosphate
  modified_base 2: mod_base = OTHER; note = 2'-O-methylcytidine-3'-phosphate
  modified_base 3: mod_base = OTHER; note = 2'-O-methyluridine-3'-phosphate
  modified_base 4: mod_base = OTHER; note = 2'-O-methyladenosine-3'-phosphate
  modified_base 5: mod_base = OTHER; note = 2'-O-methylguanosine-3'-phosphate
  modified_base 6: mod_base = OTHER; note = 2'-O-methyluridine-3'-phosphate
  modified_base 7: mod_base = OTHER; note = 2'-deoxy-2'-fluorouridine-3'-phosphate
  modified_base 8: mod_base = OTHER; note = 2'-O-methylcytidine-3'-phosphate
  modified_base 9: mod_base = OTHER; note = 2'-deoxy-2'-fluorouridine-3'-phosphate
  modified_base 10: mod_base = OTHER; note = 2'-deoxy-2'-fluorouridine-3'-phosphate
  modified_base 11: mod_base = OTHER; note = 2'-deoxy-2'-fluorouridine-3'-phosphate
  modified_base 12: mod_base = OTHER; note = 2'-O-methyluridine-3'-phosphate
  modified_base 13: mod_base = OTHER; note = 2'-O-methylcytidine-3'-phosphate
  modified_base 14: mod_base = OTHER; note = 2'-O-methylcytidine-3'-phosphate
  modified_base 15: mod_base = OTHER; note = 2'-O-methylguanosine-3'-phosphate
  modified_base 16: mod_base = OTHER; note = 2'-O-methylcytidine-3'-phosphate
  modified_base 17: mod_base = OTHER; note = 2'-O-methyladenosine-3'-phosphate
  modified_base 18: mod_base = OTHER; note = 2'-O-methyladenosine-3'-phosphate
  modified_base 19: mod_base = OTHER; note = 2'-O-methyluridine-3'-phosphate
  modified_base 20: mod_base = OTHER; note = 2'-O-methylguanosine-3'-phosphate
  modified_base 21: mod_base = OTHER; note = 2'-O-methyladenosine
tctagttcttttccgcaatga

SEQ ID NO: 4411 - RNA, 21 nt, synthetic construct
  source 1..21: mol_type = other RNA
  modified_base 1: mod_base = OTHER; note = 2'-O-methylcytidine-3'-phosphate
  modified_base 2: mod_base = OTHER; note = 2'-O-methyluridine-3'-phosphate
  modified_base 3: mod_base = OTHER; note = 2'-O-methyladenosine-3'-phosphate
  modified_base 4: mod_base = OTHER; note = 2'-O-methylguanosine-3'-phosphate
  modified_base 5: mod_base = OTHER; note = 2'-O-methyluridine-3'-phosphate
  modified_base 6: mod_base = OTHER; note = 2'-O-methyluridine-3'-phosphate
  modified_base 7: mod_base = OTHER; note = 2'-deoxy-2'-fluorocytidine-3'-phosphate
  modified_base 8: mod_base = OTHER; note = 2'-O-methyluridine-3'-phosphate
  modified_base 9: mod_base = OTHER; note = 2'-deoxy-2'-fluorouridine-3'-phosphate
  modified_base 10: mod_base = OTHER; note = 2'-deoxy-2'-fluorouridine-3'-phosphate
  modified_base 11: mod_base = OTHER; note = 2'-deoxy-2'-fluorouridine-3'-phosphate
  modified_base 12: mod_base = OTHER; note = 2'-O-methylcytidine-3'-phosphate
  modified_base 13: mod_base = OTHER; note = 2'-O-methylcytidine-3'-phosphate
  modified_base 14: mod_base = OTHER; note = 2'-O-methylguanosine-3'-phosphate
  modified_base 15: mod_base = OTHER; note = 2'-O-methylcytidine-3'-phosphate
  modified_base 16: mod_base = OTHER; note = 2'-O-methyladenosine-3'-phosphate
  modified_base 17: mod_base = OTHER; note = 2'-O-methyladenosine-3'-phosphate
  modified_base 18: mod_base = OTHER; note = 2'-O-methyluridine-3'-phosphate
  modified_base 19: mod_base = OTHER; note = 2'-O-methylguanosine-3'-phosphate
  modified_base 20: mod_base = OTHER; note = 2'-O-methyladenosine-3'-phosphate
  modified_base 21: mod_base = OTHER; note = 2'-O-methyladenosine
ctagttcttttccgcaatgaa

SEQ ID NO: 4412 - RNA, 21 nt, synthetic construct
  source 1..21: mol_type = other RNA
  modified_base 1: mod_base = OTHER; note = 2'-O-methyluridine-3'-phosphate
  modified_base 2: mod_base = OTHER; note = 2'-O-methyladenosine-3'-phosphate
  modified_base 3: mod_base = OTHER; note = 2'-O-methylguanosine-3'-phosphate
  modified_base 4: mod_base = OTHER; note = 2'-O-methyluridine-3'-phosphate
  modified_base 5: mod_base = OTHER; note = 2'-O-methyluridine-3'-phosphate
  modified_base 6: mod_base = OTHER; note = 2'-O-methylcytidine-3'-phosphate
  modified_base 7: mod_base = OTHER; note = 2'-deoxy-2'-fluorouridine-3'-phosphate
  modified_base 8: mod_base = OTHER; note = 2'-O-methyluridine-3'-phosphate
  modified_base 9: mod_base = OTHER; note = 2'-deoxy-2'-fluorouridine-3'-phosphate
  modified_base 10: mod_base = OTHER; note = 2'-deoxy-2'-fluorouridine-3'-phosphate
  modified_base 11: mod_base = OTHER; note = 2'-deoxy-2'-fluorocytidine-3'-phosphate
  modified_base 12: mod_base = OTHER; note = 2'-O-methylcytidine-3'-phosphate
  modified_base 13: mod_base = OTHER; note = 2'-O-methylguanosine-3'-phosphate
  modified_base 14: mod_base = OTHER; note = 2'-O-methylcytidine-3'-phosphate
  modified_base 15: mod_base = OTHER; note = 2'-O-methyladenosine-3'-phosphate
  modified_base 16: mod_base = OTHER; note = 2'-O-methyladenosine-3'-phosphate
  modified_base 17: mod_base = OTHER; note = 2'-O-methyluridine-3'-phosphate
  modified_base 18: mod_base = OTHER; note = 2'-O-methylguanosine-3'-phosphate
  modified_base 19: mod_base = OTHER; note = 2'-O-methyladenosine-3'-phosphate
  modified_base 20: mod_base = OTHER; note = 2'-O-methylcytidine-3'-phosphate
  modified_base 21: mod_base = OTHER; note = 2'-O-methyladenosine
tagttcttttccgcaatgaca

SEQ ID NO: 4413 - RNA, 21 nt, synthetic construct
  source 1..21: mol_type = other RNA
  modified_base 1: mod_base = OTHER; note = 2'-O-methyladenosine-3'-phosphate
  modified_base 2: mod_base = OTHER; note = 2'-O-methylguanosine-3'-phosphate
  modified_base 3: mod_base = OTHER; note = 2'-O-methyluridine-3'-phosphate
  modified_base 4: mod_base = OTHER; note = 2'-O-methyluridine-3'-phosphate
  modified_base 5: mod_base = OTHER; note = 2'-O-methylcytidine-3'-phosphate
  modified_base 6: mod_base = OTHER; note = 2'-O-methyluridine-3'-phosphate
  modified_base 7: mod_base = OTHER; note = 2'-deoxy-2'-fluorouridine-3'-phosphate
  modified_base 8: mod_base = OTHER; note = 2'-O-methyluridine-3'-phosphate
  modified_base 9: mod_base = OTHER; note = 2'-deoxy-2'-fluorouridine-3'-phosphate
  modified_base 10: mod_base = OTHER; note = 2'-deoxy-2'-fluorocytidine-3'-phosphate
  modified_base 11: mod_base = OTHER; note = 2'-deoxy-2'-fluorocytidine-3'-phosphate
  modified_base 12: mod_base = OTHER; note = 2'-O-methylguanosine-3'-phosphate
  modified_base 13: mod_base = OTHER; note = 2'-O-methylcytidine-3'-phosphate
  modified_base 14: mod_base = OTHER; note = 2'-O-methyladenosine-3'-phosphate
  modified_base 15: mod_base = OTHER; note = 2'-O-methyladenosine-3'-phosphate
  modified_base 16: mod_base = OTHER; note = 2'-O-methyluridine-3'-phosphate
  modified_base 17: mod_base = OTHER; note = 2'-O-methylguanosine-3'-phosphate
  modified_base 18: mod_base = OTHER; note = 2'-O-methyladenosine-3'-phosphate
  modified_base 19: mod_base = OTHER; note = 2'-O-methylcytidine-3'-phosphate
  modified_base 20: mod_base = OTHER; note = 2'-O-methyluridine-3'-phosphate
  modified_base 21: mod_base = OTHER; note = 2'-O-methyladenosine
agttcttttccgcaatgacta

SEQ ID NO: 4414 - RNA, 21 nt, synthetic construct
  source 1..21: mol_type = other RNA
  modified_base 1: mod_base = OTHER; note = 2'-O-methylguanosine-3'-phosphate
  modified_base 2: mod_base = OTHER; note = 2'-O-methyluridine-3'-phosphate
  modified_base 3: mod_base = OTHER; note = 2'-O-methyluridine-3'-phosphate
  modified_base 4: mod_base = OTHER; note = 2'-O-methylcytidine-3'-phosphate
  modified_base 5: mod_base = OTHER; note = 2'-O-methyluridine-3'-phosphate
  modified_base 6: mod_base = OTHER; note = 2'-O-methyluridine-3'-phosphate
  modified_base 7: mod_base = OTHER; note = 2'-deoxy-2'-fluorouridine-3'-phosphate
  modified_base 8: mod_base = OTHER; note = 2'-O-methyluridine-3'-phosphate
  modified_base 9: mod_base = OTHER; note = 2'-deoxy-2'-fluorocytidine-3'-phosphate
  modified_base 10: mod_base = OTHER; note = 2'-deoxy-2'-fluorocytidine-3'-phosphate
  modified_base 11: mod_base = OTHER; note = 2'-deoxy-2'-fluoroguanosine-3'-phosphate
  modified_base 12: mod_base = OTHER; note = 2'-O-methylcytidine-3'-phosphate
  modified_base 13: mod_base = OTHER; note = 2'-O-methyladenosine-3'-phosphate
  modified_base 14: mod_base = OTHER; note = 2'-O-methyladenosine-3'-phosphate
  modified_base 15: mod_base = OTHER; note = 2'-O-methyluridine-3'-phosphate
  modified_base 16: mod_base = OTHER; note = 2'-O-methylguanosine-3'-phosphate
  modified_base 17: mod_base = OTHER; note = 2'-O-methyladenosine-3'-phosphate
  modified_base 18: mod_base = OTHER; note = 2'-O-methylcytidine-3'-phosphate
  modified_base 19: mod_base = OTHER; note = 2'-O-methyluridine-3'-phosphate
  modified_base 20: mod_base = OTHER; note = 2'-O-methyladenosine-3'-phosphate
  modified_base 21: mod_base = OTHER; note = 2'-O-methyladenosine
gttcttttccgcaatgactaa

SEQ ID NO: 4415 - RNA, 21 nt, synthetic construct
  source 1..21: mol_type = other RNA
  modified_base 1: mod_base = OTHER; note = 2'-O-methyluridine-3'-phosphate
  modified_base 2: mod_base = OTHER; note = 2'-O-methyluridine-3'-phosphate
  modified_base 3: mod_base = OTHER; note = 2'-O-methylcytidine-3'-phosphate
  modified_base 4: mod_base = OTHER; note = 2'-O-methyluridine-3'-phosphate
  modified_base 5: mod_base = OTHER; note = 2'-O-methyluridine-3'-phosphate
  modified_base 6: mod_base = OTHER; note = 2'-O-methyluridine-3'-phosphate
  modified_base 7: mod_base = OTHER; note = 2'-deoxy-2'-fluorouridine-3'-phosphate
  modified_base 8: mod_base = OTHER; note = 2'-O-methylcytidine-3'-phosphate
  modified_base 9: mod_base = OTHER; note = 2'-deoxy-2'-fluorocytidine-3'-phosphate
  modified_base 10: mod_base = OTHER; note = 2'-deoxy-2'-fluoroguanosine-3'-phosphate
  modified_base 11: mod_base = OTHER; note = 2'-deoxy-2'-fluorocytidine-3'-phosphate
  modified_base 12: mod_base = OTHER; note = 2'-O-methyladenosine-3'-phosphate
  modified_base 13: mod_base = OTHER; note = 2'-O-methyladenosine-3'-phosphate
  modified_base 14: mod_base = OTHER; note = 2'-O-methyluridine-3'-phosphate
  modified_base 15: mod_base = OTHER; note = 2'-O-methylguanosine-3'-phosphate
  modified_base 16: mod_base = OTHER; note = 2'-O-methyladenosine-3'-phosphate
  modified_base 17: mod_base = OTHER; note = 2'-O-methylcytidine-3'-phosphate
  modified_base 18: mod_base = OTHER; note = 2'-O-methyluridine-3'-phosphate
  modified_base 19: mod_base = OTHER; note = 2'-O-methyladenosine-3'-phosphate
  modified_base 20: mod_base = OTHER; note = 2'-O-methylguanosine-3'-phosphate
  modified_base 21: mod_base = OTHER; note = 2'-O-methyladenosine
ttcttttccgcaatgactaga

SEQ ID NO: 4416 - RNA, 21 nt, synthetic construct
  source 1..21: mol_type = other RNA
  modified_base 1: mod_base = OTHER; note = 2'-O-methyluridine-3'-phosphate
  modified_base 2: mod_base = OTHER; note = 2'-O-methylcytidine-3'-phosphate
  modified_base 3: mod_base = OTHER; note = 2'-O-methyluridine-3'-phosphate
  modified_base 4: mod_base = OTHER; note = 2'-O-methyluridine-3'-phosphate
  modified_base 5: mod_base = OTHER; note = 2'-O-methyluridine-3'-phosphate
  modified_base 6: mod_base = OTHER; note = 2'-O-methyluridine-3'-phosphate
  modified_base 7: mod_base = OTHER; note = 2'-deoxy-2'-fluorocytidine-3'-phosphate
  modified_base 8: mod_base = OTHER; note = 2'-O-methylcytidine-3'-phosphate
  modified_base 9: mod_base = OTHER; note = 2'-deoxy-2'-fluoroguanosine-3'-phosphate
  modified_base 10: mod_base = OTHER; note = 2'-deoxy-2'-fluorocytidine-3'-phosphate
  modified_base 11: mod_base = OTHER; note = 2'-deoxy-2'-fluoroadenosine-3'-phosphate
  modified_base 12: mod_base = OTHER; note = 2'-O-methyladenosine-3'-phosphate
  modified_base 13: mod_base = OTHER; note = 2'-O-methyluridine-3'-phosphate
  modified_base 14: mod_base = OTHER; note = 2'-O-methylguanosine-3'-phosphate
  modified_base 15: mod_base = OTHER; note = 2'-O-methyladenosine-3'-phosphate
  modified_base 16: mod_base = OTHER; note = 2'-O-methylcytidine-3'-phosphate
  modified_base 17: mod_base = OTHER; note = 2'-O-methyluridine-3'-phosphate
  modified_base 18: mod_base = OTHER; note = 2'-O-methyladenosine-3'-phosphate
  modified_base 19: mod_base = OTHER; note = 2'-O-methylguanosine-3'-phosphate
  modified_base 20: mod_base = OTHER; note = 2'-O-methyluridine-3'-phosphate
  modified_base 21: mod_base = OTHER; note = 2'-O-methyladenosine
tcttttccgcaatgactagta

SEQ ID NO: 4417 - RNA, 21 nt, synthetic construct
  source 1..21: mol_type = other RNA
  modified_base 1: mod_base = OTHER; note = 2'-O-methylcytidine-3'-phosphate
  modified_base 2: mod_base = OTHER; note = 2'-O-methyluridine-3'-phosphate
  modified_base 3: mod_base = OTHER; note = 2'-O-methylguanosine-3'-phosphate
  modified_base 4: mod_base = OTHER; note = 2'-O-methylguanosine-3'-phosphate
  modified_base 5: mod_base = OTHER; note = 2'-O-methyladenosine-3'-phosphate
  modified_base 6: mod_base = OTHER; note = 2'-O-methylguanosine-3'-phosphate
  modified_base 7: mod_base = OTHER; note = 2'-deoxy-2'-fluoroadenosine-3'-phosphate
  modified_base 8: mod_base = OTHER; note = 2'-O-methyladenosine-3'-phosphate
  modified_base 9: mod_base = OTHER; note = 2'-deoxy-2'-fluoroguanosine-3'-phosphate
  modified_base 10: mod_base = OTHER; note = 2'-deoxy-2'-fluoroadenosine-3'-phosphate
  modified_base 11: mod_base = OTHER; note = 2'-deoxy-2'-fluorouridine-3'-phosphate
  modified_base 12: mod_base = OTHER; note = 2'-O-methyluridine-3'-phosphate
  modified_base 13: mod_base = OTHER; note = 2'-O-methyladenosine-3'-phosphate
  modified_base 14: mod_base = OTHER; note = 2'-O-methyluridine-3'-phosphate
  modified_base 15: mod_base = OTHER; note = 2'-O-methyluridine-3'-phosphate
  modified_base 16: mod_base = OTHER; note = 2'-O-methylcytidine-3'-phosphate
  modified_base 17: mod_base = OTHER; note = 2'-O-methyladenosine-3'-phosphate
  modified_base 18: mod_base = OTHER; note = 2'-O-methyladenosine-3'-phosphate
  modified_base 19: mod_base = OTHER; note = 2'-O-methyladenosine-3'-phosphate
  modified_base 20: mod_base = OTHER; note = 2'-O-methylcytidine-3'-phosphate
  modified_base 21: mod_base = OTHER; note = 2'-O-methyladenosine
ctggagaagattattcaaaca

SEQ ID NO: 4418 - RNA, 21 nt, synthetic construct
  source 1..21: mol_type = other RNA
  modified_base 1: mod_base = OTHER; note = 2'-O-methylguanosine-3'-phosphate
  modified_base 2: mod_base = OTHER; note = 2'-O-methylguanosine-3'-phosphate
  modified_base 3: mod_base = OTHER; note = 2'-O-methyladenosine-3'-phosphate
  modified_base 4: mod_base = OTHER; note = 2'-O-methylguanosine-3'-phosphate
  modified_base 5: mod_base = OTHER; note = 2'-O-methyladenosine-3'-phosphate
  modified_base 6: mod_base = OTHER; note = 2'-O-methyladenosine-3'-phosphate
  modified_base 7: mod_base = OTHER; note = 2'-deoxy-2'-fluoroguanosine-3'-phosphate
  modified_base 8: mod_base = OTHER; note = 2'-O-methyladenosine-3'-phosphate
  modified_base 9: mod_base = OTHER; note = 2'-deoxy-2'-fluorouridine-3'-phosphate
  modified_base 10: mod_base = OTHER; note = 2'-deoxy-2'-fluorouridine-3'-phosphate
  modified_base 11: mod_base = OTHER; note = 2'-deoxy-2'-fluoroadenosine-3'-phosphate
  modified_base 12: mod_base = OTHER; note = 2'-O-methyluridine-3'-phosphate
  modified_base 13: mod_base = OTHER; note = 2'-O-methyluridine-3'-phosphate
  modified_base 14: mod_base = OTHER; note = 2'-O-methylcytidine-3'-phosphate
  modified_base 15: mod_base = OTHER; note = 2'-O-methyladenosine-3'-phosphate
  modified_base 16: mod_base = OTHER; note = 2'-O-methyladenosine-3'-phosphate
  modified_base 17: mod_base = OTHER; note = 2'-O-methyladenosine-3'-phosphate
  modified_base 18: mod_base = OTHER; note = 2'-O-methylcytidine-3'-phosphate
  modified_base 19: mod_base = OTHER; note = 2'-O-methyluridine-3'-phosphate
  modified_base 20: mod_base = OTHER; note = 2'-O-methyluridine-3'-phosphate
  modified_base 21: mod_base = OTHER; note = 2'-O-methyladenosine
ggagaagattattcaaactta

SEQ ID NO: 4419 - RNA, 21 nt, synthetic construct
  source 1..21: mol_type = other RNA
  modified_base 1: mod_base = OTHER; note = 2'-O-methylcytidine-3'-phosphate
  modified_base 2: mod_base = OTHER; note = 2'-O-methyluridine-3'-phosphate
  modified_base 3: mod_base = OTHER; note = 2'-O-methyluridine-3'-phosphate
  modified_base 4: mod_base = OTHER; note = 2'-O-methylguanosine-3'-phosphate
  modified_base 5: mod_base = OTHER; note = 2'-O-methyladenosine-3'-phosphate
  modified_base 6: mod_base = OTHER; note = 2'-O-methyluridine-3'-phosphate
  modified_base 7: mod_base = OTHER; note = 2'-deoxy-2'-fluorocytidine-3'-phosphate
  modified_base 8: mod_base = OTHER; note = 2'-O-methyluridine-3'-phosphate
  modified_base 9: mod_base = OTHER; note = 2'-deoxy-2'-fluoroguanosine-3'-phosphate
  modified_base 10: mod_base = OTHER; note = 2'-deoxy-2'-fluorouridine-3'-phosphate
  modified_base 11: mod_base = OTHER; note = 2'-deoxy-2'-fluoroguanosine-3'-phosphate
  modified_base 12: mod_base = OTHER; note = 2'-O-methyluridine-3'-phosphate
  modified_base 13: mod_base = OTHER; note = 2'-O-methyluridine-3'-phosphate
  modified_base 14: mod_base = OTHER; note = 2'-O-methyluridine-3'-phosphate
  modified_base 15: mod_base = OTHER; note = 2'-O-methylcytidine-3'-phosphate
  modified_base 16: mod_base = OTHER; note = 2'-O-methyladenosine-3'-phosphate
  modified_base 17: mod_base = OTHER; note = 2'-O-methylguanosine-3'-phosphate
  modified_base 18: mod_base = OTHER; note = 2'-O-methylguanosine-3'-phosphate
  modified_base 19: mod_base = OTHER; note = 2'-O-methyluridine-3'-phosphate
  modified_base 20: mod_base = OTHER; note = 2'-O-methyluridine-3'-phosphate
  modified_base 21: mod_base = OTHER; note = 2'-O-methyladenosine
cttgatctgtgtttcaggtta

SEQ ID NO: 4420 - RNA, 21 nt, synthetic construct
  source 1..21: mol_type = other RNA
  modified_base 1: mod_base = OTHER; note = 2'-O-methyluridine-3'-phosphate
  modified_base 2: mod_base = OTHER; note = 2'-O-methylcytidine-3'-phosphate
  modified_base 3: mod_base = OTHER; note = 2'-O-methyluridine-3'-phosphate
  modified_base 4: mod_base = OTHER; note = 2'-O-methylguanosine-3'-phosphate
  modified_base 5: mod_base = OTHER; note = 2'-O-methyluridine-3'-phosphate
  modified_base 6: mod_base = OTHER; note = 2'-O-methylguanosine-3'-phosphate
  modified_base 7: mod_base = OTHER; note = 2'-deoxy-2'-fluorouridine-3'-phosphate
  modified_base 8: mod_base = OTHER; note = 2'-O-methyluridine-3'-phosphate
  modified_base 9: mod_base = OTHER; note = 2'-deoxy-2'-fluorouridine-3'-phosphate
  modified_base 10: mod_base = OTHER; note = 2'-deoxy-2'-fluorocytidine-3'-phosphate
  modified_base 11: mod_base = OTHER; note = 2'-deoxy-2'-fluoroadenosine-3'-phosphate
  modified_base 12: mod_base = OTHER; note = 2'-O-methylguanosine-3'-phosphate
  modified_base 13: mod_base = OTHER; note = 2'-O-methylguanosine-3'-phosphate
  modified_base 14: mod_base = OTHER; note = 2'-O-methyluridine-3'-phosphate
  modified_base 15: mod_base = OTHER; note = 2'-O-methyluridine-3'-phosphate
  modified_base 16: mod_base = OTHER; note = 2'-O-methyluridine-3'-phosphate
  modified_base 17: mod_base = OTHER; note = 2'-O-methyluridine-3'-phosphate
  modified_base 18: mod_base = OTHER; note = 2'-O-methyluridine-3'-phosphate
  modified_base 19: mod_base = OTHER; note = 2'-O-methyladenosine-3'-phosphate
  modified_base 20: mod_base = OTHER; note = 2'-O-methyladenosine-3'-phosphate
  modified_base 21: mod_base = OTHER; note = 2'-O-methyladenosine
tctgtgtttcaggtttttaaa

SEQ ID NO: 4421 - RNA, 21 nt, synthetic construct
  source 1..21: mol_type = other RNA
  modified_base 1: mod_base = OTHER; note = 2'-O-methylcytidine-3'-phosphate
  modified_base 2: mod_base = OTHER; note = 2'-O-methyladenosine-3'-phosphate
  modified_base 3: mod_base = OTHER; note = 2'-O-methylguanosine-3'-phosphate
  modified_base 4: mod_base = OTHER; note = 2'-O-methylguanosine-3'-phosphate
  modified_base 5: mod_base = OTHER; note = 2'-O-methyluridine-3'-phosphate
  modified_base 6: mod_base = OTHER; note = 2'-O-methyluridine-3'-phosphate
  modified_base 7: mod_base = OTHER; note = 2'-deoxy-2'-fluorouridine-3'-phosphate
  modified_base 8: mod_base = OTHER; note = 2'-O-methyluridine-3'-phosphate
  modified_base 9: mod_base = OTHER; note = 2'-deoxy-2'-fluorouridine-3'-phosphate
  modified_base 10: mod_base = OTHER; note = 2'-deoxy-2'-fluoroadenosine-3'-phosphate
  modified_base 11: mod_base = OTHER; note = 2'-deoxy-2'-fluoroadenosine-3'-phosphate
  modified_base 12: mod_base = OTHER; note = 2'-O-methyladenosine-3'-phosphate
  modified_base 13: mod_base = OTHER; note = 2'-O-methyluridine-3'-phosphate
  modified_base 14: mod_base = OTHER; note = 2'-O-methylguanosine-3'-phosphate
  modified_base 15: mod_base = OTHER; note = 2'-O-methyluridine-3'-phosphate
  modified_base 16: mod_base = OTHER; note = 2'-O-methylcytidine-3'-phosphate
  modified_base 17: mod_base = OTHER; note = 2'-O-methylcytidine-3'-phosphate
  modified_base 18: mod_base = OTHER; note = 2'-O-methyluridine-3'-phosphate
  modified_base 19: mod_base = OTHER; note = 2'-O-methyladenosine-3'-phosphate
  modified_base 20: mod_base = OTHER; note = 2'-O-methyladenosine-3'-phosphate
  modified_base 21: mod_base = OTHER; note = 2'-O-methyladenosine
caggtttttaaatgtcctaaa

SEQ ID NO: 4422 - RNA, 21 nt, synthetic construct
  source 1..21: mol_type = other RNA
  modified_base 1: mod_base = OTHER; note = 2'-O-methyladenosine-3'-phosphate
  modified_base 2: mod_base = OTHER; note = 2'-O-methyladenosine-3'-phosphate
  modified_base 3: mod_base = OTHER; note = 2'-O-methylguanosine-3'-phosphate
  modified_base 4: mod_base = OTHER; note = 2'-O-methylguanosine-3'-phosphate
  modified_base 5: mod_base = OTHER; note = 2'-O-methyladenosine-3'-phosphate
  modified_base 6: mod_base = OTHER; note = 2'-O-methyladenosine-3'-phosphate
  modified_base 7: mod_base = OTHER; note = 2'-deoxy-2'-fluorouridine-3'-phosphate
  modified_base 8: mod_base = OTHER; note = 2'-O-methyluridine-3'-phosphate
  modified_base 9: mod_base = OTHER; note = 2'-deoxy-2'-fluorouridine-3'-phosphate
  modified_base 10: mod_base = OTHER; note = 2'-deoxy-2'-fluorouridine-3'-phosphate
  modified_base 11: mod_base = OTHER; note = 2'-deoxy-2'-fluoroguanosine-3'-phosphate
  modified_base 12: mod_base = OTHER; note = 2'-O-methylguanosine-3'-phosphate
  modified_base 13: mod_base = OTHER; note = 2'-O-methyladenosine-3'-phosphate
  modified_base 14: mod_base = OTHER; note = 2'-O-methyluridine-3'-phosphate
  modified_base 15: mod_base = OTHER; note = 2'-O-methyluridine-3'-phosphate
  modified_base 16: mod_base = OTHER; note = 2'-O-methylguanosine-3'-phosphate
  modified_base 17: mod_base = OTHER; note = 2'-O-methyladenosine-3'-phosphate
  modified_base 18: mod_base = OTHER; note = 2'-O-methylcytidine-3'-phosphate
  modified_base 19: mod_base = OTHER; note = 2'-O-methyluridine-3'-phosphate
  modified_base 20: mod_base = OTHER; note = 2'-O-methyluridine-3'-phosphate
  modified_base 21: mod_base = OTHER; note = 2'-O-methyladenosine
aaggaattttggattgactta

SEQ ID NO: 4423 - RNA, 21 nt, synthetic construct
  source 1..21: mol_type = other RNA
  modified_base 1: mod_base = OTHER; note = 2'-O-methyluridine-3'-phosphate
  modified_base 2: mod_base = OTHER; note = 2'-O-methyluridine-3'-phosphate
  modified_base 3: mod_base = OTHER; note = 2'-O-methylguanosine-3'-phosphate
  modified_base 4: mod_base = OTHER; note = 2'-O-methyladenosine-3'-phosphate
  modified_base 5: mod_base = OTHER; note = 2'-O-methylcytidine-3'-phosphate
  modified_base 6: mod_base = OTHER; note = 2'-O-methyluridine-3'-phosphate
  modified_base 7: mod_base = OTHER; note = 2'-deoxy-2'-fluorouridine-3'-phosphate
  modified_base 8: mod_base = OTHER; note = 2'-O-methyluridine-3'-phosphate
  modified_base 9: mod_base = OTHER; note = 2'-deoxy-2'-fluorocytidine-3'-phosphate
  modified_base 10: mod_base = OTHER; note = 2'-deoxy-2'-fluoroadenosine-3'-phosphate
  modified_base 11: mod_base = OTHER; note = 2'-deoxy-2'-fluoroadenosine-3'-phosphate
  modified_base 12: mod_base = OTHER; note = 2'-O-methyladenosine-3'-phosphate
  modified_base 13: mod_base = OTHER; note = 2'-O-methylguanosine-3'-phosphate
  modified_base 14: mod_base = OTHER; note = 2'-O-methyluridine-3'-phosphate
  modified_base 15: mod_base = OTHER; note = 2'-O-methyladenosine-3'-phosphate
  modified_base 16: mod_base = OTHER; note = 2'-O-methylcytidine-3'-phosphate
  modified_base 17: mod_base = OTHER; note = 2'-O-methyluridine-3'-phosphate
  modified_base 18: mod_base = OTHER; note = 2'-O-methyladenosine-3'-phosphate
  modified_base 19: mod_base = OTHER; note = 2'-O-methyladenosine-3'-phosphate
  modified_base 20: mod_base = OTHER; note = 2'-O-methyluridine-3'-phosphate
  modified_base 21: mod_base = OTHER; note = 2'-O-methyladenosine
ttgactttcaaagtactaata

SEQ ID NO: 4424 - RNA, 21 nt, synthetic construct
  source 1..21: mol_type = other RNA
  modified_base 1: mod_base = OTHER; note = 2'-O-methylguanosine-3'-phosphate
  modified_base 2: mod_base = OTHER; note = 2'-O-methyladenosine-3'-phosphate
  modified_base 3: mod_base = OTHER; note = 2'-O-methylcytidine-3'-phosphate
  modified_base 4: mod_base = OTHER; note = 2'-O-methyluridine-3'-phosphate
  modified_base 5: mod_base = OTHER; note = 2'-O-methyluridine-3'-phosphate
  modified_base 6: mod_base = OTHER; note = 2'-O-methyluridine-3'-phosphate
  modified_base 7: mod_base = OTHER; note = 2'-deoxy-2'-fluorocytidine-3'-phosphate
  modified_base 8: mod_base = OTHER; note = 2'-O-methyladenosine-3'-phosphate
  modified_base 9: mod_base = OTHER; note = 2'-deoxy-2'-fluoroadenosine-3'-phosphate
  modified_base 10: mod_base = OTHER; note = 2'-deoxy-2'-fluoroadenosine-3'-phosphate
  modified_base 11: mod_base = OTHER; note = 2'-deoxy-2'-fluoroguanosine-3'-phosphate
  modified_base 12: mod_base = OTHER; note = 2'-O-methyluridine-3'-phosphate
  modified_base 13: mod_base = OTHER; note = 2'-O-methyladenosine-3'-phosphate
  modified_base 14: mod_base = OTHER; note = 2'-O-methylcytidine-3'-phosphate
  modified_base 15: mod_base = OTHER; note = 2'-O-methyluridine-3'-phosphate
  modified_base 16: mod_base = OTHER; note = 2'-O-methyladenosine-3'-phosphate
  modified_base 17: mod_base = OTHER; note = 2'-O-methyladenosine-3'-phosphate
  modified_base 18: mod_base = OTHER; note = 2'-O-methyluridine-3'-phosphate
  modified_base 19: mod_base = OTHER; note = 2'-O-methyladenosine-3'-phosphate
  modified_base 20: mod_base = OTHER; note = 2'-O-methylcytidine-3'-phosphate
  modified_base 21: mod_base = OTHER; note = 2'-O-methyladenosine
gactttcaaagtactaataca

SEQ ID NO: 4425 - RNA, 21 nt, synthetic construct
  source 1..21: mol_type = other RNA
  modified_base 1: mod_base = OTHER; note = 2'-O-methyluridine-3'-phosphate
  modified_base 2: mod_base = OTHER; note = 2'-O-methyladenosine-3'-phosphate
  modified_base 3: mod_base = OTHER; note = 2'-O-methylguanosine-3'-phosphate
  modified_base 4: mod_base = OTHER; note = 2'-O-methylcytidine-3'-phosphate
  modified_base 5: mod_base = OTHER; note = 2'-O-methylguanosine-3'-phosphate
  modified_base 6: mod_base = OTHER; note = 2'-O-methyluridine-3'-phosphate
  modified_base 7: mod_base = OTHER; note = 2'-deoxy-2'-fluoroguanosine-3'-phosphate
  modified_base 8: mod_base = OTHER; note = 2'-O-methyladenosine-3'-phosphate
  modified_base 9: mod_base = OTHER; note = 2'-deoxy-2'-fluorocytidine-3'-phosphate
  modified_base 10: mod_base = OTHER; note = 2'-deoxy-2'-fluorouridine-3'-phosphate
  modified_base 11: mod_base = OTHER; note = 2'-deoxy-2'-fluorocytidine-3'-phosphate
  modified_base 12: mod_base = OTHER; note = 2'-O-methyluridine-3'-phosphate
  modified_base 13: mod_base = OTHER; note = 2'-O-methyluridine-3'-phosphate
  modified_base 14: mod_base = OTHER; note = 2'-O-methylcytidine-3'-phosphate
  modified_base 15: mod_base = OTHER; note = 2'-O-methyluridine-3'-phosphate
  modified_base 16: mod_base = OTHER; note = 2'-O-methyluridine-3'-phosphate
  modified_base 17: mod_base = OTHER; note = 2'-O-methyladenosine-3'-phosphate
  modified_base 18: mod_base = OTHER; note = 2'-O-methyluridine-3'-phosphate
  modified_base 19: mod_base = OTHER; note = 2'-O-methyladenosine-3'-phosphate
  modified_base 20: mod_base = OTHER; note = 2'-O-methylcytidine-3'-phosphate
  modified_base 21: mod_base = OTHER; note = 2'-O-methyladenosine
tagcgtgactcttcttataca

SEQ ID NO: 4426 - RNA, 21 nt, synthetic construct
  source 1..21: mol_type = other RNA
  modified_base 1: mod_base = OTHER; note = 2'-O-methylguanosine-3'-phosphate
  modified_base 2: mod_base = OTHER; note = 2'-O-methyluridine-3'-phosphate
  modified_base 3: mod_base = OTHER; note = 2'-O-methylguanosine-3'-phosphate
  modified_base 4: mod_base = OTHER; note = 2'-O-methyladenosine-3'-phosphate
  modified_base 5: mod_base = OTHER; note = 2'-O-methylcytidine-3'-phosphate
  modified_base 6: mod_base = OTHER; note = 2'-O-methyluridine-3'-phosphate
  modified_base 7: mod_base = OTHER; note = 2'-deoxy-2'-fluorocytidine-3'-phosphate
  modified_base 8: mod_base = OTHER; note = 2'-O-methyluridine-3'-phosphate
  modified_base 9: mod_base = OTHER; note = 2'-deoxy-2'-fluorouridine-3'-phosphate
  modified_base 10: mod_base = OTHER; note = 2'-deoxy-2'-fluorocytidine-3'-phosphate
  modified_base 11: mod_base = OTHER; note = 2'-deoxy-2'-fluorouridine-3'-phosphate
  modified_base 12: mod_base = OTHER; note = 2'-O-methyluridine-3'-phosphate
  modified_base 13: mod_base = OTHER; note = 2'-O-methyladenosine-3'-phosphate
  modified_base 14: mod_base = OTHER; note = 2'-O-methyluridine-3'-phosphate
  modified_base 15: mod_base = OTHER; note = 2'-O-methyladenosine-3'-phosphate
  modified_base 16: mod_base = OTHER; note = 2'-O-methylcytidine-3'-phosphate
  modified_base 17: mod_base = OTHER; note = 2'-O-methylcytidine-3'-phosphate
  modified_base 18: mod_base = OTHER; note = 2'-O-methyluridine-3'-phosphate
  modified_base 19: mod_base = OTHER; note = 2'-O-methyladenosine-3'-phosphate
  modified_base 20: mod_base = OTHER; note = 2'-O-methyladenosine-3'-phosphate
  modified_base 21: mod_base = OTHER; note = 2'-O-methyladenosine
gtgactcttcttatacctaaa

SEQ ID NO: 4427 - RNA, 21 nt, synthetic construct
  source 1..21: mol_type = other RNA
  modified_base 1: mod_base = OTHER; note = 2'-O-methyluridine-3'-phosphate
  modified_base 2: mod_base = OTHER; note = 2'-O-methyladenosine-3'-phosphate
  modified_base 3: mod_base = OTHER; note = 2'-O-methyladenosine-3'-phosphate
  modified_base 4: mod_base = OTHER; note = 2'-O-methylguanosine-3'-phosphate
  modified_base 5: mod_base = OTHER; note = 2'-O-methyladenosine-3'-phosphate
  modified_base 6: mod_base = OTHER; note = 2'-O-methyladenosine-3'-phosphate
  modified_base 7: mod_base = OTHER; note = 2'-deoxy-2'-fluorocytidine-3'-phosphate
  modified_base 8: mod_base = OTHER; note = 2'-O-methyladenosine-3'-phosphate
  modified_base 9: mod_base = OTHER; note = 2'-deoxy-2'-fluorouridine-3'-phosphate
  modified_base 10: mod_base = OTHER; note = 2'-deoxy-2'-fluoroadenosine-3'-phosphate
  modified_base 11: mod_base = OTHER; note = 2'-deoxy-2'-fluorouridine-3'-phosphate
  modified_base 12: mod_base = OTHER; note = 2'-O-methyluridine-3'-phosphate
  modified_base 13: mod_base = OTHER; note = 2'-O-methyladenosine-3'-phosphate
  modified_base 14: mod_base = OTHER; note = 2'-O-methylcytidine-3'-phosphate
  modified_base 15: mod_base = OTHER; note = 2'-O-methyladenosine-3'-phosphate
  modified_base 16: mod_base = OTHER; note = 2'-O-methyladenosine-3'-phosphate
  modified_base 17: mod_base = OTHER; note = 2'-O-methyladenosine-3'-phosphate
  modified_base 18: mod_base = OTHER; note = 2'-O-methyluridine-3'-phosphate
  modified_base 19: mod_base = OTHER; note = 2'-O-methylguanosine-3'-phosphate
  modified_base 20: mod_base = OTHER; note = 2'-O-methyluridine-3'-phosphate
  modified_base 21: mod_base = OTHER; note = 2'-O-methyladenosine
taagaacatattacaaatgta

SEQ ID NO: 4428 - RNA, 21 nt, synthetic construct
  source 1..21: mol_type = other RNA
  modified_base 1: mod_base = OTHER; note = 2'-O-methylcytidine-3'-phosphate
  modified_base 2: mod_base = OTHER; note = 2'-O-methyladenosine-3'-phosphate
  modified_base 3: mod_base = OTHER; note = 2'-O-methyladenosine-3'-phosphate
  modified_base 4: mod_base = OTHER; note = 2'-O-methyladenosine-3'-phosphate
  modified_base 5: mod_base = OTHER; note = 2'-O-methyladenosine-3'-phosphate
  modified_base 6: mod_base = OTHER; note = 2'-O-methylcytidine-3'-phosphate
  modified_base 7: mod_base = OTHER; note = 2'-deoxy-2'-fluoroadenosine-3'-phosphate
  modified_base 8: mod_base = OTHER; note = 2'-O-methyluridine-3'-phosphate
  modified_base 9: mod_base = OTHER; note = 2'-deoxy-2'-fluoroguanosine-3'-phosphate
  modified_base 10: mod_base = OTHER; note = 2'-deoxy-2'-fluorocytidine-3'-phosphate
  modified_base 11: mod_base = OTHER; note = 2'-deoxy-2'-fluorocytidine-3'-phosphate
  modified_base 12: mod_base = OTHER; note = 2'-O-methyluridine-3'-phosphate
  modified_base 13: mod_base = OTHER; note = 2'-O-methyluridine-3'-phosphate
  modified_base 14: mod_base = OTHER; note = 2'-O-methylguanosine-3'-phosphate
  modified_base 15: mod_base = OTHER; note = 2'-O-methyladenosine-3'-phosphate
  modified_base 16: mod_base = OTHER; note = 2'-O-methyladenosine-3'-phosphate
  modified_base 17: mod_base = OTHER; note = 2'-O-methylcytidine-3'-phosphate
  modified_base 18: mod_base = OTHER; note = 2'-O-methyluridine-3'-phosphate
  modified_base 19: mod_base = OTHER; note = 2'-O-methylcytidine-3'-phosphate
  modified_base 20: mod_base = OTHER; note = 2'-O-methyluridine-3'-phosphate
  modified_base 21: mod_base = OTHER; note = 2'-O-methyladenosine
caaaacatgccttgaactcta

SEQ ID NO: 4429 - RNA, 21 nt, synthetic construct
  source 1..21: mol_type = other RNA
  modified_base 1: mod_base = OTHER; note = 2'-O-methyladenosine-3'-phosphate
  modified_base 2: mod_base = OTHER; note = 2'-O-methyladenosine-3'-phosphate
  modified_base 3: mod_base = OTHER; note = 2'-O-methyladenosine-3'-phosphate
  modified_base 4: mod_base = OTHER; note = 2'-O-methyladenosine-3'-phosphate
  modified_base 5: mod_base = OTHER; note = 2'-O-methylcytidine-3'-phosphate
  modified_base 6: mod_base = OTHER; note = 2'-O-methyladenosine-3'-phosphate
  modified_base 7: mod_base = OTHER; note = 2'-deoxy-2'-fluorouridine-3'-phosphate
  modified_base 8: mod_base = OTHER; note = 2'-O-methylguanosine-3'-phosphate
  modified_base 9: mod_base = OTHER; note = 2'-deoxy-2'-fluorocytidine-3'-phosphate
  modified_base 10: mod_base = OTHER; note = 2'-deoxy-2'-fluorocytidine-3'-phosphate
  modified_base 11: mod_base = OTHER; note = 2'-deoxy-2'-fluorouridine-3'-phosphate
  modified_base 12: mod_base = OTHER; note = 2'-O-methyluridine-3'-phosphate
  modified_base 13: mod_base = OTHER; note = 2'-O-methylguanosine-3'-phosphate
  modified_base 14: mod_base = OTHER; note = 2'-O-methyladenosine-3'-phosphate
  modified_base 15: mod_base = OTHER; note = 2'-O-methyladenosine-3'-phosphate
  modified_base 16: mod_base = OTHER; note = 2'-O-methylcytidine-3'-phosphate
  modified_base 17: mod_base = OTHER; note = 2'-O-methyluridine-3'-phosphate
  modified_base 18: mod_base = OTHER; note = 2'-O-methylcytidine-3'-phosphate
  modified_base 19: mod_base = OTHER; note = 2'-O-methyluridine-3'-phosphate
  modified_base 20: mod_base = OTHER; note = 2'-O-methyluridine-3'-phosphate
  modified_base 21: mod_base = OTHER; note = 2'-O-methyladenosine
aaaacatgccttgaactctta

SEQ ID NO: 4430 - RNA, 21 nt, synthetic construct
  source 1..21: mol_type = other RNA
  modified_base 1: mod_base = OTHER; note = 2'-O-methyluridine-3'-phosphate
  modified_base 2: mod_base = OTHER; note = 2'-O-methylguanosine-3'-phosphate
  modified_base 3: mod_base = OTHER; note = 2'-O-methylcytidine-3'-phosphate
  modified_base 4: mod_base = OTHER; note = 2'-O-methylcytidine-3'-phosphate
  modified_base 5: mod_base = OTHER; note = 2'-O-methyluridine-3'-phosphate
  modified_base 6: mod_base = OTHER; note = 2'-O-methyluridine-3'-phosphate
  modified_base 7: mod_base = OTHER; note = 2'-deoxy-2'-fluoroguanosine-3'-phosphate
  modified_base 8: mod_base = OTHER; note = 2'-O-methyladenosine-3'-phosphate
  modified_base 9: mod_base = OTHER; note = 2'-deoxy-2'-fluoroadenosine-3'-phosphate
  modified_base 10: mod_base = OTHER; note = 2'-deoxy-2'-fluorocytidine-3'-phosphate
  modified_base 11: mod_base = OTHER; note = 2'-deoxy-2'-fluorouridine-3'-phosphate
  modified_base 12: mod_base = OTHER; note = 2'-O-methylcytidine-3'-phosphate
  modified_base 13: mod_base = OTHER; note = 2'-O-methyluridine-3'-phosphate
  modified_base 14: mod_base = OTHER; note = 2'-O-methyluridine-3'-phosphate
  modified_base 15: mod_base = OTHER; note = 2'-O-methylguanosine-3'-phosphate
  modified_base 16: mod_base = OTHER; note = 2'-O-methyladenosine-3'-phosphate
  modified_base 17: mod_base = OTHER; note = 2'-O-methyladenosine-3'-phosphate
  modified_base 18: mod_base = OTHER; note = 2'-O-methylcytidine-3'-phosphate
  modified_base 19: mod_base = OTHER; note = 2'-O-methyluridine-3'-phosphate
  modified_base 20: mod_base = OTHER; note = 2'-O-methyladenosine-3'-phosphate
  modified_base 21: mod_base = OTHER; note = 2'-O-methyladenosine
tgccttgaactcttgaactaa

SEQ ID NO: 4431 - RNA, 21 nt, synthetic construct
  source 1..21: mol_type = other RNA
  modified_base 1: mod_base = OTHER; note = 2'-O-methylcytidine-3'-phosphate
  modified_base 2: mod_base = OTHER; note = 2'-O-methyluridine-3'-phosphate
  modified_base 3: mod_base = OTHER; note = 2'-O-methylcytidine-3'-phosphate
  modified_base 4: mod_base = OTHER; note = 2'-O-methyluridine-3'-phosphate
  modified_base 5: mod_base = OTHER; note = 2'-O-methyluridine-3'-phosphate
  modified_base 6: mod_base = OTHER; note = 2'-O-methylguanosine-3'-phosphate
  modified_base 7: mod_base = OTHER; note = 2'-deoxy-2'-fluoroadenosine-3'-phosphate
  modified_base 8: mod_base = OTHER; note = 2'-O-methyladenosine-3'-phosphate
  modified_base 9: mod_base = OTHER; note = 2'-deoxy-2'-fluorocytidine-3'-phosphate
  modified_base 10: mod_base = OTHER; note = 2'-deoxy-2'-fluorouridine-3'-phosphate
  modified_base 11: mod_base = OTHER; note = 2'-deoxy-2'-fluoroadenosine-3'-phosphate
  modified_base 12: mod_base = OTHER; note = 2'-O-methylcytidine-3'-phosphate
  modified_base 13: mod_base = OTHER; note = 2'-O-methyluridine-3'-phosphate
  modified_base 14: mod_base = OTHER; note = 2'-O-methylguanosine-3'-phosphate
  modified_base 15: mod_base = OTHER; note = 2'-O-methyluridine-3'-phosphate
  modified_base 16: mod_base = OTHER; note = 2'-O-methylguanosine-3'-phosphate
  modified_base 17: mod_base = OTHER; note = 2'-O-methyladenosine-3'-phosphate
  modified_base 18: mod_base = OTHER; note = 2'-O-methyladenosine-3'-phosphate
  modified_base 19: mod_base = OTHER; note = 2'-O-methyladenosine-3'-phosphate
  modified_base 20: mod_base = OTHER; note = 2'-O-methyladenosine-3'-phosphate
  modified_base 21: mod_base = OTHER; note = 2'-O-methyladenosine
ctcttgaactactgtgaaaaa

SEQ ID NO: 4432 - RNA, 21 nt, synthetic construct
  source 1..21: mol_type = other RNA
  modified_base 1: mod_base = OTHER; note = 2'-O-methyluridine-3'-phosphate
  modified_base 2: mod_base = OTHER; note = 2'-O-methyluridine-3'-phosphate
  modified_base 3: mod_base = OTHER; note = 2'-O-methylguanosine-3'-phosphate
  modified_base 4: mod_base = OTHER; note = 2'-O-methyladenosine-3'-phosphate
  modified_base 5: mod_base = OTHER; note = 2'-O-methyladenosine-3'-phosphate
  modified_base 6: mod_base = OTHER; note = 2'-O-methylcytidine-3'-phosphate
  modified_base 7: mod_base = OTHER; note = 2'-deoxy-2'-fluorouridine-3'-phosphate
  modified_base 8: mod_base = OTHER; note = 2'-O-methyladenosine-3'-phosphate
  modified_base 9: mod_base = OTHER; note = 2'-deoxy-2'-fluorocytidine-3'-phosphate
  modified_base 10: mod_base = OTHER; note = 2'-deoxy-2'-fluorouridine-3'-phosphate
  modified_base 11: mod_base = OTHER; note = 2'-deoxy-2'-fluoroguanosine-3'-phosphate
  modified_base 12: mod_base = OTHER; note = 2'-O-methyluridine-3'-phosphate
  modified_base 13: mod_base = OTHER; note = 2'-O-methylguanosine-3'-phosphate
  modified_base 14: mod_base = OTHER; note = 2'-O-methyladenosine-3'-phosphate
  modified_base 15: mod_base = OTHER; note = 2'-O-methyladenosine-3'-phosphate
  modified_base 16: mod_base = OTHER; note = 2'-O-methyladenosine-3'-phosphate
  modified_base 17: mod_base = OTHER; note = 2'-O-methyladenosine-3'-phosphate
  modified_base 18: mod_base = OTHER; note = 2'-O-methylguanosine-3'-phosphate
  modified_base 19: mod_base = OTHER; note = 2'-O-methyladenosine-3'-phosphate
  modified_base 20: mod_base = OTHER; note = 2'-O-methyladenosine-3'-phosphate
  modified_base 21: mod_base = OTHER; note = 2'-O-methyladenosine
ttgaactactgtgaaaagaaa

SEQ ID NO: 4433 - RNA, 21 nt, synthetic construct
  source 1..21: mol_type = other RNA
  modified_base 1: mod_base = OTHER; note = 2'-O-methylguanosine-3'-phosphate
  modified_base 2: mod_base = OTHER; note = 2'-O-methyladenosine-3'-phosphate
  modified_base 3: mod_base = OTHER; note = 2'-O-methyladenosine-3'-phosphate
  modified_base 4: mod_base = OTHER; note = 2'-O-methylcytidine-3'-phosphate
  modified_base 5: mod_base = OTHER; note = 2'-O-methyluridine-3'-phosphate
  modified_base 6: mod_base = OTHER; note = 2'-O-methyladenosine-3'-phosphate
  modified_base 7: mod_base = OTHER; note = 2'-deoxy-2'-fluorocytidine-3'-phosphate
  modified_base 8: mod_base = OTHER; note = 2'-O-methyluridine-3'-phosphate
  modified_base 9: mod_base = OTHER; note = 2'-deoxy-2'-fluoroguanosine-3'-phosphate
  modified_base 10: mod_base = OTHER; note = 2'-deoxy-2'-fluorouridine-3'-phosphate
  modified_base 11: mod_base = OTHER; note = 2'-deoxy-2'-fluoroguanosine-3'-phosphate
  modified_base 12: mod_base = OTHER; note = 2'-O-methyladenosine-3'-phosphate
  modified_base 13: mod_base = OTHER; note = 2'-O-methyladenosine-3'-phosphate
  modified_base 14: mod_base = OTHER; note = 2'-O-methyladenosine-3'-phosphate
  modified_base 15: mod_base = OTHER; note = 2'-O-methyladenosine-3'-phosphate
  modified_base 16: mod_base = OTHER; note = 2'-O-methylguanosine-3'-phosphate
  modified_base 17: mod_base = OTHER; note = 2'-O-methyladenosine-3'-phosphate
  modified_base 18: mod_base = OTHER; note = 2'-O-methyladenosine-3'-phosphate
  modified_base 19: mod_base = OTHER; note = 2'-O-methyluridine-3'-phosphate
  modified_base 20: mod_base = OTHER; note = 2'-O-methylcytidine-3'-phosphate
  modified_base 21: mod_base = OTHER; note = 2'-O-methyladenosine
gaactactgtgaaaagaatca

SEQ ID NO: 4434 - RNA, 21 nt, synthetic construct
  source 1..21: mol_type = other RNA
  modified_base 1: mod_base = OTHER; note = 2'-O-methylcytidine-3'-phosphate
  modified_base 2: mod_base = OTHER; note = 2'-O-methylguanosine-3'-phosphate
  modified_base 3: mod_base = OTHER; note = 2'-O-methyluridine-3'-phosphate
  modified_base 4: mod_base = OTHER; note = 2'-O-methyluridine-3'-phosphate
  modified_base 5: mod_base = OTHER; note = 2'-O-methylguanosine-3'-phosphate
  modified_base 6: mod_base = OTHER; note = 2'-O-methyluridine-3'-phosphate
  modified_base 7: mod_base = OTHER; note = 2'-deoxy-2'-fluoroadenosine-3'-phosphate
  modified_base 8: mod_base = OTHER; note = 2'-O-methyladenosine-3'-phosphate
  modified_base 9: mod_base = OTHER; note = 2'-deoxy-2'-fluoroadenosine-3'-phosphate
  modified_base 10: mod_base = OTHER; note = 2'-deoxy-2'-fluoroguanosine-3'-phosphate
  modified_base 11: mod_base = OTHER; note = 2'-deoxy-2'-fluoroadenosine-3'-phosphate
  modified_base 12: mod_base = OTHER; note = 2'-O-methylcytidine-3'-phosphate
  modified_base 13: mod_base = OTHER; note = 2'-O-methyluridine-3'-phosphate
  modified_base 14: mod_base = OTHER; note = 2'-O-methyluridine-3'-phosphate
  modified_base 15: mod_base = OTHER; note = 2'-O-methyluridine-3'-phosphate
  modified_base 16: mod_base = OTHER; note = 2'-O-methyluridine-3'-phosphate
  modified_base 17: mod_base = OTHER; note = 2'-O-methyluridine-3'-phosphate
  modified_base 18: mod_base = OTHER; note = 2'-O-methylguanosine-3'-phosphate
  modified_base 19: mod_base = OTHER; note = 2'-O-methyluridine-3'-phosphate
  modified_base 20: mod_base = OTHER; note = 2'-O-methyladenosine-3'-phosphate
  modified_base 21: mod_base = OTHER; note = 2'-O-methyladenosine
cgttgtaaagactttttgtaa

SEQ ID NO: 4435 - RNA, 21 nt, synthetic construct
  source 1..21: mol_type = other RNA
  modified_base 1: mod_base = OTHER; note = 2'-O-methylguanosine-3'-phosphate
  modified_base 2: mod_base = OTHER; note = 2'-O-methyluridine-3'-phosphate
  modified_base 3: mod_base = OTHER; note = 2'-O-methyluridine-3'-phosphate
  modified_base 4: mod_base = OTHER; note = 2'-O-methylguanosine-3'-phosphate
  modified_base 5: mod_base = OTHER; note = 2'-O-methyluridine-3'-phosphate
  modified_base 6: mod_base = OTHER; note = 2'-O-methyladenosine-3'-phosphate
  modified_base 7: mod_base = OTHER; note = 2'-deoxy-2'-fluoroadenosine-3'-phosphate
  modified_base 8: mod_base = OTHER; note = 2'-O-methyladenosine-3'-phosphate
  modified_base 9: mod_base = OTHER; note = 2'-deoxy-2'-fluoroguanosine-3'-phosphate
  modified_base 10: mod_base = OTHER; note = 2'-deoxy-2'-fluoroadenosine-3'-phosphate
  modified_base 11: mod_base = OTHER; note = 2'-deoxy-2'-fluorocytidine-3'-phosphate
  modified_base 12: mod_base = OTHER; note = 2'-O-methyluridine-3'-phosphate
  modified_base 13: mod_base = OTHER; note = 2'-O-methyluridine-3'-phosphate
  modified_base 14: mod_base = OTHER; note = 2'-O-methyluridine-3'-phosphate
  modified_base 15: mod_base = OTHER; note = 2'-O-methyluridine-3'-phosphate
  modified_base 16: mod_base = OTHER; note = 2'-O-methyluridine-3'-phosphate
  modified_base 17: mod_base = OTHER; note = 2'-O-methylguanosine-3'-phosphate
  modified_base 18: mod_base = OTHER; note = 2'-O-methyluridine-3'-phosphate
  modified_base 19: mod_base = OTHER; note = 2'-O-methyladenosine-3'-phosphate
  modified_base 20: mod_base = OTHER; note = 2'-O-methyladenosine-3'-phosphate
  modified_base 21: mod_base = OTHER; note = 2'-O-methyladenosine
gttgtaaagactttttgtaaa

SEQ ID NO: 4436 - RNA, 21 nt, synthetic construct
  source 1..21: mol_type = other RNA
  modified_base 1: mod_base = OTHER; note = 2'-O-methyladenosine-3'-phosphate
  modified_base 2: mod_base = OTHER; note = 2'-O-methyladenosine-3'-phosphate
  modified_base 3: mod_base = OTHER; note = 2'-O-methylguanosine-3'-phosphate
  modified_base 4: mod_base = OTHER; note = 2'-O-methylcytidine-3'-phosphate
  modified_base 5: mod_base = OTHER; note = 2'-O-methyluridine-3'-phosphate
  modified_base 6: mod_base = OTHER; note = 2'-O-methyladenosine-3'-phosphate
  modified_base 7: mod_base = OTHER; note = 2'-deoxy-2'-fluoroguanosine-3'-phosphate
  modified_base 8: mod_base = OTHER; note = 2'-O-methylcytidine-3'-phosphate
  modified_base 9: mod_base = OTHER; note = 2'-deoxy-2'-fluorouridine-3'-phosphate
  modified_base 10: mod_base = OTHER; note = 2'-deoxy-2'-fluoroguanosine-3'-phosphate
  modified_base 11: mod_base = OTHER; note = 2'-deoxy-2'-fluoroadenosine-3'-phosphate
  modified_base 12: mod_base = OTHER; note = 2'-O-methyluridine-3'-phosphate
  modified_base 13: mod_base = OTHER; note = 2'-O-methyladenosine-3'-phosphate
  modified_base 14: mod_base = OTHER; note = 2'-O-methylcytidine-3'-phosphate
  modified_base 15: mod_base = OTHER; note = 2'-O-methyluridine-3'-phosphate
  modified_base 16: mod_base = OTHER; note = 2'-O-methylcytidine-3'-phosphate
  modified_base 17: mod_base = OTHER; note = 2'-O-methyluridine-3'-phosphate
  modified_base 18: mod_base = OTHER; note = 2'-O-methyluridine-3'-phosphate
  modified_base 19: mod_base = OTHER; note = 2'-O-methyladenosine-3'-phosphate
  modified_base 20: mod_base = OTHER; note = 2'-O-methyladenosine-3'-phosphate
  modified_base 21: mod_base = OTHER; note = 2'-O-methyladenosine
aagctagctgatactcttaaa

SEQ ID NO: 4437 - RNA, 21 nt, synthetic construct
  source 1..21: mol_type = other RNA
  modified_base 1: mod_base = OTHER; note = 2'-O-methylcytidine-3'-phosphate
  modified_base 2: mod_base = OTHER; note = 2'-O-methyluridine-3'-phosphate
  modified_base 3: mod_base = OTHER; note = 2'-O-methyladenosine-3'-phosphate
  modified_base 4: mod_base = OTHER; note = 2'-O-methylguanosine-3'-phosphate
  modified_base 5: mod_base = OTHER; note = 2'-O-methylcytidine-3'-phosphate
  modified_base 6: mod_base = OTHER; note = 2'-O-methyluridine-3'-phosphate
  modified_base 7: mod_base = OTHER; note = 2'-deoxy-2'-fluoroguanosine-3'-phosphate
  modified_base 8: mod_base = OTHER; note = 2'-O-methyladenosine-3'-phosphate
  modified_base 9: mod_base = OTHER; note = 2'-deoxy-2'-fluorouridine-3'-phosphate
  modified_base 10: mod_base = OTHER; note = 2'-deoxy-2'-fluoroadenosine-3'-phosphate
  modified_base 11: mod_base = OTHER; note = 2'-deoxy-2'-fluorocytidine-3'-phosphate
  modified_base 12: mod_base = OTHER; note = 2'-O-methyluridine-3'-phosphate
  modified_base 13: mod_base = OTHER; note = 2'-O-methylcytidine-3'-phosphate
  modified_base 14: mod_base = OTHER; note = 2'-O-methyluridine-3'-phosphate
  modified_base 15: mod_base = OTHER; note = 2'-O-methyluridine-3'-phosphate
  modified_base 16: mod_base = OTHER; note = 2'-O-methyladenosine-3'-phosphate
  modified_base 17: mod_base = OTHER; note = 2'-O-methyladenosine-3'-phosphate
  modified_base 18: mod_base = OTHER; note = 2'-O-methylguanosine-3'-phosphate
  modified_base 19: mod_base = OTHER; note = 2'-O-methyluridine-3'-phosphate
  modified_base 20: mod_base = OTHER; note = 2'-O-methyladenosine-3'-phosphate
  modified_base 21: mod_base = OTHER; note = 2'-O-methyladenosine
ctagctgatactcttaagtaa

SEQ ID NO: 4438 - RNA, 21 nt, synthetic construct
  source 1..21: mol_type = other RNA
  modified_base 1: mod_base = OTHER; note = 2'-O-methyladenosine-3'-phosphate
  modified_base 2: mod_base = OTHER; note = 2'-O-methyladenosine-3'-phosphate
  modified_base 3: mod_base = OTHER; note = 2'-O-methyluridine-3'-phosphate
  modified_base 4: mod_base = OTHER; note = 2'-O-methyluridine-3'-phosphate
  modified_base 5: mod_base = OTHER; note = 2'-O-methylguanosine-3'-phosphate
  modified_base 6: mod_base = OTHER; note = 2'-O-methylguanosine-3'-phosphate
  modified_base 7: mod_base = OTHER; note = 2'-deoxy-2'-fluoroguanosine-3'-phosphate
  modified_base 8: mod_base = OTHER; note = 2'-O-methylcytidine-3'-phosphate
  modified_base 9: mod_base = OTHER; note = 2'-deoxy-2'-fluoroadenosine-3'-phosphate
  modified_base 10: mod_base = OTHER; note = 2'-deoxy-2'-fluoroadenosine-3'-phosphate
  modified_base 11: mod_base = OTHER; note = 2'-deoxy-2'-fluorouridine-3'-phosphate
  modified_base 12: mod_base = OTHER; note = 2'-O-methyladenosine-3'-phosphate
  modified_base 13: mod_base = OTHER; note = 2'-O-methyladenosine-3'-phosphate
  modified_base 14: mod_base = OTHER; note = 2'-O-methyladenosine-3'-phosphate
  modified_base 15: mod_base = OTHER; note = 2'-O-methylcytidine-3'-phosphate
  modified_base 16: mod_base = OTHER; note = 2'-O-methyluridine-3'-phosphate
  modified_base 17: mod_base = OTHER; note = 2'-O-methylguanosine-3'-phosphate
  modified_base 18: mod_base = OTHER; note = 2'-O-methyluridine-3'-phosphate
  modified_base 19: mod_base = OTHER; note = 2'-O-methyladenosine-3'-phosphate
  modified_base 20: mod_base = OTHER; note = 2'-O-methyluridine-3'-phosphate
  modified_base 21: mod_base = OTHER; note = 2'-O-methyladenosine
aattgggcaataaactgtata

SEQ ID NO: 4439 - RNA, 21 nt, synthetic construct
  source 1..21: mol_type = other RNA
  modified_base 1: mod_base = OTHER; note = 2'-O-methyladenosine-3'-phosphate
  modified_base 2: mod_base = OTHER; note = 2'-O-methyluridine-3'-phosphate
  modified_base 3: mod_base = OTHER; note = 2'-O-methyluridine-3'-phosphate
  modified_base 4: mod_base = OTHER; note = 2'-O-methylguanosine-3'-phosphate
  modified_base 5: mod_base = OTHER; note = 2'-O-methylguanosine-3'-phosphate
  modified_base 6: mod_base = OTHER; note = 2'-O-methylguanosine-3'-phosphate
  modified_base 7: mod_base = OTHER; note = 2'-deoxy-2'-fluorocytidine-3'-phosphate
  modified_base 8: mod_base = OTHER; note = 2'-O-methyladenosine-3'-phosphate
  modified_base 9: mod_base = OTHER; note = 2'-deoxy-2'-fluoroadenosine-3'-phosphate
  modified_base 10: mod_base = OTHER; note = 2'-deoxy-2'-fluorouridine-3'-phosphate
  modified_base 11: mod_base = OTHER; note = 2'-deoxy-2'-fluoroadenosine-3'-phosphate
  modified_base 12: mod_base = OTHER; note = 2'-O-methyladenosine-3'-phosphate
  modified_base 13: mod_base = OTHER; note = 2'-O-methyladenosine-3'-phosphate
  modified_base 14: mod_base = OTHER; note = 2'-O-methylcytidine-3'-phosphate
  modified_base 15: mod_base = OTHER; note = 2'-O-methyluridine-3'-phosphate
  modified_base 16: mod_base = OTHER; note = 2'-O-methylguanosine-3'-phosphate
  modified_base 17: mod_base = OTHER; note = 2'-O-methyluridine-3'-phosphate
  modified_base 18: mod_base = OTHER; note = 2'-O-methyladenosine-3'-phosphate
  modified_base 19: mod_base = OTHER; note = 2'-O-methyluridine-3'-phosphate
  modified_base 20: mod_base = OTHER; note = 2'-O-methylcytidine-3'-phosphate
  modified_base 21: mod_base = OTHER; note = 2'-O-methyladenosine
attgggcaataaactgtatca

SEQ ID NO: 4440 - RNA, 21 nt, synthetic construct
  source 1..21: mol_type = other RNA
  modified_base 1: mod_base = OTHER; note = 2'-O-methyluridine-3'-phosphate
  modified_base 2: mod_base = OTHER; note = 2'-O-methyluridine-3'-phosphate
  modified_base 3: mod_base = OTHER; note = 2'-O-methylguanosine-3'-phosphate
  modified_base 4: mod_base = OTHER; note = 2'-O-methylguanosine-3'-phosphate
  modified_base 5: mod_base = OTHER; note = 2'-O-methylguanosine-3'-phosphate
  modified_base 6: mod_base = OTHER; note = 2'-O-methylcytidine-3'-phosphate
  modified_base 7: mod_base = OTHER; note = 2'-deoxy-2'-fluoroadenosine-3'-phosphate
  modified_base 8: mod_base = OTHER; note = 2'-O-methyladenosine-3'-phosphate
  modified_base 9: mod_base = OTHER; note = 2'-deoxy-2'-fluorouridine-3'-phosphate
  modified_base 10: mod_base = OTHER; note = 2'-deoxy-2'-fluoroadenosine-3'-phosphate
  modified_base 11: mod_base = OTHER; note = 2'-deoxy-2'-fluoroadenosine-3'-phosphate
  modified_base 12: mod_base = OTHER; note = 2'-O-methyladenosine-3'-phosphate
  modified_base 13: mod_base = OTHER; note = 2'-O-methylcytidine-3'-phosphate
  modified_base 14: mod_base = OTHER; note = 2'-O-methyluridine-3'-phosphate
  modified_base 15: mod_base = OTHER; note = 2'-O-methylguanosine-3'-phosphate
  modified_base 16: mod_base = OTHER; note = 2'-O-methyluridine-3'-phosphate
  modified_base 17: mod_base = OTHER; note = 2'-O-methyladenosine-3'-phosphate
  modified_base 18: mod_base = OTHER; note = 2'-O-methyluridine-3'-phosphate
  modified_base 19: mod_base = OTHER; note = 2'-O-methylcytidine-3'-phosphate
  modified_base 20: mod_base = OTHER; note = 2'-O-methyladenosine-3'-phosphate
  modified_base 21: mod_base = OTHER; note = 2'-O-methyladenosine
ttgggcaataaactgtatcaa

SEQ ID NO: 4441 - RNA, 21 nt, synthetic construct
  source 1..21: mol_type = other RNA
  modified_base 1: mod_base = OTHER; note = 2'-O-methyluridine-3'-phosphate
  modified_base 2: mod_base = OTHER; note = 2'-O-methylguanosine-3'-phosphate
  modified_base 3: mod_base = OTHER; note = 2'-O-methylguanosine-3'-phosphate
  modified_base 4: mod_base = OTHER; note = 2'-O-methylguanosine-3'-phosphate
  modified_base 5: mod_base = OTHER; note = 2'-O-methylcytidine-3'-phosphate
  modified_base 6: mod_base = OTHER; note = 2'-O-methyladenosine-3'-phosphate
  modified_base 7: mod_base = OTHER; note = 2'-deoxy-2'-fluoroadenosine-3'-phosphate
  modified_base 8: mod_base = OTHER; note = 2'-O-methyluridine-3'-phosphate
  modified_base 9: mod_base = OTHER; note = 2'-deoxy-2'-fluoroadenosine-3'-phosphate
  modified_base 10: mod_base = OTHER; note = 2'-deoxy-2'-fluoroadenosine-3'-phosphate
  modified_base 11: mod_base = OTHER; note = 2'-deoxy-2'-fluoroadenosine-3'-phosphate
  modified_base 12: mod_base = OTHER; note = 2'-O-methylcytidine-3'-phosphate
  modified_base 13: mod_base = OTHER; note = 2'-O-methyluridine-3'-phosphate
  modified_base 14: mod_base = OTHER; note = 2'-O-methylguanosine-3'-phosphate
  modified_base 15: mod_base = OTHER; note = 2'-O-methyluridine-3'-phosphate
  modified_base 16: mod_base = OTHER; note = 2'-O-methyladenosine-3'-phosphate
  modified_base 17: mod_base = OTHER; note = 2'-O-methyluridine-3'-phosphate
  modified_base 18: mod_base = OTHER; note = 2'-O-methylcytidine-3'-phosphate
  modified_base 19: mod_base = OTHER; note = 2'-O-methyladenosine-3'-phosphate
  modified_base 20: mod_base = OTHER; note = 2'-O-methyladenosine-3'-phosphate
  modified_base 21: mod_base = OTHER; note = 2'-O-methyladenosine
tgggcaataaactgtatcaaa

SEQ ID NO: 4442 - RNA, 21 nt, synthetic construct
  source 1..21: mol_type = other RNA
  modified_base 1: mod_base = OTHER; note = 2'-O-methylguanosine-3'-phosphate
  modified_base 2: mod_base = OTHER; note = 2'-O-methylguanosine-3'-phosphate
  modified_base 3: mod_base = OTHER; note = 2'-O-methylguanosine-3'-phosphate
  modified_base 4: mod_base = OTHER; note = 2'-O-methylcytidine-3'-phosphate
  modified_base 5: mod_base = OTHER; note = 2'-O-methyladenosine-3'-phosphate
  modified_base 6: mod_base = OTHER; note = 2'-O-methyladenosine-3'-phosphate
  modified_base 7: mod_base = OTHER; note = 2'-deoxy-2'-fluorouridine-3'-phosphate
  modified_base 8: mod_base = OTHER; note = 2'-O-methyladenosine-3'-phosphate
  modified_base 9: mod_base = OTHER; note = 2'-deoxy-2'-fluoroadenosine-3'-phosphate
  modified_base 10: mod_base = OTHER; note = 2'-deoxy-2'-fluoroadenosine-3'-phosphate
  modified_base 11: mod_base = OTHER; note = 2'-deoxy-2'-fluorocytidine-3'-phosphate
  modified_base 12: mod_base = OTHER; note = 2'-O-methyluridine-3'-phosphate
  modified_base 13: mod_base = OTHER; note = 2'-O-methylguanosine-3'-phosphate
  modified_base 14: mod_base = OTHER; note = 2'-O-methyluridine-3'-phosphate
  modified_base 15: mod_base = OTHER; note = 2'-O-methyladenosine-3'-phosphate
  modified_base 16: mod_base = OTHER; note = 2'-O-methyluridine-3'-phosphate
  modified_base 17: mod_base = OTHER; note = 2'-O-methylcytidine-3'-phosphate
  modified_base 18: mod_base = OTHER; note = 2'-O-methyladenosine-3'-phosphate
  modified_base 19: mod_base = OTHER; note = 2'-O-methyladenosine-3'-phosphate
  modified_base 20: mod_base = OTHER; note = 2'-O-methyladenosine-3'-phosphate
  modified_base 21: mod_base = OTHER; note = 2'-O-methyladenosine
gggcaataaactgtatcaaaa

SEQ ID NO: 4443 - RNA, 21 nt, synthetic construct
  source 1..21: mol_type = other RNA
  modified_base 1: mod_base = OTHER; note = 2'-O-methylguanosine-3'-phosphate
  modified_base 2: mod_base = OTHER; note = 2'-O-methylguanosine-3'-phosphate
  modified_base 3: mod_base = OTHER; note = 2'-O-methylcytidine-3'-phosphate
  modified_base 4: mod_base = OTHER; note = 2'-O-methyladenosine-3'-phosphate
  modified_base 5: mod_base = OTHER; note = 2'-O-methyladenosine-3'-phosphate
  modified_base 6: mod_base = OTHER; note = 2'-O-methyluridine-3'-phosphate
  modified_base 7: mod_base = OTHER; note = 2'-deoxy-2'-fluoroadenosine-3'-phosphate
  modified_base 8: mod_base = OTHER; note = 2'-O-methyladenosine-3'-phosphate
  modified_base 9: mod_base = OTHER; note = 2'-deoxy-2'-fluoroadenosine-3'-phosphate
  modified_base 10: mod_base = OTHER; note = 2'-deoxy-2'-fluorocytidine-3'-phosphate
  modified_base 11: mod_base = OTHER; note = 2'-deoxy-2'-fluorouridine-3'-phosphate
  modified_base 12: mod_base = OTHER; note = 2'-O-methylguanosine-3'-phosphate
  modified_base 13: mod_base = OTHER; note = 2'-O-methyluridine-3'-phosphate
  modified_base 14: mod_base = OTHER; note = 2'-O-methyladenosine-3'-phosphate
  modified_base 15: mod_base = OTHER; note = 2'-O-methyluridine-3'-phosphate
  modified_base 16: mod_base = OTHER; note = 2'-O-methylcytidine-3'-phosphate
  modified_base 17: mod_base = OTHER; note = 2'-O-methyladenosine-3'-phosphate
  modified_base 18: mod_base = OTHER; note = 2'-O-methyladenosine-3'-phosphate
  modified_base 19: mod_base = OTHER; note = 2'-O-methyladenosine-3'-phosphate
  modified_base 20: mod_base = OTHER; note = 2'-O-methyladenosine-3'-phosphate
  modified_base 21: mod_base = OTHER; note = 2'-O-methyladenosine
ggcaataaactgtatcaaaaa

SEQ ID NO: 4444 - RNA, 21 nt, synthetic construct
  source 1..21: mol_type = other RNA
  modified_base 1: mod_base = OTHER; note = 2'-O-methylguanosine-3'-phosphate
  modified_base 2: mod_base = OTHER; note = 2'-O-methylcytidine-3'-phosphate
  modified_base 3: mod_base = OTHER; note = 2'-O-methyladenosine-3'-phosphate
  modified_base 4: mod_base = OTHER; note = 2'-O-methyladenosine-3'-phosphate
  modified_base 5: mod_base = OTHER; note = 2'-O-methyluridine-3'-phosphate
  modified_base 6: mod_base = OTHER; note = 2'-O-methyladenosine-3'-phosphate
  modified_base 7: mod_base = OTHER; note = 2'-deoxy-2'-fluoroadenosine-3'-phosphate
  modified_base 8: mod_base = OTHER; note = 2'-O-methyladenosine-3'-phosphate
  modified_base 9: mod_base = OTHER; note = 2'-deoxy-2'-fluorocytidine-3'-phosphate
  modified_base 10: mod_base = OTHER; note = 2'-deoxy-2'-fluorouridine-3'-phosphate
  modified_base 11: mod_base = OTHER; note = 2'-deoxy-2'-fluoroguanosine-3'-phosphate
  modified_base 12: mod_base = OTHER; note = 2'-O-methyluridine-3'-phosphate
  modified_base 13: mod_base = OTHER; note = 2'-O-methyladenosine-3'-phosphate
  modified_base 14: mod_base = OTHER; note = 2'-O-methyluridine-3'-phosphate
  modified_base 15: mod_base = OTHER; note = 2'-O-methylcytidine-3'-phosphate
  modified_base 16: mod_base = OTHER; note = 2'-O-methyladenosine-3'-phosphate
  modified_base 17: mod_base = OTHER; note = 2'-O-methyladenosine-3'-phosphate
  modified_base 18: mod_base = OTHER; note = 2'-O-methyladenosine-3'-phosphate
  modified_base 19: mod_base = OTHER; note = 2'-O-methyladenosine-3'-phosphate
  modified_base 20: mod_base = OTHER; note = 2'-O-methyladenosine-3'-phosphate
  modified_base 21: mod_base = OTHER; note = 2'-O-methyladenosine
gcaataaactgtatcaaaaaa

SEQ ID NO: 4445 - RNA, 21 nt, synthetic construct
  source 1..21: mol_type = other RNA
  modified_base 1: mod_base = OTHER; note = 2'-O-methylcytidine-3'-phosphate
  modified_base 2: mod_base = OTHER; note = 2'-O-methyladenosine-3'-phosphate
  modified_base 3: mod_base = OTHER; note = 2'-O-methyladenosine-3'-phosphate
  modified_base 4: mod_base = OTHER; note = 2'-O-methyluridine-3'-phosphate
  modified_base 5: mod_base = OTHER; note = 2'-O-methyladenosine-3'-phosphate
  modified_base 6: mod_base = OTHER; note = 2'-O-methyladenosine-3'-phosphate
  modified_base 7: mod_base = OTHER; note = 2'-deoxy-2'-fluoroadenosine-3'-phosphate
  modified_base 8: mod_base = OTHER; note = 2'-O-methylcytidine-3'-phosphate
  modified_base 9: mod_base = OTHER; note = 2'-deoxy-2'-fluorouridine-3'-phosphate
  modified_base 10: mod_base = OTHER; note = 2'-deoxy-2'-fluoroguanosine-3'-phosphate
  modified_base 11: mod_base = OTHER; note = 2'-deoxy-2'-fluorouridine-3'-phosphate
  modified_base 12: mod_base = OTHER; note = 2'-O-methyladenosine-3'-phosphate
  modified_base 13: mod_base = OTHER; note = 2'-O-methyluridine-3'-phosphate
  modified_base 14: mod_base = OTHER; note = 2'-O-methylcytidine-3'-phosphate
  modified_base 15: mod_base = OTHER; note = 2'-O-methyladenosine-3'-phosphate
  modified_base 16: mod_base = OTHER; note = 2'-O-methyladenosine-3'-phosphate
  modified_base 17: mod_base = OTHER; note = 2'-O-methyladenosine-3'-phosphate
  modified_base 18: mod_base = OTHER; note = 2'-O-methyladenosine-3'-phosphate
  modified_base 19: mod_base = OTHER; note = 2'-O-methyladenosine-3'-phosphate
  modified_base 20: mod_base = OTHER; note = 2'-O-methyluridine-3'-phosphate
  modified_base 21: mod_base = OTHER; note = 2'-O-methyladenosine
caataaactgtatcaaaaata

SEQ ID NO: 4446 - RNA, 21 nt, synthetic construct
  source 1..21: mol_type = other RNA
  modified_base 1: mod_base = OTHER; note = 2'-O-methylguanosine-3'-phosphate
  modified_base 2: mod_base = OTHER; note = 2'-O-methyluridine-3'-phosphate
  modified_base 3: mod_base = OTHER; note = 2'-O-methyladenosine-3'-phosphate
  modified_base 4: mod_base = OTHER; note = 2'-O-methyluridine-3'-phosphate
  modified_base 5: mod_base = OTHER; note = 2'-O-methylcytidine-3'-phosphate
  modified_base 6: mod_base = OTHER; note = 2'-O-methyladenosine-3'-phosphate
  modified_base 7: mod_base = OTHER; note = 2'-deoxy-2'-fluoroadenosine-3'-phosphate
  modified_base 8: mod_base = OTHER; note = 2'-O-methyladenosine-3'-phosphate
  modified_base 9: mod_base = OTHER; note = 2'-deoxy-2'-fluoroadenosine-3'-phosphate
  modified_base 10: mod_base = OTHER; note = 2'-deoxy-2'-fluoroadenosine-3'-phosphate
  modified_base 11: mod_base = OTHER; note = 2'-deoxy-2'-fluorouridine-3'-phosphate
  modified_base 12: mod_base = OTHER; note = 2'-O-methyladenosine-3'-phosphate
  modified_base 13: mod_base = OTHER; note = 2'-O-methyluridine-3'-phosphate
  modified_base 14: mod_base = OTHER; note = 2'-O-methylguanosine-3'-phosphate
  modified_base 15: mod_base = OTHER; note = 2'-O-methyluridine-3'-phosphate
  modified_base 16: mod_base = OTHER; note = 2'-O-methyladenosine-3'-phosphate
  modified_base 17: mod_base = OTHER; note = 2'-O-methylguanosine-3'-phosphate
  modified_base 18: mod_base = OTHER; note = 2'-O-methyladenosine-3'-phosphate
  modified_base 19: mod_base = OTHER; note = 2'-O-methyluridine-3'-phosphate
  modified_base 20: mod_base = OTHER; note = 2'-O-methylguanosine-3'-phosphate
  modified_base 21: mod_base = OTHER; note = 2'-O-methyladenosine
gtatcaaaaatatgtagatga

SEQ ID NO: 4447 - RNA, 21 nt, synthetic construct
  source 1..21: mol_type = other RNA
  modified_base 1: mod_base = OTHER; note = 2'-O-methyluridine-3'-phosphate
  modified_base 2: mod_base = OTHER; note = 2'-O-methyladenosine-3'-phosphate
  modified_base 3: mod_base = OTHER; note = 2'-O-methyluridine-3'-phosphate
  modified_base 4: mod_base = OTHER; note = 2'-O-methylcytidine-3'-phosphate
  modified_base 5: mod_base = OTHER; note = 2'-O-methyladenosine-3'-phosphate
  modified_base 6: mod_base = OTHER; note = 2'-O-methyladenosine-3'-phosphate
  modified_base 7: mod_base = OTHER; note = 2'-deoxy-2'-fluoroadenosine-3'-phosphate
  modified_base 8: mod_base = OTHER; note = 2'-O-methyladenosine-3'-phosphate
  modified_base 9: mod_base = OTHER; note = 2'-deoxy-2'-fluoroadenosine-3'-phosphate
  modified_base 10: mod_base = OTHER; note = 2'-deoxy-2'-fluorouridine-3'-phosphate
  modified_base 11: mod_base = OTHER; note = 2'-deoxy-2'-fluoroadenosine-3'-phosphate
  modified_base 12: mod_base = OTHER; note = 2'-O-methyluridine-3'-phosphate
  modified_base 13: mod_base = OTHER; note = 2'-O-methylguanosine-3'-phosphate
  modified_base 14: mod_base = OTHER; note = 2'-O-methyluridine-3'-phosphate
  modified_base 15: mod_base = OTHER; note = 2'-O-methyladenosine-3'-phosphate
  modified_base 16: mod_base = OTHER; note = 2'-O-methylguanosine-3'-phosphate
  modified_base 17: mod_base = OTHER; note = 2'-O-methyladenosine-3'-phosphate
  modified_base 18: mod_base = OTHER; note = 2'-O-methyluridine-3'-phosphate
  modified_base 19: mod_base = OTHER; note = 2'-O-methylguanosine-3'-phosphate
  modified_base 20: mod_base = OTHER; note = 2'-O-methylguanosine-3'-phosphate
  modified_base 21: mod_base = OTHER; note = 2'-O-methyladenosine
tatcaaaaatatgtagatgga

SEQ ID NO: 4448 - RNA, 21 nt, synthetic construct
  source 1..21: mol_type = other RNA
  modified_base 1: mod_base = OTHER; note = 2'-O-methyladenosine-3'-phosphate
  modified_base 2: mod_base = OTHER; note = 2'-O-methyluridine-3'-phosphate
  modified_base 3: mod_base = OTHER; note = 2'-O-methylcytidine-3'-phosphate
  modified_base 4: mod_base = OTHER; note = 2'-O-methyladenosine-3'-phosphate
  modified_base 5: mod_base = OTHER; note = 2'-O-methyladenosine-3'-phosphate
  modified_base 6: mod_base = OTHER; note = 2'-O-methyladenosine-3'-phosphate
  modified_base 7: mod_base = OTHER; note = 2'-deoxy-2'-fluoroadenosine-3'-phosphate
  modified_base 8: mod_base = OTHER; note = 2'-O-methyladenosine-3'-phosphate
  modified_base 9: mod_base = OTHER; note = 2'-deoxy-2'-fluorouridine-3'-phosphate
  modified_base 10: mod_base = OTHER; note = 2'-deoxy-2'-fluoroadenosine-3'-phosphate
  modified_base 11: mod_base = OTHER; note = 2'-deoxy-2'-fluorouridine-3'-phosphate
  modified_base 12: mod_base = OTHER; note = 2'-O-methylguanosine-3'-phosphate
  modified_base 13: mod_base = OTHER; note = 2'-O-methyluridine-3'-phosphate
  modified_base 14: mod_base = OTHER; note = 2'-O-methyladenosine-3'-phosphate
  modified_base 15: mod_base = OTHER; note = 2'-O-methylguanosine-3'-phosphate
  modified_base 16: mod_base = OTHER; note = 2'-O-methyladenosine-3'-phosphate
  modified_base 17: mod_base = OTHER; note = 2'-O-methyluridine-3'-phosphate
  modified_base 18: mod_base = OTHER; note = 2'-O-methylguanosine-3'-phosphate
  modified_base 19: mod_base = OTHER; note = 2'-O-methylguanosine-3'-phosphate
  modified_base 20: mod_base = OTHER; note = 2'-O-methyladenosine-3'-phosphate
  modified_base 21: mod_base = OTHER; note = 2'-O-methyladenosine
atcaaaaatatgtagatggaa

SEQ ID NO: 4449 - RNA, 21 nt, synthetic construct
  source 1..21: mol_type = other RNA
  modified_base 1: mod_base = OTHER; note = 2'-O-methyladenosine-3'-phosphate
  modified_base 2: mod_base = OTHER; note = 2'-O-methyladenosine-3'-phosphate
  modified_base 3: mod_base = OTHER; note = 2'-O-methylguanosine-3'-phosphate
  modified_base 4: mod_base = OTHER; note = 2'-O-methylguanosine-3'-phosphate
  modified_base 5: mod_base = OTHER; note = 2'-O-methyluridine-3'-phosphate
  modified_base 6: mod_base = OTHER; note = 2'-O-methylguanosine-3'-phosphate
  modified_base 7: mod_base = OTHER; note = 2'-deoxy-2'-fluoroadenosine-3'-phosphate
  modified_base 8: mod_base = OTHER; note = 2'-O-methyladenosine-3'-phosphate
  modified_base 9: mod_base = OTHER; note = 2'-deoxy-2'-fluoroguanosine-3'-phosphate
  modified_base 10: mod_base = OTHER; note = 2'-deoxy-2'-fluoroadenosine-3'-phosphate
  modified_base 11: mod_base = OTHER; note = 2'-deoxy-2'-fluoroguanosine-3'-phosphate
  modified_base 12: mod_base = OTHER; note = 2'-O-methyladenosine-3'-phosphate
  modified_base 13: mod_base = OTHER; note = 2'-O-methyladenosine-3'-phosphate
  modified_base 14: mod_base = OTHER; note = 2'-O-methyluridine-3'-phosphate
  modified_base 15: mod_base = OTHER; note = 2'-O-methyluridine-3'-phosphate
  modified_base 16: mod_base = OTHER; note = 2'-O-methyluridine-3'-phosphate
  modified_base 17: mod_base = OTHER; note = 2'-O-methylcytidine-3'-phosphate
  modified_base 18: mod_base = OTHER; note = 2'-O-methyladenosine-3'-phosphate
  modified_base 19: mod_base = OTHER; note = 2'-O-methyladenosine-3'-phosphate
  modified_base 20: mod_base = OTHER; note = 2'-O-methyladenosine-3'-phosphate
  modified_base 21: mod_base = OTHER; note = 2'-O-methyladenosine
aaggtgaagagaatttcaaaa

SEQ ID NO: 4450 - RNA, 21 nt, synthetic construct
  source 1..21: mol_type = other RNA
  modified_base 1: mod_base = OTHER; note = 2'-O-methylguanosine-3'-phosphate
  modified_base 2: mod_base = OTHER; note = 2'-O-methylguanosine-3'-phosphate
  modified_base 3: mod_base = OTHER; note = 2'-O-methyluridine-3'-phosphate
  modified_base 4: mod_base = OTHER; note = 2'-O-methylguanosine-3'-phosphate
  modified_base 5: mod_base = OTHER; note = 2'-O-methyladenosine-3'-phosphate
  modified_base 6: mod_base = OTHER; note = 2'-O-methyladenosine-3'-phosphate
  modified_base 7: mod_base = OTHER; note = 2'-deoxy-2'-fluoroguanosine-3'-phosphate
  modified_base 8: mod_base = OTHER; note = 2'-O-methyladenosine-3'-phosphate
  modified_base 9: mod_base = OTHER; note = 2'-deoxy-2'-fluoroguanosine-3'-phosphate
  modified_base 10: mod_base = OTHER; note = 2'-deoxy-2'-fluoroadenosine-3'-phosphate
  modified_base 11: mod_base = OTHER; note = 2'-deoxy-2'-fluoroadenosine-3'-phosphate
  modified_base 12: mod_base = OTHER; note = 2'-O-methyluridine-3'-phosphate
  modified_base 13: mod_base = OTHER; note = 2'-O-methyluridine-3'-phosphate
  modified_base 14: mod_base = OTHER; note = 2'-O-methyluridine-3'-phosphate
  modified_base 15: mod_base = OTHER; note = 2'-O-methylcytidine-3'-phosphate
  modified_base 16: mod_base = OTHER; note = 2'-O-methyladenosine-3'-phosphate
  modified_base 17: mod_base = OTHER; note = 2'-O-methyladenosine-3'-phosphate
  modified_base 18: mod_base = OTHER; note = 2'-O-methyladenosine-3'-phosphate
  modified_base 19: mod_base = OTHER; note = 2'-O-methylcytidine-3'-phosphate
  modified_base 20: mod_base = OTHER; note = 2'-O-methyluridine-3'-phosphate
  modified_base 21: mod_base = OTHER; note = 2'-O-methyladenosine
ggtgaagagaatttcaaacta

SEQ ID NO: 4451 - RNA, 21 nt, synthetic construct
  source 1..21: mol_type = other RNA
  modified_base 1: mod_base = OTHER; note = 2'-O-methylguanosine-3'-phosphate
  modified_base 2: mod_base = OTHER; note = 2'-O-methyluridine-3'-phosphate
  modified_base 3: mod_base = OTHER; note = 2'-O-methylguanosine-3'-phosphate
  modified_base 4: mod_base = OTHER; note = 2'-O-methyladenosine-3'-phosphate
  modified_base 5: mod_base = OTHER; note = 2'-O-methyladenosine-3'-phosphate
  modified_base 6: mod_base = OTHER; note = 2'-O-methylguanosine-3'-phosphate
  modified_base 7: mod_base = OTHER; note = 2'-deoxy-2'-fluoroadenosine-3'-phosphate
  modified_base 8: mod_base = OTHER; note = 2'-O-methylguanosine-3'-phosphate
  modified_base 9: mod_base = OTHER; note = 2'-deoxy-2'-fluoroadenosine-3'-phosphate
  modified_base 10: mod_base = OTHER; note = 2'-deoxy-2'-fluoroadenosine-3'-phosphate
  modified_base 11: mod_base = OTHER; note = 2'-deoxy-2'-fluorouridine-3'-phosphate
  modified_base 12: mod_base = OTHER; note = 2'-O-methyluridine-3'-phosphate
  modified_base 13: mod_base = OTHER; note = 2'-O-methyluridine-3'-phosphate
  modified_base 14: mod_base = OTHER; note = 2'-O-methylcytidine-3'-phosphate
  modified_base 15: mod_base = OTHER; note = 2'-O-methyladenosine-3'-phosphate
  modified_base 16: mod_base = OTHER; note = 2'-O-methyladenosine-3'-phosphate
  modified_base 17: mod_base = OTHER; note = 2'-O-methyladenosine-3'-phosphate
  modified_base 18: mod_base = OTHER; note = 2'-O-methylcytidine-3'-phosphate
  modified_base 19: mod_base = OTHER; note = 2'-O-methyluridine-3'-phosphate
  modified_base 20: mod_base = OTHER; note = 2'-O-methylcytidine-3'-phosphate
  modified_base 21: mod_base = OTHER; note = 2'-O-methyladenosine
gtgaagagaatttcaaactca

SEQ ID NO: 4452 - RNA, 21 nt, synthetic construct
  source 1..21: mol_type = other RNA
  modified_base 1: mod_base = OTHER; note = 2'-O-methylguanosine-3'-phosphate
  modified_base 2: mod_base = OTHER; note = 2'-O-methyladenosine-3'-phosphate
  modified_base 3: mod_base = OTHER; note = 2'-O-methyluridine-3'-phosphate
  modified_base 4: mod_base = OTHER; note = 2'-O-methylguanosine-3'-phosphate
  modified_base 5: mod_base = OTHER; note = 2'-O-methyluridine-3'-phosphate
  modified_base 6: mod_base = OTHER; note = 2'-O-methyluridine-3'-phosphate
  modified_base 7: mod_base = OTHER; note = 2'-deoxy-2'-fluorouridine-3'-phosphate
  modified_base 8: mod_base = OTHER; note = 2'-O-methylcytidine-3'-phosphate
  modified_base 9: mod_base = OTHER; note = 2'-deoxy-2'-fluoroadenosine-3'-phosphate
  modified_base 10: mod_base = OTHER; note = 2'-deoxy-2'-fluorouridine-3'-phosphate
  modified_base 11: mod_base = OTHER; note = 2'-deoxy-2'-fluorouridine-3'-phosphate
  modified_base 12: mod_base = OTHER; note = 2'-O-methyladenosine-3'-phosphate
  modified_base 13: mod_base = OTHER; note = 2'-O-methyladenosine-3'-phosphate
  modified_base 14: mod_base = OTHER; note = 2'-O-methyluridine-3'-phosphate
  modified_base 15: mod_base = OTHER; note = 2'-O-methyluridine-3'-phosphate
  modified_base 16: mod_base = OTHER; note = 2'-O-methyluridine-3'-phosphate
  modified_base 17: mod_base = OTHER; note = 2'-O-methylcytidine-3'-phosphate
  modified_base 18: mod_base = OTHER; note = 2'-O-methyluridine-3'-phosphate
  modified_base 19: mod_base = OTHER; note = 2'-O-methyladenosine-3'-phosphate
  modified_base 20: mod_base = OTHER; note = 2'-O-methylguanosine-3'-phosphate
  modified_base 21: mod_base = OTHER; note = 2'-O-methyladenosine
gatgtttcattaatttctaga

SEQ ID NO: 4453 - RNA, 21 nt, synthetic construct
  source 1..21: mol_type = other RNA
  modified_base 1: mod_base = OTHER; note = 2'-O-methyluridine-3'-phosphate
  modified_base 2: mod_base = OTHER; note = 2'-O-methyluridine-3'-phosphate
  modified_base 3: mod_base = OTHER; note = 2'-O-methylcytidine-3'-phosphate
  modified_base 4: mod_base = OTHER; note = 2'-O-methyluridine-3'-phosphate
  modified_base 5: mod_base = OTHER; note = 2'-O-methyladenosine-3'-phosphate
  modified_base 6: mod_base = OTHER; note = 2'-O-methylguanosine-3'-phosphate
  modified_base 7: mod_base = OTHER; note = 2'-deoxy-2'-fluorouridine-3'-phosphate
  modified_base 8: mod_base = OTHER; note = 2'-O-methylcytidine-3'-phosphate
  modified_base 9: mod_base = OTHER; note = 2'-deoxy-2'-fluorouridine-3'-phosphate
  modified_base 10: mod_base = OTHER; note = 2'-deoxy-2'-fluoroguanosine-3'-phosphate
  modified_base 11: mod_base = OTHER; note = 2'-deoxy-2'-fluorouridine-3'-phosphate
  modified_base 12: mod_base = OTHER; note = 2'-O-methylguanosine-3'-phosphate
  modified_base 13: mod_base = OTHER; note = 2'-O-methyladenosine-3'-phosphate
  modified_base 14: mod_base = OTHER; note = 2'-O-methyladenosine-3'-phosphate
  modified_base 15: mod_base = OTHER; note = 2'-O-methyladenosine-3'-phosphate
  modified_base 16: mod_base = OTHER; note = 2'-O-methyladenosine-3'-phosphate
  modified_base 17: mod_base = OTHER; note = 2'-O-methyluridine-3'-phosphate
  modified_base 18: mod_base = OTHER; note = 2'-O-methyladenosine-3'-phosphate
  modified_base 19: mod_base = OTHER; note = 2'-O-methyluridine-3'-phosphate
  modified_base 20: mod_base = OTHER; note = 2'-O-methylguanosine-3'-phosphate
  modified_base 21: mod_base = OTHER; note = 2'-O-methyladenosine
ttctagtctgtgaaaatatga

SEQ ID NO: 4454 - RNA, 21 nt, synthetic construct
  source 1..21: mol_type = other RNA
  modified_base 1: mod_base = OTHER; note = 2'-O-methyluridine-3'-phosphate
  modified_base 2: mod_base = OTHER; note = 2'-O-methylcytidine-3'-phosphate
  modified_base 3: mod_base = OTHER; note = 2'-O-methyluridine-3'-phosphate
  modified_base 4: mod_base = OTHER; note = 2'-O-methyladenosine-3'-phosphate
  modified_base 5: mod_base = OTHER; note = 2'-O-methylguanosine-3'-phosphate
  modified_base 6: mod_base = OTHER; note = 2'-O-methyluridine-3'-phosphate
  modified_base 7: mod_base = OTHER; note = 2'-deoxy-2'-fluorocytidine-3'-phosphate
  modified_base 8: mod_base = OTHER; note = 2'-O-methyluridine-3'-phosphate
  modified_base 9: mod_base = OTHER; note = 2'-deoxy-2'-fluoroguanosine-3'-phosphate
  modified_base 10: mod_base = OTHER; note = 2'-deoxy-2'-fluorouridine-3'-phosphate
  modified_base 11: mod_base = OTHER; note = 2'-deoxy-2'-fluoroguanosine-3'-phosphate
  modified_base 12: mod_base = OTHER; note = 2'-O-methyladenosine-3'-phosphate
  modified_base 13: mod_base = OTHER; note = 2'-O-methyladenosine-3'-phosphate
  modified_base 14: mod_base = OTHER; note = 2'-O-methyladenosine-3'-phosphate
  modified_base 15: mod_base = OTHER; note = 2'-O-methyladenosine-3'-phosphate
  modified_base 16: mod_base = OTHER; note = 2'-O-methyluridine-3'-phosphate
  modified_base 17: mod_base = OTHER; note = 2'-O-methyladenosine-3'-phosphate
  modified_base 18: mod_base = OTHER; note = 2'-O-methyluridine-3'-phosphate
  modified_base 19: mod_base = OTHER; note = 2'-O-methylguanosine-3'-phosphate
  modified_base 20: mod_base = OTHER; note = 2'-O-methylcytidine-3'-phosphate
  modified_base 21: mod_base = OTHER; note = 2'-O-methyladenosine
tctagtctgtgaaaatatgca

SEQ ID NO: 4455 - RNA, 21 nt, synthetic construct
  source 1..21: mol_type = other RNA
  modified_base 1: mod_base = OTHER; note = 2'-O-methylcytidine-3'-phosphate
  modified_base 2: mod_base = OTHER; note = 2'-O-methyluridine-3'-phosphate
  modified_base 3: mod_base = OTHER; note = 2'-O-methyladenosine-3'-phosphate
  modified_base 4: mod_base = OTHER; note = 2'-O-methylguanosine-3'-phosphate
  modified_base 5: mod_base = OTHER; note = 2'-O-methyluridine-3'-phosphate
  modified_base 6: mod_base = OTHER; note = 2'-O-methylcytidine-3'-phosphate
  modified_base 7: mod_base = OTHER; note = 2'-deoxy-2'-fluorouridine-3'-phosphate
  modified_base 8: mod_base = OTHER; note = 2'-O-methylguanosine-3'-phosphate
  modified_base 9: mod_base = OTHER; note = 2'-deoxy-2'-fluorouridine-3'-phosphate
  modified_base 10: mod_base = OTHER; note = 2'-deoxy-2'-fluoroguanosine-3'-phosphate
  modified_base 11: mod_base = OTHER; note = 2'-deoxy-2'-fluoroadenosine-3'-phosphate
  modified_base 12: mod_base = OTHER; note = 2'-O-methyladenosine-3'-phosphate
  modified_base 13: mod_base = OTHER; note = 2'-O-methyladenosine-3'-phosphate
  modified_base 14: mod_base = OTHER; note = 2'-O-methyladenosine-3'-phosphate
  modified_base 15: mod_base = OTHER; note = 2'-O-methyluridine-3'-phosphate
  modified_base 16: mod_base = OTHER; note = 2'-O-methyladenosine-3'-phosphate
  modified_base 17: mod_base = OTHER; note = 2'-O-methyluridine-3'-phosphate
  modified_base 18: mod_base = OTHER; note = 2'-O-methylguanosine-3'-phosphate
  modified_base 19: mod_base = OTHER; note = 2'-O-methylcytidine-3'-phosphate
  modified_base 20: mod_base = OTHER; note = 2'-O-methyladenosine-3'-phosphate
  modified_base 21: mod_base = OTHER; note = 2'-O-methyladenosine
ctagtctgtgaaaatatgcaa

SEQ ID NO: 4456 - RNA, 21 nt, synthetic construct
  source 1..21: mol_type = other RNA
  modified_base 1: mod_base = OTHER; note = 2'-O-methyluridine-3'-phosphate
  modified_base 2: mod_base = OTHER; note = 2'-O-methyladenosine-3'-phosphate
  modified_base 3: mod_base = OTHER; note = 2'-O-methylguanosine-3'-phosphate
  modified_base 4: mod_base = OTHER; note = 2'-O-methyluridine-3'-phosphate
  modified_base 5: mod_base = OTHER; note = 2'-O-methylcytidine-3'-phosphate
  modified_base 6: mod_base = OTHER; note = 2'-O-methyluridine-3'-phosphate
  modified_base 7: mod_base = OTHER; note = 2'-deoxy-2'-fluoroguanosine-3'-phosphate
  modified_base 8: mod_base = OTHER; note = 2'-O-methyluridine-3'-phosphate
  modified_base 9: mod_base = OTHER; note = 2'-deoxy-2'-fluoroguanosine-3'-phosphate
  modified_base 10: mod_base = OTHER; note = 2'-deoxy-2'-fluoroadenosine-3'-phosphate
  modified_base 11: mod_base = OTHER; note = 2'-deoxy-2'-fluoroadenosine-3'-phosphate
  modified_base 12: mod_base = OTHER; note = 2'-O-methyladenosine-3'-phosphate
  modified_base 13: mod_base = OTHER; note = 2'-O-methyladenosine-3'-phosphate
  modified_base 14: mod_base = OTHER; note = 2'-O-methyluridine-3'-phosphate
  modified_base 15: mod_base = OTHER; note = 2'-O-methyladenosine-3'-phosphate
  modified_base 16: mod_base = OTHER; note = 2'-O-methyluridine-3'-phosphate
  modified_base 17: mod_base = OTHER; note = 2'-O-methylguanosine-3'-phosphate
  modified_base 18: mod_base = OTHER; note = 2'-O-methylcytidine-3'-phosphate
  modified_base 19: mod_base = OTHER; note = 2'-O-methyladenosine-3'-phosphate
  modified_base 20: mod_base = OTHER; note = 2'-O-methyluridine-3'-phosphate
  modified_base 21: mod_base = OTHER; note = 2'-O-methyladenosine
tagtctgtgaaaatatgcata

SEQ ID NO: 4457 - RNA, 21 nt, synthetic construct
  source 1..21: mol_type = other RNA
  modified_base 1: mod_base = OTHER; note = 2'-O-methyladenosine-3'-phosphate
  modified_base 2: mod_base = OTHER; note = 2'-O-methylguanosine-3'-phosphate
  modified_base 3: mod_base = OTHER; note = 2'-O-methyluridine-3'-phosphate
  modified_base 4: mod_base = OTHER; note = 2'-O-methylcytidine-3'-phosphate
  modified_base 5: mod_base = OTHER; note = 2'-O-methyluridine-3'-phosphate
  modified_base 6: mod_base = OTHER; note = 2'-O-methylguanosine-3'-phosphate
  modified_base 7: mod_base = OTHER; note = 2'-deoxy-2'-fluorouridine-3'-phosphate
  modified_base 8: mod_base = OTHER; note = 2'-O-methylguanosine-3'-phosphate
  modified_base 9: mod_base = OTHER; note = 2'-deoxy-2'-fluoroadenosine-3'-phosphate
  modified_base 10: mod_base = OTHER; note = 2'-deoxy-2'-fluoroadenosine-3'-phosphate
  modified_base 11: mod_base = OTHER; note = 2'-deoxy-2'-fluoroadenosine-3'-phosphate
  modified_base 12: mod_base = OTHER; note = 2'-O-methyladenosine-3'-phosphate
  modified_base 13: mod_base = OTHER; note = 2'-O-methyluridine-3'-phosphate
  modified_base 14: mod_base = OTHER; note = 2'-O-methyladenosine-3'-phosphate
  modified_base 15: mod_base = OTHER; note = 2'-O-methyluridine-3'-phosphate
  modified_base 16: mod_base = OTHER; note = 2'-O-methylguanosine-3'-phosphate
  modified_base 17: mod_base = OTHER; note = 2'-O-methylcytidine-3'-phosphate
  modified_base 18: mod_base = OTHER; note = 2'-O-methyladenosine-3'-phosphate
  modified_base 19: mod_base = OTHER; note = 2'-O-methyluridine-3'-phosphate
  modified_base 20: mod_base = OTHER; note = 2'-O-methyluridine-3'-phosphate
  modified_base 21: mod_base = OTHER; note = 2'-O-methyladenosine
agtctgtgaaaatatgcatta

SEQ ID NO: 4458 - RNA, 21 nt, synthetic construct
  source 1..21: mol_type = other RNA
  modified_base 1: mod_base = OTHER; note = 2'-O-methylguanosine-3'-phosphate
  modified_base 2: mod_base = OTHER; note = 2'-O-methyluridine-3'-phosphate
  modified_base 3: mod_base = OTHER; note = 2'-O-methylcytidine-3'-phosphate
  modified_base 4: mod_base = OTHER; note = 2'-O-methyluridine-3'-phosphate
  modified_base 5: mod_base = OTHER; note = 2'-O-methylguanosine-3'-phosphate
  modified_base 6: mod_base = OTHER; note = 2'-O-methyluridine-3'-phosphate
  modified_base 7: mod_base = OTHER; note = 2'-deoxy-2'-fluoroguanosine-3'-phosphate
  modified_base 8: mod_base = OTHER; note = 2'-O-methyladenosine-3'-phosphate
  modified_base 9: mod_base = OTHER; note = 2'-deoxy-2'-fluoroadenosine-3'-phosphate
  modified_base 10: mod_base = OTHER; note = 2'-deoxy-2'-fluoroadenosine-3'-phosphate
  modified_base 11: mod_base = OTHER; note = 2'-deoxy-2'-fluoroadenosine-3'-phosphate
  modified_base 12: mod_base = OTHER; note = 2'-O-methyluridine-3'-phosphate
  modified_base 13: mod_base = OTHER; note = 2'-O-methyladenosine-3'-phosphate
  modified_base 14: mod_base = OTHER; note = 2'-O-methyluridine-3'-phosphate
  modified_base 15: mod_base = OTHER; note = 2'-O-methylguanosine-3'-phosphate
  modified_base 16: mod_base = OTHER; note = 2'-O-methylcytidine-3'-phosphate
  modified_base 17: mod_base = OTHER; note = 2'-O-methyladenosine-3'-phosphate
  modified_base 18: mod_base = OTHER; note = 2'-O-methyluridine-3'-phosphate
  modified_base 19: mod_base = OTHER; note = 2'-O-methyluridine-3'-phosphate
  modified_base 20: mod_base = OTHER; note = 2'-O-methyluridine-3'-phosphate
  modified_base 21: mod_base = OTHER; note = 2'-O-methyladenosine
gtctgtgaaaatatgcattta

SEQ ID NO: 4459 - RNA, 21 nt, synthetic construct
  source 1..21: mol_type = other RNA
  modified_base 1: mod_base = OTHER; note = 2'-O-methyluridine-3'-phosphate
  modified_base 2: mod_base = OTHER; note = 2'-O-methylcytidine-3'-phosphate
  modified_base 3: mod_base = OTHER; note = 2'-O-methyluridine-3'-phosphate
  modified_base 4: mod_base = OTHER; note = 2'-O-methylguanosine-3'-phosphate
  modified_base 5: mod_base = OTHER; note = 2'-O-methyluridine-3'-phosphate
  modified_base 6: mod_base = OTHER; note = 2'-O-methylguanosine-3'-phosphate
  modified_base 7: mod_base = OTHER; note = 2'-deoxy-2'-fluoroadenosine-3'-phosphate
  modified_base 8: mod_base = OTHER; note = 2'-O-methyladenosine-3'-phosphate
  modified_base 9: mod_base = OTHER; note = 2'-deoxy-2'-fluoroadenosine-3'-phosphate
  modified_base 10: mod_base = OTHER; note = 2'-deoxy-2'-fluoroadenosine-3'-phosphate
  modified_base 11: mod_base = OTHER; note = 2'-deoxy-2'-fluorouridine-3'-phosphate
  modified_base 12: mod_base = OTHER; note = 2'-O-methyladenosine-3'-phosphate
  modified_base 13: mod_base = OTHER; note = 2'-O-methyluridine-3'-phosphate
  modified_base 14: mod_base = OTHER; note = 2'-O-methylguanosine-3'-phosphate
  modified_base 15: mod_base = OTHER; note = 2'-O-methylcytidine-3'-phosphate
  modified_base 16: mod_base = OTHER; note = 2'-O-methyladenosine-3'-phosphate
  modified_base 17: mod_base = OTHER; note = 2'-O-methyluridine-3'-phosphate
  modified_base 18: mod_base = OTHER; note = 2'-O-methyluridine-3'-phosphate
  modified_base 19: mod_base = OTHER; note = 2'-O-methyluridine-3'-phosphate
  modified_base 20: mod_base = OTHER; note = 2'-O-methyluridine-3'-phosphate
  modified_base 21: mod_base = OTHER; note = 2'-O-methyladenosine
tctgtgaaaatatgcatttta

SEQ ID NO: 4460 - RNA, 21 nt, synthetic construct
  source 1..21: mol_type = other RNA
  modified_base 1: mod_base = OTHER; note = 2'-O-methylcytidine-3'-phosphate
  modified_base 2: mod_base = OTHER; note = 2'-O-methyluridine-3'-phosphate
  modified_base 3: mod_base = OTHER; note = 2'-O-methylguanosine-3'-phosphate
  modified_base 4: mod_base = OTHER; note = 2'-O-methyluridine-3'-phosphate
  modified_base 5: mod_base = OTHER; note = 2'-O-methylguanosine-3'-phosphate
  modified_base 6: mod_base = OTHER; note = 2'-O-methyladenosine-3'-phosphate
  modified_base 7: mod_base = OTHER; note = 2'-deoxy-2'-fluoroadenosine-3'-phosphate
  modified_base 8: mod_base = OTHER; note = 2'-O-methyladenosine-3'-phosphate
  modified_base 9: mod_base = OTHER; note = 2'-deoxy-2'-fluoroadenosine-3'-phosphate
  modified_base 10: mod_base = OTHER; note = 2'-deoxy-2'-fluorouridine-3'-phosphate
  modified_base 11: mod_base = OTHER; note = 2'-deoxy-2'-fluoroadenosine-3'-phosphate
  modified_base 12: mod_base = OTHER; note = 2'-O-methyluridine-3'-phosphate
  modified_base 13: mod_base = OTHER; note = 2'-O-methylguanosine-3'-phosphate
  modified_base 14: mod_base = OTHER; note = 2'-O-methylcytidine-3'-phosphate
  modified_base 15: mod_base = OTHER; note = 2'-O-methyladenosine-3'-phosphate
  modified_base 16: mod_base = OTHER; note = 2'-O-methyluridine-3'-phosphate
  modified_base 17: mod_base = OTHER; note = 2'-O-methyluridine-3'-phosphate
  modified_base 18: mod_base = OTHER; note = 2'-O-methyluridine-3'-phosphate
  modified_base 19: mod_base = OTHER; note = 2'-O-methyluridine-3'-phosphate
  modified_base 20: mod_base = OTHER; note = 2'-O-methyladenosine-3'-phosphate
  modified_base 21: mod_base = OTHER; note = 2'-O-methyladenosine
ctgtgaaaatatgcattttaa

SEQ ID NO: 4461 - RNA, 21 nt, synthetic construct
  source 1..21: mol_type = other RNA
  modified_base 1: mod_base = OTHER; note = 2'-O-methylguanosine-3'-phosphate
  modified_base 2: mod_base = OTHER; note = 2'-O-methyladenosine-3'-phosphate
  modified_base 3: mod_base = OTHER; note = 2'-O-methyluridine-3'-phosphate
  modified_base 4: mod_base = OTHER; note = 2'-O-methyladenosine-3'-phosphate
  modified_base 5: mod_base = OTHER; note = 2'-O-methylguanosine-3'-phosphate
  modified_base 6: mod_base = OTHER; note = 2'-O-methylcytidine-3'-phosphate
  modified_base 7: mod_base = OTHER; note = 2'-deoxy-2'-fluorocytidine-3'-phosphate
  modified_base 8: mod_base = OTHER; note = 2'-O-methyluridine-3'-phosphate
  modified_base 9: mod_base = OTHER; note = 2'-deoxy-2'-fluorouridine-3'-phosphate
  modified_base 10: mod_base = OTHER; note = 2'-deoxy-2'-fluorouridine-3'-phosphate
  modified_base 11: mod_base = OTHER; note = 2'-deoxy-2'-fluoroadenosine-3'-phosphate
  modified_base 12: mod_base = OTHER; note = 2'-O-methyluridine-3'-phosphate
  modified_base 13: mod_base = OTHER; note = 2'-O-methyladenosine-3'-phosphate
  modified_base 14: mod_base = OTHER; note = 2'-O-methylcytidine-3'-phosphate
  modified_base 15: mod_base = OTHER; note = 2'-O-methylcytidine-3'-phosphate
  modified_base 16: mod_base = OTHER; note = 2'-O-methyladenosine-3'-phosphate
  modified_base 17: mod_base = OTHER; note = 2'-O-methyladenosine-3'-phosphate
  modified_base 18: mod_base = OTHER; note = 2'-O-methyladenosine-3'-phosphate
  modified_base 19: mod_base = OTHER; note = 2'-O-methyladenosine-3'-phosphate
  modified_base 20: mod_base = OTHER; note = 2'-O-methyluridine-3'-phosphate
  modified_base 21: mod_base = OTHER; note = 2'-O-methyladenosine
gatagcctttataccaaaata

SEQ ID NO: 4462 - RNA, 21 nt, synthetic construct
  source 1..21: mol_type = other RNA
  modified_base 1: mod_base = OTHER; note = 2'-O-methylcytidine-3'-phosphate
  modified_base 2: mod_base = OTHER; note = 2'-O-methyladenosine-3'-phosphate
  modified_base 3: mod_base = OTHER; note = 2'-O-methyladenosine-3'-phosphate
  modified_base 4: mod_base = OTHER; note = 2'-O-methylcytidine-3'-phosphate
  modified_base 5: mod_base = OTHER; note = 2'-O-methyladenosine-3'-phosphate
  modified_base 6: mod_base = OTHER; note = 2'-O-methylguanosine-3'-phosphate
  modified_base 7: mod_base = OTHER; note = 2'-deoxy-2'-fluorocytidine-3'-phosphate
  modified_base 8: mod_base = OTHER; note = 2'-O-methyladenosine-3'-phosphate
  modified_base 9: mod_base = OTHER; note = 2'-deoxy-2'-fluoroadenosine-3'-phosphate
  modified_base 10: mod_base = OTHER; note = 2'-deoxy-2'-fluoroguanosine-3'-phosphate
  modified_base 11: mod_base = OTHER; note = 2'-deoxy-2'-fluorouridine-3'-phosphate
  modified_base 12: mod_base = OTHER; note = 2'-O-methylcytidine-3'-phosphate
  modified_base 13: mod_base = OTHER; note = 2'-O-methyladenosine-3'-phosphate
  modified_base 14: mod_base = OTHER; note = 2'-O-methyluridine-3'-phosphate
  modified_base 15: mod_base = OTHER; note = 2'-O-methyladenosine-3'-phosphate
  modified_base 16: mod_base = OTHER; note = 2'-O-methyladenosine-3'-phosphate
  modified_base 17: mod_base = OTHER; note = 2'-O-methyladenosine-3'-phosphate
  modified_base 18: mod_base = OTHER; note = 2'-O-methyladenosine-3'-phosphate
  modified_base 19: mod_base = OTHER; note = 2'-O-methylguanosine-3'-phosphate
  modified_base 20: mod_base = OTHER; note = 2'-O-methyluridine-3'-phosphate
  modified_base 21: mod_base = OTHER; note = 2'-O-methyladenosine
caacagcaagtcataaaagta

SEQ ID NO: 4463 - RNA, 21 nt, synthetic construct
  source 1..21: mol_type = other RNA
  modified_base 1: mod_base = OTHER; note = 2'-O-methyladenosine-3'-phosphate
  modified_base 2: mod_base = OTHER; note = 2'-O-methyladenosine-3'-phosphate
  modified_base 3: mod_base = OTHER; note = 2'-O-methylcytidine-3'-phosphate
  modified_base 4: mod_base = OTHER; note = 2'-O-methyladenosine-3'-phosphate
  modified_base 5: mod_base = OTHER; note = 2'-O-methylguanosine-3'-phosphate
  modified_base 6: mod_base = OTHER; note = 2'-O-methylcytidine-3'-phosphate
  modified_base 7: mod_base = OTHER; note = 2'-deoxy-2'-fluoroadenosine-3'-phosphate
  modified_base 8: mod_base = OTHER; note = 2'-O-methyladenosine-3'-phosphate
  modified_base 9: mod_base = OTHER; note = 2'-deoxy-2'-fluoroguanosine-3'-phosphate
  modified_base 10: mod_base = OTHER; note = 2'-deoxy-2'-fluorouridine-3'-phosphate
  modified_base 11: mod_base = OTHER; note = 2'-deoxy-2'-fluorocytidine-3'-phosphate
  modified_base 12: mod_base = OTHER; note = 2'-O-methyladenosine-3'-phosphate
  modified_base 13: mod_base = OTHER; note = 2'-O-methyluridine-3'-phosphate
  modified_base 14: mod_base = OTHER; note = 2'-O-methyladenosine-3'-phosphate
  modified_base 15: mod_base = OTHER; note = 2'-O-methyladenosine-3'-phosphate
  modified_base 16: mod_base = OTHER; note = 2'-O-methyladenosine-3'-phosphate
  modified_base 17: mod_base = OTHER; note = 2'-O-methyladenosine-3'-phosphate
  modified_base 18: mod_base = OTHER; note = 2'-O-methylguanosine-3'-phosphate
  modified_base 19: mod_base = OTHER; note = 2'-O-methyluridine-3'-phosphate
  modified_base 20: mod_base = OTHER; note = 2'-O-methyladenosine-3'-phosphate
  modified_base 21: mod_base = OTHER; note = 2'-O-methyladenosine
aacagcaagtcataaaagtaa

SEQ ID NO: 4464 - RNA, 21 nt, synthetic construct
  source 1..21: mol_type = other RNA
  modified_base 1: mod_base = OTHER; note = 2'-O-methyladenosine-3'-phosphate
  modified_base 2: mod_base = OTHER; note = 2'-O-methylcytidine-3'-phosphate
  modified_base 3: mod_base = OTHER; note = 2'-O-methyladenosine-3'-phosphate
  modified_base 4: mod_base = OTHER; note = 2'-O-methylguanosine-3'-phosphate
  modified_base 5: mod_base = OTHER; note = 2'-O-methylcytidine-3'-phosphate
  modified_base 6: mod_base = OTHER; note = 2'-O-methyladenosine-3'-phosphate
  modified_base 7: mod_base = OTHER; note = 2'-deoxy-2'-fluoroadenosine-3'-phosphate
  modified_base 8: mod_base = OTHER; note = 2'-O-methylguanosine-3'-phosphate
  modified_base 9: mod_base = OTHER; note = 2'-deoxy-2'-fluorouridine-3'-phosphate
  modified_base 10: mod_base = OTHER; note = 2'-deoxy-2'-fluorocytidine-3'-phosphate
  modified_base 11: mod_base = OTHER; note = 2'-deoxy-2'-fluoroadenosine-3'-phosphate
  modified_base 12: mod_base = OTHER; note = 2'-O-methyluridine-3'-phosphate
  modified_base 13: mod_base = OTHER; note = 2'-O-methyladenosine-3'-phosphate
  modified_base 14: mod_base = OTHER; note = 2'-O-methyladenosine-3'-phosphate
  modified_base 15: mod_base = OTHER; note = 2'-O-methyladenosine-3'-phosphate
  modified_base 16: mod_base = OTHER; note = 2'-O-methyladenosine-3'-phosphate
  modified_base 17: mod_base = OTHER; note = 2'-O-methylguanosine-3'-phosphate
  modified_base 18: mod_base = OTHER; note = 2'-O-methyluridine-3'-phosphate
  modified_base 19: mod_base = OTHER; note = 2'-O-methyladenosine-3'-phosphate
  modified_base 20: mod_base = OTHER; note = 2'-O-methyluridine-3'-phosphate
  modified_base 21: mod_base = OTHER; note = 2'-O-methyladenosine
acagcaagtcataaaagtata

SEQ ID NO: 4465 - RNA, 21 nt, synthetic construct
  source 1..21: mol_type = other RNA
  modified_base 1: mod_base = OTHER; note = 2'-O-methylcytidine-3'-phosphate
  modified_base 2: mod_base = OTHER; note = 2'-O-methyladenosine-3'-phosphate
  modified_base 3: mod_base = OTHER; note = 2'-O-methylguanosine-3'-phosphate
  modified_base 4: mod_base = OTHER; note = 2'-O-methylcytidine-3'-phosphate
  modified_base 5: mod_base = OTHER; note = 2'-O-methyladenosine-3'-phosphate
  modified_base 6: mod_base = OTHER; note = 2'-O-methyladenosine-3'-phosphate
  modified_base 7: mod_base = OTHER; note = 2'-deoxy-2'-fluoroguanosine-3'-phosphate
  modified_base 8: mod_base = OTHER; note = 2'-O-methyluridine-3'-phosphate
  modified_base 9: mod_base = OTHER; note = 2'-deoxy-2'-fluorocytidine-3'-phosphate
  modified_base 10: mod_base = OTHER; note = 2'-deoxy-2'-fluoroadenosine-3'-phosphate
  modified_base 11: mod_base = OTHER; note = 2'-deoxy-2'-fluorouridine-3'-phosphate
  modified_base 12: mod_base = OTHER; note = 2'-O-methyladenosine-3'-phosphate
  modified_base 13: mod_base = OTHER; note = 2'-O-methyladenosine-3'-phosphate
  modified_base 14: mod_base = OTHER; note = 2'-O-methyladenosine-3'-phosphate
  modified_base 15: mod_base = OTHER; note = 2'-O-methyladenosine-3'-phosphate
  modified_base 16: mod_base = OTHER; note = 2'-O-methylguanosine-3'-phosphate
  modified_base 17: mod_base = OTHER; note = 2'-O-methyluridine-3'-phosphate
  modified_base 18: mod_base = OTHER; note = 2'-O-methyladenosine-3'-phosphate
  modified_base 19: mod_base = OTHER; note = 2'-O-methyluridine-3'-phosphate
  modified_base 20: mod_base = OTHER; note = 2'-O-methyluridine-3'-phosphate
  modified_base 21: mod_base = OTHER; note = 2'-O-methyladenosine
cagcaagtcataaaagtatta

SEQ ID NO: 4466 - RNA, 21 nt, synthetic construct
  source 1..21: mol_type = other RNA
  modified_base 1: mod_base = OTHER; note = 2'-O-methyladenosine-3'-phosphate
  modified_base 2: mod_base = OTHER; note = 2'-O-methylguanosine-3'-phosphate
  modified_base 3: mod_base = OTHER; note = 2'-O-methylcytidine-3'-phosphate
  modified_base 4: mod_base = OTHER; note = 2'-O-methyladenosine-3'-phosphate
  modified_base 5: mod_base = OTHER; note = 2'-O-methyladenosine-3'-phosphate
  modified_base 6: mod_base = OTHER; note = 2'-O-methylguanosine-3'-phosphate
  modified_base 7: mod_base = OTHER; note = 2'-deoxy-2'-fluorouridine-3'-phosphate
  modified_base 8: mod_base = OTHER; note = 2'-O-methylcytidine-3'-phosphate
  modified_base 9: mod_base = OTHER; note = 2'-deoxy-2'-fluoroadenosine-3'-phosphate
  modified_base 10: mod_base = OTHER; note = 2'-deoxy-2'-fluorouridine-3'-phosphate
  modified_base 11: mod_base = OTHER; note = 2'-deoxy-2'-fluoroadenosine-3'-phosphate
  modified_base 12: mod_base = OTHER; note = 2'-O-methyladenosine-3'-phosphate
  modified_base 13: mod_base = OTHER; note = 2'-O-methyladenosine-3'-phosphate
  modified_base 14: mod_base = OTHER; note = 2'-O-methyladenosine-3'-phosphate
  modified_base 15: mod_base = OTHER; note = 2'-O-methylguanosine-3'-phosphate
  modified_base 16: mod_base = OTHER; note = 2'-O-methyluridine-3'-phosphate
  modified_base 17: mod_base = OTHER; note = 2'-O-methyladenosine-3'-phosphate
  modified_base 18: mod_base = OTHER; note = 2'-O-methyluridine-3'-phosphate
  modified_base 19: mod_base = OTHER; note = 2'-O-methyluridine-3'-phosphate
  modified_base 20: mod_base = OTHER; note = 2'-O-methyluridine-3'-phosphate
  modified_base 21: mod_base = OTHER; note = 2'-O-methyladenosine
agcaagtcataaaagtattta

SEQ ID NO: 4467 - RNA, 21 nt, synthetic construct
  source 1..21: mol_type = other RNA
  modified_base 1: mod_base = OTHER; note = 2'-O-methylguanosine-3'-phosphate
  modified_base 2: mod_base = OTHER; note = 2'-O-methylcytidine-3'-phosphate
  modified_base 3: mod_base = OTHER; note = 2'-O-methyladenosine-3'-phosphate
  modified_base 4: mod_base = OTHER; note = 2'-O-methyladenosine-3'-phosphate
  modified_base 5: mod_base = OTHER; note = 2'-O-methylguanosine-3'-phosphate
  modified_base 6: mod_base = OTHER; note = 2'-O-methyluridine-3'-phosphate
  modified_base 7: mod_base = OTHER; note = 2'-deoxy-2'-fluorocytidine-3'-phosphate
  modified_base 8: mod_base = OTHER; note = 2'-O-methyladenosine-3'-phosphate
  modified_base 9: mod_base = OTHER; note = 2'-deoxy-2'-fluorouridine-3'-phosphate
  modified_base 10: mod_base = OTHER; note = 2'-deoxy-2'-fluoroadenosine-3'-phosphate
  modified_base 11: mod_base = OTHER; note = 2'-deoxy-2'-fluoroadenosine-3'-phosphate
  modified_base 12: mod_base = OTHER; note = 2'-O-methyladenosine-3'-phosphate
  modified_base 13: mod_base = OTHER; note = 2'-O-methyladenosine-3'-phosphate
  modified_base 14: mod_base = OTHER; note = 2'-O-methylguanosine-3'-phosphate
  modified_base 15: mod_base = OTHER; note = 2'-O-methyluridine-3'-phosphate
  modified_base 16: mod_base = OTHER; note = 2'-O-methyladenosine-3'-phosphate
  modified_base 17: mod_base = OTHER; note = 2'-O-methyluridine-3'-phosphate
  modified_base 18: mod_base = OTHER; note = 2'-O-methyluridine-3'-phosphate
  modified_base 19: mod_base = OTHER; note = 2'-O-methyluridine-3'-phosphate
  modified_base 20: mod_base = OTHER; note = 2'-O-methyladenosine-3'-phosphate
  modified_base 21: mod_base = OTHER; note = 2'-O-methyladenosine
gcaagtcataaaagtatttaa

SEQ ID NO: 4468 - RNA, 21 nt, synthetic construct
  source 1..21: mol_type = other RNA
  modified_base 1: mod_base = OTHER; note = 2'-O-methylguanosine-3'-phosphate
  modified_base 2: mod_base = OTHER; note = 2'-O-methyluridine-3'-phosphate
  modified_base 3: mod_base = OTHER; note = 2'-O-methylcytidine-3'-phosphate
  modified_base 4: mod_base = OTHER; note = 2'-O-methyluridine-3'-phosphate
  modified_base 5: mod_base = OTHER; note = 2'-O-methyluridine-3'-phosphate
  modified_base 6: mod_base = OTHER; note = 2'-O-methylcytidine-3'-phosphate
  modified_base 7: mod_base = OTHER; note = 2'-deoxy-2'-fluoroadenosine-3'-phosphate
  modified_base 8: mod_base = OTHER; note = 2'-O-methylguanosine-3'-phosphate
  modified_base 9: mod_base = OTHER; note = 2'-deoxy-2'-fluoroadenosine-3'-phosphate
  modified_base 10: mod_base = OTHER; note = 2'-deoxy-2'-fluorouridine-3'-phosphate
  modified_base 11: mod_base = OTHER; note = 2'-deoxy-2'-fluoroguanosine-3'-phosphate
  modified_base 12: mod_base = OTHER; note = 2'-O-methyluridine-3'-phosphate
  modified_base 13: mod_base = OTHER; note = 2'-O-methyladenosine-3'-phosphate
  modified_base 14: mod_base = OTHER; note = 2'-O-methyladenosine-3'-phosphate
  modified_base 15: mod_base = OTHER; note = 2'-O-methyladenosine-3'-phosphate
  modified_base 16: mod_base = OTHER; note = 2'-O-methyluridine-3'-phosphate
  modified_base 17: mod_base = OTHER; note = 2'-O-methyladenosine-3'-phosphate
  modified_base 18: mod_base = OTHER; note = 2'-O-methyladenosine-3'-phosphate
  modified_base 19: mod_base = OTHER; note = 2'-O-methyluridine-3'-phosphate
  modified_base 20: mod_base = OTHER; note = 2'-O-methyluridine-3'-phosphate
  modified_base 21: mod_base = OTHER; note = 2'-O-methyladenosine
gtcttcagatgtaaataatta

SEQ ID NO: 4469 - RNA, 21 nt, synthetic construct
  source 1..21: mol_type = other RNA
  modified_base 1: mod_base = OTHER; note = 2'-O-methylcytidine-3'-phosphate
  modified_base 2: mod_base = OTHER; note = 2'-O-methyladenosine-3'-phosphate
  modified_base 3: mod_base = OTHER; note = 2'-O-methyluridine-3'-phosphate
  modified_base 4: mod_base = OTHER; note = 2'-O-methyluridine-3'-phosphate
  modified_base 5: mod_base = OTHER; note = 2'-O-methyluridine-3'-phosphate
  modified_base 6: mod_base = OTHER; note = 2'-O-methyluridine-3'-phosphate
  modified_base 7: mod_base = OTHER; note = 2'-deoxy-2'-fluorocytidine-3'-phosphate
  modified_base 8: mod_base = OTHER; note = 2'-O-methyluridine-3'-phosphate
  modified_base 9: mod_base = OTHER; note = 2'-deoxy-2'-fluoroguanosine-3'-phosphate
  modified_base 10: mod_base = OTHER; note = 2'-deoxy-2'-fluoroadenosine-3'-phosphate
  modified_base 11: mod_base = OTHER; note = 2'-deoxy-2'-fluoroadenosine-3'-phosphate
  modified_base 12: mod_base = OTHER; note = 2'-O-methyladenosine-3'-phosphate
  modified_base 13: mod_base = OTHER; note = 2'-O-methyladenosine-3'-phosphate
  modified_base 14: mod_base = OTHER; note = 2'-O-methyluridine-3'-phosphate
  modified_base 15: mod_base = OTHER; note = 2'-O-methylguanosine-3'-phosphate
  modified_base 16: mod_base = OTHER; note = 2'-O-methyluridine-3'-phosphate
  modified_base 17: mod_base = OTHER; note = 2'-O-methyladenosine-3'-phosphate
  modified_base 18: mod_base = OTHER; note = 2'-O-methyluridine-3'-phosphate
  modified_base 19: mod_base = OTHER; note = 2'-O-methyluridine-3'-phosphate
  modified_base 20: mod_base = OTHER; note = 2'-O-methylguanosine-3'-phosphate
  modified_base 21: mod_base = OTHER; note = 2'-O-methyladenosine
cattttctgaaaatgtattga

SEQ ID NO: 4470 - RNA, 21 nt, synthetic construct
  source 1..21: mol_type = other RNA
  modified_base 1: mod_base = OTHER; note = 2'-O-methylcytidine-3'-phosphate
  modified_base 2: mod_base = OTHER; note = 2'-O-methyluridine-3'-phosphate
  modified_base 3: mod_base = OTHER; note = 2'-O-methylguanosine-3'-phosphate
  modified_base 4: mod_base = OTHER; note = 2'-O-methyluridine-3'-phosphate
  modified_base 5: mod_base = OTHER; note = 2'-O-methylguanosine-3'-phosphate
  modified_base 6: mod_base = OTHER; note = 2'-O-methyladenosine-3'-phosphate
  modified_base 7: mod_base = OTHER; note = 2'-deoxy-2'-fluoroadenosine-3'-phosphate
  modified_base 8: mod_base = OTHER; note = 2'-O-methylguanosine-3'-phosphate
  modified_base 9: mod_base = OTHER; note = 2'-deoxy-2'-fluorocytidine-3'-phosphate
  modified_base 10: mod_base = OTHER; note = 2'-deoxy-2'-fluoroadenosine-3'-phosphate
  modified_base 11: mod_base = OTHER; note = 2'-deoxy-2'-fluorouridine-3'-phosphate
  modified_base 12: mod_base = OTHER; note = 2'-O-methyladenosine-3'-phosphate
  modified_base 13: mod_base = OTHER; note = 2'-O-methyluridine-3'-phosphate
  modified_base 14: mod_base = OTHER; note = 2'-O-methyladenosine-3'-phosphate
  modified_base 15: mod_base = OTHER; note = 2'-O-methylguanosine-3'-phosphate
  modified_base 16: mod_base = OTHER; note = 2'-O-methyladenosine-3'-phosphate
  modified_base 17: mod_base = OTHER; note = 2'-O-methyladenosine-3'-phosphate
  modified_base 18: mod_base = OTHER; note = 2'-O-methylcytidine-3'-phosphate
  modified_base 19: mod_base = OTHER; note = 2'-O-methyluridine-3'-phosphate
  modified_base 20: mod_base = OTHER; note = 2'-O-methylcytidine-3'-phosphate
  modified_base 21: mod_base = OTHER; note = 2'-O-methyladenosine
ctgtgaagcatatagaactca

SEQ ID NO: 4471 - RNA, 21 nt, synthetic construct
  source 1..21: mol_type = other RNA
  modified_base 1: mod_base = OTHER; note = 2'-O-methyluridine-3'-phosphate
  modified_base 2: mod_base = OTHER; note = 2'-O-methylguanosine-3'-phosphate
  modified_base 3: mod_base = OTHER; note = 2'-O-methyluridine-3'-phosphate
  modified_base 4: mod_base = OTHER; note = 2'-O-methylguanosine-3'-phosphate
  modified_base 5: mod_base = OTHER; note = 2'-O-methyladenosine-3'-phosphate
  modified_base 6: mod_base = OTHER; note = 2'-O-methyladenosine-3'-phosphate
  modified_base 7: mod_base = OTHER; note = 2'-deoxy-2'-fluoroguanosine-3'-phosphate
  modified_base 8: mod_base = OTHER; note = 2'-O-methylcytidine-3'-phosphate
  modified_base 9: mod_base = OTHER; note = 2'-deoxy-2'-fluoroadenosine-3'-phosphate
  modified_base 10: mod_base = OTHER; note = 2'-deoxy-2'-fluorouridine-3'-phosphate
  modified_base 11: mod_base = OTHER; note = 2'-deoxy-2'-fluoroadenosine-3'-phosphate
  modified_base 12: mod_base = OTHER; note = 2'-O-methyluridine-3'-phosphate
  modified_base 13: mod_base = OTHER; note = 2'-O-methyladenosine-3'-phosphate
  modified_base 14: mod_base = OTHER; note = 2'-O-methylguanosine-3'-phosphate
  modified_base 15: mod_base = OTHER; note = 2'-O-methyladenosine-3'-phosphate
  modified_base 16: mod_base = OTHER; note = 2'-O-methyladenosine-3'-phosphate
  modified_base 17: mod_base = OTHER; note = 2'-O-methylcytidine-3'-phosphate
  modified_base 18: mod_base = OTHER; note = 2'-O-methyluridine-3'-phosphate
  modified_base 19: mod_base = OTHER; note = 2'-O-methylcytidine-3'-phosphate
  modified_base 20: mod_base = OTHER; note = 2'-O-methyluridine-3'-phosphate
  modified_base 21: mod_base = OTHER; note = 2'-O-methyladenosine
tgtgaagcatatagaactcta

SEQ ID NO: 4472 - RNA, 21 nt, synthetic construct
  source 1..21: mol_type = other RNA
  modified_base 1: mod_base = OTHER; note = 2'-O-methylguanosine-3'-phosphate
  modified_base 2: mod_base = OTHER; note = 2'-O-methyluridine-3'-phosphate
  modified_base 3: mod_base = OTHER; note = 2'-O-methylguanosine-3'-phosphate
  modified_base 4: mod_base = OTHER; note = 2'-O-methyladenosine-3'-phosphate
  modified_base 5: mod_base = OTHER; note = 2'-O-methyladenosine-3'-phosphate
  modified_base 6: mod_base = OTHER; note = 2'-O-methylguanosine-3'-phosphate
  modified_base 7: mod_base = OTHER; note = 2'-deoxy-2'-fluorocytidine-3'-phosphate
  modified_base 8: mod_base = OTHER; note = 2'-O-methyladenosine-3'-phosphate
  modified_base 9: mod_base = OTHER; note = 2'-deoxy-2'-fluorouridine-3'-phosphate
  modified_base 10: mod_base = OTHER; note = 2'-deoxy-2'-fluoroadenosine-3'-phosphate
  modified_base 11: mod_base = OTHER; note = 2'-deoxy-2'-fluorouridine-3'-phosphate
  modified_base 12: mod_base = OTHER; note = 2'-O-methyladenosine-3'-phosphate
  modified_base 13: mod_base = OTHER; note = 2'-O-methylguanosine-3'-phosphate
  modified_base 14: mod_base = OTHER; note = 2'-O-methyladenosine-3'-phosphate
  modified_base 15: mod_base = OTHER; note = 2'-O-methyladenosine-3'-phosphate
  modified_base 16: mod_base = OTHER; note = 2'-O-methylcytidine-3'-phosphate
  modified_base 17: mod_base = OTHER; note = 2'-O-methyluridine-3'-phosphate
  modified_base 18: mod_base = OTHER; note = 2'-O-methylcytidine-3'-phosphate
  modified_base 19: mod_base = OTHER; note = 2'-O-methyluridine-3'-phosphate
  modified_base 20: mod_base = OTHER; note = 2'-O-methyladenosine-3'-phosphate
  modified_base 21: mod_base = OTHER; note = 2'-O-methyladenosine
gtgaagcatatagaactctaa

SEQ ID NO: 4473 - RNA, 21 nt, synthetic construct
  source 1..21: mol_type = other RNA
  modified_base 1: mod_base = OTHER; note = 2'-O-methyluridine-3'-phosphate
  modified_base 2: mod_base = OTHER; note = 2'-O-methylguanosine-3'-phosphate
  modified_base 3: mod_base = OTHER; note = 2'-O-methyladenosine-3'-phosphate
  modified_base 4: mod_base = OTHER; note = 2'-O-methyladenosine-3'-phosphate
  modified_base 5: mod_base = OTHER; note = 2'-O-methylguanosine-3'-phosphate
  modified_base 6: mod_base = OTHER; note = 2'-O-methylcytidine-3'-phosphate
  modified_base 7: mod_base = OTHER; note = 2'-deoxy-2'-fluoroadenosine-3'-phosphate
  modified_base 8: mod_base = OTHER; note = 2'-O-methyluridine-3'-phosphate
  modified_base 9: mod_base = OTHER; note = 2'-deoxy-2'-fluoroadenosine-3'-phosphate
  modified_base 10: mod_base = OTHER; note = 2'-deoxy-2'-fluorouridine-3'-phosphate
  modified_base 11: mod_base = OTHER; note = 2'-deoxy-2'-fluoroadenosine-3'-phosphate
  modified_base 12: mod_base = OTHER; note = 2'-O-methylguanosine-3'-phosphate
  modified_base 13: mod_base = OTHER; note = 2'-O-methyladenosine-3'-phosphate
  modified_base 14: mod_base = OTHER; note = 2'-O-methyladenosine-3'-phosphate
  modified_base 15: mod_base = OTHER; note = 2'-O-methylcytidine-3'-phosphate
  modified_base 16: mod_base = OTHER; note = 2'-O-methyluridine-3'-phosphate
  modified_base 17: mod_base = OTHER; note = 2'-O-methylcytidine-3'-phosphate
  modified_base 18: mod_base = OTHER; note = 2'-O-methyluridine-3'-phosphate
  modified_base 19: mod_base = OTHER; note = 2'-O-methyladenosine-3'-phosphate
  modified_base 20: mod_base = OTHER; note = 2'-O-methyluridine-3'-phosphate
  modified_base 21: mod_base = OTHER; note = 2'-O-methyladenosine
tgaagcatatagaactctata

SEQ ID NO: 4474 - RNA, 21 nt, synthetic construct
  source 1..21: mol_type = other RNA
  modified_base 1: mod_base = OTHER; note = 2'-O-methylguanosine-3'-phosphate
  modified_base 2: mod_base = OTHER; note = 2'-O-methyladenosine-3'-phosphate
  modified_base 3: mod_base = OTHER; note = 2'-O-methyladenosine-3'-phosphate
  modified_base 4: mod_base = OTHER; note = 2'-O-methylguanosine-3'-phosphate
  modified_base 5: mod_base = OTHER; note = 2'-O-methylcytidine-3'-phosphate
  modified_base 6: mod_base = OTHER; note = 2'-O-methyladenosine-3'-phosphate
  modified_base 7: mod_base = OTHER; note = 2'-deoxy-2'-fluorouridine-3'-phosphate
  modified_base 8: mod_base = OTHER; note = 2'-O-methyladenosine-3'-phosphate
  modified_base 9: mod_base = OTHER; note = 2'-deoxy-2'-fluorouridine-3'-phosphate
  modified_base 10: mod_base = OTHER; note = 2'-deoxy-2'-fluoroadenosine-3'-phosphate
  modified_base 11: mod_base = OTHER; note = 2'-deoxy-2'-fluoroguanosine-3'-phosphate
  modified_base 12: mod_base = OTHER; note = 2'-O-methyladenosine-3'-phosphate
  modified_base 13: mod_base = OTHER; note = 2'-O-methyladenosine-3'-phosphate
  modified_base 14: mod_base = OTHER; note = 2'-O-methylcytidine-3'-phosphate
  modified_base 15: mod_base = OTHER; note = 2'-O-methyluridine-3'-phosphate
  modified_base 16: mod_base = OTHER; note = 2'-O-methylcytidine-3'-phosphate
  modified_base 17: mod_base = OTHER; note = 2'-O-methyluridine-3'-phosphate
  modified_base 18: mod_base = OTHER; note = 2'-O-methyladenosine-3'-phosphate
  modified_base 19: mod_base = OTHER; note = 2'-O-methyluridine-3'-phosphate
  modified_base 20: mod_base = OTHER; note = 2'-O-methyluridine-3'-phosphate
  modified_base 21: mod_base = OTHER; note = 2'-O-methyladenosine
gaagcatatagaactctatta

SEQ ID NO: 4475 - RNA, 21 nt, synthetic construct
  source 1..21: mol_type = other RNA
  modified_base 1: mod_base = OTHER; note = 2'-O-methyladenosine-3'-phosphate
  modified_base 2: mod_base = OTHER; note = 2'-O-methyladenosine-3'-phosphate
  modified_base 3: mod_base = OTHER; note = 2'-O-methylguanosine-3'-phosphate
  modified_base 4: mod_base = OTHER; note = 2'-O-methylcytidine-3'-phosphate
  modified_base 5: mod_base = OTHER; note = 2'-O-methyladenosine-3'-phosphate
  modified_base 6: mod_base = OTHER; note = 2'-O-methyluridine-3'-phosphate
  modified_base 7: mod_base = OTHER; note = 2'-deoxy-2'-fluoroadenosine-3'-phosphate
  modified_base 8: mod_base = OTHER; note = 2'-O-methyluridine-3'-phosphate
  modified_base 9: mod_base = OTHER; note = 2'-deoxy-2'-fluoroadenosine-3'-phosphate
  modified_base 10: mod_base = OTHER; note = 2'-deoxy-2'-fluoroguanosine-3'-phosphate
  modified_base 11: mod_base = OTHER; note = 2'-deoxy-2'-fluoroadenosine-3'-phosphate
  modified_base 12: mod_base = OTHER; note = 2'-O-methyladenosine-3'-phosphate
  modified_base 13: mod_base = OTHER; note = 2'-O-methylcytidine-3'-phosphate
  modified_base 14: mod_base = OTHER; note = 2'-O-methyluridine-3'-phosphate
  modified_base 15: mod_base = OTHER; note = 2'-O-methylcytidine-3'-phosphate
  modified_base 16: mod_base = OTHER; note = 2'-O-methyluridine-3'-phosphate
  modified_base 17: mod_base = OTHER; note = 2'-O-methyladenosine-3'-phosphate
  modified_base 18: mod_base = OTHER; note = 2'-O-methyluridine-3'-phosphate
  modified_base 19: mod_base = OTHER; note = 2'-O-methyluridine-3'-phosphate
  modified_base 20: mod_base = OTHER; note = 2'-O-methyluridine-3'-phosphate
  modified_base 21: mod_base = OTHER; note = 2'-O-methyladenosine
aagcatatagaactctattta

SEQ ID NO: 4476 - RNA, 21 nt, synthetic construct
  source 1..21: mol_type = other RNA
  modified_base 1: mod_base = OTHER; note = 2'-O-methyladenosine-3'-phosphate
  modified_base 2: mod_base = OTHER; note = 2'-O-methylguanosine-3'-phosphate
  modified_base 3: mod_base = OTHER; note = 2'-O-methylcytidine-3'-phosphate
  modified_base 4: mod_base = OTHER; note = 2'-O-methyladenosine-3'-phosphate
  modified_base 5: mod_base = OTHER; note = 2'-O-methyluridine-3'-phosphate
  modified_base 6: mod_base = OTHER; note = 2'-O-methyladenosine-3'-phosphate
  modified_base 7: mod_base = OTHER; note = 2'-deoxy-2'-fluorouridine-3'-phosphate
  modified_base 8: mod_base = OTHER; note = 2'-O-methyladenosine-3'-phosphate
  modified_base 9: mod_base = OTHER; note = 2'-deoxy-2'-fluoroguanosine-3'-phosphate
  modified_base 10: mod_base = OTHER; note = 2'-deoxy-2'-fluoroadenosine-3'-phosphate
  modified_base 11: mod_base = OTHER; note = 2'-deoxy-2'-fluoroadenosine-3'-phosphate
  modified_base 12: mod_base = OTHER; note = 2'-O-methylcytidine-3'-phosphate
  modified_base 13: mod_base = OTHER; note = 2'-O-methyluridine-3'-phosphate
  modified_base 14: mod_base = OTHER; note = 2'-O-methylcytidine-3'-phosphate
  modified_base 15: mod_base = OTHER; note = 2'-O-methyluridine-3'-phosphate
  modified_base 16: mod_base = OTHER; note = 2'-O-methyladenosine-3'-phosphate
  modified_base 17: mod_base = OTHER; note = 2'-O-methyluridine-3'-phosphate
  modified_base 18: mod_base = OTHER; note = 2'-O-methyluridine-3'-phosphate
  modified_base 19: mod_base = OTHER; note = 2'-O-methyluridine-3'-phosphate
  modified_base 20: mod_base = OTHER; note = 2'-O-methyluridine-3'-phosphate
  modified_base 21: mod_base = OTHER; note = 2'-O-methyladenosine
agcatatagaactctatttta

SEQ ID NO: 4477 - RNA, 21 nt, synthetic construct
  source 1..21: mol_type = other RNA
  modified_base 1: mod_base = OTHER; note = 2'-O-methyluridine-3'-phosphate
  modified_base 2: mod_base = OTHER; note = 2'-O-methyladenosine-3'-phosphate
  modified_base 3: mod_base = OTHER; note = 2'-O-methyladenosine-3'-phosphate
  modified_base 4: mod_base = OTHER; note = 2'-O-methyladenosine-3'-phosphate
  modified_base 5: mod_base = OTHER; note = 2'-O-methyluridine-3'-phosphate
  modified_base 6: mod_base = OTHER; note = 2'-O-methyladenosine-3'-phosphate
  modified_base 7: mod_base = OTHER; note = 2'-deoxy-2'-fluoroadenosine-3'-phosphate
  modified_base 8: mod_base = OTHER; note = 2'-O-methyladenosine-3'-phosphate
  modified_base 9: mod_base = OTHER; note = 2'-deoxy-2'-fluoroguanosine-3'-phosphate
  modified_base 10: mod_base = OTHER; note = 2'-deoxy-2'-fluoroguanosine-3'-phosphate
  modified_base 11: mod_base = OTHER; note = 2'-deoxy-2'-fluoroadenosine-3'-phosphate
  modified_base 12: mod_base = OTHER; note = 2'-O-methyladenosine-3'-phosphate
  modified_base 13: mod_base = OTHER; note = 2'-O-methylguanosine-3'-phosphate
  modified_base 14: mod_base = OTHER; note = 2'-O-methyladenosine-3'-phosphate
  modified_base 15: mod_base = OTHER; note = 2'-O-methyluridine-3'-phosphate
  modified_base 16: mod_base = OTHER; note = 2'-O-methylguanosine-3'-phosphate
  modified_base 17: mod_base = OTHER; note = 2'-O-methyluridine-3'-phosphate
  modified_base 18: mod_base = OTHER; note = 2'-O-methylguanosine-3'-phosphate
  modified_base 19: mod_base = OTHER; note = 2'-O-methyluridine-3'-phosphate
  modified_base 20: mod_base = OTHER; note = 2'-O-methylcytidine-3'-phosphate
  modified_base 21: mod_base = OTHER; note = 2'-O-methyladenosine
taaataaaggaagatgtgtca

SEQ ID NO: 4478 - RNA, 23 nt, synthetic construct
  source 1..23: mol_type = other RNA
  modified_base 1: mod_base = OTHER; note = 2'-O-methyluridine-3'-phosphate 5'-(E)-Vinylphosphonate
  modified_base 2: mod_base = OTHER; note = 2'-deoxy-2'-fluorouridine-3'-phosphate
  modified_base 3: mod_base = OTHER; note = 2'-O-methyluridine-3'-phosphate
  modified_base 4: mod_base = OTHER; note = 2'-O-methyluridine-3'-phosphate
  modified_base 5: mod_base = OTHER; note = 2'-O-methyluridine-3'-phosphate
  modified_base 6: mod_base = OTHER; note = 2'-deoxy-2'-fluoroguanosine-3'-phosphate
  modified_base 7: mod_base = OTHER; note = 2'-O-methyladenosine-3'-phosphate
  modified_base 8: mod_base = OTHER; note = 2'-O-methyladenosine-3'-phosphate
  modified_base 9: mod_base = OTHER; note = 2'-O-methylguanosine-3'-phosphate
  modified_base 10: mod_base = OTHER; note = 2'-O-methyluridine-3'-phosphate
  modified_base 11: mod_base = OTHER; note = 2'-O-methylguanosine-3'-phosphate
  modified_base 12: mod_base = OTHER; note = 2'-O-methylcytidine-3'-phosphate
  modified_base 13: mod_base = OTHER; note = 2'-O-methylguanosine-3'-phosphate
  modified_base 14: mod_base = OTHER; note = 2'-deoxy-2'-fluorocytidine-3'-phosphate
  modified_base 15: mod_base = OTHER; note = 2'-O-methylguanosine-3'-phosphate
  modified_base 16: mod_base = OTHER; note = 2'-deoxy-2'-fluoroguanosine-3'-phosphate
  modified_base 17: mod_base = OTHER; note = 2'-O-methyluridine-3'-phosphate
  modified_base 18: mod_base = OTHER; note = 2'-O-methyluridine-3'-phosphate
  modified_base 19: mod_base = OTHER; note = 2'-O-methylguanosine-3'-phosphate
  modified_base 20: mod_base = OTHER; note = 2'-O-methylguanosine-3'-phosphate
  modified_base 21: mod_base = OTHER; note = 2'-O-methylcytidine-3'-phosphate
  modified_base 22: mod_base = OTHER; note = 2'-O-methyluridine-3'-phosphate
  modified_base 23: mod_base = OTHER; note = 2'-O-methylcytidine
tttttgaagtgcgcggttggctc

SEQ ID NO: 4479 - RNA, 23 nt, synthetic construct
  source 1..23: mol_type = other RNA
  modified_base 1: mod_base = OTHER; note = 2'-O-methyluridine-3'-phosphate 5'-(E)-Vinylphosphonate
  modified_base 2: mod_base = OTHER; note = 2'-deoxy-2'-fluorocytidine-3'-phosphate
  modified_base 3: mod_base = OTHER; note = 2'-O-methyluridine-3'-phosphate
  modified_base 4: mod_base = OTHER; note = 2'-O-methyluridine-3'-phosphate
  modified_base 5: mod_base = OTHER; note = 2'-O-methyluridine-3'-phosphate
  modified_base 6: mod_base = OTHER; note = 2'-deoxy-2'-fluorouridine-3'-phosphate
  modified_base 7: mod_base = OTHER; note = 2'-O-methylguanosine-3'-phosphate
  modified_base 8: mod_base = OTHER; note = 2'-O-methyladenosine-3'-phosphate
  modified_base 9: mod_base = OTHER; note = 2'-O-methyladenosine-3'-phosphate
  modified_base 10: mod_base = OTHER; note = 2'-O-methylguanosine-3'-phosphate
  modified_base 11: mod_base = OTHER; note = 2'-O-methyluridine-3'-phosphate
  modified_base 12: mod_base = OTHER; note = 2'-O-methylguanosine-3'-phosphate
  modified_base 13: mod_base = OTHER; note = 2'-O-methylcytidine-3'-phosphate
  modified_base 14: mod_base = OTHER; note = 2'-deoxy-2'-fluoroguanosine-3'-phosphate
  modified_base 15: mod_base = OTHER; note = 2'-O-methylcytidine-3'-phosphate
  modified_base 16: mod_base = OTHER; note = 2'-deoxy-2'-fluoroguanosine-3'-phosphate
  modified_base 17: mod_base = OTHER; note = 2'-O-methylguanosine-3'-phosphate
  modified_base 18: mod_base = OTHER; note = 2'-O-methyluridine-3'-phosphate
  modified_base 19: mod_base = OTHER; note = 2'-O-methyluridine-3'-phosphate
  modified_base 20: mod_base = OTHER; note = 2'-O-methylguanosine-3'-phosphate
  modified_base 21: mod_base = OTHER; note = 2'-O-methylguanosine-3'-phosphate
  modified_base 22: mod_base = OTHER; note = 2'-O-methylcytidine-3'-phosphate
  modified_base 23: mod_base = OTHER; note = 2'-O-methyluridine
tcttttgaagtgcgcggttggct

SEQ ID NO: 4480 - RNA, 23 nt, synthetic construct
  source 1..23: mol_type = other RNA
  modified_base 1: mod_base = OTHER; note = 2'-O-methyluridine-3'-phosphate 5'-(E)-Vinylphosphonate
  modified_base 2: mod_base = OTHER; note = 2'-deoxy-2'-fluorocytidine-3'-phosphate
  modified_base 3: mod_base = OTHER; note = 2'-O-methylcytidine-3'-phosphate
  modified_base 4: mod_base = OTHER; note = 2'-O-methyluridine-3'-phosphate
  modified_base 5: mod_base = OTHER; note = 2'-O-methyluridine-3'-phosphate
  modified_base 6: mod_base = OTHER; note = 2'-deoxy-2'-fluorouridine-3'-phosphate
  modified_base 7: mod_base = OTHER; note = 2'-O-methyluridine-3'-phosphate
  modified_base 8: mod_base = OTHER; note = 2'-O-methylguanosine-3'-phosphate
  modified_base 9: mod_base = OTHER; note = 2'-O-methyladenosine-3'-phosphate
  modified_base 10: mod_base = OTHER; note = 2'-O-methyladenosine-3'-phosphate
  modified_base 11: mod_base = OTHER; note = 2'-O-methylguanosine-3'-phosphate
  modified_base 12: mod_base = OTHER; note = 2'-O-methyluridine-3'-phosphate
  modified_base 13: mod_base = OTHER; note = 2'-O-methylguanosine-3'-phosphate
  modified_base 14: mod_base = OTHER; note = 2'-deoxy-2'-fluorocytidine-3'-phosphate
  modified_base 15: mod_base = OTHER; note = 2'-O-methylguanosine-3'-phosphate
  modified_base 16: mod_base = OTHER; note = 2'-deoxy-2'-fluorocytidine-3'-phosphate
  modified_base 17: mod_base = OTHER; note = 2'-O-methylguanosine-3'-phosphate
  modified_base 18: mod_base = OTHER; note = 2'-O-methylguanosine-3'-phosphate
  modified_base 19: mod_base = OTHER; note = 2'-O-methyluridine-3'-phosphate
  modified_base 20: mod_base = OTHER; note = 2'-O-methyluridine-3'-phosphate
  modified_base 21: mod_base = OTHER; note = 2'-O-methylguanosine-3'-phosphate
  modified_base 22: mod_base = OTHER; note = 2'-O-methylguanosine-3'-phosphate
  modified_base 23: mod_base = OTHER; note = 2'-O-methylcytidine
tccttttgaagtgcgcggttggc

SEQ ID NO: 4481 - RNA, 23 nt, synthetic construct
  source 1..23: mol_type = other RNA
  modified_base 1: mod_base = OTHER; note = 2'-O-methyluridine-3'-phosphate 5'-(E)-Vinylphosphonate
  modified_base 2: mod_base = OTHER; note = 2'-deoxy-2'-fluorocytidine-3'-phosphate
  modified_base 3: mod_base = OTHER; note = 2'-O-methylcytidine-3'-phosphate
  modified_base 4: mod_base = OTHER; note = 2'-O-methylcytidine-3'-phosphate
  modified_base 5: mod_base = OTHER; note = 2'-O-methyluridine-3'-phosphate
  modified_base 6: mod_base = OTHER; note = 2'-deoxy-2'-fluorouridine-3'-phosphate
  modified_base 7: mod_base = OTHER; note = 2'-O-methyluridine-3'-phosphate
  modified_base 8: mod_base = OTHER; note = 2'-O-methyluridine-3'-phosphate
  modified_base 9: mod_base = OTHER; note = 2'-O-methylguanosine-3'-phosphate
  modified_base 10: mod_base = OTHER; note = 2'-O-methyladenosine-3'-phosphate
  modified_base 11: mod_base = OTHER; note = 2'-O-methyladenosine-3'-phosphate
  modified_base 12: mod_base = OTHER; note = 2'-O-methylguanosine-3'-phosphate
  modified_base 13: mod_base = OTHER; note = 2'-O-methyluridine-3'-phosphate
  modified_base 14: mod_base = OTHER; note = 2'-deoxy-2'-fluoroguanosine-3'-phosphate
  modified_base 15: mod_base = OTHER; note = 2'-O-methylcytidine-3'-phosphate
  modified_base 16: mod_base = OTHER; note = 2'-deoxy-2'-fluoroguanosine-3'-phosphate
  modified_base 17: mod_base = OTHER; note = 2'-O-methylcytidine-3'-phosphate
  modified_base 18: mod_base = OTHER; note = 2'-O-methylguanosine-3'-phosphate
  modified_base 19: mod_base = OTHER; note = 2'-O-methylguanosine-3'-phosphate
  modified_base 20: mod_base = OTHER; note = 2'-O-methyluridine-3'-phosphate
  modified_base 21: mod_base = OTHER; note = 2'-O-methyluridine-3'-phosphate
  modified_base 22: mod_base = OTHER; note = 2'-O-methylguanosine-3'-phosphate
  modified_base 23: mod_base = OTHER; note = 2'-O-methylguanosine
tcccttttgaagtgcgcggttgg

SEQ ID NO: 4482 - RNA, 23 nt, synthetic construct
  source 1..23: mol_type = other RNA
  modified_base 1: mod_base = OTHER; note = 2'-O-methyluridine-3'-phosphate 5'-(E)-Vinylphosphonate
  modified_base 2: mod_base = OTHER; note = 2'-deoxy-2'-fluoroadenosine-3'-phosphate
  modified_base 3: mod_base = OTHER; note = 2'-O-methylcytidine-3'-phosphate
  modified_base 4: mod_base = OTHER; note = 2'-O-methylcytidine-3'-phosphate
  modified_base 5: mod_base = OTHER; note = 2'-O-methylcytidine-3'-phosphate
  modified_base 6: mod_base = OTHER; note = 2'-deoxy-2'-fluorouridine-3'-phosphate
  modified_base 7: mod_base = OTHER; note = 2'-O-methyluridine-3'-phosphate
  modified_base 8: mod_base = OTHER; note = 2'-O-methyluridine-3'-phosphate
  modified_base 9: mod_base = OTHER; note = 2'-O-methyluridine-3'-phosphate
  modified_base 10: mod_base = OTHER; note = 2'-O-methylguanosine-3'-phosphate
  modified_base 11: mod_base = OTHER; note = 2'-O-methyladenosine-3'-phosphate
  modified_base 12: mod_base = OTHER; note = 2'-O-methyladenosine-3'-phosphate
  modified_base 13: mod_base = OTHER; note = 2'-O-methylguanosine-3'-phosphate
  modified_base 14: mod_base = OTHER; note = 2'-deoxy-2'-fluorouridine-3'-phosphate
  modified_base 15: mod_base = OTHER; note = 2'-O-methylguanosine-3'-phosphate
  modified_base 16: mod_base = OTHER; note = 2'-deoxy-2'-fluorocytidine-3'-phosphate
  modified_base 17: mod_base = OTHER; note = 2'-O-methylguanosine-3'-phosphate
  modified_base 18: mod_base = OTHER; note = 2'-O-methylcytidine-3'-phosphate
  modified_base 19: mod_base = OTHER; note = 2'-O-methylguanosine-3'-phosphate
  modified_base 20: mod_base = OTHER; note = 2'-O-methylguanosine-3'-phosphate
  modified_base 21: mod_base = OTHER; note = 2'-O-methyluridine-3'-phosphate
  modified_base 22: mod_base = OTHER; note = 2'-O-methyluridine-3'-phosphate
  modified_base 23: mod_base = OTHER; note = 2'-O-methylguanosine
tacccttttgaagtgcgcggttg

SEQ ID NO: 4483 - RNA, 23 nt, synthetic construct
  source 1..23: mol_type = other RNA
  modified_base 1: mod_base = OTHER; note = 2'-O-methyluridine-3'-phosphate 5'-(E)-Vinylphosphonate
  modified_base 2: mod_base = OTHER; note = 2'-deoxy-2'-fluorocytidine-3'-phosphate
  modified_base 3: mod_base = OTHER; note = 2'-O-methyladenosine-3'-phosphate
  modified_base 4: mod_base = OTHER; note = 2'-O-methylcytidine-3'-phosphate
  modified_base 5: mod_base = OTHER; note = 2'-O-methylcytidine-3'-phosphate
  modified_base 6: mod_base = OTHER; note = 2'-deoxy-2'-fluorocytidine-3'-phosphate
  modified_base 7: mod_base = OTHER; note = 2'-O-methyluridine-3'-phosphate
  modified_base 8: mod_base = OTHER; note = 2'-O-methyluridine-3'-phosphate
  modified_base 9: mod_base = OTHER; note = 2'-O-methyluridine-3'-phosphate
  modified_base 10: mod_base = OTHER; note = 2'-O-methyluridine-3'-phosphate
  modified_base 11: mod_base = OTHER; note = 2'-O-methylguanosine-3'-phosphate
  modified_base 12: mod_base = OTHER; note = 2'-O-methyladenosine-3'-phosphate
  modified_base 13: mod_base = OTHER; note = 2'-O-methyladenosine-3'-phosphate
  modified_base 14: mod_base = OTHER; note = 2'-deoxy-2'-fluoroguanosine-3'-phosphate
  modified_base 15: mod_base = OTHER; note = 2'-O-methyluridine-3'-phosphate
  modified_base 16: mod_base = OTHER; note = 2'-deoxy-2'-fluoroguanosine-3'-phosphate
  modified_base 17: mod_base = OTHER; note = 2'-O-methylcytidine-3'-phosphate
  modified_base 18: mod_base = OTHER; note = 2'-O-methylguanosine-3'-phosphate
  modified_base 19: mod_base = OTHER; note = 2'-O-methylcytidine-3'-phosphate
  modified_base 20: mod_base = OTHER; note = 2'-O-methylguanosine-3'-phosphate
  modified_base 21: mod_base = OTHER; note = 2'-O-methylguanosine-3'-phosphate
  modified_base 22: mod_base = OTHER; note = 2'-O-methyluridine-3'-phosphate
  modified_base 23: mod_base = OTHER; note = 2'-O-methyluridine
tcacccttttgaagtgcgcggtt

SEQ ID NO: 4484 - RNA, 23 nt, synthetic construct
  source 1..23: mol_type = other RNA
  modified_base 1: mod_base = OTHER; note = 2'-O-methyluridine-3'-phosphate 5'-(E)-Vinylphosphonate
  modified_base 2: mod_base = OTHER; note = 2'-deoxy-2'-fluoroadenosine-3'-phosphate
  modified_base 3: mod_base = OTHER; note = 2'-O-methylcytidine-3'-phosphate
  modified_base 4: mod_base = OTHER; note = 2'-O-methyladenosine-3'-phosphate
  modified_base 5: mod_base = OTHER; note = 2'-O-methylcytidine-3'-phosphate
  modified_base 6: mod_base = OTHER; note = 2'-deoxy-2'-fluorocytidine-3'-phosphate
  modified_base 7: mod_base = OTHER; note = 2'-O-methylcytidine-3'-phosphate
  modified_base 8: mod_base = OTHER; note = 2'-O-methyluridine-3'-phosphate
  modified_base 9: mod_base = OTHER; note = 2'-O-methyluridine-3'-phosphate
  modified_base 10: mod_base = OTHER; note = 2'-O-methyluridine-3'-phosphate
  modified_base 11: mod_base = OTHER; note = 2'-O-methyluridine-3'-phosphate
  modified_base 12: mod_base = OTHER; note = 2'-O-methylguanosine-3'-phosphate
  modified_base 13: mod_base = OTHER; note = 2'-O-methyladenosine-3'-phosphate
  modified_base 14: mod_base = OTHER; note = 2'-deoxy-2'-fluoroadenosine-3'-phosphate
  modified_base 15: mod_base = OTHER; note = 2'-O-methylguanosine-3'-phosphate
  modified_base 16: mod_base = OTHER; note = 2'-deoxy-2'-fluorouridine-3'-phosphate
  modified_base 17: mod_base = OTHER; note = 2'-O-methylguanosine-3'-phosphate
  modified_base 18: mod_base = OTHER; note = 2'-O-methylcytidine-3'-phosphate
  modified_base 19: mod_base = OTHER; note = 2'-O-methylguanosine-3'-phosphate
  modified_base 20: mod_base = OTHER; note = 2'-O-methylcytidine-3'-phosphate
  modified_base 21: mod_base = OTHER; note = 2'-O-methylguanosine-3'-phosphate
  modified_base 22: mod_base = OTHER; note = 2'-O-methylguanosine-3'-phosphate
  modified_base 23: mod_base = OTHER; note = 2'-O-methyluridine
tacacccttttgaagtgcgcggt

SEQ ID NO: 4485 - RNA, 23 nt, synthetic construct
  source 1..23: mol_type = other RNA
  modified_base 1: mod_base = OTHER; note = 2'-O-methyluridine-3'-phosphate 5'-(E)-Vinylphosphonate
  modified_base 2: mod_base = OTHER; note = 2'-deoxy-2'-fluoroguanosine-3'-phosphate
  modified_base 3: mod_base = OTHER; note = 2'-O-methyladenosine-3'-phosphate
  modified_base 4: mod_base = OTHER; note = 2'-O-methylcytidine-3'-phosphate
  modified_base 5: mod_base = OTHER; note = 2'-O-methyladenosine-3'-phosphate
  modified_base 6: mod_base = OTHER; note = 2'-deoxy-2'-fluorocytidine-3'-phosphate
  modified_base 7: mod_base = OTHER; note = 2'-O-methylcytidine-3'-phosphate
  modified_base 8: mod_base = OTHER; note = 2'-O-methylcytidine-3'-phosphate
  modified_base 9: mod_base = OTHER; note = 2'-O-methyluridine-3'-phosphate
  modified_base 10: mod_base = OTHER; note = 2'-O-methyluridine-3'-phosphate
  modified_base 11: mod_base = OTHER; note = 2'-O-methyluridine-3'-phosphate
  modified_base 12: mod_base = OTHER; note = 2'-O-methyluridine-3'-phosphate
  modified_base 13: mod_base = OTHER; note = 2'-O-methylguanosine-3'-phosphate
  modified_base 14: mod_base = OTHER; note = 2'-deoxy-2'-fluoroadenosine-3'-phosphate
  modified_base 15: mod_base = OTHER; note = 2'-O-methyladenosine-3'-phosphate
  modified_base 16: mod_base = OTHER; note = 2'-deoxy-2'-fluoroguanosine-3'-phosphate
  modified_base 17: mod_base = OTHER; note = 2'-O-methyluridine-3'-phosphate
  modified_base 18: mod_base = OTHER; note = 2'-O-methylguanosine-3'-phosphate
  modified_base 19: mod_base = OTHER; note = 2'-O-methylcytidine-3'-phosphate
  modified_base 20: mod_base = OTHER; note = 2'-O-methylguanosine-3'-phosphate
  modified_base 21: mod_base = OTHER; note = 2'-O-methylcytidine-3'-phosphate
  modified_base 22: mod_base = OTHER; note = 2'-O-methylguanosine-3'-phosphate
  modified_base 23: mod_base = OTHER; note = 2'-O-methylguanosine
tgacacccttttgaagtgcgcgg

SEQ ID NO: 4486 - RNA, 23 nt, synthetic construct
  source 1..23: mol_type = other RNA
  modified_base 1: mod_base = OTHER; note = 2'-O-methyluridine-3'-phosphate 5'-(E)-Vinylphosphonate
  modified_base 2: mod_base = OTHER; note = 2'-deoxy-2'-fluorocytidine-3'-phosphate
  modified_base 3: mod_base = OTHER; note = 2'-O-methylguanosine-3'-phosphate
  modified_base 4: mod_base = OTHER; note = 2'-O-methyladenosine-3'-phosphate
  modified_base 5: mod_base = OTHER; note = 2'-O-methylcytidine-3'-phosphate
  modified_base 6: mod_base = OTHER; note = 2'-deoxy-2'-fluoroadenosine-3'-phosphate
  modified_base 7: mod_base = OTHER; note = 2'-O-methylcytidine-3'-phosphate
  modified_base 8: mod_base = OTHER; note = 2'-O-methylcytidine-3'-phosphate
  modified_base 9: mod_base = OTHER; note = 2'-O-methylcytidine-3'-phosphate
  modified_base 10: mod_base = OTHER; note = 2'-O-methyluridine-3'-phosphate
  modified_base 11: mod_base = OTHER; note = 2'-O-methyluridine-3'-phosphate
  modified_base 12: mod_base = OTHER; note = 2'-O-methyluridine-3'-phosphate
  modified_base 13: mod_base = OTHER; note = 2'-O-methyluridine-3'-phosphate
  modified_base 14: mod_base = OTHER; note = 2'-deoxy-2'-fluoroguanosine-3'-phosphate
  modified_base 15: mod_base = OTHER; note = 2'-O-methyladenosine-3'-phosphate
  modified_base 16: mod_base = OTHER; note = 2'-deoxy-2'-fluoroadenosine-3'-phosphate
  modified_base 17: mod_base = OTHER; note = 2'-O-methylguanosine-3'-phosphate
  modified_base 18: mod_base = OTHER; note = 2'-O-methyluridine-3'-phosphate
  modified_base 19: mod_base = OTHER; note = 2'-O-methylguanosine-3'-phosphate
  modified_base 20: mod_base = OTHER; note = 2'-O-methylcytidine-3'-phosphate
  modified_base 21: mod_base = OTHER; note = 2'-O-methylguanosine-3'-phosphate
  modified_base 22: mod_base = OTHER; note = 2'-O-methylcytidine-3'-phosphate
  modified_base 23: mod_base = OTHER; note = 2'-O-methylguanosine
tcgacacccttttgaagtgcgcg

SEQ ID NO: 4487 - RNA, 23 nt, synthetic construct
  source 1..23: mol_type = other RNA
  modified_base 1: mod_base = OTHER; note = 2'-O-methyluridine-3'-phosphate 5'-(E)-Vinylphosphonate
  modified_base 2: mod_base = OTHER; note = 2'-deoxy-2'-fluorocytidine-3'-phosphate
  modified_base 3: mod_base = OTHER; note = 2'-O-methylcytidine-3'-phosphate
  modified_base 4: mod_base = OTHER; note = 2'-O-methylguanosine-3'-phosphate
  modified_base 5: mod_base = OTHER; note = 2'-O-methyladenosine-3'-phosphate
  modified_base 6: mod_base = OTHER; note = 2'-deoxy-2'-fluorocytidine-3'-phosphate
  modified_base 7: mod_base = OTHER; note = 2'-O-methyladenosine-3'-phosphate
  modified_base 8: mod_base = OTHER; note = 2'-O-methylcytidine-3'-phosphate
  modified_base 9: mod_base = OTHER; note = 2'-O-methylcytidine-3'-phosphate
  modified_base 10: mod_base = OTHER; note = 2'-O-methylcytidine-3'-phosphate
  modified_base 11: mod_base = OTHER; note = 2'-O-methyluridine-3'-phosphate
  modified_base 12: mod_base = OTHER; note = 2'-O-methyluridine-3'-phosphate
  modified_base 13: mod_base = OTHER; note = 2'-O-methyluridine-3'-phosphate
  modified_base 14: mod_base = OTHER; note = 2'-deoxy-2'-fluorouridine-3'-phosphate
  modified_base 15: mod_base = OTHER; note = 2'-O-methylguanosine-3'-phosphate
  modified_base 16: mod_base = OTHER; note = 2'-deoxy-2'-fluoroadenosine-3'-phosphate
  modified_base 17: mod_base = OTHER; note = 2'-O-methyladenosine-3'-phosphate
  modified_base 18: mod_base = OTHER; note = 2'-O-methylguanosine-3'-phosphate
  modified_base 19: mod_base = OTHER; note = 2'-O-methyluridine-3'-phosphate
  modified_base 20: mod_base = OTHER; note = 2'-O-methylguanosine-3'-phosphate
  modified_base 21: mod_base = OTHER; note = 2'-O-methylcytidine-3'-phosphate
  modified_base 22: mod_base = OTHER; note = 2'-O-methylguanosine-3'-phosphate
  modified_base 23: mod_base = OTHER; note = 2'-O-methylcytidine
tccgacacccttttgaagtgcgc

SEQ ID NO: 4488 - RNA, 23 nt, synthetic construct
  source 1..23: mol_type = other RNA
  modified_base 1: mod_base = OTHER; note = 2'-O-methyluridine-3'-phosphate 5'-(E)-Vinylphosphonate
  modified_base 2: mod_base = OTHER; note = 2'-deoxy-2'-fluoroadenosine-3'-phosphate
  modified_base 3: mod_base = OTHER; note = 2'-O-methylcytidine-3'-phosphate
  modified_base 4: mod_base = OTHER; note = 2'-O-methylcytidine-3'-phosphate
  modified_base 5: mod_base = OTHER; note = 2'-O-methylguanosine-3'-phosphate
  modified_base 6: mod_base = OTHER; note = 2'-deoxy-2'-fluoroadenosine-3'-phosphate
  modified_base 7: mod_base = OTHER; note = 2'-O-methylcytidine-3'-phosphate
  modified_base 8: mod_base = OTHER; note = 2'-O-methyladenosine-3'-phosphate
  modified_base 9: mod_base = OTHER; note = 2'-O-methylcytidine-3'-phosphate
  modified_base 10: mod_base = OTHER; note = 2'-O-methylcytidine-3'-phosphate
  modified_base 11: mod_base = OTHER; note = 2'-O-methylcytidine-3'-phosphate
  modified_base 12: mod_base = OTHER; note = 2'-O-methyluridine-3'-phosphate
  modified_base 13: mod_base = OTHER; note = 2'-O-methyluridine-3'-phosphate
  modified_base 14: mod_base = OTHER; note = 2'-deoxy-2'-fluorouridine-3'-phosphate
  modified_base 15: mod_base = OTHER; note = 2'-O-methyluridine-3'-phosphate
  modified_base 16: mod_base = OTHER; note = 2'-deoxy-2'-fluoroguanosine-3'-phosphate
  modified_base 17: mod_base = OTHER; note = 2'-O-methyladenosine-3'-phosphate
  modified_base 18: mod_base = OTHER; note = 2'-O-methyladenosine-3'-phosphate
  modified_base 19: mod_base = OTHER; note = 2'-O-methylguanosine-3'-phosphate
  modified_base 20: mod_base = OTHER; note = 2'-O-methyluridine-3'-phosphate
  modified_base 21: mod_base = OTHER; note = 2'-O-methylguanosine-3'-phosphate
  modified_base 22: mod_base = OTHER; note = 2'-O-methylcytidine-3'-phosphate
  modified_base 23: mod_base = OTHER; note = 2'-O-methylguanosine
taccgacacccttttgaagtgcg

SEQ ID NO: 4489 - RNA, 23 nt, synthetic construct
  source 1..23: mol_type = other RNA
  modified_base 1: mod_base = OTHER; note = 2'-O-methyluridine-3'-phosphate 5'-(E)-Vinylphosphonate
  modified_base 2: mod_base = OTHER; note = 2'-deoxy-2'-fluorouridine-3'-phosphate
  modified_base 3: mod_base = OTHER; note = 2'-O-methyladenosine-3'-phosphate
  modified_base 4: mod_base = OTHER; note = 2'-O-methylcytidine-3'-phosphate
  modified_base 5: mod_base = OTHER; note = 2'-O-methyladenosine-3'-phosphate
  modified_base 6: mod_base = OTHER; note = 2'-deoxy-2'-fluorocytidine-3'-phosphate
  modified_base 7: mod_base = OTHER; note = 2'-O-methyladenosine-3'-phosphate
  modified_base 8: mod_base = OTHER; note = 2'-O-methylcytidine-3'-phosphate
  modified_base 9: mod_base = OTHER; note = 2'-O-methyluridine-3'-phosphate
  modified_base 10: mod_base = OTHER; note = 2'-O-methyluridine-3'-phosphate
  modified_base 11: mod_base = OTHER; note = 2'-O-methylcytidine-3'-phosphate
  modified_base 12: mod_base = OTHER; note = 2'-O-methyladenosine-3'-phosphate
  modified_base 13: mod_base = OTHER; note = 2'-O-methylguanosine-3'-phosphate
  modified_base 14: mod_base = OTHER; note = 2'-deoxy-2'-fluorouridine-3'-phosphate
  modified_base 15: mod_base = OTHER; note = 2'-O-methylcytidine-3'-phosphate
  modified_base 16: mod_base = OTHER; note = 2'-deoxy-2'-fluorocytidine-3'-phosphate
  modified_base 17: mod_base = OTHER; note = 2'-O-methyluridine-3'-phosphate
  modified_base 18: mod_base = OTHER; note = 2'-O-methylguanosine-3'-phosphate
  modified_base 19: mod_base = OTHER; note = 2'-O-methylguanosine-3'-phosphate
  modified_base 20: mod_base = OTHER; note = 2'-O-methylcytidine-3'-phosphate
  modified_base 21: mod_base = OTHER; note = 2'-O-methylguanosine-3'-phosphate
  modified_base 22: mod_base = OTHER; note = 2'-O-methyladenosine-3'-phosphate
  modified_base 23: mod_base = OTHER; note = 2'-O-methylguanosine
ttacacacttcagtcctggcgag

SEQ ID NO: 4490 - RNA, 23 nt, synthetic construct
  source 1..23: mol_type = other RNA
  modified_base 1: mod_base = OTHER; note = 2'-O-methyluridine-3'-phosphate 5'-(E)-Vinylphosphonate
  modified_base 2: mod_base = OTHER; note = 2'-deoxy-2'-fluoroadenosine-3'-phosphate
  modified_base 3: mod_base = OTHER; note = 2'-O-methyluridine-3'-phosphate
  modified_base 4: mod_base = OTHER; note = 2'-O-methyladenosine-3'-phosphate
  modified_base 5: mod_base = OTHER; note = 2'-O-methylcytidine-3'-phosphate
  modified_base 6: mod_base = OTHER; note = 2'-deoxy-2'-fluoroadenosine-3'-phosphate
  modified_base 7: mod_base = OTHER; note = 2'-O-methylcytidine-3'-phosphate
  modified_base 8: mod_base = OTHER; note = 2'-O-methyladenosine-3'-phosphate
  modified_base 9: mod_base = OTHER; note = 2'-O-methylcytidine-3'-phosphate
  modified_base 10: mod_base = OTHER; note = 2'-O-methyluridine-3'-phosphate
  modified_base 11: mod_base = OTHER; note = 2'-O-methyluridine-3'-phosphate
  modified_base 12: mod_base = OTHER; note = 2'-O-methylcytidine-3'-phosphate
  modified_base 13: mod_base = OTHER; note = 2'-O-methyladenosine-3'-phosphate
  modified_base 14: mod_base = OTHER; note = 2'-deoxy-2'-fluoroguanosine-3'-phosphate
  modified_base 15: mod_base = OTHER; note = 2'-O-methyluridine-3'-phosphate
  modified_base 16: mod_base = OTHER; note = 2'-deoxy-2'-fluorocytidine-3'-phosphate
  modified_base 17: mod_base = OTHER; note = 2'-O-methylcytidine-3'-phosphate
  modified_base 18: mod_base = OTHER; note = 2'-O-methyluridine-3'-phosphate
  modified_base 19: mod_base = OTHER; note = 2'-O-methylguanosine-3'-phosphate
  modified_base 20: mod_base = OTHER; note = 2'-O-methylguanosine-3'-phosphate
  modified_base 21: mod_base = OTHER; note = 2'-O-methylcytidine-3'-phosphate
  modified_base 22: mod_base = OTHER; note = 2'-O-methylguanosine-3'-phosphate
  modified_base 23: mod_base = OTHER; note = 2'-O-methyladenosine
tatacacacttcagtcctggcga

SEQ ID NO: 4491 - RNA, 23 nt, synthetic construct
  source 1..23: mol_type = other RNA
  modified_base 1: mod_base = OTHER; note = 2'-O-methyluridine-3'-phosphate 5'-(E)-Vinylphosphonate
  modified_base 2: mod_base = OTHER; note = 2'-deoxy-2'-fluorocytidine-3'-phosphate
  modified_base 3: mod_base = OTHER; note = 2'-O-methyladenosine-3'-phosphate
  modified_base 4: mod_base = OTHER; note = 2'-O-methyluridine-3'-phosphate
  modified_base 5: mod_base = OTHER; note = 2'-O-methyladenosine-3'-phosphate
  modified_base 6: mod_base = OTHER; note = 2'-deoxy-2'-fluorocytidine-3'-phosphate
  modified_base 7: mod_base = OTHER; note = 2'-O-methyladenosine-3'-phosphate
  modified_base 8: mod_base = OTHER; note = 2'-O-methylcytidine-3'-phosphate
  modified_base 9: mod_base = OTHER; note = 2'-O-methyladenosine-3'-phosphate
  modified_base 10: mod_base = OTHER; note = 2'-O-methylcytidine-3'-phosphate
  modified_base 11: mod_base = OTHER; note = 2'-O-methyluridine-3'-phosphate
  modified_base 12: mod_base = OTHER; note = 2'-O-methyluridine-3'-phosphate
  modified_base 13: mod_base = OTHER; note = 2'-O-methylcytidine-3'-phosphate
  modified_base 14: mod_base = OTHER; note = 2'-deoxy-2'-fluoroadenosine-3'-phosphate
  modified_base 15: mod_base = OTHER; note = 2'-O-methylguanosine-3'-phosphate
  modified_base 16: mod_base = OTHER; note = 2'-deoxy-2'-fluorouridine-3'-phosphate
  modified_base 17: mod_base = OTHER; note = 2'-O-methylcytidine-3'-phosphate
  modified_base 18: mod_base = OTHER; note = 2'-O-methylcytidine-3'-phosphate
  modified_base 19: mod_base = OTHER; note = 2'-O-methyluridine-3'-phosphate
  modified_base 20: mod_base = OTHER; note = 2'-O-methylguanosine-3'-phosphate
  modified_base 21: mod_base = OTHER; note = 2'-O-methylguanosine-3'-phosphate
  modified_base 22: mod_base = OTHER; note = 2'-O-methylcytidine-3'-phosphate
  modified_base 23: mod_base = OTHER; note = 2'-O-methylguanosine
tcatacacacttcagtcctggcg

SEQ ID NO: 4492 - RNA, 23 nt, synthetic construct
  source 1..23: mol_type = other RNA
  modified_base 1: mod_base = OTHER; note = 2'-O-methyluridine-3'-phosphate 5'-(E)-Vinylphosphonate
  modified_base 2: mod_base = OTHER; note = 2'-deoxy-2'-fluoroadenosine-3'-phosphate
  modified_base 3: mod_base = OTHER; note = 2'-O-methylcytidine-3'-phosphate
  modified_base 4: mod_base = OTHER; note = 2'-O-methyladenosine-3'-phosphate
  modified_base 5: mod_base = OTHER; note = 2'-O-methyluridine-3'-phosphate
  modified_base 6: mod_base = OTHER; note = 2'-deoxy-2'-fluoroadenosine-3'-phosphate
  modified_base 7: mod_base = OTHER; note = 2'-O-methylcytidine-3'-phosphate
  modified_base 8: mod_base = OTHER; note = 2'-O-methyladenosine-3'-phosphate
  modified_base 9: mod_base = OTHER; note = 2'-O-methylcytidine-3'-phosphate
  modified_base 10: mod_base = OTHER; note = 2'-O-methyladenosine-3'-phosphate
  modified_base 11: mod_base = OTHER; note = 2'-O-methylcytidine-3'-phosphate
  modified_base 12: mod_base = OTHER; note = 2'-O-methyluridine-3'-phosphate
  modified_base 13: mod_base = OTHER; note = 2'-O-methyluridine-3'-phosphate
  modified_base 14: mod_base = OTHER; note = 2'-deoxy-2'-fluorocytidine-3'-phosphate
  modified_base 15: mod_base = OTHER; note = 2'-O-methyladenosine-3'-phosphate
  modified_base 16: mod_base = OTHER; note = 2'-deoxy-2'-fluoroguanosine-3'-phosphate
  modified_base 17: mod_base = OTHER; note = 2'-O-methyluridine-3'-phosphate
  modified_base 18: mod_base = OTHER; note = 2'-O-methylcytidine-3'-phosphate
  modified_base 19: mod_base = OTHER; note = 2'-O-methylcytidine-3'-phosphate
  modified_base 20: mod_base = OTHER; note = 2'-O-methyluridine-3'-phosphate
  modified_base 21: mod_base = OTHER; note = 2'-O-methylguanosine-3'-phosphate
  modified_base 22: mod_base = OTHER; note = 2'-O-methylguanosine-3'-phosphate
  modified_base 23: mod_base = OTHER; note = 2'-O-methylcytidine
tacatacacacttcagtcctggc

SEQ ID NO: 4493 - RNA, 23 nt, synthetic construct
  source 1..23: mol_type = other RNA
  modified_base 1: mod_base = OTHER; note = 2'-O-methyluridine-3'-phosphate 5'-(E)-Vinylphosphonate
  modified_base 2: mod_base = OTHER; note = 2'-deoxy-2'-fluoroguanosine-3'-phosphate
  modified_base 3: mod_base = OTHER; note = 2'-O-methyladenosine-3'-phosphate
  modified_base 4: mod_base = OTHER; note = 2'-O-methylcytidine-3'-phosphate
  modified_base 5: mod_base = OTHER; note = 2'-O-methyladenosine-3'-phosphate
  modified_base 6: mod_base = OTHER; note = 2'-deoxy-2'-fluorouridine-3'-phosphate
  modified_base 7: mod_base = OTHER; note = 2'-O-methyladenosine-3'-phosphate
  modified_base 8: mod_base = OTHER; note = 2'-O-methylcytidine-3'-phosphate
  modified_base 9: mod_base = OTHER; note = 2'-O-methyladenosine-3'-phosphate
  modified_base 10: mod_base = OTHER; note = 2'-O-methylcytidine-3'-phosphate
  modified_base 11: mod_base = OTHER; note = 2'-O-methyladenosine-3'-phosphate
  modified_base 12: mod_base = OTHER; note = 2'-O-methylcytidine-3'-phosphate
  modified_base 13: mod_base = OTHER; note = 2'-O-methyluridine-3'-phosphate
  modified_base 14: mod_base = OTHER; note = 2'-deoxy-2'-fluorouridine-3'-phosphate
  modified_base 15: mod_base = OTHER; note = 2'-O-methylcytidine-3'-phosphate
  modified_base 16: mod_base = OTHER; note = 2'-deoxy-2'-fluoroadenosine-3'-phosphate
  modified_base 17: mod_base = OTHER; note = 2'-O-methylguanosine-3'-phosphate
  modified_base 18: mod_base = OTHER; note = 2'-O-methyluridine-3'-phosphate
  modified_base 19: mod_base = OTHER; note = 2'-O-methylcytidine-3'-phosphate
  modified_base 20: mod_base = OTHER; note = 2'-O-methylcytidine-3'-phosphate
  modified_base 21: mod_base = OTHER; note = 2'-O-methyluridine-3'-phosphate
  modified_base 22: mod_base = OTHER; note = 2'-O-methylguanosine-3'-phosphate
  modified_base 23: mod_base = OTHER; note = 2'-O-methylguanosine
tgacatacacacttcagtcctgg

SEQ ID NO: 4494 - RNA, 23 nt, synthetic construct
  source 1..23: mol_type = other RNA
  modified_base 1: mod_base = OTHER; note = 2'-O-methyluridine-3'-phosphate 5'-(E)-Vinylphosphonate
  modified_base 2: mod_base = OTHER; note = 2'-deoxy-2'-fluoroadenosine-3'-phosphate
  modified_base 3: mod_base = OTHER; note = 2'-O-methylguanosine-3'-phosphate
  modified_base 4: mod_base = OTHER; note = 2'-O-methyladenosine-3'-phosphate
  modified_base 5: mod_base = OTHER; note = 2'-O-methylcytidine-3'-phosphate
  modified_base 6: mod_base = OTHER; note = 2'-deoxy-2'-fluoroadenosine-3'-phosphate
  modified_base 7: mod_base = OTHER; note = 2'-O-methyluridine-3'-phosphate
  modified_base 8: mod_base = OTHER; note = 2'-O-methyladenosine-3'-phosphate
  modified_base 9: mod_base = OTHER; note = 2'-O-methylcytidine-3'-phosphate
  modified_base 10: mod_base = OTHER; note = 2'-O-methyladenosine-3'-phosphate
  modified_base 11: mod_base = OTHER; note = 2'-O-methylcytidine-3'-phosphate
  modified_base 12: mod_base = OTHER; note = 2'-O-methyladenosine-3'-phosphate
  modified_base 13: mod_base = OTHER; note = 2'-O-methylcytidine-3'-phosphate
  modified_base 14: mod_base = OTHER; note = 2'-deoxy-2'-fluorouridine-3'-phosphate
  modified_base 15: mod_base = OTHER; note = 2'-O-methyluridine-3'-phosphate
  modified_base 16: mod_base = OTHER; note = 2'-deoxy-2'-fluorocytidine-3'-phosphate
  modified_base 17: mod_base = OTHER; note = 2'-O-methyladenosine-3'-phosphate
  modified_base 18: mod_base = OTHER; note = 2'-O-methylguanosine-3'-phosphate
  modified_base 19: mod_base = OTHER; note = 2'-O-methyluridine-3'-phosphate
  modified_base 20: mod_base = OTHER; note = 2'-O-methylcytidine-3'-phosphate
  modified_base 21: mod_base = OTHER; note = 2'-O-methylcytidine-3'-phosphate
  modified_base 22: mod_base = OTHER; note = 2'-O-methyluridine-3'-phosphate
  modified_base 23: mod_base = OTHER; note = 2'-O-methylguanosine
tagacatacacacttcagtcctg

SEQ ID NO: 4495 - RNA, 23 nt, synthetic construct
  source 1..23: mol_type = other RNA
  modified_base 1: mod_base = OTHER; note = 2'-O-methyluridine-3'-phosphate 5'-(E)-Vinylphosphonate
  modified_base 2: mod_base = OTHER; note = 2'-deoxy-2'-fluoroadenosine-3'-phosphate
  modified_base 3: mod_base = OTHER; note = 2'-O-methyladenosine-3'-phosphate
  modified_base 4: mod_base = OTHER; note = 2'-O-methylguanosine-3'-phosphate
  modified_base 5: mod_base = OTHER; note = 2'-O-methyladenosine-3'-phosphate
  modified_base 6: mod_base = OTHER; note = 2'-deoxy-2'-fluorocytidine-3'-phosphate
  modified_base 7: mod_base = OTHER; note = 2'-O-methyladenosine-3'-phosphate
  modified_base 8: mod_base = OTHER; note = 2'-O-methyluridine-3'-phosphate
  modified_base 9: mod_base = OTHER; note = 2'-O-methyladenosine-3'-phosphate
  modified_base 10: mod_base = OTHER; note = 2'-O-methylcytidine-3'-phosphate
  modified_base 11: mod_base = OTHER; note = 2'-O-methyladenosine-3'-phosphate
  modified_base 12: mod_base = OTHER; note = 2'-O-methylcytidine-3'-phosphate
  modified_base 13: mod_base = OTHER; note = 2'-O-methyladenosine-3'-phosphate
  modified_base 14: mod_base = OTHER; note = 2'-deoxy-2'-fluorocytidine-3'-phosphate
  modified_base 15: mod_base = OTHER; note = 2'-O-methyluridine-3'-phosphate
  modified_base 16: mod_base = OTHER; note = 2'-deoxy-2'-fluorouridine-3'-phosphate
  modified_base 17: mod_base = OTHER; note = 2'-O-methylcytidine-3'-phosphate
  modified_base 18: mod_base = OTHER; note = 2'-O-methyladenosine-3'-phosphate
  modified_base 19: mod_base = OTHER; note = 2'-O-methylguanosine-3'-phosphate
  modified_base 20: mod_base = OTHER; note = 2'-O-methyluridine-3'-phosphate
  modified_base 21: mod_base = OTHER; note = 2'-O-methylcytidine-3'-phosphate
  modified_base 22: mod_base = OTHER; note = 2'-O-methylcytidine-3'-phosphate
  modified_base 23: mod_base = OTHER; note = 2'-O-methyluridine
taagacatacacacttcagtcct

SEQ ID NO: 4496 - RNA, 23 nt, synthetic construct
  source 1..23: mol_type = other RNA
  modified_base 1: mod_base = OTHER; note = 2'-O-methyluridine-3'-phosphate 5'-(E)-Vinylphosphonate
  modified_base 2: mod_base = OTHER; note = 2'-deoxy-2'-fluoroadenosine-3'-phosphate
  modified_base 3: mod_base = OTHER; note = 2'-O-methyladenosine-3'-phosphate
  modified_base 4: mod_base = OTHER; note = 2'-O-methyladenosine-3'-phosphate
  modified_base 5: mod_base = OTHER; note = 2'-O-methylguanosine-3'-phosphate
  modified_base 6: mod_base = OTHER; note = 2'-deoxy-2'-fluoroadenosine-3'-phosphate
  modified_base 7: mod_base = OTHER; note = 2'-O-methylcytidine-3'-phosphate
  modified_base 8: mod_base = OTHER; note = 2'-O-methyladenosine-3'-phosphate
  modified_base 9: mod_base = OTHER; note = 2'-O-methyluridine-3'-phosphate
  modified_base 10: mod_base = OTHER; note = 2'-O-methyladenosine-3'-phosphate
  modified_base 11: mod_base = OTHER; note = 2'-O-methylcytidine-3'-phosphate
  modified_base 12: mod_base = OTHER; note = 2'-O-methyladenosine-3'-phosphate
  modified_base 13: mod_base = OTHER; note = 2'-O-methylcytidine-3'-phosphate
  modified_base 14: mod_base = OTHER; note = 2'-deoxy-2'-fluoroadenosine-3'-phosphate
  modified_base 15: mod_base = OTHER; note = 2'-O-methylcytidine-3'-phosphate
  modified_base 16: mod_base = OTHER; note = 2'-deoxy-2'-fluorouridine-3'-phosphate
  modified_base 17: mod_base = OTHER; note = 2'-O-methyluridine-3'-phosphate
  modified_base 18: mod_base = OTHER; note = 2'-O-methylcytidine-3'-phosphate
  modified_base 19: mod_base = OTHER; note = 2'-O-methyladenosine-3'-phosphate
  modified_base 20: mod_base = OTHER; note = 2'-O-methylguanosine-3'-phosphate
  modified_base 21: mod_base = OTHER; note = 2'-O-methyluridine-3'-phosphate
  modified_base 22: mod_base = OTHER; note = 2'-O-methylcytidine-3'-phosphate
  modified_base 23: mod_base = OTHER; note = 2'-O-methylcytidine
taaagacatacacacttcagtcc

SEQ ID NO: 4497 - RNA, 23 nt, synthetic construct
  source 1..23: mol_type = other RNA
  modified_base 1: mod_base = OTHER; note = 2'-O-methyluridine-3'-phosphate 5'-(E)-Vinylphosphonate
  modified_base 2: mod_base = OTHER; note = 2'-deoxy-2'-fluoroadenosine-3'-phosphate
  modified_base 3: mod_base = OTHER; note = 2'-O-methyladenosine-3'-phosphate
  modified_base 4: mod_base = OTHER; note = 2'-O-methyladenosine-3'-phosphate
  modified_base 5: mod_base = OTHER; note = 2'-O-methyladenosine-3'-phosphate
  modified_base 6: mod_base = OTHER; note = 2'-deoxy-2'-fluoroguanosine-3'-phosphate
  modified_base 7: mod_base = OTHER; note = 2'-O-methyladenosine-3'-phosphate
  modified_base 8: mod_base = OTHER; note = 2'-O-methylcytidine-3'-phosphate
  modified_base 9: mod_base = OTHER; note = 2'-O-methyladenosine-3'-phosphate
  modified_base 10: mod_base = OTHER; note = 2'-O-methyluridine-3'-phosphate
  modified_base 11: mod_base = OTHER; note = 2'-O-methyladenosine-3'-phosphate
  modified_base 12: mod_base = OTHER; note = 2'-O-methylcytidine-3'-phosphate
  modified_base 13: mod_base = OTHER; note = 2'-O-methyladenosine-3'-phosphate
  modified_base 14: mod_base = OTHER; note = 2'-deoxy-2'-fluorocytidine-3'-phosphate
  modified_base 15: mod_base = OTHER; note = 2'-O-methyladenosine-3'-phosphate
  modified_base 16: mod_base = OTHER; note = 2'-deoxy-2'-fluorocytidine-3'-phosphate
  modified_base 17: mod_base = OTHER; note = 2'-O-methyluridine-3'-phosphate
  modified_base 18: mod_base = OTHER; note = 2'-O-methyluridine-3'-phosphate
  modified_base 19: mod_base = OTHER; note = 2'-O-methylcytidine-3'-phosphate
  modified_base 20: mod_base = OTHER; note = 2'-O-methyladenosine-3'-phosphate
  modified_base 21: mod_base = OTHER; note = 2'-O-methylguanosine-3'-phosphate
  modified_base 22: mod_base = OTHER; note = 2'-O-methyluridine-3'-phosphate
  modified_base 23: mod_base = OTHER; note = 2'-O-methylcytidine
taaaagacatacacacttcagtc

SEQ ID NO: 4498 - RNA, 23 nt, synthetic construct
  source 1..23: mol_type = other RNA
  modified_base 1: mod_base = OTHER; note = 2'-O-methyluridine-3'-phosphate 5'-(E)-Vinylphosphonate
  modified_base 2: mod_base = OTHER; note = 2'-deoxy-2'-fluorocytidine-3'-phosphate
  modified_base 3: mod_base = OTHER; note = 2'-O-methyladenosine-3'-phosphate
  modified_base 4: mod_base = OTHER; note = 2'-O-methyladenosine-3'-phosphate
  modified_base 5: mod_base = OTHER; note = 2'-O-methyladenosine-3'-phosphate
  modified_base 6: mod_base = OTHER; note = 2'-deoxy-2'-fluoroadenosine-3'-phosphate
  modified_base 7: mod_base = OTHER; note = 2'-O-methylguanosine-3'-phosphate
  modified_base 8: mod_base = OTHER; note = 2'-O-methyladenosine-3'-phosphate
  modified_base 9: mod_base = OTHER; note = 2'-O-methylcytidine-3'-phosphate
  modified_base 10: mod_base = OTHER; note = 2'-O-methyladenosine-3'-phosphate
  modified_base 11: mod_base = OTHER; note = 2'-O-methyluridine-3'-phosphate
  modified_base 12: mod_base = OTHER; note = 2'-O-methyladenosine-3'-phosphate
  modified_base 13: mod_base = OTHER; note = 2'-O-methylcytidine-3'-phosphate
  modified_base 14: mod_base = OTHER; note = 2'-deoxy-2'-fluoroadenosine-3'-phosphate
  modified_base 15: mod_base = OTHER; note = 2'-O-methylcytidine-3'-phosphate
  modified_base 16: mod_base = OTHER; note = 2'-deoxy-2'-fluoroadenosine-3'-phosphate
  modified_base 17: mod_base = OTHER; note = 2'-O-methylcytidine-3'-phosphate
  modified_base 18: mod_base = OTHER; note = 2'-O-methyluridine-3'-phosphate
  modified_base 19: mod_base = OTHER; note = 2'-O-methyluridine-3'-phosphate
  modified_base 20: mod_base = OTHER; note = 2'-O-methylcytidine-3'-phosphate
  modified_base 21: mod_base = OTHER; note = 2'-O-methyladenosine-3'-phosphate
  modified_base 22: mod_base = OTHER; note = 2'-O-methylguanosine-3'-phosphate
  modified_base 23: mod_base = OTHER; note = 2'-O-methyluridine
tcaaaagacatacacacttcagt

SEQ ID NO: 4499 - RNA, 23 nt, synthetic construct
  source 1..23: mol_type = other RNA
  modified_base 1: mod_base = OTHER; note = 2'-O-methyluridine-3'-phosphate 5'-(E)-Vinylphosphonate
  modified_base 2: mod_base = OTHER; note = 2'-deoxy-2'-fluoroadenosine-3'-phosphate
  modified_base 3: mod_base = OTHER; note = 2'-O-methylcytidine-3'-phosphate
  modified_base 4: mod_base = OTHER; note = 2'-O-methyladenosine-3'-phosphate
  modified_base 5: mod_base = OTHER; note = 2'-O-methyladenosine-3'-phosphate
  modified_base 6: mod_base = OTHER; note = 2'-deoxy-2'-fluoroadenosine-3'-phosphate
  modified_base 7: mod_base = OTHER; note = 2'-O-methyladenosine-3'-phosphate
  modified_base 8: mod_base = OTHER; note = 2'-O-methylguanosine-3'-phosphate
  modified_base 9: mod_base = OTHER; note = 2'-O-methyladenosine-3'-phosphate
  modified_base 10: mod_base = OTHER; note = 2'-O-methylcytidine-3'-phosphate
  modified_base 11: mod_base = OTHER; note = 2'-O-methyladenosine-3'-phosphate
  modified_base 12: mod_base = OTHER; note = 2'-O-methyluridine-3'-phosphate
  modified_base 13: mod_base = OTHER; note = 2'-O-methyladenosine-3'-phosphate
  modified_base 14: mod_base = OTHER; note = 2'-deoxy-2'-fluorocytidine-3'-phosphate
  modified_base 15: mod_base = OTHER; note = 2'-O-methyladenosine-3'-phosphate
  modified_base 16: mod_base = OTHER; note = 2'-deoxy-2'-fluorocytidine-3'-phosphate
  modified_base 17: mod_base = OTHER; note = 2'-O-methyladenosine-3'-phosphate
  modified_base 18: mod_base = OTHER; note = 2'-O-methylcytidine-3'-phosphate
  modified_base 19: mod_base = OTHER; note = 2'-O-methyluridine-3'-phosphate
  modified_base 20: mod_base = OTHER; note = 2'-O-methyluridine-3'-phosphate
  modified_base 21: mod_base = OTHER; note = 2'-O-methylcytidine-3'-phosphate
  modified_base 22: mod_base = OTHER; note = 2'-O-methyladenosine-3'-phosphate
  modified_base 23: mod_base = OTHER; note = 2'-O-methylguanosine
tacaaaagacatacacacttcag

SEQ ID NO: 4500 - RNA, 23 nt, synthetic construct
  source 1..23: mol_type = other RNA
  modified_base 1: mod_base = OTHER; note = 2'-O-methyluridine-3'-phosphate 5'-(E)-Vinylphosphonate
  modified_base 2: mod_base = OTHER; note = 2'-deoxy-2'-fluorocytidine-3'-phosphate
  modified_base 3: mod_base = OTHER; note = 2'-O-methyladenosine-3'-phosphate
  modified_base 4: mod_base = OTHER; note = 2'-O-methylcytidine-3'-phosphate
  modified_base 5: mod_base = OTHER; note = 2'-O-methyladenosine-3'-phosphate
  modified_base 6: mod_base = OTHER; note = 2'-deoxy-2'-fluoroadenosine-3'-phosphate
  modified_base 7: mod_base = OTHER; note = 2'-O-methyladenosine-3'-phosphate
  modified_base 8: mod_base = OTHER; note = 2'-O-methyladenosine-3'-phosphate
  modified_base 9: mod_base = OTHER; note = 2'-O-methylguanosine-3'-phosphate
  modified_base 10: mod_base = OTHER; note = 2'-O-methyladenosine-3'-phosphate
  modified_base 11: mod_base = OTHER; note = 2'-O-methylcytidine-3'-phosphate
  modified_base 12: mod_base = OTHER; note = 2'-O-methyladenosine-3'-phosphate
  modified_base 13: mod_base = OTHER; note = 2'-O-methyluridine-3'-phosphate
  modified_base 14: mod_base = OTHER; note = 2'-deoxy-2'-fluoroadenosine-3'-phosphate
  modified_base 15: mod_base = OTHER; note = 2'-O-methylcytidine-3'-phosphate
  modified_base 16: mod_base = OTHER; note = 2'-deoxy-2'-fluoroadenosine-3'-phosphate
  modified_base 17: mod_base = OTHER; note = 2'-O-methylcytidine-3'-phosphate
  modified_base 18: mod_base = OTHER; note = 2'-O-methyladenosine-3'-phosphate
  modified_base 19: mod_base = OTHER; note = 2'-O-methylcytidine-3'-phosphate
  modified_base 20: mod_base = OTHER; note = 2'-O-methyluridine-3'-phosphate
  modified_base 21: mod_base = OTHER; note = 2'-O-methyluridine-3'-phosphate
  modified_base 22: mod_base = OTHER; note = 2'-O-methylcytidine-3'-phosphate
  modified_base 23: mod_base = OTHER; note = 2'-O-methyladenosine
tcacaaaagacatacacacttca

SEQ ID NO: 4501 - RNA, 23 nt, synthetic construct
  source 1..23: mol_type = other RNA
  modified_base 1: mod_base = OTHER; note = 2'-O-methyluridine-3'-phosphate 5'-(E)-Vinylphosphonate
  modified_base 2: mod_base = OTHER; note = 2'-deoxy-2'-fluoroadenosine-3'-phosphate
  modified_base 3: mod_base = OTHER; note = 2'-O-methylcytidine-3'-phosphate
  modified_base 4: mod_base = OTHER; note = 2'-O-methyladenosine-3'-phosphate
  modified_base 5: mod_base = OTHER; note = 2'-O-methylcytidine-3'-phosphate
  modified_base 6: mod_base = OTHER; note = 2'-deoxy-2'-fluoroadenosine-3'-phosphate
  modified_base 7: mod_base = OTHER; note = 2'-O-methyladenosine-3'-phosphate
  modified_base 8: mod_base = OTHER; note = 2'-O-methyladenosine-3'-phosphate
  modified_base 9: mod_base = OTHER; note = 2'-O-methyladenosine-3'-phosphate
  modified_base 10: mod_base = OTHER; note = 2'-O-methylguanosine-3'-phosphate
  modified_base 11: mod_base = OTHER; note = 2'-O-methyladenosine-3'-phosphate
  modified_base 12: mod_base = OTHER; note = 2'-O-methylcytidine-3'-phosphate
  modified_base 13: mod_base = OTHER; note = 2'-O-methyladenosine-3'-phosphate
  modified_base 14: mod_base = OTHER; note = 2'-deoxy-2'-fluorouridine-3'-phosphate
  modified_base 15: mod_base = OTHER; note = 2'-O-methyladenosine-3'-phosphate
  modified_base 16: mod_base = OTHER; note = 2'-deoxy-2'-fluorocytidine-3'-phosphate
  modified_base 17: mod_base = OTHER; note = 2'-O-methyladenosine-3'-phosphate
  modified_base 18: mod_base = OTHER; note = 2'-O-methylcytidine-3'-phosphate
  modified_base 19: mod_base = OTHER; note = 2'-O-methyladenosine-3'-phosphate
  modified_base 20: mod_base = OTHER; note = 2'-O-methylcytidine-3'-phosphate
  modified_base 21: mod_base = OTHER; note = 2'-O-methyluridine-3'-phosphate
  modified_base 22: mod_base = OTHER; note = 2'-O-methyluridine-3'-phosphate
  modified_base 23: mod_base = OTHER; note = 2'-O-methylcytidine
tacacaaaagacatacacacttc

SEQ ID NO: 4502 - RNA, 23 nt, synthetic construct
  source 1..23: mol_type = other RNA
  modified_base 1: mod_base = OTHER; note = 2'-O-methyluridine-3'-phosphate 5'-(E)-Vinylphosphonate
  modified_base 2: mod_base = OTHER; note = 2'-deoxy-2'-fluorocytidine-3'-phosphate
  modified_base 3: mod_base = OTHER; note = 2'-O-methyladenosine-3'-phosphate
  modified_base 4: mod_base = OTHER; note = 2'-O-methylcytidine-3'-phosphate
  modified_base 5: mod_base = OTHER; note = 2'-O-methyladenosine-3'-phosphate
  modified_base 6: mod_base = OTHER; note = 2'-deoxy-2'-fluorocytidine-3'-phosphate
  modified_base 7: mod_base = OTHER; note = 2'-O-methyladenosine-3'-phosphate
  modified_base 8: mod_base = OTHER; note = 2'-O-methyladenosine-3'-phosphate
  modified_base 9: mod_base = OTHER; note = 2'-O-methyladenosine-3'-phosphate
  modified_base 10: mod_base = OTHER; note = 2'-O-methyladenosine-3'-phosphate
  modified_base 11: mod_base = OTHER; note = 2'-O-methylguanosine-3'-phosphate
  modified_base 12: mod_base = OTHER; note = 2'-O-methyladenosine-3'-phosphate
  modified_base 13: mod_base = OTHER; note = 2'-O-methylcytidine-3'-phosphate
  modified_base 14: mod_base = OTHER; note = 2'-deoxy-2'-fluoroadenosine-3'-phosphate
  modified_base 15: mod_base = OTHER; note = 2'-O-methyluridine-3'-phosphate
  modified_base 16: mod_base = OTHER; note = 2'-deoxy-2'-fluoroadenosine-3'-phosphate
  modified_base 17: mod_base = OTHER; note = 2'-O-methylcytidine-3'-phosphate
  modified_base 18: mod_base = OTHER; note = 2'-O-methyladenosine-3'-phosphate
  modified_base 19: mod_base = OTHER; note = 2'-O-methylcytidine-3'-phosphate
  modified_base 20: mod_base = OTHER; note = 2'-O-methyladenosine-3'-phosphate
  modified_base 21: mod_base = OTHER; note = 2'-O-methylcytidine-3'-phosphate
  modified_base 22: mod_base = OTHER; note = 2'-O-methyluridine-3'-phosphate
  modified_base 23: mod_base = OTHER; note = 2'-O-methyluridine
tcacacaaaagacatacacactt

SEQ ID NO: 4503 - RNA, 23 nt, synthetic construct
  source 1..23: mol_type = other RNA
  modified_base 1: mod_base = OTHER; note = 2'-O-methyluridine-3'-phosphate 5'-(E)-Vinylphosphonate
  modified_base 2: mod_base = OTHER; note = 2'-deoxy-2'-fluorouridine-3'-phosphate
  modified_base 3: mod_base = OTHER; note = 2'-O-methylcytidine-3'-phosphate
  modified_base 4: mod_base = OTHER; note = 2'-O-methyladenosine-3'-phosphate
  modified_base 5: mod_base = OTHER; note = 2'-O-methylcytidine-3'-phosphate
  modified_base 6: mod_base = OTHER; note = 2'-deoxy-2'-fluoroadenosine-3'-phosphate
  modified_base 7: mod_base = OTHER; note = 2'-O-methylcytidine-3'-phosphate
  modified_base 8: mod_base = OTHER; note = 2'-O-methyladenosine-3'-phosphate
  modified_base 9: mod_base = OTHER; note = 2'-O-methyladenosine-3'-phosphate
  modified_base 10: mod_base = OTHER; note = 2'-O-methyladenosine-3'-phosphate
  modified_base 11: mod_base = OTHER; note = 2'-O-methyladenosine-3'-phosphate
  modified_base 12: mod_base = OTHER; note = 2'-O-methylguanosine-3'-phosphate
  modified_base 13: mod_base = OTHER; note = 2'-O-methyladenosine-3'-phosphate
  modified_base 14: mod_base = OTHER; note = 2'-deoxy-2'-fluorocytidine-3'-phosphate
  modified_base 15: mod_base = OTHER; note = 2'-O-methyladenosine-3'-phosphate
  modified_base 16: mod_base = OTHER; note = 2'-deoxy-2'-fluorouridine-3'-phosphate
  modified_base 17: mod_base = OTHER; note = 2'-O-methyladenosine-3'-phosphate
  modified_base 18: mod_base = OTHER; note = 2'-O-methylcytidine-3'-phosphate
  modified_base 19: mod_base = OTHER; note = 2'-O-methyladenosine-3'-phosphate
  modified_base 20: mod_base = OTHER; note = 2'-O-methylcytidine-3'-phosphate
  modified_base 21: mod_base = OTHER; note = 2'-O-methyladenosine-3'-phosphate
  modified_base 22: mod_base = OTHER; note = 2'-O-methylcytidine-3'-phosphate
  modified_base 23: mod_base = OTHER; note = 2'-O-methyluridine
ttcacacaaaagacatacacact

SEQ ID NO: 4504 - RNA, 23 nt, synthetic construct
  source 1..23: mol_type = other RNA
  modified_base 1: mod_base = OTHER; note = 2'-O-methyluridine-3'-phosphate 5'-(E)-Vinylphosphonate
  modified_base 2: mod_base = OTHER; note = 2'-deoxy-2'-fluoroadenosine-3'-phosphate
  modified_base 3: mod_base = OTHER; note = 2'-O-methyluridine-3'-phosphate
  modified_base 4: mod_base = OTHER; note = 2'-O-methylcytidine-3'-phosphate
  modified_base 5: mod_base = OTHER; note = 2'-O-methyladenosine-3'-phosphate
  modified_base 6: mod_base = OTHER; note = 2'-deoxy-2'-fluorocytidine-3'-phosphate
  modified_base 7: mod_base = OTHER; note = 2'-O-methyladenosine-3'-phosphate
  modified_base 8: mod_base = OTHER; note = 2'-O-methylcytidine-3'-phosphate
  modified_base 9: mod_base = OTHER; note = 2'-O-methyladenosine-3'-phosphate
  modified_base 10: mod_base = OTHER; note = 2'-O-methyladenosine-3'-phosphate
  modified_base 11: mod_base = OTHER; note = 2'-O-methyladenosine-3'-phosphate
  modified_base 12: mod_base = OTHER; note = 2'-O-methyladenosine-3'-phosphate
  modified_base 13: mod_base = OTHER; note = 2'-O-methylguanosine-3'-phosphate
  modified_base 14: mod_base = OTHER; note = 2'-deoxy-2'-fluoroadenosine-3'-phosphate
  modified_base 15: mod_base = OTHER; note = 2'-O-methylcytidine-3'-phosphate
  modified_base 16: mod_base = OTHER; note = 2'-deoxy-2'-fluoroadenosine-3'-phosphate
  modified_base 17: mod_base = OTHER; note = 2'-O-methyluridine-3'-phosphate
  modified_base 18: mod_base = OTHER; note = 2'-O-methyladenosine-3'-phosphate
  modified_base 19: mod_base = OTHER; note = 2'-O-methylcytidine-3'-phosphate
  modified_base 20: mod_base = OTHER; note = 2'-O-methyladenosine-3'-phosphate
  modified_base 21: mod_base = OTHER; note = 2'-O-methylcytidine-3'-phosphate
  modified_base 22: mod_base = OTHER; note = 2'-O-methyladenosine-3'-phosphate
  modified_base 23: mod_base = OTHER; note = 2'-O-methylcytidine
tatcacacaaaagacatacacac

SEQ ID NO: 4505 - RNA, 23 nt, synthetic construct
  source 1..23: mol_type = other RNA
  modified_base 1: mod_base = OTHER; note = 2'-O-methyluridine-3'-phosphate 5'-(E)-Vinylphosphonate
  modified_base 2: mod_base = OTHER; note = 2'-deoxy-2'-fluoroadenosine-3'-phosphate
  modified_base 3: mod_base = OTHER; note = 2'-O-methyladenosine-3'-phosphate
  modified_base 4: mod_base = OTHER; note = 2'-O-methyluridine-3'-phosphate
  modified_base 5: mod_base = OTHER; note = 2'-O-methylcytidine-3'-phosphate
  modified_base 6: mod_base = OTHER; note = 2'-deoxy-2'-fluoroadenosine-3'-phosphate
  modified_base 7: mod_base = OTHER; note = 2'-O-methylcytidine-3'-phosphate
  modified_base 8: mod_base = OTHER; note = 2'-O-methyladenosine-3'-phosphate
  modified_base 9: mod_base = OTHER; note = 2'-O-methylcytidine-3'-phosphate
  modified_base 10: mod_base = OTHER; note = 2'-O-methyladenosine-3'-phosphate
  modified_base 11: mod_base = OTHER; note = 2'-O-methyladenosine-3'-phosphate
  modified_base 12: mod_base = OTHER; note = 2'-O-methyladenosine-3'-phosphate
  modified_base 13: mod_base = OTHER; note = 2'-O-methyladenosine-3'-phosphate
  modified_base 14: mod_base = OTHER; note = 2'-deoxy-2'-fluoroguanosine-3'-phosphate
  modified_base 15: mod_base = OTHER; note = 2'-O-methyladenosine-3'-phosphate
  modified_base 16: mod_base = OTHER; note = 2'-deoxy-2'-fluorocytidine-3'-phosphate
  modified_base 17: mod_base = OTHER; note = 2'-O-methyladenosine-3'-phosphate
  modified_base 18: mod_base = OTHER; note = 2'-O-methyluridine-3'-phosphate
  modified_base 19: mod_base = OTHER; note = 2'-O-methyladenosine-3'-phosphate
  modified_base 20: mod_base = OTHER; note = 2'-O-methylcytidine-3'-phosphate
  modified_base 21: mod_base = OTHER; note = 2'-O-methyladenosine-3'-phosphate
  modified_base 22: mod_base = OTHER; note = 2'-O-methylcytidine-3'-phosphate
  modified_base 23: mod_base = OTHER; note = 2'-O-methyladenosine
taatcacacaaaagacatacaca

SEQ ID NO: 4506 - RNA, 23 nt, synthetic construct
  source 1..23: mol_type = other RNA
  modified_base 1: mod_base = OTHER; note = 2'-O-methyluridine-3'-phosphate 5'-(E)-Vinylphosphonate
  modified_base 2: mod_base = OTHER; note = 2'-deoxy-2'-fluoroguanosine-3'-phosphate
  modified_base 3: mod_base = OTHER; note = 2'-O-methyladenosine-3'-phosphate
  modified_base 4: mod_base = OTHER; note = 2'-O-methyladenosine-3'-phosphate
  modified_base 5: mod_base = OTHER; note = 2'-O-methyluridine-3'-phosphate
  modified_base 6: mod_base = OTHER; note = 2'-deoxy-2'-fluorocytidine-3'-phosphate
  modified_base 7: mod_base = OTHER; note = 2'-O-methyladenosine-3'-phosphate
  modified_base 8: mod_base = OTHER; note = 2'-O-methylcytidine-3'-phosphate
  modified_base 9: mod_base = OTHER; note = 2'-O-methyladenosine-3'-phosphate
  modified_base 10: mod_base = OTHER; note = 2'-O-methylcytidine-3'-phosphate
  modified_base 11: mod_base = OTHER; note = 2'-O-methyladenosine-3'-phosphate
  modified_base 12: mod_base = OTHER; note = 2'-O-methyladenosine-3'-phosphate
  modified_base 13: mod_base = OTHER; note = 2'-O-methyladenosine-3'-phosphate
  modified_base 14: mod_base = OTHER; note = 2'-deoxy-2'-fluoroadenosine-3'-phosphate
  modified_base 15: mod_base = OTHER; note = 2'-O-methylguanosine-3'-phosphate
  modified_base 16: mod_base = OTHER; note = 2'-deoxy-2'-fluoroadenosine-3'-phosphate
  modified_base 17: mod_base = OTHER; note = 2'-O-methylcytidine-3'-phosphate
  modified_base 18: mod_base = OTHER; note = 2'-O-methyladenosine-3'-phosphate
  modified_base 19: mod_base = OTHER; note = 2'-O-methyluridine-3'-phosphate
  modified_base 20: mod_base = OTHER; note = 2'-O-methyladenosine-3'-phosphate
  modified_base 21: mod_base = OTHER; note = 2'-O-methylcytidine-3'-phosphate
  modified_base 22: mod_base = OTHER; note = 2'-O-methyladenosine-3'-phosphate
  modified_base 23: mod_base = OTHER; note = 2'-O-methylcytidine
tgaatcacacaaaagacatacac

SEQ ID NO: 4507 - RNA, 23 nt, synthetic construct
  source 1..23: mol_type = other RNA
  modified_base 1: mod_base = OTHER; note = 2'-O-methyluridine-3'-phosphate 5'-(E)-Vinylphosphonate
  modified_base 2: mod_base = OTHER; note = 2'-deoxy-2'-fluoroadenosine-3'-phosphate
  modified_base 3: mod_base = OTHER; note = 2'-O-methylguanosine-3'-phosphate
  modified_base 4: mod_base = OTHER; note = 2'-O-methyladenosine-3'-phosphate
  modified_base 5: mod_base = OTHER; note = 2'-O-methyladenosine-3'-phosphate
  modified_base 6: mod_base = OTHER; note = 2'-deoxy-2'-fluorouridine-3'-phosphate
  modified_base 7: mod_base = OTHER; note = 2'-O-methylcytidine-3'-phosphate
  modified_base 8: mod_base = OTHER; note = 2'-O-methyladenosine-3'-phosphate
  modified_base 9: mod_base = OTHER; note = 2'-O-methylcytidine-3'-phosphate
  modified_base 10: mod_base = OTHER; note = 2'-O-methyladenosine-3'-phosphate
  modified_base 11: mod_base = OTHER; note = 2'-O-methylcytidine-3'-phosphate
  modified_base 12: mod_base = OTHER; note = 2'-O-methyladenosine-3'-phosphate
  modified_base 13: mod_base = OTHER; note = 2'-O-methyladenosine-3'-phosphate
  modified_base 14: mod_base = OTHER; note = 2'-deoxy-2'-fluoroadenosine-3'-phosphate
  modified_base 15: mod_base = OTHER; note = 2'-O-methyladenosine-3'-phosphate
  modified_base 16: mod_base = OTHER; note = 2'-deoxy-2'-fluoroguanosine-3'-phosphate
  modified_base 17: mod_base = OTHER; note = 2'-O-methyladenosine-3'-phosphate
  modified_base 18: mod_base = OTHER; note = 2'-O-methylcytidine-3'-phosphate
  modified_base 19: mod_base = OTHER; note = 2'-O-methyladenosine-3'-phosphate
  modified_base 20: mod_base = OTHER; note = 2'-O-methyluridine-3'-phosphate
  modified_base 21: mod_base = OTHER; note = 2'-O-methyladenosine-3'-phosphate
  modified_base 22: mod_base = OTHER; note = 2'-O-methylcytidine-3'-phosphate
  modified_base 23: mod_base = OTHER; note = 2'-O-methyladenosine
tagaatcacacaaaagacataca

SEQ ID NO: 4508 - RNA, 23 nt, synthetic construct
  source 1..23: mol_type = other RNA
  modified_base 1: mod_base = OTHER; note = 2'-O-methyluridine-3'-phosphate 5'-(E)-Vinylphosphonate
  modified_base 2: mod_base = OTHER; note = 2'-deoxy-2'-fluoroadenosine-3'-phosphate
  modified_base 3: mod_base = OTHER; note = 2'-O-methyladenosine-3'-phosphate
  modified_base 4: mod_base = OTHER; note = 2'-O-methylguanosine-3'-phosphate
  modified_base 5: mod_base = OTHER; note = 2'-O-methyladenosine-3'-phosphate
  modified_base 6: mod_base = OTHER; note = 2'-deoxy-2'-fluoroadenosine-3'-phosphate
  modified_base 7: mod_base = OTHER; note = 2'-O-methyluridine-3'-phosphate
  modified_base 8: mod_base = OTHER; note = 2'-O-methylcytidine-3'-phosphate
  modified_base 9: mod_base = OTHER; note = 2'-O-methyladenosine-3'-phosphate
  modified_base 10: mod_base = OTHER; note = 2'-O-methylcytidine-3'-phosphate
  modified_base 11: mod_base = OTHER; note = 2'-O-methyladenosine-3'-phosphate
  modified_base 12: mod_base = OTHER; note = 2'-O-methylcytidine-3'-phosphate
  modified_base 13: mod_base = OTHER; note = 2'-O-methyladenosine-3'-phosphate
  modified_base 14: mod_base = OTHER; note = 2'-deoxy-2'-fluoroadenosine-3'-phosphate
  modified_base 15: mod_base = OTHER; note = 2'-O-methyladenosine-3'-phosphate
  modified_base 16: mod_base = OTHER; note = 2'-deoxy-2'-fluoroadenosine-3'-phosphate
  modified_base 17: mod_base = OTHER; note = 2'-O-methylguanosine-3'-phosphate
  modified_base 18: mod_base = OTHER; note = 2'-O-methyladenosine-3'-phosphate
  modified_base 19: mod_base = OTHER; note = 2'-O-methylcytidine-3'-phosphate
  modified_base 20: mod_base = OTHER; note = 2'-O-methyladenosine-3'-phosphate
  modified_base 21: mod_base = OTHER; note = 2'-O-methyluridine-3'-phosphate
  modified_base 22: mod_base = OTHER; note = 2'-O-methyladenosine-3'-phosphate
  modified_base 23: mod_base = OTHER; note = 2'-O-methylcytidine
taagaatcacacaaaagacatac

SEQ ID NO: 4509 - RNA, 23 nt, synthetic construct
  source 1..23: mol_type = other RNA
  modified_base 1: mod_base = OTHER; note = 2'-O-methyluridine-3'-phosphate 5'-(E)-Vinylphosphonate
  modified_base 2: mod_base = OTHER; note = 2'-deoxy-2'-fluoroguanosine-3'-phosphate
  modified_base 3: mod_base = OTHER; note = 2'-O-methyladenosine-3'-phosphate
  modified_base 4: mod_base = OTHER; note = 2'-O-methyladenosine-3'-phosphate
  modified_base 5: mod_base = OTHER; note = 2'-O-methylguanosine-3'-phosphate
  modified_base 6: mod_base = OTHER; note = 2'-deoxy-2'-fluoroadenosine-3'-phosphate
  modified_base 7: mod_base = OTHER; note = 2'-O-methyladenosine-3'-phosphate
  modified_base 8: mod_base = OTHER; note = 2'-O-methyluridine-3'-phosphate
  modified_base 9: mod_base = OTHER; note = 2'-O-methylcytidine-3'-phosphate
  modified_base 10: mod_base = OTHER; note = 2'-O-methyladenosine-3'-phosphate
  modified_base 11: mod_base = OTHER; note = 2'-O-methylcytidine-3'-phosphate
  modified_base 12: mod_base = OTHER; note = 2'-O-methyladenosine-3'-phosphate
  modified_base 13: mod_base = OTHER; note = 2'-O-methylcytidine-3'-phosphate
  modified_base 14: mod_base = OTHER; note = 2'-deoxy-2'-fluoroadenosine-3'-phosphate
  modified_base 15: mod_base = OTHER; note = 2'-O-methyladenosine-3'-phosphate
  modified_base 16: mod_base = OTHER; note = 2'-deoxy-2'-fluoroadenosine-3'-phosphate
  modified_base 17: mod_base = OTHER; note = 2'-O-methyladenosine-3'-phosphate
  modified_base 18: mod_base = OTHER; note = 2'-O-methylguanosine-3'-phosphate
  modified_base 19: mod_base = OTHER; note = 2'-O-methyladenosine-3'-phosphate
  modified_base 20: mod_base = OTHER; note = 2'-O-methylcytidine-3'-phosphate
  modified_base 21: mod_base = OTHER; note = 2'-O-methyladenosine-3'-phosphate
  modified_base 22: mod_base = OTHER; note = 2'-O-methyluridine-3'-phosphate
  modified_base 23: mod_base = OTHER; note = 2'-O-methyladenosine
tgaagaatcacacaaaagacata

SEQ ID NO: 4510 - RNA, 23 nt, synthetic construct
  source 1..23: mol_type = other RNA
  modified_base 1: mod_base = OTHER; note = 2'-O-methyluridine-3'-phosphate 5'-(E)-Vinylphosphonate
  modified_base 2: mod_base = OTHER; note = 2'-deoxy-2'-fluorouridine-3'-phosphate
  modified_base 3: mod_base = OTHER; note = 2'-O-methylguanosine-3'-phosphate
  modified_base 4: mod_base = OTHER; note = 2'-O-methyladenosine-3'-phosphate
  modified_base 5: mod_base = OTHER; note = 2'-O-methyladenosine-3'-phosphate
  modified_base 6: mod_base = OTHER; note = 2'-deoxy-2'-fluoroguanosine-3'-phosphate
  modified_base 7: mod_base = OTHER; note = 2'-O-methyladenosine-3'-phosphate
  modified_base 8: mod_base = OTHER; note = 2'-O-methyladenosine-3'-phosphate
  modified_base 9: mod_base = OTHER; note = 2'-O-methyluridine-3'-phosphate
  modified_base 10: mod_base = OTHER; note = 2'-O-methylcytidine-3'-phosphate
  modified_base 11: mod_base = OTHER; note = 2'-O-methyladenosine-3'-phosphate
  modified_base 12: mod_base = OTHER; note = 2'-O-methylcytidine-3'-phosphate
  modified_base 13: mod_base = OTHER; note = 2'-O-methyladenosine-3'-phosphate
  modified_base 14: mod_base = OTHER; note = 2'-deoxy-2'-fluorocytidine-3'-phosphate
  modified_base 15: mod_base = OTHER; note = 2'-O-methyladenosine-3'-phosphate
  modified_base 16: mod_base = OTHER; note = 2'-deoxy-2'-fluoroadenosine-3'-phosphate
  modified_base 17: mod_base = OTHER; note = 2'-O-methyladenosine-3'-phosphate
  modified_base 18: mod_base = OTHER; note = 2'-O-methyladenosine-3'-phosphate
  modified_base 19: mod_base = OTHER; note = 2'-O-methylguanosine-3'-phosphate
  modified_base 20: mod_base = OTHER; note = 2'-O-methyladenosine-3'-phosphate
  modified_base 21: mod_base = OTHER; note = 2'-O-methylcytidine-3'-phosphate
  modified_base 22: mod_base = OTHER; note = 2'-O-methyladenosine-3'-phosphate
  modified_base 23: mod_base = OTHER; note = 2'-O-methyluridine
ttgaagaatcacacaaaagacat

SEQ ID NO: 4511 - RNA, 23 nt, synthetic construct
  source 1..23: mol_type = other RNA
  modified_base 1: mod_base = OTHER; note = 2'-O-methyluridine-3'-phosphate 5'-(E)-Vinylphosphonate
  modified_base 2: mod_base = OTHER; note = 2'-deoxy-2'-fluorouridine-3'-phosphate
  modified_base 3: mod_base = OTHER; note = 2'-O-methyluridine-3'-phosphate
  modified_base 4: mod_base = OTHER; note = 2'-O-methylguanosine-3'-phosphate
  modified_base 5: mod_base = OTHER; note = 2'-O-methyladenosine-3'-phosphate
  modified_base 6: mod_base = OTHER; note = 2'-deoxy-2'-fluoroadenosine-3'-phosphate
  modified_base 7: mod_base = OTHER; note = 2'-O-methylguanosine-3'-phosphate
  modified_base 8: mod_base = OTHER; note = 2'-O-methyladenosine-3'-phosphate
  modified_base 9: mod_base = OTHER; note = 2'-O-methyladenosine-3'-phosphate
  modified_base 10: mod_base = OTHER; note = 2'-O-methyluridine-3'-phosphate
  modified_base 11: mod_base = OTHER; note = 2'-O-methylcytidine-3'-phosphate
  modified_base 12: mod_base = OTHER; note = 2'-O-methyladenosine-3'-phosphate
  modified_base 13: mod_base = OTHER; note = 2'-O-methylcytidine-3'-phosphate
  modified_base 14: mod_base = OTHER; note = 2'-deoxy-2'-fluoroadenosine-3'-phosphate
  modified_base 15: mod_base = OTHER; note = 2'-O-methylcytidine-3'-phosphate
  modified_base 16: mod_base = OTHER; note = 2'-deoxy-2'-fluoroadenosine-3'-phosphate
  modified_base 17: mod_base = OTHER; note = 2'-O-methyladenosine-3'-phosphate
  modified_base 18: mod_base = OTHER; note = 2'-O-methyladenosine-3'-phosphate
  modified_base 19: mod_base = OTHER; note = 2'-O-methyladenosine-3'-phosphate
  modified_base 20: mod_base = OTHER; note = 2'-O-methylguanosine-3'-phosphate
  modified_base 21: mod_base = OTHER; note = 2'-O-methyladenosine-3'-phosphate
  modified_base 22: mod_base = OTHER; note = 2'-O-methylcytidine-3'-phosphate
  modified_base 23: mod_base = OTHER; note = 2'-O-methyladenosine
tttgaagaatcacacaaaagaca

SEQ ID NO: 4512 - RNA, 23 nt, synthetic construct
  source 1..23: mol_type = other RNA
  modified_base 1: mod_base = OTHER; note = 2'-O-methyluridine-3'-phosphate 5'-(E)-Vinylphosphonate
  modified_base 2: mod_base = OTHER; note = 2'-deoxy-2'-fluorouridine-3'-phosphate
  modified_base 3: mod_base = OTHER; note = 2'-O-methyluridine-3'-phosphate
  modified_base 4: mod_base = OTHER; note = 2'-O-methyluridine-3'-phosphate
  modified_base 5: mod_base = OTHER; note = 2'-O-methylguanosine-3'-phosphate
  modified_base 6: mod_base = OTHER; note = 2'-deoxy-2'-fluoroadenosine-3'-phosphate
  modified_base 7: mod_base = OTHER; note = 2'-O-methyladenosine-3'-phosphate
  modified_base 8: mod_base = OTHER; note = 2'-O-methylguanosine-3'-phosphate
  modified_base 9: mod_base = OTHER; note = 2'-O-methyladenosine-3'-phosphate
  modified_base 10: mod_base = OTHER; note = 2'-O-methyladenosine-3'-phosphate
  modified_base 11: mod_base = OTHER; note = 2'-O-methyluridine-3'-phosphate
  modified_base 12: mod_base = OTHER; note = 2'-O-methylcytidine-3'-phosphate
  modified_base 13: mod_base = OTHER; note = 2'-O-methyladenosine-3'-phosphate
  modified_base 14: mod_base = OTHER; note = 2'-deoxy-2'-fluorocytidine-3'-phosphate
  modified_base 15: mod_base = OTHER; note = 2'-O-methyladenosine-3'-phosphate
  modified_base 16: mod_base = OTHER; note = 2'-deoxy-2'-fluorocytidine-3'-phosphate
  modified_base 17: mod_base = OTHER; note = 2'-O-methyladenosine-3'-phosphate
  modified_base 18: mod_base = OTHER; note = 2'-O-methyladenosine-3'-phosphate
  modified_base 19: mod_base = OTHER; note = 2'-O-methyladenosine-3'-phosphate
  modified_base 20: mod_base = OTHER; note = 2'-O-methyladenosine-3'-phosphate
  modified_base 21: mod_base = OTHER; note = 2'-O-methylguanosine-3'-phosphate
  modified_base 22: mod_base = OTHER; note = 2'-O-methyladenosine-3'-phosphate
  modified_base 23: mod_base = OTHER; note = 2'-O-methylcytidine
ttttgaagaatcacacaaaagac

SEQ ID NO: 4513 - RNA, 23 nt, synthetic construct
  source 1..23: mol_type = other RNA
  modified_base 1: mod_base = OTHER; note = 2'-O-methyluridine-3'-phosphate 5'-(E)-Vinylphosphonate
  modified_base 2: mod_base = OTHER; note = 2'-deoxy-2'-fluoroguanosine-3'-phosphate
  modified_base 3: mod_base = OTHER; note = 2'-O-methyluridine-3'-phosphate
  modified_base 4: mod_base = OTHER; note = 2'-O-methyluridine-3'-phosphate
  modified_base 5: mod_base = OTHER; note = 2'-O-methyluridine-3'-phosphate
  modified_base 6: mod_base = OTHER; note = 2'-deoxy-2'-fluoroguanosine-3'-phosphate
  modified_base 7: mod_base = OTHER; note = 2'-O-methyladenosine-3'-phosphate
  modified_base 8: mod_base = OTHER; note = 2'-O-methyladenosine-3'-phosphate
  modified_base 9: mod_base = OTHER; note = 2'-O-methylguanosine-3'-phosphate
  modified_base 10: mod_base = OTHER; note = 2'-O-methyladenosine-3'-phosphate
  modified_base 11: mod_base = OTHER; note = 2'-O-methyladenosine-3'-phosphate
  modified_base 12: mod_base = OTHER; note = 2'-O-methyluridine-3'-phosphate
  modified_base 13: mod_base = OTHER; note = 2'-O-methylcytidine-3'-phosphate
  modified_base 14: mod_base = OTHER; note = 2'-deoxy-2'-fluoroadenosine-3'-phosphate
  modified_base 15: mod_base = OTHER; note = 2'-O-methylcytidine-3'-phosphate
  modified_base 16: mod_base = OTHER; note = 2'-deoxy-2'-fluoroadenosine-3'-phosphate
  modified_base 17: mod_base = OTHER; note = 2'-O-methylcytidine-3'-phosphate
  modified_base 18: mod_base = OTHER; note = 2'-O-methyladenosine-3'-phosphate
  modified_base 19: mod_base = OTHER; note = 2'-O-methyladenosine-3'-phosphate
  modified_base 20: mod_base = OTHER; note = 2'-O-methyladenosine-3'-phosphate
  modified_base 21: mod_base = OTHER; note = 2'-O-methyladenosine-3'-phosphate
  modified_base 22: mod_base = OTHER; note = 2'-O-methylguanosine-3'-phosphate
  modified_base 23: mod_base = OTHER; note = 2'-O-methyladenosine
tgtttgaagaatcacacaaaaga

SEQ ID NO: 4514 - RNA, 23 nt, synthetic construct
  source 1..23: mol_type = other RNA
  modified_base 1: mod_base = OTHER; note = 2'-O-methyluridine-3'-phosphate 5'-(E)-Vinylphosphonate
  modified_base 2: mod_base = OTHER; note = 2'-deoxy-2'-fluoroadenosine-3'-phosphate
  modified_base 3: mod_base = OTHER; note = 2'-O-methylguanosine-3'-phosphate
  modified_base 4: mod_base = OTHER; note = 2'-O-methyluridine-3'-phosphate
  modified_base 5: mod_base = OTHER; note = 2'-O-methyluridine-3'-phosphate
  modified_base 6: mod_base = OTHER; note = 2'-deoxy-2'-fluorouridine-3'-phosphate
  modified_base 7: mod_base = OTHER; note = 2'-O-methylguanosine-3'-phosphate
  modified_base 8: mod_base = OTHER; note = 2'-O-methyladenosine-3'-phosphate
  modified_base 9: mod_base = OTHER; note = 2'-O-methyladenosine-3'-phosphate
  modified_base 10: mod_base = OTHER; note = 2'-O-methylguanosine-3'-phosphate
  modified_base 11: mod_base = OTHER; note = 2'-O-methyladenosine-3'-phosphate
  modified_base 12: mod_base = OTHER; note = 2'-O-methyladenosine-3'-phosphate
  modified_base 13: mod_base = OTHER; note = 2'-O-methyluridine-3'-phosphate
  modified_base 14: mod_base = OTHER; note = 2'-deoxy-2'-fluorocytidine-3'-phosphate
  modified_base 15: mod_base = OTHER; note = 2'-O-methyladenosine-3'-phosphate
  modified_base 16: mod_base = OTHER; note = 2'-deoxy-2'-fluorocytidine-3'-phosphate
  modified_base 17: mod_base = OTHER; note = 2'-O-methyladenosine-3'-phosphate
  modified_base 18: mod_base = OTHER; note = 2'-O-methylcytidine-3'-phosphate
  modified_base 19: mod_base = OTHER; note = 2'-O-methyladenosine-3'-phosphate
  modified_base 20: mod_base = OTHER; note = 2'-O-methyladenosine-3'-phosphate
  modified_base 21: mod_base = OTHER; note = 2'-O-methyladenosine-3'-phosphate
  modified_base 22: mod_base = OTHER; note = 2'-O-methyladenosine-3'-phosphate
  modified_base 23: mod_base = OTHER; note = 2'-O-methylguanosine
tagtttgaagaatcacacaaaag

SEQ ID NO: 4515 - RNA, 23 nt, synthetic construct
  source 1..23: mol_type = other RNA
  modified_base 1: mod_base = OTHER; note = 2'-O-methyluridine-3'-phosphate 5'-(E)-Vinylphosphonate
  modified_base 2: mod_base = OTHER; note = 2'-deoxy-2'-fluoroadenosine-3'-phosphate
  modified_base 3: mod_base = OTHER; note = 2'-O-methyladenosine-3'-phosphate
  modified_base 4: mod_base = OTHER; note = 2'-O-methylguanosine-3'-phosphate
  modified_base 5: mod_base = OTHER; note = 2'-O-methyluridine-3'-phosphate
  modified_base 6: mod_base = OTHER; note = 2'-deoxy-2'-fluorouridine-3'-phosphate
  modified_base 7: mod_base = OTHER; note = 2'-O-methyluridine-3'-phosphate
  modified_base 8: mod_base = OTHER; note = 2'-O-methylguanosine-3'-phosphate
  modified_base 9: mod_base = OTHER; note = 2'-O-methyladenosine-3'-phosphate
  modified_base 10: mod_base = OTHER; note = 2'-O-methyladenosine-3'-phosphate
  modified_base 11: mod_base = OTHER; note = 2'-O-methylguanosine-3'-phosphate
  modified_base 12: mod_base = OTHER; note = 2'-O-methyladenosine-3'-phosphate
  modified_base 13: mod_base = OTHER; note = 2'-O-methyladenosine-3'-phosphate
  modified_base 14: mod_base = OTHER; note = 2'-deoxy-2'-fluorouridine-3'-phosphate
  modified_base 15: mod_base = OTHER; note = 2'-O-methylcytidine-3'-phosphate
  modified_base 16: mod_base = OTHER; note = 2'-deoxy-2'-fluoroadenosine-3'-phosphate
  modified_base 17: mod_base = OTHER; note = 2'-O-methylcytidine-3'-phosphate
  modified_base 18: mod_base = OTHER; note = 2'-O-methyladenosine-3'-phosphate
  modified_base 19: mod_base = OTHER; note = 2'-O-methylcytidine-3'-phosphate
  modified_base 20: mod_base = OTHER; note = 2'-O-methyladenosine-3'-phosphate
  modified_base 21: mod_base = OTHER; note = 2'-O-methyladenosine-3'-phosphate
  modified_base 22: mod_base = OTHER; note = 2'-O-methyladenosine-3'-phosphate
  modified_base 23: mod_base = OTHER; note = 2'-O-methyladenosine
taagtttgaagaatcacacaaaa

SEQ ID NO: 4516 - RNA, 23 nt, synthetic construct
  source 1..23: mol_type = other RNA
  modified_base 1: mod_base = OTHER; note = 2'-O-methyluridine-3'-phosphate 5'-(E)-Vinylphosphonate
  modified_base 2: mod_base = OTHER; note = 2'-deoxy-2'-fluoroadenosine-3'-phosphate
  modified_base 3: mod_base = OTHER; note = 2'-O-methyladenosine-3'-phosphate
  modified_base 4: mod_base = OTHER; note = 2'-O-methylcytidine-3'-phosphate
  modified_base 5: mod_base = OTHER; note = 2'-O-methyladenosine-3'-phosphate
  modified_base 6: mod_base = OTHER; note = 2'-deoxy-2'-fluorouridine-3'-phosphate
  modified_base 7: mod_base = OTHER; note = 2'-O-methylguanosine-3'-phosphate
  modified_base 8: mod_base = OTHER; note = 2'-O-methylcytidine-3'-phosphate
  modified_base 9: mod_base = OTHER; note = 2'-O-methyluridine-3'-phosphate
  modified_base 10: mod_base = OTHER; note = 2'-O-methylcytidine-3'-phosphate
  modified_base 11: mod_base = OTHER; note = 2'-O-methylcytidine-3'-phosphate
  modified_base 12: mod_base = OTHER; note = 2'-O-methyluridine-3'-phosphate
  modified_base 13: mod_base = OTHER; note = 2'-O-methyluridine-3'-phosphate
  modified_base 14: mod_base = OTHER; note = 2'-deoxy-2'-fluorocytidine-3'-phosphate
  modified_base 15: mod_base = OTHER; note = 2'-O-methyluridine-3'-phosphate
  modified_base 16: mod_base = OTHER; note = 2'-deoxy-2'-fluoroguanosine-3'-phosphate
  modified_base 17: mod_base = OTHER; note = 2'-O-methyluridine-3'-phosphate
  modified_base 18: mod_base = OTHER; note = 2'-O-methyluridine-3'-phosphate
  modified_base 19: mod_base = OTHER; note = 2'-O-methyluridine-3'-phosphate
  modified_base 20: mod_base = OTHER; note = 2'-O-methylguanosine-3'-phosphate
  modified_base 21: mod_base = OTHER; note = 2'-O-methylguanosine-3'-phosphate
  modified_base 22: mod_base = OTHER; note = 2'-O-methylcytidine-3'-phosphate
  modified_base 23: mod_base = OTHER; note = 2'-O-methyladenosine
taacatgctccttctgtttggca

SEQ ID NO: 4517 - RNA, 23 nt, synthetic construct
  source 1..23: mol_type = other RNA
  modified_base 1: mod_base = OTHER; note = 2'-O-methyluridine-3'-phosphate 5'-(E)-Vinylphosphonate
  modified_base 2: mod_base = OTHER; note = 2'-deoxy-2'-fluorocytidine-3'-phosphate
  modified_base 3: mod_base = OTHER; note = 2'-O-methyladenosine-3'-phosphate
  modified_base 4: mod_base = OTHER; note = 2'-O-methyladenosine-3'-phosphate
  modified_base 5: mod_base = OTHER; note = 2'-O-methylcytidine-3'-phosphate
  modified_base 6: mod_base = OTHER; note = 2'-deoxy-2'-fluoroadenosine-3'-phosphate
  modified_base 7: mod_base = OTHER; note = 2'-O-methyluridine-3'-phosphate
  modified_base 8: mod_base = OTHER; note = 2'-O-methylguanosine-3'-phosphate
  modified_base 9: mod_base = OTHER; note = 2'-O-methylcytidine-3'-phosphate
  modified_base 10: mod_base = OTHER; note = 2'-O-methyluridine-3'-phosphate
  modified_base 11: mod_base = OTHER; note = 2'-O-methylcytidine-3'-phosphate
  modified_base 12: mod_base = OTHER; note = 2'-O-methylcytidine-3'-phosphate
  modified_base 13: mod_base = OTHER; note = 2'-O-methyluridine-3'-phosphate
  modified_base 14: mod_base = OTHER; note = 2'-deoxy-2'-fluorouridine-3'-phosphate
  modified_base 15: mod_base = OTHER; note = 2'-O-methylcytidine-3'-phosphate
  modified_base 16: mod_base = OTHER; note = 2'-deoxy-2'-fluorouridine-3'-phosphate
  modified_base 17: mod_base = OTHER; note = 2'-O-methylguanosine-3'-phosphate
  modified_base 18: mod_base = OTHER; note = 2'-O-methyluridine-3'-phosphate
  modified_base 19: mod_base = OTHER; note = 2'-O-methyluridine-3'-phosphate
  modified_base 20: mod_base = OTHER; note = 2'-O-methyluridine-3'-phosphate
  modified_base 21: mod_base = OTHER; note = 2'-O-methylguanosine-3'-phosphate
  modified_base 22: mod_base = OTHER; note = 2'-O-methylguanosine-3'-phosphate
  modified_base 23: mod_base = OTHER; note = 2'-O-methylcytidine
tcaacatgctccttctgtttggc

SEQ ID NO: 4518 - RNA, 23 nt, synthetic construct
  source 1..23: mol_type = other RNA
  modified_base 1: mod_base = OTHER; note = 2'-O-methyluridine-3'-phosphate 5'-(E)-Vinylphosphonate
  modified_base 2: mod_base = OTHER; note = 2'-deoxy-2'-fluorouridine-3'-phosphate
  modified_base 3: mod_base = OTHER; note = 2'-O-methyluridine-3'-phosphate
  modified_base 4: mod_base = OTHER; note = 2'-O-methyladenosine-3'-phosphate
  modified_base 5: mod_base = OTHER; note = 2'-O-methylguanosine-3'-phosphate
  modified_base 6: mod_base = OTHER; note = 2'-deoxy-2'-fluorocytidine-3'-phosphate
  modified_base 7: mod_base = OTHER; note = 2'-O-methyladenosine-3'-phosphate
  modified_base 8: mod_base = OTHER; note = 2'-O-methyluridine-3'-phosphate
  modified_base 9: mod_base = OTHER; note = 2'-O-methylguanosine-3'-phosphate
  modified_base 10: mod_base = OTHER; note = 2'-O-methyladenosine-3'-phosphate
  modified_base 11: mod_base = OTHER; note = 2'-O-methylcytidine-3'-phosphate
  modified_base 12: mod_base = OTHER; note = 2'-O-methyluridine-3'-phosphate
  modified_base 13: mod_base = OTHER; note = 2'-O-methylguanosine-3'-phosphate
  modified_base 14: mod_base = OTHER; note = 2'-deoxy-2'-fluoroadenosine-3'-phosphate
  modified_base 15: mod_base = OTHER; note = 2'-O-methyluridine-3'-phosphate
  modified_base 16: mod_base = OTHER; note = 2'-deoxy-2'-fluoroguanosine-3'-phosphate
  modified_base 17: mod_base = OTHER; note = 2'-O-methylcytidine-3'-phosphate
  modified_base 18: mod_base = OTHER; note = 2'-O-methylcytidine-3'-phosphate
  modified_base 19: mod_base = OTHER; note = 2'-O-methylcytidine-3'-phosphate
  modified_base 20: mod_base = OTHER; note = 2'-O-methyladenosine-3'-phosphate
  modified_base 21: mod_base = OTHER; note = 2'-O-methyladenosine-3'-phosphate
  modified_base 22: mod_base = OTHER; note = 2'-O-methylcytidine-3'-phosphate
  modified_base 23: mod_base = OTHER; note = 2'-O-methyladenosine
tttagcatgactgatgcccaaca

SEQ ID NO: 4519 - RNA, 23 nt, synthetic construct
  source 1..23: mol_type = other RNA
  modified_base 1: mod_base = OTHER; note = 2'-O-methyluridine-3'-phosphate 5'-(E)-Vinylphosphonate
  modified_base 2: mod_base = OTHER; note = 2'-deoxy-2'-fluorouridine-3'-phosphate
  modified_base 3: mod_base = OTHER; note = 2'-O-methylguanosine-3'-phosphate
  modified_base 4: mod_base = OTHER; note = 2'-O-methylguanosine-3'-phosphate
  modified_base 5: mod_base = OTHER; note = 2'-O-methyluridine-3'-phosphate
  modified_base 6: mod_base = OTHER; note = 2'-deoxy-2'-fluorouridine-3'-phosphate
  modified_base 7: mod_base = OTHER; note = 2'-O-methyladenosine-3'-phosphate
  modified_base 8: mod_base = OTHER; note = 2'-O-methylguanosine-3'-phosphate
  modified_base 9: mod_base = OTHER; note = 2'-O-methylcytidine-3'-phosphate
  modified_base 10: mod_base = OTHER; note = 2'-O-methyladenosine-3'-phosphate
  modified_base 11: mod_base = OTHER; note = 2'-O-methyluridine-3'-phosphate
  modified_base 12: mod_base = OTHER; note = 2'-O-methylguanosine-3'-phosphate
  modified_base 13: mod_base = OTHER; note = 2'-O-methyladenosine-3'-phosphate
  modified_base 14: mod_base = OTHER; note = 2'-deoxy-2'-fluorocytidine-3'-phosphate
  modified_base 15: mod_base = OTHER; note = 2'-O-methyluridine-3'-phosphate
  modified_base 16: mod_base = OTHER; note = 2'-deoxy-2'-fluoroguanosine-3'-phosphate
  modified_base 17: mod_base = OTHER; note = 2'-O-methyladenosine-3'-phosphate
  modified_base 18: mod_base = OTHER; note = 2'-O-methyluridine-3'-phosphate
  modified_base 19: mod_base = OTHER; note = 2'-O-methylguanosine-3'-phosphate
  modified_base 20: mod_base = OTHER; note = 2'-O-methylcytidine-3'-phosphate
  modified_base 21: mod_base = OTHER; note = 2'-O-methylcytidine-3'-phosphate
  modified_base 22: mod_base = OTHER; note = 2'-O-methylcytidine-3'-phosphate
  modified_base 23: mod_base = OTHER; note = 2'-O-methyladenosine
ttggttagcatgactgatgccca

SEQ ID NO: 4520 - RNA, 23 nt, synthetic construct
  source 1..23: mol_type = other RNA
  modified_base 1: mod_base = OTHER; note = 2'-O-methyluridine-3'-phosphate 5'-(E)-Vinylphosphonate
  modified_base 2: mod_base = OTHER; note = 2'-deoxy-2'-fluorocytidine-3'-phosphate
  modified_base 3: mod_base = OTHER; note = 2'-O-methyladenosine-3'-phosphate
  modified_base 4: mod_base = OTHER; note = 2'-O-methyluridine-3'-phosphate
  modified_base 5: mod_base = OTHER; note = 2'-O-methyluridine-3'-phosphate
  modified_base 6: mod_base = OTHER; note = 2'-deoxy-2'-fluoroguanosine-3'-phosphate
  modified_base 7: mod_base = OTHER; note = 2'-O-methylguanosine-3'-phosphate
  modified_base 8: mod_base = OTHER; note = 2'-O-methyluridine-3'-phosphate
  modified_base 9: mod_base = OTHER; note = 2'-O-methyluridine-3'-phosphate
  modified_base 10: mod_base = OTHER; note = 2'-O-methyladenosine-3'-phosphate
  modified_base 11: mod_base = OTHER; note = 2'-O-methylguanosine-3'-phosphate
  modified_base 12: mod_base = OTHER; note = 2'-O-methylcytidine-3'-phosphate
  modified_base 13: mod_base = OTHER; note = 2'-O-methyladenosine-3'-phosphate
  modified_base 14: mod_base = OTHER; note = 2'-deoxy-2'-fluorouridine-3'-phosphate
  modified_base 15: mod_base = OTHER; note = 2'-O-methylguanosine-3'-phosphate
  modified_base 16: mod_base = OTHER; note = 2'-deoxy-2'-fluoroadenosine-3'-phosphate
  modified_base 17: mod_base = OTHER; note = 2'-O-methylcytidine-3'-phosphate
  modified_base 18: mod_base = OTHER; note = 2'-O-methyluridine-3'-phosphate
  modified_base 19: mod_base = OTHER; note = 2'-O-methylguanosine-3'-phosphate
  modified_base 20: mod_base = OTHER; note = 2'-O-methyladenosine-3'-phosphate
  modified_base 21: mod_base = OTHER; note = 2'-O-methyluridine-3'-phosphate
  modified_base 22: mod_base = OTHER; note = 2'-O-methylguanosine-3'-phosphate
  modified_base 23: mod_base = OTHER; note = 2'-O-methylcytidine
tcattggttagcatgactgatgc

SEQ ID NO: 4521 - RNA, 23 nt, synthetic construct
  source 1..23: mol_type = other RNA
  modified_base 1: mod_base = OTHER; note = 2'-O-methyluridine-3'-phosphate 5'-(E)-Vinylphosphonate
  modified_base 2: mod_base = OTHER; note = 2'-deoxy-2'-fluorouridine-3'-phosphate
  modified_base 3: mod_base = OTHER; note = 2'-O-methyluridine-3'-phosphate
  modified_base 4: mod_base = OTHER; note = 2'-O-methyluridine-3'-phosphate
  modified_base 5: mod_base = OTHER; note = 2'-O-methylcytidine-3'-phosphate
  modified_base 6: mod_base = OTHER; note = 2'-deoxy-2'-fluorocytidine-3'-phosphate
  modified_base 7: mod_base = OTHER; note = 2'-O-methyladenosine-3'-phosphate
  modified_base 8: mod_base = OTHER; note = 2'-O-methyluridine-3'-phosphate
  modified_base 9: mod_base = OTHER; note = 2'-O-methyluridine-3'-phosphate
  modified_base 10: mod_base = OTHER; note = 2'-O-methylguanosine-3'-phosphate
  modified_base 11: mod_base = OTHER; note = 2'-O-methylguanosine-3'-phosphate
  modified_base 12: mod_base = OTHER; note = 2'-O-methyluridine-3'-phosphate
  modified_base 13: mod_base = OTHER; note = 2'-O-methyluridine-3'-phosphate
  modified_base 14: mod_base = OTHER; note = 2'-deoxy-2'-fluoroadenosine-3'-phosphate
  modified_base 15: mod_base = OTHER; note = 2'-O-methylguanosine-3'-phosphate
  modified_base 16: mod_base = OTHER; note = 2'-deoxy-2'-fluorocytidine-3'-phosphate
  modified_base 17: mod_base = OTHER; note = 2'-O-methyladenosine-3'-phosphate
  modified_base 18: mod_base = OTHER; note = 2'-O-methyluridine-3'-phosphate
  modified_base 19: mod_base = OTHER; note = 2'-O-methylguanosine-3'-phosphate
  modified_base 20: mod_base = OTHER; note = 2'-O-methyladenosine-3'-phosphate
  modified_base 21: mod_base = OTHER; note = 2'-O-methylcytidine-3'-phosphate
  modified_base 22: mod_base = OTHER; note = 2'-O-methyluridine-3'-phosphate
  modified_base 23: mod_base = OTHER; note = 2'-O-methylguanosine
ttttccattggttagcatgactg

SEQ ID NO: 4522 - RNA, 23 nt, synthetic construct
  source 1..23: mol_type = other RNA
  modified_base 1: mod_base = OTHER; note = 2'-O-methyluridine-3'-phosphate 5'-(E)-Vinylphosphonate
  modified_base 2: mod_base = OTHER; note = 2'-deoxy-2'-fluorouridine-3'-phosphate
  modified_base 3: mod_base = OTHER; note = 2'-O-methylcytidine-3'-phosphate
  modified_base 4: mod_base = OTHER; note = 2'-O-methyluridine-3'-phosphate
  modified_base 5: mod_base = OTHER; note = 2'-O-methyluridine-3'-phosphate
  modified_base 6: mod_base = OTHER; note = 2'-deoxy-2'-fluorouridine-3'-phosphate
  modified_base 7: mod_base = OTHER; note = 2'-O-methyluridine-3'-phosphate
  modified_base 8: mod_base = OTHER; note = 2'-O-methylcytidine-3'-phosphate
  modified_base 9: mod_base = OTHER; note = 2'-O-methylcytidine-3'-phosphate
  modified_base 10: mod_base = OTHER; note = 2'-O-methyladenosine-3'-phosphate
  modified_base 11: mod_base = OTHER; note = 2'-O-methyluridine-3'-phosphate
  modified_base 12: mod_base = OTHER; note = 2'-O-methyluridine-3'-phosphate
  modified_base 13: mod_base = OTHER; note = 2'-O-methylguanosine-3'-phosphate
  modified_base 14: mod_base = OTHER; note = 2'-deoxy-2'-fluoroguanosine-3'-phosphate
  modified_base 15: mod_base = OTHER; note = 2'-O-methyluridine-3'-phosphate
  modified_base 16: mod_base = OTHER; note = 2'-deoxy-2'-fluorouridine-3'-phosphate
  modified_base 17: mod_base = OTHER; note = 2'-O-methyladenosine-3'-phosphate
  modified_base 18: mod_base = OTHER; note = 2'-O-methylguanosine-3'-phosphate
  modified_base 19: mod_base = OTHER; note = 2'-O-methylcytidine-3'-phosphate
  modified_base 20: mod_base = OTHER; note = 2'-O-methyladenosine-3'-phosphate
  modified_base 21: mod_base = OTHER; note = 2'-O-methyluridine-3'-phosphate
  modified_base 22: mod_base = OTHER; note = 2'-O-methylguanosine-3'-phosphate
  modified_base 23: mod_base = OTHER; note = 2'-O-methyladenosine
ttcttttccattggttagcatga

SEQ ID NO: 4523 - RNA, 23 nt, synthetic construct
  source 1..23: mol_type = other RNA
  modified_base 1: mod_base = OTHER; note = 2'-O-methyluridine-3'-phosphate 5'-(E)-Vinylphosphonate
  modified_base 2: mod_base = OTHER; note = 2'-deoxy-2'-fluoroadenosine-3'-phosphate
  modified_base 3: mod_base = OTHER; note = 2'-O-methyluridine-3'-phosphate
  modified_base 4: mod_base = OTHER; note = 2'-O-methyluridine-3'-phosphate
  modified_base 5: mod_base = OTHER; note = 2'-O-methyluridine-3'-phosphate
  modified_base 6: mod_base = OTHER; note = 2'-deoxy-2'-fluoroguanosine-3'-phosphate
  modified_base 7: mod_base = OTHER; note = 2'-O-methyladenosine-3'-phosphate
  modified_base 8: mod_base = OTHER; note = 2'-O-methyluridine-3'-phosphate
  modified_base 9: mod_base = OTHER; note = 2'-O-methylcytidine-3'-phosphate
  modified_base 10: mod_base = OTHER; note = 2'-O-methyladenosine-3'-phosphate
  modified_base 11: mod_base = OTHER; note = 2'-O-methylcytidine-3'-phosphate
  modified_base 12: mod_base = OTHER; note = 2'-O-methylcytidine-3'-phosphate
  modified_base 13: mod_base = OTHER; note = 2'-O-methyluridine-3'-phosphate
  modified_base 14: mod_base = OTHER; note = 2'-deoxy-2'-fluoroguanosine-3'-phosphate
  modified_base 15: mod_base = OTHER; note = 2'-O-methylcytidine-3'-phosphate
  modified_base 16: mod_base = OTHER; note = 2'-deoxy-2'-fluorouridine-3'-phosphate
  modified_base 17: mod_base = OTHER; note = 2'-O-methylcytidine-3'-phosphate
  modified_base 18: mod_base = OTHER; note = 2'-O-methyluridine-3'-phosphate
  modified_base 19: mod_base = OTHER; note = 2'-O-methyluridine-3'-phosphate
  modified_base 20: mod_base = OTHER; note = 2'-O-methyluridine-3'-phosphate
  modified_base 21: mod_base = OTHER; note = 2'-O-methyluridine-3'-phosphate
  modified_base 22: mod_base = OTHER; note = 2'-O-methylcytidine-3'-phosphate
  modified_base 23: mod_base = OTHER; note = 2'-O-methylcytidine
tatttgatcacctgctcttttcc

SEQ ID NO: 4524 - RNA, 23 nt, synthetic construct
  source 1..23: mol_type = other RNA
  modified_base 1: mod_base = OTHER; note = 2'-O-methyluridine-3'-phosphate 5'-(E)-Vinylphosphonate
  modified_base 2: mod_base = OTHER; note = 2'-deoxy-2'-fluorocytidine-3'-phosphate
  modified_base 3: mod_base = OTHER; note = 2'-O-methyladenosine-3'-phosphate
  modified_base 4: mod_base = OTHER; note = 2'-O-methyluridine-3'-phosphate
  modified_base 5: mod_base = OTHER; note = 2'-O-methyluridine-3'-phosphate
  modified_base 6: mod_base = OTHER; note = 2'-deoxy-2'-fluorocytidine-3'-phosphate
  modified_base 7: mod_base = OTHER; note = 2'-O-methyladenosine-3'-phosphate
  modified_base 8: mod_base = OTHER; note = 2'-O-methylguanosine-3'-phosphate
  modified_base 9: mod_base = OTHER; note = 2'-O-methyluridine-3'-phosphate
  modified_base 10: mod_base = OTHER; note = 2'-O-methyluridine-3'-phosphate
  modified_base 11: mod_base = OTHER; note = 2'-O-methylcytidine-3'-phosphate
  modified_base 12: mod_base = OTHER; note = 2'-O-methyluridine-3'-phosphate
  modified_base 13: mod_base = OTHER; note = 2'-O-methylguanosine-3'-phosphate
  modified_base 14: mod_base = OTHER; note = 2'-deoxy-2'-fluoroguanosine-3'-phosphate
  modified_base 15: mod_base = OTHER; note = 2'-O-methyladenosine-3'-phosphate
  modified_base 16: mod_base = OTHER; note = 2'-deoxy-2'-fluoroadenosine-3'-phosphate
  modified_base 17: mod_base = OTHER; note = 2'-O-methylguanosine-3'-phosphate
  modified_base 18: mod_base = OTHER; note = 2'-O-methylguanosine-3'-phosphate
  modified_base 19: mod_base = OTHER; note = 2'-O-methylguanosine-3'-phosphate
  modified_base 20: mod_base = OTHER; note = 2'-O-methyladenosine-3'-phosphate
  modified_base 21: mod_base = OTHER; note = 2'-O-methylguanosine-3'-phosphate
  modified_base 22: mod_base = OTHER; note = 2'-O-methyladenosine-3'-phosphate
  modified_base 23: mod_base = OTHER; note = 2'-O-methylcytidine
tcattcagttctggaagggagac

SEQ ID NO: 4525 - RNA, 23 nt, synthetic construct
  source 1..23: mol_type = other RNA
  modified_base 1: mod_base = OTHER; note = 2'-O-methyluridine-3'-phosphate 5'-(E)-Vinylphosphonate
  modified_base 2: mod_base = OTHER; note = 2'-deoxy-2'-fluoroguanosine-3'-phosphate
  modified_base 3: mod_base = OTHER; note = 2'-O-methylcytidine-3'-phosphate
  modified_base 4: mod_base = OTHER; note = 2'-O-methyladenosine-3'-phosphate
  modified_base 5: mod_base = OTHER; note = 2'-O-methyluridine-3'-phosphate
  modified_base 6: mod_base = OTHER; note = 2'-deoxy-2'-fluorouridine-3'-phosphate
  modified_base 7: mod_base = OTHER; note = 2'-O-methylcytidine-3'-phosphate
  modified_base 8: mod_base = OTHER; note = 2'-O-methyladenosine-3'-phosphate
  modified_base 9: mod_base = OTHER; note = 2'-O-methylguanosine-3'-phosphate
  modified_base 10: mod_base = OTHER; note = 2'-O-methyluridine-3'-phosphate
  modified_base 11: mod_base = OTHER; note = 2'-O-methyluridine-3'-phosphate
  modified_base 12: mod_base = OTHER; note = 2'-O-methylcytidine-3'-phosphate
  modified_base 13: mod_base = OTHER; note = 2'-O-methyluridine-3'-phosphate
  modified_base 14: mod_base = OTHER; note = 2'-deoxy-2'-fluoroguanosine-3'-phosphate
  modified_base 15: mod_base = OTHER; note = 2'-O-methylguanosine-3'-phosphate
  modified_base 16: mod_base = OTHER; note = 2'-deoxy-2'-fluoroadenosine-3'-phosphate
  modified_base 17: mod_base = OTHER; note = 2'-O-methyladenosine-3'-phosphate
  modified_base 18: mod_base = OTHER; note = 2'-O-methylguanosine-3'-phosphate
  modified_base 19: mod_base = OTHER; note = 2'-O-methylguanosine-3'-phosphate
  modified_base 20: mod_base = OTHER; note = 2'-O-methylguanosine-3'-phosphate
  modified_base 21: mod_base = OTHER; note = 2'-O-methyladenosine-3'-phosphate
  modified_base 22: mod_base = OTHER; note = 2'-O-methylguanosine-3'-phosphate
  modified_base 23: mod_base = OTHER; note = 2'-O-methyladenosine
tgcattcagttctggaagggaga

SEQ ID NO: 4526 - RNA, 23 nt, synthetic construct
  source 1..23: mol_type = other RNA
  modified_base 1: mod_base = OTHER; note = 2'-O-methyluridine-3'-phosphate 5'-(E)-Vinylphosphonate
  modified_base 2: mod_base = OTHER; note = 2'-deoxy-2'-fluoroadenosine-3'-phosphate
  modified_base 3: mod_base = OTHER; note = 2'-O-methylguanosine-3'-phosphate
  modified_base 4: mod_base = OTHER; note = 2'-O-methylcytidine-3'-phosphate
  modified_base 5: mod_base = OTHER; note = 2'-O-methyladenosine-3'-phosphate
  modified_base 6: mod_base = OTHER; note = 2'-deoxy-2'-fluorouridine-3'-phosphate
  modified_base 7: mod_base = OTHER; note = 2'-O-methyluridine-3'-phosphate
  modified_base 8: mod_base = OTHER; note = 2'-O-methylcytidine-3'-phosphate
  modified_base 9: mod_base = OTHER; note = 2'-O-methyladenosine-3'-phosphate
  modified_base 10: mod_base = OTHER; note = 2'-O-methylguanosine-3'-phosphate
  modified_base 11: mod_base = OTHER; note = 2'-O-methyluridine-3'-phosphate
  modified_base 12: mod_base = OTHER; note = 2'-O-methyluridine-3'-phosphate
  modified_base 13: mod_base = OTHER; note = 2'-O-methylcytidine-3'-phosphate
  modified_base 14: mod_base = OTHER; note = 2'-deoxy-2'-fluorouridine-3'-phosphate
  modified_base 15: mod_base = OTHER; note = 2'-O-methylguanosine-3'-phosphate
  modified_base 16: mod_base = OTHER; note = 2'-deoxy-2'-fluoroguanosine-3'-phosphate
  modified_base 17: mod_base = OTHER; note = 2'-O-methyladenosine-3'-phosphate
  modified_base 18: mod_base = OTHER; note = 2'-O-methyladenosine-3'-phosphate
  modified_base 19: mod_base = OTHER; note = 2'-O-methylguanosine-3'-phosphate
  modified_base 20: mod_base = OTHER; note = 2'-O-methylguanosine-3'-phosphate
  modified_base 21: mod_base = OTHER; note = 2'-O-methylguanosine-3'-phosphate
  modified_base 22: mod_base = OTHER; note = 2'-O-methyladenosine-3'-phosphate
  modified_base 23: mod_base = OTHER; note = 2'-O-methylguanosine
tagcattcagttctggaagggag

SEQ ID NO: 4527 - RNA, 23 nt, synthetic construct
  source 1..23: mol_type = other RNA
  modified_base 1: mod_base = OTHER; note = 2'-O-methyluridine-3'-phosphate 5'-(E)-Vinylphosphonate
  modified_base 2: mod_base = OTHER; note = 2'-deoxy-2'-fluoroguanosine-3'-phosphate
  modified_base 3: mod_base = OTHER; note = 2'-O-methyladenosine-3'-phosphate
  modified_base 4: mod_base = OTHER; note = 2'-O-methylguanosine-3'-phosphate
  modified_base 5: mod_base = OTHER; note = 2'-O-methylcytidine-3'-phosphate
  modified_base 6: mod_base = OTHER; note = 2'-deoxy-2'-fluoroadenosine-3'-phosphate
  modified_base 7: mod_base = OTHER; note = 2'-O-methyluridine-3'-phosphate
  modified_base 8: mod_base = OTHER; note = 2'-O-methyluridine-3'-phosphate
  modified_base 9: mod_base = OTHER; note = 2'-O-methylcytidine-3'-phosphate
  modified_base 10: mod_base = OTHER; note = 2'-O-methyladenosine-3'-phosphate
  modified_base 11: mod_base = OTHER; note = 2'-O-methylguanosine-3'-phosphate
  modified_base 12: mod_base = OTHER; note = 2'-O-methyluridine-3'-phosphate
  modified_base 13: mod_base = OTHER; note = 2'-O-methyluridine-3'-phosphate
  modified_base 14: mod_base = OTHER; note = 2'-deoxy-2'-fluorocytidine-3'-phosphate
  modified_base 15: mod_base = OTHER; note = 2'-O-methyluridine-3'-phosphate
  modified_base 16: mod_base = OTHER; note = 2'-deoxy-2'-fluoroguanosine-3'-phosphate
  modified_base 17: mod_base = OTHER; note = 2'-O-methylguanosine-3'-phosphate
  modified_base 18: mod_base = OTHER; note = 2'-O-methyladenosine-3'-phosphate
  modified_base 19: mod_base = OTHER; note = 2'-O-methyladenosine-3'-phosphate
  modified_base 20: mod_base = OTHER; note = 2'-O-methylguanosine-3'-phosphate
  modified_base 21: mod_base = OTHER; note = 2'-O-methylguanosine-3'-phosphate
  modified_base 22: mod_base = OTHER; note = 2'-O-methylguanosine-3'-phosphate
  modified_base 23: mod_base = OTHER; note = 2'-O-methyladenosine
tgagcattcagttctggaaggga

SEQ ID NO: 4528 - RNA, 23 nt, synthetic construct
  source 1..23: mol_type = other RNA
  modified_base 1: mod_base = OTHER; note = 2'-O-methyluridine-3'-phosphate 5'-(E)-Vinylphosphonate
  modified_base 2: mod_base = OTHER; note = 2'-deoxy-2'-fluorouridine-3'-phosphate
  modified_base 3: mod_base = OTHER; note = 2'-O-methylguanosine-3'-phosphate
  modified_base 4: mod_base = OTHER; note = 2'-O-methyladenosine-3'-phosphate
  modified_base 5: mod_base = OTHER; note = 2'-O-methylguanosine-3'-phosphate
  modified_base 6: mod_base = OTHER; note = 2'-deoxy-2'-fluorocytidine-3'-phosphate
  modified_base 7: mod_base = OTHER; note = 2'-O-methyladenosine-3'-phosphate
  modified_base 8: mod_base = OTHER; note = 2'-O-methyluridine-3'-phosphate
  modified_base 9: mod_base = OTHER; note = 2'-O-methyluridine-3'-phosphate
  modified_base 10: mod_base = OTHER; note = 2'-O-methylcytidine-3'-phosphate
  modified_base 11: mod_base = OTHER; note = 2'-O-methyladenosine-3'-phosphate
  modified_base 12: mod_base = OTHER; note = 2'-O-methylguanosine-3'-phosphate
  modified_base 13: mod_base = OTHER; note = 2'-O-methyluridine-3'-phosphate
  modified_base 14: mod_base = OTHER; note = 2'-deoxy-2'-fluorouridine-3'-phosphate
  modified_base 15: mod_base = OTHER; note = 2'-O-methylcytidine-3'-phosphate
  modified_base 16: mod_base = OTHER; note = 2'-deoxy-2'-fluorouridine-3'-phosphate
  modified_base 17: mod_base = OTHER; note = 2'-O-methylguanosine-3'-phosphate
  modified_base 18: mod_base = OTHER; note = 2'-O-methylguanosine-3'-phosphate
  modified_base 19: mod_base = OTHER; note = 2'-O-methyladenosine-3'-phosphate
  modified_base 20: mod_base = OTHER; note = 2'-O-methyladenosine-3'-phosphate
  modified_base 21: mod_base = OTHER; note = 2'-O-methylguanosine-3'-phosphate
  modified_base 22: mod_base = OTHER; note = 2'-O-methylguanosine-3'-phosphate
  modified_base 23: mod_base = OTHER; note = 2'-O-methylguanosine
ttgagcattcagttctggaaggg

SEQ ID NO: 4529 - RNA, 23 nt, synthetic construct
  source 1..23: mol_type = other RNA
  modified_base 1: mod_base = OTHER; note = 2'-O-methyluridine-3'-phosphate 5'-(E)-Vinylphosphonate
  modified_base 2: mod_base = OTHER; note = 2'-deoxy-2'-fluorouridine-3'-phosphate
  modified_base 3: mod_base = OTHER; note = 2'-O-methyluridine-3'-phosphate
  modified_base 4: mod_base = OTHER; note = 2'-O-methylguanosine-3'-phosphate
  modified_base 5: mod_base = OTHER; note = 2'-O-methyladenosine-3'-phosphate
  modified_base 6: mod_base = OTHER; note = 2'-deoxy-2'-fluoroguanosine-3'-phosphate
  modified_base 7: mod_base = OTHER; note = 2'-O-methylcytidine-3'-phosphate
  modified_base 8: mod_base = OTHER; note = 2'-O-methyladenosine-3'-phosphate
  modified_base 9: mod_base = OTHER; note = 2'-O-methyluridine-3'-phosphate
  modified_base 10: mod_base = OTHER; note = 2'-O-methyluridine-3'-phosphate
  modified_base 11: mod_base = OTHER; note = 2'-O-methylcytidine-3'-phosphate
  modified_base 12: mod_base = OTHER; note = 2'-O-methyladenosine-3'-phosphate
  modified_base 13: mod_base = OTHER; note = 2'-O-methylguanosine-3'-phosphate
  modified_base 14: mod_base = OTHER; note = 2'-deoxy-2'-fluorouridine-3'-phosphate
  modified_base 15: mod_base = OTHER; note = 2'-O-methyluridine-3'-phosphate
  modified_base 16: mod_base = OTHER; note = 2'-deoxy-2'-fluorocytidine-3'-phosphate
  modified_base 17: mod_base = OTHER; note = 2'-O-methyluridine-3'-phosphate
  modified_base 18: mod_base = OTHER; note = 2'-O-methylguanosine-3'-phosphate
  modified_base 19: mod_base = OTHER; note = 2'-O-methylguanosine-3'-phosphate
  modified_base 20: mod_base = OTHER; note = 2'-O-methyladenosine-3'-phosphate
  modified_base 21: mod_base = OTHER; note = 2'-O-methyladenosine-3'-phosphate
  modified_base 22: mod_base = OTHER; note = 2'-O-methylguanosine-3'-phosphate
  modified_base 23: mod_base = OTHER; note = 2'-O-methylguanosine
tttgagcattcagttctggaagg

SEQ ID NO: 4530 - RNA, 23 nt, synthetic construct
  source 1..23: mol_type = other RNA
  modified_base 1: mod_base = OTHER; note = 2'-O-methyluridine-3'-phosphate 5'-(E)-Vinylphosphonate
  modified_base 2: mod_base = OTHER; note = 2'-deoxy-2'-fluorocytidine-3'-phosphate
  modified_base 3: mod_base = OTHER; note = 2'-O-methyluridine-3'-phosphate
  modified_base 4: mod_base = OTHER; note = 2'-O-methyluridine-3'-phosphate
  modified_base 5: mod_base = OTHER; note = 2'-O-methylguanosine-3'-phosphate
  modified_base 6: mod_base = OTHER; note = 2'-deoxy-2'-fluoroadenosine-3'-phosphate
  modified_base 7: mod_base = OTHER; note = 2'-O-methylguanosine-3'-phosphate
  modified_base 8: mod_base = OTHER; note = 2'-O-methylcytidine-3'-phosphate
  modified_base 9: mod_base = OTHER; note = 2'-O-methyladenosine-3'-phosphate
  modified_base 10: mod_base = OTHER; note = 2'-O-methyluridine-3'-phosphate
  modified_base 11: mod_base = OTHER; note = 2'-O-methyluridine-3'-phosphate
  modified_base 12: mod_base = OTHER; note = 2'-O-methylcytidine-3'-phosphate
  modified_base 13: mod_base = OTHER; note = 2'-O-methyladenosine-3'-phosphate
  modified_base 14: mod_base = OTHER; note = 2'-deoxy-2'-fluoroguanosine-3'-phosphate
  modified_base 15: mod_base = OTHER; note = 2'-O-methyluridine-3'-phosphate
  modified_base 16: mod_base = OTHER; note = 2'-deoxy-2'-fluorouridine-3'-phosphate
  modified_base 17: mod_base = OTHER; note = 2'-O-methylcytidine-3'-phosphate
  modified_base 18: mod_base = OTHER; note = 2'-O-methyluridine-3'-phosphate
  modified_base 19: mod_base = OTHER; note = 2'-O-methylguanosine-3'-phosphate
  modified_base 20: mod_base = OTHER; note = 2'-O-methylguanosine-3'-phosphate
  modified_base 21: mod_base = OTHER; note = 2'-O-methyladenosine-3'-phosphate
  modified_base 22: mod_base = OTHER; note = 2'-O-methyladenosine-3'-phosphate
  modified_base 23: mod_base = OTHER; note = 2'-O-methylguanosine
tcttgagcattcagttctggaag

SEQ ID NO: 4531 - RNA, 23 nt, synthetic construct
  source 1..23: mol_type = other RNA
  modified_base 1: mod_base = OTHER; note = 2'-O-methyluridine-3'-phosphate 5'-(E)-Vinylphosphonate
  modified_base 2: mod_base = OTHER; note = 2'-deoxy-2'-fluoroadenosine-3'-phosphate
  modified_base 3: mod_base = OTHER; note = 2'-O-methylcytidine-3'-phosphate
  modified_base 4: mod_base = OTHER; note = 2'-O-methyluridine-3'-phosphate
  modified_base 5: mod_base = OTHER; note = 2'-O-methyluridine-3'-phosphate
  modified_base 6: mod_base = OTHER; note = 2'-deoxy-2'-fluoroguanosine-3'-phosphate
  modified_base 7: mod_base = OTHER; note = 2'-O-methyladenosine-3'-phosphate
  modified_base 8: mod_base = OTHER; note = 2'-O-methylguanosine-3'-phosphate
  modified_base 9: mod_base = OTHER; note = 2'-O-methylcytidine-3'-phosphate
  modified_base 10: mod_base = OTHER; note = 2'-O-methyladenosine-3'-phosphate
  modified_base 11: mod_base = OTHER; note = 2'-O-methyluridine-3'-phosphate
  modified_base 12: mod_base = OTHER; note = 2'-O-methyluridine-3'-phosphate
  modified_base 13: mod_base = OTHER; note = 2'-O-methylcytidine-3'-phosphate
  modified_base 14: mod_base = OTHER; note = 2'-deoxy-2'-fluoroadenosine-3'-phosphate
  modified_base 15: mod_base = OTHER; note = 2'-O-methylguanosine-3'-phosphate
  modified_base 16: mod_base = OTHER; note = 2'-deoxy-2'-fluorouridine-3'-phosphate
  modified_base 17: mod_base = OTHER; note = 2'-O-methyluridine-3'-phosphate
  modified_base 18: mod_base = OTHER; note = 2'-O-methylcytidine-3'-phosphate
  modified_base 19: mod_base = OTHER; note = 2'-O-methyluridine-3'-phosphate
  modified_base 20: mod_base = OTHER; note = 2'-O-methylguanosine-3'-phosphate
  modified_base 21: mod_base = OTHER; note = 2'-O-methylguanosine-3'-phosphate
  modified_base 22: mod_base = OTHER; note = 2'-O-methyladenosine-3'-phosphate
  modified_base 23: mod_base = OTHER; note = 2'-O-methyladenosine
tacttgagcattcagttctggaa

SEQ ID NO: 4532 - RNA, 23 nt, synthetic construct
  source 1..23: mol_type = other RNA
  modified_base 1: mod_base = OTHER; note = 2'-O-methyluridine-3'-phosphate 5'-(E)-Vinylphosphonate
  modified_base 2: mod_base = OTHER; note = 2'-deoxy-2'-fluoroguanosine-3'-phosphate
  modified_base 3: mod_base = OTHER; note = 2'-O-methyladenosine-3'-phosphate
  modified_base 4: mod_base = OTHER; note = 2'-O-methylcytidine-3'-phosphate
  modified_base 5: mod_base = OTHER; note = 2'-O-methyluridine-3'-phosphate
  modified_base 6: mod_base = OTHER; note = 2'-deoxy-2'-fluorouridine-3'-phosphate
  modified_base 7: mod_base = OTHER; note = 2'-O-methylguanosine-3'-phosphate
  modified_base 8: mod_base = OTHER; note = 2'-O-methyladenosine-3'-phosphate
  modified_base 9: mod_base = OTHER; note = 2'-O-methylguanosine-3'-phosphate
  modified_base 10: mod_base = OTHER; note = 2'-O-methylcytidine-3'-phosphate
  modified_base 11: mod_base = OTHER; note = 2'-O-methyladenosine-3'-phosphate
  modified_base 12: mod_base = OTHER; note = 2'-O-methyluridine-3'-phosphate
  modified_base 13: mod_base = OTHER; note = 2'-O-methyluridine-3'-phosphate
  modified_base 14: mod_base = OTHER; note = 2'-deoxy-2'-fluorocytidine-3'-phosphate
  modified_base 15: mod_base = OTHER; note = 2'-O-methyladenosine-3'-phosphate
  modified_base 16: mod_base = OTHER; note = 2'-deoxy-2'-fluoroguanosine-3'-phosphate
  modified_base 17: mod_base = OTHER; note = 2'-O-methyluridine-3'-phosphate
  modified_base 18: mod_base = OTHER; note = 2'-O-methyluridine-3'-phosphate
  modified_base 19: mod_base = OTHER; note = 2'-O-methylcytidine-3'-phosphate
  modified_base 20: mod_base = OTHER; note = 2'-O-methyluridine-3'-phosphate
  modified_base 21: mod_base = OTHER; note = 2'-O-methylguanosine-3'-phosphate
  modified_base 22: mod_base = OTHER; note = 2'-O-methylguanosine-3'-phosphate
  modified_base 23: mod_base = OTHER; note = 2'-O-methyladenosine
tgacttgagcattcagttctgga

SEQ ID NO: 4533 - RNA, 23 nt, synthetic construct
  source 1..23: mol_type = other RNA
  modified_base 1: mod_base = OTHER; note = 2'-O-methyluridine-3'-phosphate 5'-(E)-Vinylphosphonate
  modified_base 2: mod_base = OTHER; note = 2'-deoxy-2'-fluoroadenosine-3'-phosphate
  modified_base 3: mod_base = OTHER; note = 2'-O-methylguanosine-3'-phosphate
  modified_base 4: mod_base = OTHER; note = 2'-O-methyladenosine-3'-phosphate
  modified_base 5: mod_base = OTHER; note = 2'-O-methylcytidine-3'-phosphate
  modified_base 6: mod_base = OTHER; note = 2'-deoxy-2'-fluorouridine-3'-phosphate
  modified_base 7: mod_base = OTHER; note = 2'-O-methyluridine-3'-phosphate
  modified_base 8: mod_base = OTHER; note = 2'-O-methylguanosine-3'-phosphate
  modified_base 9: mod_base = OTHER; note = 2'-O-methyladenosine-3'-phosphate
  modified_base 10: mod_base = OTHER; note = 2'-O-methylguanosine-3'-phosphate
  modified_base 11: mod_base = OTHER; note = 2'-O-methylcytidine-3'-phosphate
  modified_base 12: mod_base = OTHER; note = 2'-O-methyladenosine-3'-phosphate
  modified_base 13: mod_base = OTHER; note = 2'-O-methyluridine-3'-phosphate
  modified_base 14: mod_base = OTHER; note = 2'-deoxy-2'-fluorouridine-3'-phosphate
  modified_base 15: mod_base = OTHER; note = 2'-O-methylcytidine-3'-phosphate
  modified_base 16: mod_base = OTHER; note = 2'-deoxy-2'-fluoroadenosine-3'-phosphate
  modified_base 17: mod_base = OTHER; note = 2'-O-methylguanosine-3'-phosphate
  modified_base 18: mod_base = OTHER; note = 2'-O-methyluridine-3'-phosphate
  modified_base 19: mod_base = OTHER; note = 2'-O-methyluridine-3'-phosphate
  modified_base 20: mod_base = OTHER; note = 2'-O-methylcytidine-3'-phosphate
  modified_base 21: mod_base = OTHER; note = 2'-O-methyluridine-3'-phosphate
  modified_base 22: mod_base = OTHER; note = 2'-O-methylguanosine-3'-phosphate
  modified_base 23: mod_base = OTHER; note = 2'-O-methylguanosine
tagacttgagcattcagttctgg

SEQ ID NO: 4534 - RNA, 23 nt, synthetic construct
  source 1..23: mol_type = other RNA
  modified_base 1: mod_base = OTHER; note = 2'-O-methyluridine-3'-phosphate 5'-(E)-Vinylphosphonate
  modified_base 2: mod_base = OTHER; note = 2'-deoxy-2'-fluoroadenosine-3'-phosphate
  modified_base 3: mod_base = OTHER; note = 2'-O-methyladenosine-3'-phosphate
  modified_base 4: mod_base = OTHER; note = 2'-O-methylguanosine-3'-phosphate
  modified_base 5: mod_base = OTHER; note = 2'-O-methyladenosine-3'-phosphate
  modified_base 6: mod_base = OTHER; note = 2'-deoxy-2'-fluorocytidine-3'-phosphate
  modified_base 7: mod_base = OTHER; note = 2'-O-methyluridine-3'-phosphate
  modified_base 8: mod_base = OTHER; note = 2'-O-methyluridine-3'-phosphate
  modified_base 9: mod_base = OTHER; note = 2'-O-methylguanosine-3'-phosphate
  modified_base 10: mod_base = OTHER; note = 2'-O-methyladenosine-3'-phosphate
  modified_base 11: mod_base = OTHER; note = 2'-O-methylguanosine-3'-phosphate
  modified_base 12: mod_base = OTHER; note = 2'-O-methylcytidine-3'-phosphate
  modified_base 13: mod_base = OTHER; note = 2'-O-methyladenosine-3'-phosphate
  modified_base 14: mod_base = OTHER; note = 2'-deoxy-2'-fluorouridine-3'-phosphate
  modified_base 15: mod_base = OTHER; note = 2'-O-methyluridine-3'-phosphate
  modified_base 16: mod_base = OTHER; note = 2'-deoxy-2'-fluorocytidine-3'-phosphate
  modified_base 17: mod_base = OTHER; note = 2'-O-methyladenosine-3'-phosphate
  modified_base 18: mod_base = OTHER; note = 2'-O-methylguanosine-3'-phosphate
  modified_base 19: mod_base = OTHER; note = 2'-O-methyluridine-3'-phosphate
  modified_base 20: mod_base = OTHER; note = 2'-O-methyluridine-3'-phosphate
  modified_base 21: mod_base = OTHER; note = 2'-O-methylcytidine-3'-phosphate
  modified_base 22: mod_base = OTHER; note = 2'-O-methyluridine-3'-phosphate
  modified_base 23: mod_base = OTHER; note = 2'-O-methylguanosine
taagacttgagcattcagttctg

SEQ ID NO: 4535 - RNA, 23 nt, synthetic construct
  source 1..23: mol_type = other RNA
  modified_base 1: mod_base = OTHER; note = 2'-O-methyluridine-3'-phosphate 5'-(E)-Vinylphosphonate
  modified_base 2: mod_base = OTHER; note = 2'-deoxy-2'-fluoroguanosine-3'-phosphate
  modified_base 3: mod_base = OTHER; note = 2'-O-methyladenosine-3'-phosphate
  modified_base 4: mod_base = OTHER; note = 2'-O-methyladenosine-3'-phosphate
  modified_base 5: mod_base = OTHER; note = 2'-O-methylguanosine-3'-phosphate
  modified_base 6: mod_base = OTHER; note = 2'-deoxy-2'-fluoroadenosine-3'-phosphate
  modified_base 7: mod_base = OTHER; note = 2'-O-methylcytidine-3'-phosphate
  modified_base 8: mod_base = OTHER; note = 2'-O-methyluridine-3'-phosphate
  modified_base 9: mod_base = OTHER; note = 2'-O-methyluridine-3'-phosphate
  modified_base 10: mod_base = OTHER; note = 2'-O-methylguanosine-3'-phosphate
  modified_base 11: mod_base = OTHER; note = 2'-O-methyladenosine-3'-phosphate
  modified_base 12: mod_base = OTHER; note = 2'-O-methylguanosine-3'-phosphate
  modified_base 13: mod_base = OTHER; note = 2'-O-methylcytidine-3'-phosphate
  modified_base 14: mod_base = OTHER; note = 2'-deoxy-2'-fluoroadenosine-3'-phosphate
  modified_base 15: mod_base = OTHER; note = 2'-O-methyluridine-3'-phosphate
  modified_base 16: mod_base = OTHER; note = 2'-deoxy-2'-fluorouridine-3'-phosphate
  modified_base 17: mod_base = OTHER; note = 2'-O-methylcytidine-3'-phosphate
  modified_base 18: mod_base = OTHER; note = 2'-O-methyladenosine-3'-phosphate
  modified_base 19: mod_base = OTHER; note = 2'-O-methylguanosine-3'-phosphate
  modified_base 20: mod_base = OTHER; note = 2'-O-methyluridine-3'-phosphate
  modified_base 21: mod_base = OTHER; note = 2'-O-methyluridine-3'-phosphate
  modified_base 22: mod_base = OTHER; note = 2'-O-methylcytidine-3'-phosphate
  modified_base 23: mod_base = OTHER; note = 2'-O-methyluridine
tgaagacttgagcattcagttct

SEQ ID NO: 4536 - RNA, 23 nt, synthetic construct
  source 1..23: mol_type = other RNA
  modified_base 1: mod_base = OTHER; note = 2'-O-methyluridine-3'-phosphate 5'-(E)-Vinylphosphonate
  modified_base 2: mod_base = OTHER; note = 2'-deoxy-2'-fluoroadenosine-3'-phosphate
  modified_base 3: mod_base = OTHER; note = 2'-O-methylguanosine-3'-phosphate
  modified_base 4: mod_base = OTHER; note = 2'-O-methyladenosine-3'-phosphate
  modified_base 5: mod_base = OTHER; note = 2'-O-methyladenosine-3'-phosphate
  modified_base 6: mod_base = OTHER; note = 2'-deoxy-2'-fluoroguanosine-3'-phosphate
  modified_base 7: mod_base = OTHER; note = 2'-O-methyladenosine-3'-phosphate
  modified_base 8: mod_base = OTHER; note = 2'-O-methylcytidine-3'-phosphate
  modified_base 9: mod_base = OTHER; note = 2'-O-methyluridine-3'-phosphate
  modified_base 10: mod_base = OTHER; note = 2'-O-methyluridine-3'-phosphate
  modified_base 11: mod_base = OTHER; note = 2'-O-methylguanosine-3'-phosphate
  modified_base 12: mod_base = OTHER; note = 2'-O-methyladenosine-3'-phosphate
  modified_base 13: mod_base = OTHER; note = 2'-O-methylguanosine-3'-phosphate
  modified_base 14: mod_base = OTHER; note = 2'-deoxy-2'-fluorocytidine-3'-phosphate
  modified_base 15: mod_base = OTHER; note = 2'-O-methyladenosine-3'-phosphate
  modified_base 16: mod_base = OTHER; note = 2'-deoxy-2'-fluorouridine-3'-phosphate
  modified_base 17: mod_base = OTHER; note = 2'-O-methyluridine-3'-phosphate
  modified_base 18: mod_base = OTHER; note = 2'-O-methylcytidine-3'-phosphate
  modified_base 19: mod_base = OTHER; note = 2'-O-methyladenosine-3'-phosphate
  modified_base 20: mod_base = OTHER; note = 2'-O-methylguanosine-3'-phosphate
  modified_base 21: mod_base = OTHER; note = 2'-O-methyluridine-3'-phosphate
  modified_base 22: mod_base = OTHER; note = 2'-O-methyluridine-3'-phosphate
  modified_base 23: mod_base = OTHER; note = 2'-O-methylcytidine
tagaagacttgagcattcagttc

SEQ ID NO: 4537 - RNA, 23 nt, synthetic construct
  source 1..23: mol_type = other RNA
  modified_base 1: mod_base = OTHER; note = 2'-O-methyluridine-3'-phosphate 5'-(E)-Vinylphosphonate
  modified_base 2: mod_base = OTHER; note = 2'-deoxy-2'-fluorocytidine-3'-phosphate
  modified_base 3: mod_base = OTHER; note = 2'-O-methyladenosine-3'-phosphate
  modified_base 4: mod_base = OTHER; note = 2'-O-methylguanosine-3'-phosphate
  modified_base 5: mod_base = OTHER; note = 2'-O-methyladenosine-3'-phosphate
  modified_base 6: mod_base = OTHER; note = 2'-deoxy-2'-fluoroadenosine-3'-phosphate
  modified_base 7: mod_base = OTHER; note = 2'-O-methylguanosine-3'-phosphate
  modified_base 8: mod_base = OTHER; note = 2'-O-methyladenosine-3'-phosphate
  modified_base 9: mod_base = OTHER; note = 2'-O-methylcytidine-3'-phosphate
  modified_base 10: mod_base = OTHER; note = 2'-O-methyluridine-3'-phosphate
  modified_base 11: mod_base = OTHER; note = 2'-O-methyluridine-3'-phosphate
  modified_base 12: mod_base = OTHER; note = 2'-O-methylguanosine-3'-phosphate
  modified_base 13: mod_base = OTHER; note = 2'-O-methyladenosine-3'-phosphate
  modified_base 14: mod_base = OTHER; note = 2'-deoxy-2'-fluoroguanosine-3'-phosphate
  modified_base 15: mod_base = OTHER; note = 2'-O-methylcytidine-3'-phosphate
  modified_base 16: mod_base = OTHER; note = 2'-deoxy-2'-fluoroadenosine-3'-phosphate
  modified_base 17: mod_base = OTHER; note = 2'-O-methyluridine-3'-phosphate
  modified_base 18: mod_base = OTHER; note = 2'-O-methyluridine-3'-phosphate
  modified_base 19: mod_base = OTHER; note = 2'-O-methylcytidine-3'-phosphate
  modified_base 20: mod_base = OTHER; note = 2'-O-methyladenosine-3'-phosphate
  modified_base 21: mod_base = OTHER; note = 2'-O-methylguanosine-3'-phosphate
  modified_base 22: mod_base = OTHER; note = 2'-O-methyluridine-3'-phosphate
  modified_base 23: mod_base = OTHER; note = 2'-O-methyluridine
tcagaagacttgagcattcagtt

SEQ ID NO: 4538 - RNA, 23 nt, synthetic construct
  source 1..23: mol_type = other RNA
  modified_base 1: mod_base = OTHER; note = 2'-O-methyluridine-3'-phosphate 5'-(E)-Vinylphosphonate
  modified_base 2: mod_base = OTHER; note = 2'-deoxy-2'-fluoroadenosine-3'-phosphate
  modified_base 3: mod_base = OTHER; note = 2'-O-methylcytidine-3'-phosphate
  modified_base 4: mod_base = OTHER; note = 2'-O-methyladenosine-3'-phosphate
  modified_base 5: mod_base = OTHER; note = 2'-O-methylguanosine-3'-phosphate
  modified_base 6: mod_base = OTHER; note = 2'-deoxy-2'-fluoroadenosine-3'-phosphate
  modified_base 7: mod_base = OTHER; note = 2'-O-methyladenosine-3'-phosphate
  modified_base 8: mod_base = OTHER; note = 2'-O-methylguanosine-3'-phosphate
  modified_base 9: mod_base = OTHER; note = 2'-O-methyladenosine-3'-phosphate
  modified_base 10: mod_base = OTHER; note = 2'-O-methylcytidine-3'-phosphate
  modified_base 11: mod_base = OTHER; note = 2'-O-methyluridine-3'-phosphate
  modified_base 12: mod_base = OTHER; note = 2'-O-methyluridine-3'-phosphate
  modified_base 13: mod_base = OTHER; note = 2'-O-methylguanosine-3'-phosphate
  modified_base 14: mod_base = OTHER; note = 2'-deoxy-2'-fluoroadenosine-3'-phosphate
  modified_base 15: mod_base = OTHER; note = 2'-O-methylguanosine-3'-phosphate
  modified_base 16: mod_base = OTHER; note = 2'-deoxy-2'-fluorocytidine-3'-phosphate
  modified_base 17: mod_base = OTHER; note = 2'-O-methyladenosine-3'-phosphate
  modified_base 18: mod_base = OTHER; note = 2'-O-methyluridine-3'-phosphate
  modified_base 19: mod_base = OTHER; note = 2'-O-methyluridine-3'-phosphate
  modified_base 20: mod_base = OTHER; note = 2'-O-methylcytidine-3'-phosphate
  modified_base 21: mod_base = OTHER; note = 2'-O-methyladenosine-3'-phosphate
  modified_base 22: mod_base = OTHER; note = 2'-O-methylguanosine-3'-phosphate
  modified_base 23: mod_base = OTHER; note = 2'-O-methyluridine
tacagaagacttgagcattcagt

SEQ ID NO: 4539 - RNA, 23 nt, synthetic construct
  source 1..23: mol_type = other RNA
  modified_base 1: mod_base = OTHER; note = 2'-O-methyluridine-3'-phosphate 5'-(E)-Vinylphosphonate
  modified_base 2: mod_base = OTHER; note = 2'-deoxy-2'-fluoroguanosine-3'-phosphate
  modified_base 3: mod_base = OTHER; note = 2'-O-methyladenosine-3'-phosphate
  modified_base 4: mod_base = OTHER; note = 2'-O-methylcytidine-3'-phosphate
  modified_base 5: mod_base = OTHER; note = 2'-O-methyladenosine-3'-phosphate
  modified_base 6: mod_base = OTHER; note = 2'-deoxy-2'-fluoroguanosine-3'-phosphate
  modified_base 7: mod_base = OTHER; note = 2'-O-methyladenosine-3'-phosphate
  modified_base 8: mod_base = OTHER; note = 2'-O-methyladenosine-3'-phosphate
  modified_base 9: mod_base = OTHER; note = 2'-O-methylguanosine-3'-phosphate
  modified_base 10: mod_base = OTHER; note = 2'-O-methyladenosine-3'-phosphate
  modified_base 11: mod_base = OTHER; note = 2'-O-methylcytidine-3'-phosphate
  modified_base 12: mod_base = OTHER; note = 2'-O-methyluridine-3'-phosphate
  modified_base 13: mod_base = OTHER; note = 2'-O-methyluridine-3'-phosphate
  modified_base 14: mod_base = OTHER; note = 2'-deoxy-2'-fluoroguanosine-3'-phosphate
  modified_base 15: mod_base = OTHER; note = 2'-O-methyladenosine-3'-phosphate
  modified_base 16: mod_base = OTHER; note = 2'-deoxy-2'-fluoroguanosine-3'-phosphate
  modified_base 17: mod_base = OTHER; note = 2'-O-methylcytidine-3'-phosphate
  modified_base 18: mod_base = OTHER; note = 2'-O-methyladenosine-3'-phosphate
  modified_base 19: mod_base = OTHER; note = 2'-O-methyluridine-3'-phosphate
  modified_base 20: mod_base = OTHER; note = 2'-O-methyluridine-3'-phosphate
  modified_base 21: mod_base = OTHER; note = 2'-O-methylcytidine-3'-phosphate
  modified_base 22: mod_base = OTHER; note = 2'-O-methyladenosine-3'-phosphate
  modified_base 23: mod_base = OTHER; note = 2'-O-methylguanosine
tgacagaagacttgagcattcag

SEQ ID NO: 4540 - RNA, 23 nt, synthetic construct
  source 1..23: mol_type = other RNA
  modified_base 1: mod_base = OTHER; note = 2'-O-methyluridine-3'-phosphate 5'-(E)-Vinylphosphonate
  modified_base 2: mod_base = OTHER; note = 2'-deoxy-2'-fluorouridine-3'-phosphate
  modified_base 3: mod_base = OTHER; note = 2'-O-methylguanosine-3'-phosphate
  modified_base 4: mod_base = OTHER; note = 2'-O-methyladenosine-3'-phosphate
  modified_base 5: mod_base = OTHER; note = 2'-O-methylcytidine-3'-phosphate
  modified_base 6: mod_base = OTHER; note = 2'-deoxy-2'-fluoroadenosine-3'-phosphate
  modified_base 7: mod_base = OTHER; note = 2'-O-methylguanosine-3'-phosphate
  modified_base 8: mod_base = OTHER; note = 2'-O-methyladenosine-3'-phosphate
  modified_base 9: mod_base = OTHER; note = 2'-O-methyladenosine-3'-phosphate
  modified_base 10: mod_base = OTHER; note = 2'-O-methylguanosine-3'-phosphate
  modified_base 11: mod_base = OTHER; note = 2'-O-methyladenosine-3'-phosphate
  modified_base 12: mod_base = OTHER; note = 2'-O-methylcytidine-3'-phosphate
  modified_base 13: mod_base = OTHER; note = 2'-O-methyluridine-3'-phosphate
  modified_base 14: mod_base = OTHER; note = 2'-deoxy-2'-fluorouridine-3'-phosphate
  modified_base 15: mod_base = OTHER; note = 2'-O-methylguanosine-3'-phosphate
  modified_base 16: mod_base = OTHER; note = 2'-deoxy-2'-fluoroadenosine-3'-phosphate
  modified_base 17: mod_base = OTHER; note = 2'-O-methylguanosine-3'-phosphate
  modified_base 18: mod_base = OTHER; note = 2'-O-methylcytidine-3'-phosphate
  modified_base 19: mod_base = OTHER; note = 2'-O-methyladenosine-3'-phosphate
  modified_base 20: mod_base = OTHER; note = 2'-O-methyluridine-3'-phosphate
  modified_base 21: mod_base = OTHER; note = 2'-O-methyluridine-3'-phosphate
  modified_base 22: mod_base = OTHER; note = 2'-O-methylcytidine-3'-phosphate
  modified_base 23: mod_base = OTHER; note = 2'-O-methyladenosine
ttgacagaagacttgagcattca

SEQ ID NO: 4541 - RNA, 23 nt, synthetic construct
  source 1..23: mol_type = other RNA
  modified_base 1: mod_base = OTHER; note = 2'-O-methyluridine-3'-phosphate 5'-(E)-Vinylphosphonate
  modified_base 2: mod_base = OTHER; note = 2'-deoxy-2'-fluoroadenosine-3'-phosphate
  modified_base 3: mod_base = OTHER; note = 2'-O-methyluridine-3'-phosphate
  modified_base 4: mod_base = OTHER; note = 2'-O-methylguanosine-3'-phosphate
  modified_base 5: mod_base = OTHER; note = 2'-O-methyladenosine-3'-phosphate
  modified_base 6: mod_base = OTHER; note = 2'-deoxy-2'-fluorocytidine-3'-phosphate
  modified_base 7: mod_base = OTHER; note = 2'-O-methyladenosine-3'-phosphate
  modified_base 8: mod_base = OTHER; note = 2'-O-methylguanosine-3'-phosphate
  modified_base 9: mod_base = OTHER; note = 2'-O-methyladenosine-3'-phosphate
  modified_base 10: mod_base = OTHER; note = 2'-O-methyladenosine-3'-phosphate
  modified_base 11: mod_base = OTHER; note = 2'-O-methylguanosine-3'-phosphate
  modified_base 12: mod_base = OTHER; note = 2'-O-methyladenosine-3'-phosphate
  modified_base 13: mod_base = OTHER; note = 2'-O-methylcytidine-3'-phosphate
  modified_base 14: mod_base = OTHER; note = 2'-deoxy-2'-fluorouridine-3'-phosphate
  modified_base 15: mod_base = OTHER; note = 2'-O-methyluridine-3'-phosphate
  modified_base 16: mod_base = OTHER; note = 2'-deoxy-2'-fluoroguanosine-3'-phosphate
  modified_base 17: mod_base = OTHER; note = 2'-O-methyladenosine-3'-phosphate
  modified_base 18: mod_base = OTHER; note = 2'-O-methylguanosine-3'-phosphate
  modified_base 19: mod_base = OTHER; note = 2'-O-methylcytidine-3'-phosphate
  modified_base 20: mod_base = OTHER; note = 2'-O-methyladenosine-3'-phosphate
  modified_base 21: mod_base = OTHER; note = 2'-O-methyluridine-3'-phosphate
  modified_base 22: mod_base = OTHER; note = 2'-O-methyluridine-3'-phosphate
  modified_base 23: mod_base = OTHER; note = 2'-O-methylcytidine
tatgacagaagacttgagcattc

SEQ ID NO: 4542 - RNA, 23 nt, synthetic construct
  source 1..23: mol_type = other RNA
  modified_base 1: mod_base = OTHER; note = 2'-O-methyluridine-3'-phosphate 5'-(E)-Vinylphosphonate
  modified_base 2: mod_base = OTHER; note = 2'-deoxy-2'-fluorouridine-3'-phosphate
  modified_base 3: mod_base = OTHER; note = 2'-O-methyladenosine-3'-phosphate
  modified_base 4: mod_base = OTHER; note = 2'-O-methyluridine-3'-phosphate
  modified_base 5: mod_base = OTHER; note = 2'-O-methylguanosine-3'-phosphate
  modified_base 6: mod_base = OTHER; note = 2'-deoxy-2'-fluoroadenosine-3'-phosphate
  modified_base 7: mod_base = OTHER; note = 2'-O-methylcytidine-3'-phosphate
  modified_base 8: mod_base = OTHER; note = 2'-O-methyladenosine-3'-phosphate
  modified_base 9: mod_base = OTHER; note = 2'-O-methylguanosine-3'-phosphate
  modified_base 10: mod_base = OTHER; note = 2'-O-methyladenosine-3'-phosphate
  modified_base 11: mod_base = OTHER; note = 2'-O-methyladenosine-3'-phosphate
  modified_base 12: mod_base = OTHER; note = 2'-O-methylguanosine-3'-phosphate
  modified_base 13: mod_base = OTHER; note = 2'-O-methyladenosine-3'-phosphate
  modified_base 14: mod_base = OTHER; note = 2'-deoxy-2'-fluorocytidine-3'-phosphate
  modified_base 15: mod_base = OTHER; note = 2'-O-methyluridine-3'-phosphate
  modified_base 16: mod_base = OTHER; note = 2'-deoxy-2'-fluorouridine-3'-phosphate
  modified_base 17: mod_base = OTHER; note = 2'-O-methylguanosine-3'-phosphate
  modified_base 18: mod_base = OTHER; note = 2'-O-methyladenosine-3'-phosphate
  modified_base 19: mod_base = OTHER; note = 2'-O-methylguanosine-3'-phosphate
  modified_base 20: mod_base = OTHER; note = 2'-O-methylcytidine-3'-phosphate
  modified_base 21: mod_base = OTHER; note = 2'-O-methyladenosine-3'-phosphate
  modified_base 22: mod_base = OTHER; note = 2'-O-methyluridine-3'-phosphate
  modified_base 23: mod_base = OTHER; note = 2'-O-methyluridine
ttatgacagaagacttgagcatt

SEQ ID NO: 4543 - RNA, 23 nt, synthetic construct
  source 1..23: mol_type = other RNA
  modified_base 1: mod_base = OTHER; note = 2'-O-methyluridine-3'-phosphate 5'-(E)-Vinylphosphonate
  modified_base 2: mod_base = OTHER; note = 2'-deoxy-2'-fluorocytidine-3'-phosphate
  modified_base 3: mod_base = OTHER; note = 2'-O-methyluridine-3'-phosphate
  modified_base 4: mod_base = OTHER; note = 2'-O-methyladenosine-3'-phosphate
  modified_base 5: mod_base = OTHER; note = 2'-O-methyluridine-3'-phosphate
  modified_base 6: mod_base = OTHER; note = 2'-deoxy-2'-fluoroguanosine-3'-phosphate
  modified_base 7: mod_base = OTHER; note = 2'-O-methyladenosine-3'-phosphate
  modified_base 8: mod_base = OTHER; note = 2'-O-methylcytidine-3'-phosphate
  modified_base 9: mod_base = OTHER; note = 2'-O-methyladenosine-3'-phosphate
  modified_base 10: mod_base = OTHER; note = 2'-O-methylguanosine-3'-phosphate
  modified_base 11: mod_base = OTHER; note = 2'-O-methyladenosine-3'-phosphate
  modified_base 12: mod_base = OTHER; note = 2'-O-methyladenosine-3'-phosphate
  modified_base 13: mod_base = OTHER; note = 2'-O-methylguanosine-3'-phosphate
  modified_base 14: mod_base = OTHER; note = 2'-deoxy-2'-fluoroadenosine-3'-phosphate
  modified_base 15: mod_base = OTHER; note = 2'-O-methylcytidine-3'-phosphate
  modified_base 16: mod_base = OTHER; note = 2'-deoxy-2'-fluorouridine-3'-phosphate
  modified_base 17: mod_base = OTHER; note = 2'-O-methyluridine-3'-phosphate
  modified_base 18: mod_base = OTHER; note = 2'-O-methylguanosine-3'-phosphate
  modified_base 19: mod_base = OTHER; note = 2'-O-methyladenosine-3'-phosphate
  modified_base 20: mod_base = OTHER; note = 2'-O-methylguanosine-3'-phosphate
  modified_base 21: mod_base = OTHER; note = 2'-O-methylcytidine-3'-phosphate
  modified_base 22: mod_base = OTHER; note = 2'-O-methyladenosine-3'-phosphate
  modified_base 23: mod_base = OTHER; note = 2'-O-methyluridine
tctatgacagaagacttgagcat

SEQ ID NO: 4544 - RNA, 23 nt, synthetic construct
  source 1..23: mol_type = other RNA
  modified_base 1: mod_base = OTHER; note = 2'-O-methyluridine-3'-phosphate 5'-(E)-Vinylphosphonate
  modified_base 2: mod_base = OTHER; note = 2'-deoxy-2'-fluoroadenosine-3'-phosphate
  modified_base 3: mod_base = OTHER; note = 2'-O-methylcytidine-3'-phosphate
  modified_base 4: mod_base = OTHER; note = 2'-O-methyluridine-3'-phosphate
  modified_base 5: mod_base = OTHER; note = 2'-O-methyladenosine-3'-phosphate
  modified_base 6: mod_base = OTHER; note = 2'-deoxy-2'-fluorouridine-3'-phosphate
  modified_base 7: mod_base = OTHER; note = 2'-O-methylguanosine-3'-phosphate
  modified_base 8: mod_base = OTHER; note = 2'-O-methyladenosine-3'-phosphate
  modified_base 9: mod_base = OTHER; note = 2'-O-methylcytidine-3'-phosphate
  modified_base 10: mod_base = OTHER; note = 2'-O-methyladenosine-3'-phosphate
  modified_base 11: mod_base = OTHER; note = 2'-O-methylguanosine-3'-phosphate
  modified_base 12: mod_base = OTHER; note = 2'-O-methyladenosine-3'-phosphate
  modified_base 13: mod_base = OTHER; note = 2'-O-methyladenosine-3'-phosphate
  modified_base 14: mod_base = OTHER; note = 2'-deoxy-2'-fluoroguanosine-3'-phosphate
  modified_base 15: mod_base = OTHER; note = 2'-O-methyladenosine-3'-phosphate
  modified_base 16: mod_base = OTHER; note = 2'-deoxy-2'-fluorocytidine-3'-phosphate
  modified_base 17: mod_base = OTHER; note = 2'-O-methyluridine-3'-phosphate
  modified_base 18: mod_base = OTHER; note = 2'-O-methyluridine-3'-phosphate
  modified_base 19: mod_base = OTHER; note = 2'-O-methylguanosine-3'-phosphate
  modified_base 20: mod_base = OTHER; note = 2'-O-methyladenosine-3'-phosphate
  modified_base 21: mod_base = OTHER; note = 2'-O-methylguanosine-3'-phosphate
  modified_base 22: mod_base = OTHER; note = 2'-O-methylcytidine-3'-phosphate
  modified_base 23: mod_base = OTHER; note = 2'-O-methyladenosine
tactatgacagaagacttgagca

SEQ ID NO: 4545 - RNA, 23 nt, synthetic construct
  source 1..23: mol_type = other RNA
  modified_base 1: mod_base = OTHER; note = 2'-O-methyluridine-3'-phosphate 5'-(E)-Vinylphosphonate
  modified_base 2: mod_base = OTHER; note = 2'-deoxy-2'-fluoroadenosine-3'-phosphate
  modified_base 3: mod_base = OTHER; note = 2'-O-methyladenosine-3'-phosphate
  modified_base 4: mod_base = OTHER; note = 2'-O-methylcytidine-3'-phosphate
  modified_base 5: mod_base = OTHER; note = 2'-O-methyluridine-3'-phosphate
  modified_base 6: mod_base = OTHER; note = 2'-deoxy-2'-fluoroadenosine-3'-phosphate
  modified_base 7: mod_base = OTHER; note = 2'-O-methyluridine-3'-phosphate
  modified_base 8: mod_base = OTHER; note = 2'-O-methylguanosine-3'-phosphate
  modified_base 9: mod_base = OTHER; note = 2'-O-methyladenosine-3'-phosphate
  modified_base 10: mod_base = OTHER; note = 2'-O-methylcytidine-3'-phosphate
  modified_base 11: mod_base = OTHER; note = 2'-O-methyladenosine-3'-phosphate
  modified_base 12: mod_base = OTHER; note = 2'-O-methylguanosine-3'-phosphate
  modified_base 13: mod_base = OTHER; note = 2'-O-methyladenosine-3'-phosphate
  modified_base 14: mod_base = OTHER; note = 2'-deoxy-2'-fluoroadenosine-3'-phosphate
  modified_base 15: mod_base = OTHER; note = 2'-O-methylguanosine-3'-phosphate
  modified_base 16: mod_base = OTHER; note = 2'-deoxy-2'-fluoroadenosine-3'-phosphate
  modified_base 17: mod_base = OTHER; note = 2'-O-methylcytidine-3'-phosphate
  modified_base 18: mod_base = OTHER; note = 2'-O-methyluridine-3'-phosphate
  modified_base 19: mod_base = OTHER; note = 2'-O-methyluridine-3'-phosphate
  modified_base 20: mod_base = OTHER; note = 2'-O-methylguanosine-3'-phosphate
  modified_base 21: mod_base = OTHER; note = 2'-O-methyladenosine-3'-phosphate
  modified_base 22: mod_base = OTHER; note = 2'-O-methylguanosine-3'-phosphate
  modified_base 23: mod_base = OTHER; note = 2'-O-methylcytidine
taactatgacagaagacttgagc

SEQ ID NO: 4546 - RNA, 23 nt, synthetic construct
  source 1..23: mol_type = other RNA
  modified_base 1: mod_base = OTHER; note = 2'-O-methyluridine-3'-phosphate 5'-(E)-Vinylphosphonate
  modified_base 2: mod_base = OTHER; note = 2'-deoxy-2'-fluoroguanosine-3'-phosphate
  modified_base 3: mod_base = OTHER; note = 2'-O-methyladenosine-3'-phosphate
  modified_base 4: mod_base = OTHER; note = 2'-O-methyladenosine-3'-phosphate
  modified_base 5: mod_base = OTHER; note = 2'-O-methylcytidine-3'-phosphate
  modified_base 6: mod_base = OTHER; note = 2'-deoxy-2'-fluorouridine-3'-phosphate
  modified_base 7: mod_base = OTHER; note = 2'-O-methyladenosine-3'-phosphate
  modified_base 8: mod_base = OTHER; note = 2'-O-methyluridine-3'-phosphate
  modified_base 9: mod_base = OTHER; note = 2'-O-methylguanosine-3'-phosphate
  modified_base 10: mod_base = OTHER; note = 2'-O-methyladenosine-3'-phosphate
  modified_base 11: mod_base = OTHER; note = 2'-O-methylcytidine-3'-phosphate
  modified_base 12: mod_base = OTHER; note = 2'-O-methyladenosine-3'-phosphate
  modified_base 13: mod_base = OTHER; note = 2'-O-methylguanosine-3'-phosphate
  modified_base 14: mod_base = OTHER; note = 2'-deoxy-2'-fluoroadenosine-3'-phosphate
  modified_base 15: mod_base = OTHER; note = 2'-O-methyladenosine-3'-phosphate
  modified_base 16: mod_base = OTHER; note = 2'-deoxy-2'-fluoroguanosine-3'-phosphate
  modified_base 17: mod_base = OTHER; note = 2'-O-methyladenosine-3'-phosphate
  modified_base 18: mod_base = OTHER; note = 2'-O-methylcytidine-3'-phosphate
  modified_base 19: mod_base = OTHER; note = 2'-O-methyluridine-3'-phosphate
  modified_base 20: mod_base = OTHER; note = 2'-O-methyluridine-3'-phosphate
  modified_base 21: mod_base = OTHER; note = 2'-O-methylguanosine-3'-phosphate
  modified_base 22: mod_base = OTHER; note = 2'-O-methyladenosine-3'-phosphate
  modified_base 23: mod_base = OTHER; note = 2'-O-methylguanosine
tgaactatgacagaagacttgag

SEQ ID NO: 4547 - RNA, 23 nt, synthetic construct
  source 1..23: mol_type = other RNA
  modified_base 1: mod_base = OTHER; note = 2'-O-methyluridine-3'-phosphate 5'-(E)-Vinylphosphonate
  modified_base 2: mod_base = OTHER; note = 2'-deoxy-2'-fluoroguanosine-3'-phosphate
  modified_base 3: mod_base = OTHER; note = 2'-O-methylguanosine-3'-phosphate
  modified_base 4: mod_base = OTHER; note = 2'-O-methyladenosine-3'-phosphate
  modified_base 5: mod_base = OTHER; note = 2'-O-methyladenosine-3'-phosphate
  modified_base 6: mod_base = OTHER; note = 2'-deoxy-2'-fluorocytidine-3'-phosphate
  modified_base 7: mod_base = OTHER; note = 2'-O-methyluridine-3'-phosphate
  modified_base 8: mod_base = OTHER; note = 2'-O-methyladenosine-3'-phosphate
  modified_base 9: mod_base = OTHER; note = 2'-O-methyluridine-3'-phosphate
  modified_base 10: mod_base = OTHER; note = 2'-O-methylguanosine-3'-phosphate
  modified_base 11: mod_base = OTHER; note = 2'-O-methyladenosine-3'-phosphate
  modified_base 12: mod_base = OTHER; note = 2'-O-methylcytidine-3'-phosphate
  modified_base 13: mod_base = OTHER; note = 2'-O-methyladenosine-3'-phosphate
  modified_base 14: mod_base = OTHER; note = 2'-deoxy-2'-fluoroguanosine-3'-phosphate
  modified_base 15: mod_base = OTHER; note = 2'-O-methyladenosine-3'-phosphate
  modified_base 16: mod_base = OTHER; note = 2'-deoxy-2'-fluoroadenosine-3'-phosphate
  modified_base 17: mod_base = OTHER; note = 2'-O-methylguanosine-3'-phosphate
  modified_base 18: mod_base = OTHER; note = 2'-O-methyladenosine-3'-phosphate
  modified_base 19: mod_base = OTHER; note = 2'-O-methylcytidine-3'-phosphate
  modified_base 20: mod_base = OTHER; note = 2'-O-methyluridine-3'-phosphate
  modified_base 21: mod_base = OTHER; note = 2'-O-methyluridine-3'-phosphate
  modified_base 22: mod_base = OTHER; note = 2'-O-methylguanosine-3'-phosphate
  modified_base 23: mod_base = OTHER; note = 2'-O-methyladenosine
tggaactatgacagaagacttga

SEQ ID NO: 4548 - RNA, 23 nt, synthetic construct
  source 1..23: mol_type = other RNA
  modified_base 1: mod_base = OTHER; note = 2'-O-methyluridine-3'-phosphate 5'-(E)-Vinylphosphonate
  modified_base 2: mod_base = OTHER; note = 2'-deoxy-2'-fluorouridine-3'-phosphate
  modified_base 3: mod_base = OTHER; note = 2'-O-methylguanosine-3'-phosphate
  modified_base 4: mod_base = OTHER; note = 2'-O-methylguanosine-3'-phosphate
  modified_base 5: mod_base = OTHER; note = 2'-O-methyladenosine-3'-phosphate
  modified_base 6: mod_base = OTHER; note = 2'-deoxy-2'-fluoroadenosine-3'-phosphate
  modified_base 7: mod_base = OTHER; note = 2'-O-methylcytidine-3'-phosphate
  modified_base 8: mod_base = OTHER; note = 2'-O-methyluridine-3'-phosphate
  modified_base 9: mod_base = OTHER; note = 2'-O-methyladenosine-3'-phosphate
  modified_base 10: mod_base = OTHER; note = 2'-O-methyluridine-3'-phosphate
  modified_base 11: mod_base = OTHER; note = 2'-O-methylguanosine-3'-phosphate
  modified_base 12: mod_base = OTHER; note = 2'-O-methyladenosine-3'-phosphate
  modified_base 13: mod_base = OTHER; note = 2'-O-methylcytidine-3'-phosphate
  modified_base 14: mod_base = OTHER; note = 2'-deoxy-2'-fluoroadenosine-3'-phosphate
  modified_base 15: mod_base = OTHER; note = 2'-O-methylguanosine-3'-phosphate
  modified_base 16: mod_base = OTHER; note = 2'-deoxy-2'-fluoroadenosine-3'-phosphate
  modified_base 17: mod_base = OTHER; note = 2'-O-methyladenosine-3'-phosphate
  modified_base 18: mod_base = OTHER; note = 2'-O-methylguanosine-3'-phosphate
  modified_base 19: mod_base = OTHER; note = 2'-O-methyladenosine-3'-phosphate
  modified_base 20: mod_base = OTHER; note = 2'-O-methylcytidine-3'-phosphate
  modified_base 21: mod_base = OTHER; note = 2'-O-methyluridine-3'-phosphate
  modified_base 22: mod_base = OTHER; note = 2'-O-methyluridine-3'-phosphate
  modified_base 23: mod_base = OTHER; note = 2'-O-methylguanosine
ttggaactatgacagaagacttg

SEQ ID NO: 4549 - RNA, 23 nt, synthetic construct
  source 1..23: mol_type = other RNA
  modified_base 1: mod_base = OTHER; note = 2'-O-methyluridine-3'-phosphate 5'-(E)-Vinylphosphonate
  modified_base 2: mod_base = OTHER; note = 2'-deoxy-2'-fluorouridine-3'-phosphate
  modified_base 3: mod_base = OTHER; note = 2'-O-methyluridine-3'-phosphate
  modified_base 4: mod_base = OTHER; note = 2'-O-methylguanosine-3'-phosphate
  modified_base 5: mod_base = OTHER; note = 2'-O-methylguanosine-3'-phosphate
  modified_base 6: mod_base = OTHER; note = 2'-deoxy-2'-fluoroadenosine-3'-phosphate
  modified_base 7: mod_base = OTHER; note = 2'-O-methyladenosine-3'-phosphate
  modified_base 8: mod_base = OTHER; note = 2'-O-methylcytidine-3'-phosphate
  modified_base 9: mod_base = OTHER; note = 2'-O-methyluridine-3'-phosphate
  modified_base 10: mod_base = OTHER; note = 2'-O-methyladenosine-3'-phosphate
  modified_base 11: mod_base = OTHER; note = 2'-O-methyluridine-3'-phosphate
  modified_base 12: mod_base = OTHER; note = 2'-O-methylguanosine-3'-phosphate
  modified_base 13: mod_base = OTHER; note = 2'-O-methyladenosine-3'-phosphate
  modified_base 14: mod_base = OTHER; note = 2'-deoxy-2'-fluorocytidine-3'-phosphate
  modified_base 15: mod_base = OTHER; note = 2'-O-methyladenosine-3'-phosphate
  modified_base 16: mod_base = OTHER; note = 2'-deoxy-2'-fluoroguanosine-3'-phosphate
  modified_base 17: mod_base = OTHER; note = 2'-O-methyladenosine-3'-phosphate
  modified_base 18: mod_base = OTHER; note = 2'-O-methyladenosine-3'-phosphate
  modified_base 19: mod_base = OTHER; note = 2'-O-methylguanosine-3'-phosphate
  modified_base 20: mod_base = OTHER; note = 2'-O-methyladenosine-3'-phosphate
  modified_base 21: mod_base = OTHER; note = 2'-O-methylcytidine-3'-phosphate
  modified_base 22: mod_base = OTHER; note = 2'-O-methyluridine-3'-phosphate
  modified_base 23: mod_base = OTHER; note = 2'-O-methyluridine
tttggaactatgacagaagactt

SEQ ID NO: 4550 - RNA, 23 nt, synthetic construct
  source 1..23: mol_type = other RNA
  modified_base 1: mod_base = OTHER; note = 2'-O-methyluridine-3'-phosphate 5'-(E)-Vinylphosphonate
  modified_base 2: mod_base = OTHER; note = 2'-deoxy-2'-fluoroguanosine-3'-phosphate
  modified_base 3: mod_base = OTHER; note = 2'-O-methyluridine-3'-phosphate
  modified_base 4: mod_base = OTHER; note = 2'-O-methyluridine-3'-phosphate
  modified_base 5: mod_base = OTHER; note = 2'-O-methylguanosine-3'-phosphate
  modified_base 6: mod_base = OTHER; note = 2'-deoxy-2'-fluoroguanosine-3'-phosphate
  modified_base 7: mod_base = OTHER; note = 2'-O-methyladenosine-3'-phosphate
  modified_base 8: mod_base = OTHER; note = 2'-O-methyladenosine-3'-phosphate
  modified_base 9: mod_base = OTHER; note = 2'-O-methylcytidine-3'-phosphate
  modified_base 10: mod_base = OTHER; note = 2'-O-methyluridine-3'-phosphate
  modified_base 11: mod_base = OTHER; note = 2'-O-methyladenosine-3'-phosphate
  modified_base 12: mod_base = OTHER; note = 2'-O-methyluridine-3'-phosphate
  modified_base 13: mod_base = OTHER; note = 2'-O-methylguanosine-3'-phosphate
  modified_base 14: mod_base = OTHER; note = 2'-deoxy-2'-fluoroadenosine-3'-phosphate
  modified_base 15: mod_base = OTHER; note = 2'-O-methylcytidine-3'-phosphate
  modified_base 16: mod_base = OTHER; note = 2'-deoxy-2'-fluoroadenosine-3'-phosphate
  modified_base 17: mod_base = OTHER; note = 2'-O-methylguanosine-3'-phosphate
  modified_base 18: mod_base = OTHER; note = 2'-O-methyladenosine-3'-phosphate
  modified_base 19: mod_base = OTHER; note = 2'-O-methyladenosine-3'-phosphate
  modified_base 20: mod_base = OTHER; note = 2'-O-methylguanosine-3'-phosphate
  modified_base 21: mod_base = OTHER; note = 2'-O-methyladenosine-3'-phosphate
  modified_base 22: mod_base = OTHER; note = 2'-O-methylcytidine-3'-phosphate
  modified_base 23: mod_base = OTHER; note = 2'-O-methyluridine
tgttggaactatgacagaagact

SEQ ID NO: 4551 - RNA, 23 nt, synthetic construct
  source 1..23: mol_type = other RNA
  modified_base 1: mod_base = OTHER; note = 2'-O-methyluridine-3'-phosphate 5'-(E)-Vinylphosphonate
  modified_base 2: mod_base = OTHER; note = 2'-deoxy-2'-fluorouridine-3'-phosphate
  modified_base 3: mod_base = OTHER; note = 2'-O-methylguanosine-3'-phosphate
  modified_base 4: mod_base = OTHER; note = 2'-O-methyluridine-3'-phosphate
  modified_base 5: mod_base = OTHER; note = 2'-O-methyluridine-3'-phosphate
  modified_base 6: mod_base = OTHER; note = 2'-deoxy-2'-fluoroguanosine-3'-phosphate
  modified_base 7: mod_base = OTHER; note = 2'-O-methylguanosine-3'-phosphate
  modified_base 8: mod_base = OTHER; note = 2'-O-methyladenosine-3'-phosphate
  modified_base 9: mod_base = OTHER; note = 2'-O-methyladenosine-3'-phosphate
  modified_base 10: mod_base = OTHER; note = 2'-O-methylcytidine-3'-phosphate
  modified_base 11: mod_base = OTHER; note = 2'-O-methyluridine-3'-phosphate
  modified_base 12: mod_base = OTHER; note = 2'-O-methyladenosine-3'-phosphate
  modified_base 13: mod_base = OTHER; note = 2'-O-methyluridine-3'-phosphate
  modified_base 14: mod_base = OTHER; note = 2'-deoxy-2'-fluoroguanosine-3'-phosphate
  modified_base 15: mod_base = OTHER; note = 2'-O-methyladenosine-3'-phosphate
  modified_base 16: mod_base = OTHER; note = 2'-deoxy-2'-fluorocytidine-3'-phosphate
  modified_base 17: mod_base = OTHER; note = 2'-O-methyladenosine-3'-phosphate
  modified_base 18: mod_base = OTHER; note = 2'-O-methylguanosine-3'-phosphate
  modified_base 19: mod_base = OTHER; note = 2'-O-methyladenosine-3'-phosphate
  modified_base 20: mod_base = OTHER; note = 2'-O-methyladenosine-3'-phosphate
  modified_base 21: mod_base = OTHER; note = 2'-O-methylguanosine-3'-phosphate
  modified_base 22: mod_base = OTHER; note = 2'-O-methyladenosine-3'-phosphate
  modified_base 23: mod_base = OTHER; note = 2'-O-methylcytidine
ttgttggaactatgacagaagac

SEQ ID NO: 4552 - RNA, 23 nt, synthetic construct
  source 1..23: mol_type = other RNA
  modified_base 1: mod_base = OTHER; note = 2'-O-methyluridine-3'-phosphate 5'-(E)-Vinylphosphonate
  modified_base 2: mod_base = OTHER; note = 2'-deoxy-2'-fluorouridine-3'-phosphate
  modified_base 3: mod_base = OTHER; note = 2'-O-methyluridine-3'-phosphate
  modified_base 4: mod_base = OTHER; note = 2'-O-methylguanosine-3'-phosphate
  modified_base 5: mod_base = OTHER; note = 2'-O-methyluridine-3'-phosphate
  modified_base 6: mod_base = OTHER; note = 2'-deoxy-2'-fluorouridine-3'-phosphate
  modified_base 7: mod_base = OTHER; note = 2'-O-methylguanosine-3'-phosphate
  modified_base 8: mod_base = OTHER; note = 2'-O-methylguanosine-3'-phosphate
  modified_base 9: mod_base = OTHER; note = 2'-O-methyladenosine-3'-phosphate
  modified_base 10: mod_base = OTHER; note = 2'-O-methyladenosine-3'-phosphate
  modified_base 11: mod_base = OTHER; note = 2'-O-methylcytidine-3'-phosphate
  modified_base 12: mod_base = OTHER; note = 2'-O-methyluridine-3'-phosphate
  modified_base 13: mod_base = OTHER; note = 2'-O-methyladenosine-3'-phosphate
  modified_base 14: mod_base = OTHER; note = 2'-deoxy-2'-fluorouridine-3'-phosphate
  modified_base 15: mod_base = OTHER; note = 2'-O-methylguanosine-3'-phosphate
  modified_base 16: mod_base = OTHER; note = 2'-deoxy-2'-fluoroadenosine-3'-phosphate
  modified_base 17: mod_base = OTHER; note = 2'-O-methylcytidine-3'-phosphate
  modified_base 18: mod_base = OTHER; note = 2'-O-methyladenosine-3'-phosphate
  modified_base 19: mod_base = OTHER; note = 2'-O-methylguanosine-3'-phosphate
  modified_base 20: mod_base = OTHER; note = 2'-O-methyladenosine-3'-phosphate
  modified_base 21: mod_base = OTHER; note = 2'-O-methyladenosine-3'-phosphate
  modified_base 22: mod_base = OTHER; note = 2'-O-methylguanosine-3'-phosphate
  modified_base 23: mod_base = OTHER; note = 2'-O-methyladenosine
tttgttggaactatgacagaaga

SEQ ID NO: 4553 - RNA, 23 nt, synthetic construct
  source 1..23: mol_type = other RNA
  modified_base 1: mod_base = OTHER; note = 2'-O-methyluridine-3'-phosphate 5'-(E)-Vinylphosphonate
  modified_base 2: mod_base = OTHER; note = 2'-deoxy-2'-fluoroadenosine-3'-phosphate
  modified_base 3: mod_base = OTHER; note = 2'-O-methyluridine-3'-phosphate
  modified_base 4: mod_base = OTHER; note = 2'-O-methyluridine-3'-phosphate
  modified_base 5: mod_base = OTHER; note = 2'-O-methylguanosine-3'-phosphate
  modified_base 6: mod_base = OTHER; note = 2'-deoxy-2'-fluorouridine-3'-phosphate
  modified_base 7: mod_base = OTHER; note = 2'-O-methyluridine-3'-phosphate
  modified_base 8: mod_base = OTHER; note = 2'-O-methylguanosine-3'-phosphate
  modified_base 9: mod_base = OTHER; note = 2'-O-methylguanosine-3'-phosphate
  modified_base 10: mod_base = OTHER; note = 2'-O-methyladenosine-3'-phosphate
  modified_base 11: mod_base = OTHER; note = 2'-O-methyladenosine-3'-phosphate
  modified_base 12: mod_base = OTHER; note = 2'-O-methylcytidine-3'-phosphate
  modified_base 13: mod_base = OTHER; note = 2'-O-methyluridine-3'-phosphate
  modified_base 14: mod_base = OTHER; note = 2'-deoxy-2'-fluoroadenosine-3'-phosphate
  modified_base 15: mod_base = OTHER; note = 2'-O-methyluridine-3'-phosphate
  modified_base 16: mod_base = OTHER; note = 2'-deoxy-2'-fluoroguanosine-3'-phosphate
  modified_base 17: mod_base = OTHER; note = 2'-O-methyladenosine-3'-phosphate
  modified_base 18: mod_base = OTHER; note = 2'-O-methylcytidine-3'-phosphate
  modified_base 19: mod_base = OTHER; note = 2'-O-methyladenosine-3'-phosphate
  modified_base 20: mod_base = OTHER; note = 2'-O-methylguanosine-3'-phosphate
  modified_base 21: mod_base = OTHER; note = 2'-O-methyladenosine-3'-phosphate
  modified_base 22: mod_base = OTHER; note = 2'-O-methyladenosine-3'-phosphate
  modified_base 23: mod_base = OTHER; note = 2'-O-methylguanosine
tattgttggaactatgacagaag

SEQ ID NO: 4554 - RNA, 23 nt, synthetic construct
  source 1..23: mol_type = other RNA
  modified_base 1: mod_base = OTHER; note = 2'-O-methyluridine-3'-phosphate 5'-(E)-Vinylphosphonate
  modified_base 2: mod_base = OTHER; note = 2'-deoxy-2'-fluorocytidine-3'-phosphate
  modified_base 3: mod_base = OTHER; note = 2'-O-methyladenosine-3'-phosphate
  modified_base 4: mod_base = OTHER; note = 2'-O-methyluridine-3'-phosphate
  modified_base 5: mod_base = OTHER; note = 2'-O-methyluridine-3'-phosphate
  modified_base 6: mod_base = OTHER; note = 2'-deoxy-2'-fluoroguanosine-3'-phosphate
  modified_base 7: mod_base = OTHER; note = 2'-O-methyluridine-3'-phosphate
  modified_base 8: mod_base = OTHER; note = 2'-O-methyluridine-3'-phosphate
  modified_base 9: mod_base = OTHER; note = 2'-O-methylguanosine-3'-phosphate
  modified_base 10: mod_base = OTHER; note = 2'-O-methylguanosine-3'-phosphate
  modified_base 11: mod_base = OTHER; note = 2'-O-methyladenosine-3'-phosphate
  modified_base 12: mod_base = OTHER; note = 2'-O-methyladenosine-3'-phosphate
  modified_base 13: mod_base = OTHER; note = 2'-O-methylcytidine-3'-phosphate
  modified_base 14: mod_base = OTHER; note = 2'-deoxy-2'-fluorouridine-3'-phosphate
  modified_base 15: mod_base = OTHER; note = 2'-O-methyladenosine-3'-phosphate
  modified_base 16: mod_base = OTHER; note = 2'-deoxy-2'-fluorouridine-3'-phosphate
  modified_base 17: mod_base = OTHER; note = 2'-O-methylguanosine-3'-phosphate
  modified_base 18: mod_base = OTHER; note = 2'-O-methyladenosine-3'-phosphate
  modified_base 19: mod_base = OTHER; note = 2'-O-methylcytidine-3'-phosphate
  modified_base 20: mod_base = OTHER; note = 2'-O-methyladenosine-3'-phosphate
  modified_base 21: mod_base = OTHER; note = 2'-O-methylguanosine-3'-phosphate
  modified_base 22: mod_base = OTHER; note = 2'-O-methyladenosine-3'-phosphate
  modified_base 23: mod_base = OTHER; note = 2'-O-methyladenosine
tcattgttggaactatgacagaa

SEQ ID NO: 4555 - RNA, 23 nt, synthetic construct
  source 1..23: mol_type = other RNA
  modified_base 1: mod_base = OTHER; note = 2'-O-methyluridine-3'-phosphate 5'-(E)-Vinylphosphonate
  modified_base 2: mod_base = OTHER; note = 2'-deoxy-2'-fluoroadenosine-3'-phosphate
  modified_base 3: mod_base = OTHER; note = 2'-O-methylcytidine-3'-phosphate
  modified_base 4: mod_base = OTHER; note = 2'-O-methyladenosine-3'-phosphate
  modified_base 5: mod_base = OTHER; note = 2'-O-methyluridine-3'-phosphate
  modified_base 6: mod_base = OTHER; note = 2'-deoxy-2'-fluorouridine-3'-phosphate
  modified_base 7: mod_base = OTHER; note = 2'-O-methylguanosine-3'-phosphate
  modified_base 8: mod_base = OTHER; note = 2'-O-methyluridine-3'-phosphate
  modified_base 9: mod_base = OTHER; note = 2'-O-methyluridine-3'-phosphate
  modified_base 10: mod_base = OTHER; note = 2'-O-methylguanosine-3'-phosphate
  modified_base 11: mod_base = OTHER; note = 2'-O-methylguanosine-3'-phosphate
  modified_base 12: mod_base = OTHER; note = 2'-O-methyladenosine-3'-phosphate
  modified_base 13: mod_base = OTHER; note = 2'-O-methyladenosine-3'-phosphate
  modified_base 14: mod_base = OTHER; note = 2'-deoxy-2'-fluorocytidine-3'-phosphate
  modified_base 15: mod_base = OTHER; note = 2'-O-methyluridine-3'-phosphate
  modified_base 16: mod_base = OTHER; note = 2'-deoxy-2'-fluoroadenosine-3'-phosphate
  modified_base 17: mod_base = OTHER; note = 2'-O-methyluridine-3'-phosphate
  modified_base 18: mod_base = OTHER; note = 2'-O-methylguanosine-3'-phosphate
  modified_base 19: mod_base = OTHER; note = 2'-O-methyladenosine-3'-phosphate
  modified_base 20: mod_base = OTHER; note = 2'-O-methylcytidine-3'-phosphate
  modified_base 21: mod_base = OTHER; note = 2'-O-methyladenosine-3'-phosphate
  modified_base 22: mod_base = OTHER; note = 2'-O-methylguanosine-3'-phosphate
  modified_base 23: mod_base = OTHER; note = 2'-O-methyladenosine
tacattgttggaactatgacaga

SEQ ID NO: 4556 - RNA, 23 nt, synthetic construct
  source 1..23: mol_type = other RNA
  modified_base 1: mod_base = OTHER; note = 2'-O-methyluridine-3'-phosphate 5'-(E)-Vinylphosphonate
  modified_base 2: mod_base = OTHER; note = 2'-deoxy-2'-fluoroadenosine-3'-phosphate
  modified_base 3: mod_base = OTHER; note = 2'-O-methyladenosine-3'-phosphate
  modified_base 4: mod_base = OTHER; note = 2'-O-methylcytidine-3'-phosphate
  modified_base 5: mod_base = OTHER; note = 2'-O-methyladenosine-3'-phosphate
  modified_base 6: mod_base = OTHER; note = 2'-deoxy-2'-fluorouridine-3'-phosphate
  modified_base 7: mod_base = OTHER; note = 2'-O-methyluridine-3'-phosphate
  modified_base 8: mod_base = OTHER; note = 2'-O-methylguanosine-3'-phosphate
  modified_base 9: mod_base = OTHER; note = 2'-O-methyluridine-3'-phosphate
  modified_base 10: mod_base = OTHER; note = 2'-O-methyluridine-3'-phosphate
  modified_base 11: mod_base = OTHER; note = 2'-O-methylguanosine-3'-phosphate
  modified_base 12: mod_base = OTHER; note = 2'-O-methylguanosine-3'-phosphate
  modified_base 13: mod_base = OTHER; note = 2'-O-methyladenosine-3'-phosphate
  modified_base 14: mod_base = OTHER; note = 2'-deoxy-2'-fluoroadenosine-3'-phosphate
  modified_base 15: mod_base = OTHER; note = 2'-O-methylcytidine-3'-phosphate
  modified_base 16: mod_base = OTHER; note = 2'-deoxy-2'-fluorouridine-3'-phosphate
  modified_base 17: mod_base = OTHER; note = 2'-O-methyladenosine-3'-phosphate
  modified_base 18: mod_base = OTHER; note = 2'-O-methyluridine-3'-phosphate
  modified_base 19: mod_base = OTHER; note = 2'-O-methylguanosine-3'-phosphate
  modified_base 20: mod_base = OTHER; note = 2'-O-methyladenosine-3'-phosphate
  modified_base 21: mod_base = OTHER; note = 2'-O-methylcytidine-3'-phosphate
  modified_base 22: mod_base = OTHER; note = 2'-O-methyladenosine-3'-phosphate
  modified_base 23: mod_base = OTHER; note = 2'-O-methylguanosine
taacattgttggaactatgacag

SEQ ID NO: 4557 - RNA, 23 nt, synthetic construct
  source 1..23: mol_type = other RNA
  modified_base 1: mod_base = OTHER; note = 2'-O-methyluridine-3'-phosphate 5'-(E)-Vinylphosphonate
  modified_base 2: mod_base = OTHER; note = 2'-deoxy-2'-fluorouridine-3'-phosphate
  modified_base 3: mod_base = OTHER; note = 2'-O-methyladenosine-3'-phosphate
  modified_base 4: mod_base = OTHER; note = 2'-O-methyladenosine-3'-phosphate
  modified_base 5: mod_base = OTHER; note = 2'-O-methylcytidine-3'-phosphate
  modified_base 6: mod_base = OTHER; note = 2'-deoxy-2'-fluoroadenosine-3'-phosphate
  modified_base 7: mod_base = OTHER; note = 2'-O-methyluridine-3'-phosphate
  modified_base 8: mod_base = OTHER; note = 2'-O-methyluridine-3'-phosphate
  modified_base 9: mod_base = OTHER; note = 2'-O-methylguanosine-3'-phosphate
  modified_base 10: mod_base = OTHER; note = 2'-O-methyluridine-3'-phosphate
  modified_base 11: mod_base = OTHER; note = 2'-O-methyluridine-3'-phosphate
  modified_base 12: mod_base = OTHER; note = 2'-O-methylguanosine-3'-phosphate
  modified_base 13: mod_base = OTHER; note = 2'-O-methylguanosine-3'-phosphate
  modified_base 14: mod_base = OTHER; note = 2'-deoxy-2'-fluoroadenosine-3'-phosphate
  modified_base 15: mod_base = OTHER; note = 2'-O-methyladenosine-3'-phosphate
  modified_base 16: mod_base = OTHER; note = 2'-deoxy-2'-fluorocytidine-3'-phosphate
  modified_base 17: mod_base = OTHER; note = 2'-O-methyluridine-3'-phosphate
  modified_base 18: mod_base = OTHER; note = 2'-O-methyladenosine-3'-phosphate
  modified_base 19: mod_base = OTHER; note = 2'-O-methyluridine-3'-phosphate
  modified_base 20: mod_base = OTHER; note = 2'-O-methylguanosine-3'-phosphate
  modified_base 21: mod_base = OTHER; note = 2'-O-methyladenosine-3'-phosphate
  modified_base 22: mod_base = OTHER; note = 2'-O-methylcytidine-3'-phosphate
  modified_base 23: mod_base = OTHER; note = 2'-O-methyladenosine
ttaacattgttggaactatgaca

SEQ ID NO: 4558 - RNA, 23 nt, synthetic construct
  source 1..23: mol_type = other RNA
  modified_base 1: mod_base = OTHER; note = 2'-O-methyluridine-3'-phosphate 5'-(E)-Vinylphosphonate
  modified_base 2: mod_base = OTHER; note = 2'-deoxy-2'-fluoroguanosine-3'-phosphate
  modified_base 3: mod_base = OTHER; note = 2'-O-methyluridine-3'-phosphate
  modified_base 4: mod_base = OTHER; note = 2'-O-methyladenosine-3'-phosphate
  modified_base 5: mod_base = OTHER; note = 2'-O-methyladenosine-3'-phosphate
  modified_base 6: mod_base = OTHER; note = 2'-deoxy-2'-fluorocytidine-3'-phosphate
  modified_base 7: mod_base = OTHER; note = 2'-O-methyladenosine-3'-phosphate
  modified_base 8: mod_base = OTHER; note = 2'-O-methyluridine-3'-phosphate
  modified_base 9: mod_base = OTHER; note = 2'-O-methyluridine-3'-phosphate
  modified_base 10: mod_base = OTHER; note = 2'-O-methylguanosine-3'-phosphate
  modified_base 11: mod_base = OTHER; note = 2'-O-methyluridine-3'-phosphate
  modified_base 12: mod_base = OTHER; note = 2'-O-methyluridine-3'-phosphate
  modified_base 13: mod_base = OTHER; note = 2'-O-methylguanosine-3'-phosphate
  modified_base 14: mod_base = OTHER; note = 2'-deoxy-2'-fluoroguanosine-3'-phosphate
  modified_base 15: mod_base = OTHER; note = 2'-O-methyladenosine-3'-phosphate
  modified_base 16: mod_base = OTHER; note = 2'-deoxy-2'-fluoroadenosine-3'-phosphate
  modified_base 17: mod_base = OTHER; note = 2'-O-methylcytidine-3'-phosphate
  modified_base 18: mod_base = OTHER; note = 2'-O-methyluridine-3'-phosphate
  modified_base 19: mod_base = OTHER; note = 2'-O-methyladenosine-3'-phosphate
  modified_base 20: mod_base = OTHER; note = 2'-O-methyluridine-3'-phosphate
  modified_base 21: mod_base = OTHER; note = 2'-O-methylguanosine-3'-phosphate
  modified_base 22: mod_base = OTHER; note = 2'-O-methyladenosine-3'-phosphate
  modified_base 23: mod_base = OTHER; note = 2'-O-methylcytidine
tgtaacattgttggaactatgac

SEQ ID NO: 4559 - RNA, 23 nt, synthetic construct
  source 1..23: mol_type = other RNA
  modified_base 1: mod_base = OTHER; note = 2'-O-methyluridine-3'-phosphate 5'-(E)-Vinylphosphonate
  modified_base 2: mod_base = OTHER; note = 2'-deoxy-2'-fluoroguanosine-3'-phosphate
  modified_base 3: mod_base = OTHER; note = 2'-O-methylguanosine-3'-phosphate
  modified_base 4: mod_base = OTHER; note = 2'-O-methyluridine-3'-phosphate
  modified_base 5: mod_base = OTHER; note = 2'-O-methyladenosine-3'-phosphate
  modified_base 6: mod_base = OTHER; note = 2'-deoxy-2'-fluoroadenosine-3'-phosphate
  modified_base 7: mod_base = OTHER; note = 2'-O-methylcytidine-3'-phosphate
  modified_base 8: mod_base = OTHER; note = 2'-O-methyladenosine-3'-phosphate
  modified_base 9: mod_base = OTHER; note = 2'-O-methyluridine-3'-phosphate
  modified_base 10: mod_base = OTHER; note = 2'-O-methyluridine-3'-phosphate
  modified_base 11: mod_base = OTHER; note = 2'-O-methylguanosine-3'-phosphate
  modified_base 12: mod_base = OTHER; note = 2'-O-methyluridine-3'-phosphate
  modified_base 13: mod_base = OTHER; note = 2'-O-methyluridine-3'-phosphate
  modified_base 14: mod_base = OTHER; note = 2'-deoxy-2'-fluoroguanosine-3'-phosphate
  modified_base 15: mod_base = OTHER; note = 2'-O-methylguanosine-3'-phosphate
  modified_base 16: mod_base = OTHER; note = 2'-deoxy-2'-fluoroadenosine-3'-phosphate
  modified_base 17: mod_base = OTHER; note = 2'-O-methyladenosine-3'-phosphate
  modified_base 18: mod_base = OTHER; note = 2'-O-methylcytidine-3'-phosphate
  modified_base 19: mod_base = OTHER; note = 2'-O-methyluridine-3'-phosphate
  modified_base 20: mod_base = OTHER; note = 2'-O-methyladenosine-3'-phosphate
  modified_base 21: mod_base = OTHER; note = 2'-O-methyluridine-3'-phosphate
  modified_base 22: mod_base = OTHER; note = 2'-O-methylguanosine-3'-phosphate
  modified_base 23: mod_base = OTHER; note = 2'-O-methyladenosine
tggtaacattgttggaactatga

SEQ ID NO: 4560 - RNA, 23 nt, synthetic construct
  source 1..23: mol_type = other RNA
  modified_base 1: mod_base = OTHER; note = 2'-O-methyluridine-3'-phosphate 5'-(E)-Vinylphosphonate
  modified_base 2: mod_base = OTHER; note = 2'-deoxy-2'-fluorouridine-3'-phosphate
  modified_base 3: mod_base = OTHER; note = 2'-O-methylguanosine-3'-phosphate
  modified_base 4: mod_base = OTHER; note = 2'-O-methylguanosine-3'-phosphate
  modified_base 5: mod_base = OTHER; note = 2'-O-methyluridine-3'-phosphate
  modified_base 6: mod_base = OTHER; note = 2'-deoxy-2'-fluoroadenosine-3'-phosphate
  modified_base 7: mod_base = OTHER; note = 2'-O-methyladenosine-3'-phosphate
  modified_base 8: mod_base = OTHER; note = 2'-O-methylcytidine-3'-phosphate
  modified_base 9: mod_base = OTHER; note = 2'-O-methyladenosine-3'-phosphate
  modified_base 10: mod_base = OTHER; note = 2'-O-methyluridine-3'-phosphate
  modified_base 11: mod_base = OTHER; note = 2'-O-methyluridine-3'-phosphate
  modified_base 12: mod_base = OTHER; note = 2'-O-methylguanosine-3'-phosphate
  modified_base 13: mod_base = OTHER; note = 2'-O-methyluridine-3'-phosphate
  modified_base 14: mod_base = OTHER; note = 2'-deoxy-2'-fluorouridine-3'-phosphate
  modified_base 15: mod_base = OTHER; note = 2'-O-methylguanosine-3'-phosphate
  modified_base 16: mod_base = OTHER; note = 2'-deoxy-2'-fluoroguanosine-3'-phosphate
  modified_base 17: mod_base = OTHER; note = 2'-O-methyladenosine-3'-phosphate
  modified_base 18: mod_base = OTHER; note = 2'-O-methyladenosine-3'-phosphate
  modified_base 19: mod_base = OTHER; note = 2'-O-methylcytidine-3'-phosphate
  modified_base 20: mod_base = OTHER; note = 2'-O-methyluridine-3'-phosphate
  modified_base 21: mod_base = OTHER; note = 2'-O-methyladenosine-3'-phosphate
  modified_base 22: mod_base = OTHER; note = 2'-O-methyluridine-3'-phosphate
  modified_base 23: mod_base = OTHER; note = 2'-O-methylguanosine
ttggtaacattgttggaactatg

SEQ ID NO: 4561 - RNA, 23 nt, synthetic construct
  source 1..23: mol_type = other RNA
  modified_base 1: mod_base = OTHER; note = 2'-O-methyluridine-3'-phosphate 5'-(E)-Vinylphosphonate
  modified_base 2: mod_base = OTHER; note = 2'-deoxy-2'-fluorouridine-3'-phosphate
  modified_base 3: mod_base = OTHER; note = 2'-O-methyluridine-3'-phosphate
  modified_base 4: mod_base = OTHER; note = 2'-O-methylguanosine-3'-phosphate
  modified_base 5: mod_base = OTHER; note = 2'-O-methylguanosine-3'-phosphate
  modified_base 6: mod_base = OTHER; note = 2'-deoxy-2'-fluorouridine-3'-phosphate
  modified_base 7: mod_base = OTHER; note = 2'-O-methyladenosine-3'-phosphate
  modified_base 8: mod_base = OTHER; note = 2'-O-methyladenosine-3'-phosphate
  modified_base 9: mod_base = OTHER; note = 2'-O-methylcytidine-3'-phosphate
  modified_base 10: mod_base = OTHER; note = 2'-O-methyladenosine-3'-phosphate
  modified_base 11: mod_base = OTHER; note = 2'-O-methyluridine-3'-phosphate
  modified_base 12: mod_base = OTHER; note = 2'-O-methyluridine-3'-phosphate
  modified_base 13: mod_base = OTHER; note = 2'-O-methylguanosine-3'-phosphate
  modified_base 14: mod_base = OTHER; note = 2'-deoxy-2'-fluorouridine-3'-phosphate
  modified_base 15: mod_base = OTHER; note = 2'-O-methyluridine-3'-phosphate
  modified_base 16: mod_base = OTHER; note = 2'-deoxy-2'-fluoroguanosine-3'-phosphate
  modified_base 17: mod_base = OTHER; note = 2'-O-methylguanosine-3'-phosphate
  modified_base 18: mod_base = OTHER; note = 2'-O-methyladenosine-3'-phosphate
  modified_base 19: mod_base = OTHER; note = 2'-O-methyladenosine-3'-phosphate
  modified_base 20: mod_base = OTHER; note = 2'-O-methylcytidine-3'-phosphate
  modified_base 21: mod_base = OTHER; note = 2'-O-methyluridine-3'-phosphate
  modified_base 22: mod_base = OTHER; note = 2'-O-methyladenosine-3'-phosphate
  modified_base 23: mod_base = OTHER; note = 2'-O-methyluridine
tttggtaacattgttggaactat

SEQ ID NO: 4562 - RNA, 23 nt, synthetic construct
  source 1..23: mol_type = other RNA
  modified_base 1: mod_base = OTHER; note = 2'-O-methyluridine-3'-phosphate 5'-(E)-Vinylphosphonate
  modified_base 2: mod_base = OTHER; note = 2'-deoxy-2'-fluorouridine-3'-phosphate
  modified_base 3: mod_base = OTHER; note = 2'-O-methyluridine-3'-phosphate
  modified_base 4: mod_base = OTHER; note = 2'-O-methyluridine-3'-phosphate
  modified_base 5: mod_base = OTHER; note = 2'-O-methylguanosine-3'-phosphate
  modified_base 6: mod_base = OTHER; note = 2'-deoxy-2'-fluoroguanosine-3'-phosphate
  modified_base 7: mod_base = OTHER; note = 2'-O-methyluridine-3'-phosphate
  modified_base 8: mod_base = OTHER; note = 2'-O-methyladenosine-3'-phosphate
  modified_base 9: mod_base = OTHER; note = 2'-O-methyladenosine-3'-phosphate
  modified_base 10: mod_base = OTHER; note = 2'-O-methylcytidine-3'-phosphate
  modified_base 11: mod_base = OTHER; note = 2'-O-methyladenosine-3'-phosphate
  modified_base 12: mod_base = OTHER; note = 2'-O-methyluridine-3'-phosphate
  modified_base 13: mod_base = OTHER; note = 2'-O-methyluridine-3'-phosphate
  modified_base 14: mod_base = OTHER; note = 2'-deoxy-2'-fluoroguanosine-3'-phosphate
  modified_base 15: mod_base = OTHER; note = 2'-O-methyluridine-3'-phosphate
  modified_base 16: mod_base = OTHER; note = 2'-deoxy-2'-fluorouridine-3'-phosphate
  modified_base 17: mod_base = OTHER; note = 2'-O-methylguanosine-3'-phosphate
  modified_base 18: mod_base = OTHER; note = 2'-O-methylguanosine-3'-phosphate
  modified_base 19: mod_base = OTHER; note = 2'-O-methyladenosine-3'-phosphate
  modified_base 20: mod_base = OTHER; note = 2'-O-methyladenosine-3'-phosphate
  modified_base 21: mod_base = OTHER; note = 2'-O-methylcytidine-3'-phosphate
  modified_base 22: mod_base = OTHER; note = 2'-O-methyluridine-3'-phosphate
  modified_base 23: mod_base = OTHER; note = 2'-O-methyladenosine
ttttggtaacattgttggaacta

SEQ ID NO: 4563 - RNA, 23 nt, synthetic construct
  source 1..23: mol_type = other RNA
  modified_base 1: mod_base = OTHER; note = 2'-O-methyluridine-3'-phosphate 5'-(E)-Vinylphosphonate
  modified_base 2: mod_base = OTHER; note = 2'-deoxy-2'-fluorouridine-3'-phosphate
  modified_base 3: mod_base = OTHER; note = 2'-O-methyluridine-3'-phosphate
  modified_base 4: mod_base = OTHER; note = 2'-O-methyluridine-3'-phosphate
  modified_base 5: mod_base = OTHER; note = 2'-O-methyluridine-3'-phosphate
  modified_base 6: mod_base = OTHER; note = 2'-deoxy-2'-fluoroguanosine-3'-phosphate
  modified_base 7: mod_base = OTHER; note = 2'-O-methylguanosine-3'-phosphate
  modified_base 8: mod_base = OTHER; note = 2'-O-methyluridine-3'-phosphate
  modified_base 9: mod_base = OTHER; note = 2'-O-methyladenosine-3'-phosphate
  modified_base 10: mod_base = OTHER; note = 2'-O-methyladenosine-3'-phosphate
  modified_base 11: mod_base = OTHER; note = 2'-O-methylcytidine-3'-phosphate
  modified_base 12: mod_base = OTHER; note = 2'-O-methyladenosine-3'-phosphate
  modified_base 13: mod_base = OTHER; note = 2'-O-methyluridine-3'-phosphate
  modified_base 14: mod_base = OTHER; note = 2'-deoxy-2'-fluorouridine-3'-phosphate
  modified_base 15: mod_base = OTHER; note = 2'-O-methylguanosine-3'-phosphate
  modified_base 16: mod_base = OTHER; note = 2'-deoxy-2'-fluorouridine-3'-phosphate
  modified_base 17: mod_base = OTHER; note = 2'-O-methyluridine-3'-phosphate
  modified_base 18: mod_base = OTHER; note = 2'-O-methylguanosine-3'-phosphate
  modified_base 19: mod_base = OTHER; note = 2'-O-methylguanosine-3'-phosphate
  modified_base 20: mod_base = OTHER; note = 2'-O-methyladenosine-3'-phosphate
  modified_base 21: mod_base = OTHER; note = 2'-O-methyladenosine-3'-phosphate
  modified_base 22: mod_base = OTHER; note = 2'-O-methylcytidine-3'-phosphate
  modified_base 23: mod_base = OTHER; note = 2'-O-methyluridine
tttttggtaacattgttggaact

SEQ ID NO: 4564 - RNA, 23 nt, synthetic construct
  source 1..23: mol_type = other RNA
  modified_base 1: mod_base = OTHER; note = 2'-O-methyluridine-3'-phosphate 5'-(E)-Vinylphosphonate
  modified_base 2: mod_base = OTHER; note = 2'-deoxy-2'-fluoroguanosine-3'-phosphate
  modified_base 3: mod_base = OTHER; note = 2'-O-methyluridine-3'-phosphate
  modified_base 4: mod_base = OTHER; note = 2'-O-methyluridine-3'-phosphate
  modified_base 5: mod_base = OTHER; note = 2'-O-methyluridine-3'-phosphate
  modified_base 6: mod_base = OTHER; note = 2'-deoxy-2'-fluorouridine-3'-phosphate
  modified_base 7: mod_base = OTHER; note = 2'-O-methylguanosine-3'-phosphate
  modified_base 8: mod_base = OTHER; note = 2'-O-methylguanosine-3'-phosphate
  modified_base 9: mod_base = OTHER; note = 2'-O-methyluridine-3'-phosphate
  modified_base 10: mod_base = OTHER; note = 2'-O-methyladenosine-3'-phosphate
  modified_base 11: mod_base = OTHER; note = 2'-O-methyladenosine-3'-phosphate
  modified_base 12: mod_base = OTHER; note = 2'-O-methylcytidine-3'-phosphate
  modified_base 13: mod_base = OTHER; note = 2'-O-methyladenosine-3'-phosphate
  modified_base 14: mod_base = OTHER; note = 2'-deoxy-2'-fluorouridine-3'-phosphate
  modified_base 15: mod_base = OTHER; note = 2'-O-methyluridine-3'-phosphate
  modified_base 16: mod_base = OTHER; note = 2'-deoxy-2'-fluoroguanosine-3'-phosphate
  modified_base 17: mod_base = OTHER; note = 2'-O-methyluridine-3'-phosphate
  modified_base 18: mod_base = OTHER; note = 2'-O-methyluridine-3'-phosphate
  modified_base 19: mod_base = OTHER; note = 2'-O-methylguanosine-3'-phosphate
  modified_base 20: mod_base = OTHER; note = 2'-O-methylguanosine-3'-phosphate
  modified_base 21: mod_base = OTHER; note = 2'-O-methyladenosine-3'-phosphate
  modified_base 22: mod_base = OTHER; note = 2'-O-methyladenosine-3'-phosphate
  modified_base 23: mod_base = OTHER; note = 2'-O-methylcytidine
tgttttggtaacattgttggaac

SEQ ID NO: 4565 - RNA, 23 nt, synthetic construct
  source 1..23: mol_type = other RNA
  modified_base 1: mod_base = OTHER; note = 2'-O-methyluridine-3'-phosphate 5'-(E)-Vinylphosphonate
  modified_base 2: mod_base = OTHER; note = 2'-deoxy-2'-fluoroguanosine-3'-phosphate
  modified_base 3: mod_base = OTHER; note = 2'-O-methylguanosine-3'-phosphate
  modified_base 4: mod_base = OTHER; note = 2'-O-methyluridine-3'-phosphate
  modified_base 5: mod_base = OTHER; note = 2'-O-methyluridine-3'-phosphate
  modified_base 6: mod_base = OTHER; note = 2'-deoxy-2'-fluorouridine-3'-phosphate
  modified_base 7: mod_base = OTHER; note = 2'-O-methyluridine-3'-phosphate
  modified_base 8: mod_base = OTHER; note = 2'-O-methylguanosine-3'-phosphate
  modified_base 9: mod_base = OTHER; note = 2'-O-methylguanosine-3'-phosphate
  modified_base 10: mod_base = OTHER; note = 2'-O-methyluridine-3'-phosphate
  modified_base 11: mod_base = OTHER; note = 2'-O-methyladenosine-3'-phosphate
  modified_base 12: mod_base = OTHER; note = 2'-O-methyladenosine-3'-phosphate
  modified_base 13: mod_base = OTHER; note = 2'-O-methylcytidine-3'-phosphate
  modified_base 14: mod_base = OTHER; note = 2'-deoxy-2'-fluoroadenosine-3'-phosphate
  modified_base 15: mod_base = OTHER; note = 2'-O-methyluridine-3'-phosphate
  modified_base 16: mod_base = OTHER; note = 2'-deoxy-2'-fluorouridine-3'-phosphate
  modified_base 17: mod_base = OTHER; note = 2'-O-methylguanosine-3'-phosphate
  modified_base 18: mod_base = OTHER; note = 2'-O-methyluridine-3'-phosphate
  modified_base 19: mod_base = OTHER; note = 2'-O-methyluridine-3'-phosphate
  modified_base 20: mod_base = OTHER; note = 2'-O-methylguanosine-3'-phosphate
  modified_base 21: mod_base = OTHER; note = 2'-O-methylguanosine-3'-phosphate
  modified_base 22: mod_base = OTHER; note = 2'-O-methyladenosine-3'-phosphate
  modified_base 23: mod_base = OTHER; note = 2'-O-methyladenosine
tggttttggtaacattgttggaa

SEQ ID NO: 4566 - RNA, 23 nt, synthetic construct
  source 1..23: mol_type = other RNA
  modified_base 1: mod_base = OTHER; note = 2'-O-methyluridine-3'-phosphate 5'-(E)-Vinylphosphonate
  modified_base 2: mod_base = OTHER; note = 2'-deoxy-2'-fluorocytidine-3'-phosphate
  modified_base 3: mod_base = OTHER; note = 2'-O-methylguanosine-3'-phosphate
  modified_base 4: mod_base = OTHER; note = 2'-O-methylguanosine-3'-phosphate
  modified_base 5: mod_base = OTHER; note = 2'-O-methyluridine-3'-phosphate
  modified_base 6: mod_base = OTHER; note = 2'-deoxy-2'-fluorouridine-3'-phosphate
  modified_base 7: mod_base = OTHER; note = 2'-O-methyluridine-3'-phosphate
  modified_base 8: mod_base = OTHER; note = 2'-O-methyluridine-3'-phosphate
  modified_base 9: mod_base = OTHER; note = 2'-O-methylguanosine-3'-phosphate
  modified_base 10: mod_base = OTHER; note = 2'-O-methylguanosine-3'-phosphate
  modified_base 11: mod_base = OTHER; note = 2'-O-methyluridine-3'-phosphate
  modified_base 12: mod_base = OTHER; note = 2'-O-methyladenosine-3'-phosphate
  modified_base 13: mod_base = OTHER; note = 2'-O-methyladenosine-3'-phosphate
  modified_base 14: mod_base = OTHER; note = 2'-deoxy-2'-fluorocytidine-3'-phosphate
  modified_base 15: mod_base = OTHER; note = 2'-O-methyladenosine-3'-phosphate
  modified_base 16: mod_base = OTHER; note = 2'-deoxy-2'-fluorouridine-3'-phosphate
  modified_base 17: mod_base = OTHER; note = 2'-O-methyluridine-3'-phosphate
  modified_base 18: mod_base = OTHER; note = 2'-O-methylguanosine-3'-phosphate
  modified_base 19: mod_base = OTHER; note = 2'-O-methyluridine-3'-phosphate
  modified_base 20: mod_base = OTHER; note = 2'-O-methyluridine-3'-phosphate
  modified_base 21: mod_base = OTHER; note = 2'-O-methylguanosine-3'-phosphate
  modified_base 22: mod_base = OTHER; note = 2'-O-methylguanosine-3'-phosphate
  modified_base 23: mod_base = OTHER; note = 2'-O-methyladenosine
tcggttttggtaacattgttgga

SEQ ID NO: 4567 - RNA, 23 nt, synthetic construct
  source 1..23: mol_type = other RNA
  modified_base 1: mod_base = OTHER; note = 2'-O-methyluridine-3'-phosphate 5'-(E)-Vinylphosphonate
  modified_base 2: mod_base = OTHER; note = 2'-deoxy-2'-fluorouridine-3'-phosphate
  modified_base 3: mod_base = OTHER; note = 2'-O-methylcytidine-3'-phosphate
  modified_base 4: mod_base = OTHER; note = 2'-O-methylguanosine-3'-phosphate
  modified_base 5: mod_base = OTHER; note = 2'-O-methylguanosine-3'-phosphate
  modified_base 6: mod_base = OTHER; note = 2'-deoxy-2'-fluorouridine-3'-phosphate
  modified_base 7: mod_base = OTHER; note = 2'-O-methyluridine-3'-phosphate
  modified_base 8: mod_base = OTHER; note = 2'-O-methyluridine-3'-phosphate
  modified_base 9: mod_base = OTHER; note = 2'-O-methyluridine-3'-phosphate
  modified_base 10: mod_base = OTHER; note = 2'-O-methylguanosine-3'-phosphate
  modified_base 11: mod_base = OTHER; note = 2'-O-methylguanosine-3'-phosphate
  modified_base 12: mod_base = OTHER; note = 2'-O-methyluridine-3'-phosphate
  modified_base 13: mod_base = OTHER; note = 2'-O-methyladenosine-3'-phosphate
  modified_base 14: mod_base = OTHER; note = 2'-deoxy-2'-fluoroadenosine-3'-phosphate
  modified_base 15: mod_base = OTHER; note = 2'-O-methylcytidine-3'-phosphate
  modified_base 16: mod_base = OTHER; note = 2'-deoxy-2'-fluoroadenosine-3'-phosphate
  modified_base 17: mod_base = OTHER; note = 2'-O-methyluridine-3'-phosphate
  modified_base 18: mod_base = OTHER; note = 2'-O-methyluridine-3'-phosphate
  modified_base 19: mod_base = OTHER; note = 2'-O-methylguanosine-3'-phosphate
  modified_base 20: mod_base = OTHER; note = 2'-O-methyluridine-3'-phosphate
  modified_base 21: mod_base = OTHER; note = 2'-O-methyluridine-3'-phosphate
  modified_base 22: mod_base = OTHER; note = 2'-O-methylguanosine-3'-phosphate
  modified_base 23: mod_base = OTHER; note = 2'-O-methylguanosine
ttcggttttggtaacattgttgg

SEQ ID NO: 4568 - RNA, 23 nt, synthetic construct
  source 1..23: mol_type = other RNA
  modified_base 1: mod_base = OTHER; note = 2'-O-methyluridine-3'-phosphate 5'-(E)-Vinylphosphonate
  modified_base 2: mod_base = OTHER; note = 2'-deoxy-2'-fluorouridine-3'-phosphate
  modified_base 3: mod_base = OTHER; note = 2'-O-methyluridine-3'-phosphate
  modified_base 4: mod_base = OTHER; note = 2'-O-methylcytidine-3'-phosphate
  modified_base 5: mod_base = OTHER; note = 2'-O-methylguanosine-3'-phosphate
  modified_base 6: mod_base = OTHER; note = 2'-deoxy-2'-fluoroguanosine-3'-phosphate
  modified_base 7: mod_base = OTHER; note = 2'-O-methyluridine-3'-phosphate
  modified_base 8: mod_base = OTHER; note = 2'-O-methyluridine-3'-phosphate
  modified_base 9: mod_base = OTHER; note = 2'-O-methyluridine-3'-phosphate
  modified_base 10: mod_base = OTHER; note = 2'-O-methyluridine-3'-phosphate
  modified_base 11: mod_base = OTHER; note = 2'-O-methylguanosine-3'-phosphate
  modified_base 12: mod_base = OTHER; note = 2'-O-methylguanosine-3'-phosphate
  modified_base 13: mod_base = OTHER; note = 2'-O-methyluridine-3'-phosphate
  modified_base 14: mod_base = OTHER; note = 2'-deoxy-2'-fluoroadenosine-3'-phosphate
  modified_base 15: mod_base = OTHER; note = 2'-O-methyladenosine-3'-phosphate
  modified_base 16: mod_base = OTHER; note = 2'-deoxy-2'-fluorocytidine-3'-phosphate
  modified_base 17: mod_base = OTHER; note = 2'-O-methyladenosine-3'-phosphate
  modified_base 18: mod_base = OTHER; note = 2'-O-methyluridine-3'-phosphate
  modified_base 19: mod_base = OTHER; note = 2'-O-methyluridine-3'-phosphate
  modified_base 20: mod_base = OTHER; note = 2'-O-methylguanosine-3'-phosphate
  modified_base 21: mod_base = OTHER; note = 2'-O-methyluridine-3'-phosphate
  modified_base 22: mod_base = OTHER; note = 2'-O-methyluridine-3'-phosphate
  modified_base 23: mod_base = OTHER; note = 2'-O-methylguanosine
tttcggttttggtaacattgttg

SEQ ID NO: 4569 - RNA, 23 nt, synthetic construct
  source 1..23: mol_type = other RNA
  modified_base 1: mod_base = OTHER; note = 2'-O-methyluridine-3'-phosphate 5'-(E)-Vinylphosphonate
  modified_base 2: mod_base = OTHER; note = 2'-deoxy-2'-fluoroadenosine-3'-phosphate
  modified_base 3: mod_base = OTHER; note = 2'-O-methyluridine-3'-phosphate
  modified_base 4: mod_base = OTHER; note = 2'-O-methyluridine-3'-phosphate
  modified_base 5: mod_base = OTHER; note = 2'-O-methylcytidine-3'-phosphate
  modified_base 6: mod_base = OTHER; note = 2'-deoxy-2'-fluoroguanosine-3'-phosphate
  modified_base 7: mod_base = OTHER; note = 2'-O-methylguanosine-3'-phosphate
  modified_base 8: mod_base = OTHER; note = 2'-O-methyluridine-3'-phosphate
  modified_base 9: mod_base = OTHER; note = 2'-O-methyluridine-3'-phosphate
  modified_base 10: mod_base = OTHER; note = 2'-O-methyluridine-3'-phosphate
  modified_base 11: mod_base = OTHER; note = 2'-O-methyluridine-3'-phosphate
  modified_base 12: mod_base = OTHER; note = 2'-O-methylguanosine-3'-phosphate
  modified_base 13: mod_base = OTHER; note = 2'-O-methylguanosine-3'-phosphate
  modified_base 14: mod_base = OTHER; note = 2'-deoxy-2'-fluorouridine-3'-phosphate
  modified_base 15: mod_base = OTHER; note = 2'-O-methyladenosine-3'-phosphate
  modified_base 16: mod_base = OTHER; note = 2'-deoxy-2'-fluoroadenosine-3'-phosphate
  modified_base 17: mod_base = OTHER; note = 2'-O-methylcytidine-3'-phosphate
  modified_base 18: mod_base = OTHER; note = 2'-O-methyladenosine-3'-phosphate
  modified_base 19: mod_base = OTHER; note = 2'-O-methyluridine-3'-phosphate
  modified_base 20: mod_base = OTHER; note = 2'-O-methyluridine-3'-phosphate
  modified_base 21: mod_base = OTHER; note = 2'-O-methylguanosine-3'-phosphate
  modified_base 22: mod_base = OTHER; note = 2'-O-methyluridine-3'-phosphate
  modified_base 23: mod_base = OTHER; note = 2'-O-methyluridine
tattcggttttggtaacattgtt

SEQ ID NO: 4570 - RNA, 23 nt, synthetic construct
  source 1..23: mol_type = other RNA
  modified_base 1: mod_base = OTHER; note = 2'-O-methyluridine-3'-phosphate 5'-(E)-Vinylphosphonate
  modified_base 2: mod_base = OTHER; note = 2'-deoxy-2'-fluorocytidine-3'-phosphate
  modified_base 3: mod_base = OTHER; note = 2'-O-methyladenosine-3'-phosphate
  modified_base 4: mod_base = OTHER; note = 2'-O-methyluridine-3'-phosphate
  modified_base 5: mod_base = OTHER; note = 2'-O-methyluridine-3'-phosphate
  modified_base 6: mod_base = OTHER; note = 2'-deoxy-2'-fluorocytidine-3'-phosphate
  modified_base 7: mod_base = OTHER; note = 2'-O-methylguanosine-3'-phosphate
  modified_base 8: mod_base = OTHER; note = 2'-O-methylguanosine-3'-phosphate
  modified_base 9: mod_base = OTHER; note = 2'-O-methyluridine-3'-phosphate
  modified_base 10: mod_base = OTHER; note = 2'-O-methyluridine-3'-phosphate
  modified_base 11: mod_base = OTHER; note = 2'-O-methyluridine-3'-phosphate
  modified_base 12: mod_base = OTHER; note = 2'-O-methyluridine-3'-phosphate
  modified_base 13: mod_base = OTHER; note = 2'-O-methylguanosine-3'-phosphate
  modified_base 14: mod_base = OTHER; note = 2'-deoxy-2'-fluoroguanosine-3'-phosphate
  modified_base 15: mod_base = OTHER; note = 2'-O-methyluridine-3'-phosphate
  modified_base 16: mod_base = OTHER; note = 2'-deoxy-2'-fluoroadenosine-3'-phosphate
  modified_base 17: mod_base = OTHER; note = 2'-O-methyladenosine-3'-phosphate
  modified_base 18: mod_base = OTHER; note = 2'-O-methylcytidine-3'-phosphate
  modified_base 19: mod_base = OTHER; note = 2'-O-methyladenosine-3'-phosphate
  modified_base 20: mod_base = OTHER; note = 2'-O-methyluridine-3'-phosphate
  modified_base 21: mod_base = OTHER; note = 2'-O-methyluridine-3'-phosphate
  modified_base 22: mod_base = OTHER; note = 2'-O-methylguanosine-3'-phosphate
  modified_base 23: mod_base = OTHER; note = 2'-O-methyluridine
tcattcggttttggtaacattgt

SEQ ID NO: 4571 - RNA, 23 nt, synthetic construct
  source 1..23: mol_type = other RNA
  modified_base 1: mod_base = OTHER; note = 2'-O-methyluridine-3'-phosphate 5'-(E)-Vinylphosphonate
  modified_base 2: mod_base = OTHER; note = 2'-deoxy-2'-fluoroguanosine-3'-phosphate
  modified_base 3: mod_base = OTHER; note = 2'-O-methylcytidine-3'-phosphate
  modified_base 4: mod_base = OTHER; note = 2'-O-methyladenosine-3'-phosphate
  modified_base 5: mod_base = OTHER; note = 2'-O-methyluridine-3'-phosphate
  modified_base 6: mod_base = OTHER; note = 2'-deoxy-2'-fluorouridine-3'-phosphate
  modified_base 7: mod_base = OTHER; note = 2'-O-methylcytidine-3'-phosphate
  modified_base 8: mod_base = OTHER; note = 2'-O-methylguanosine-3'-phosphate
  modified_base 9: mod_base = OTHER; note = 2'-O-methylguanosine-3'-phosphate
  modified_base 10: mod_base = OTHER; note = 2'-O-methyluridine-3'-phosphate
  modified_base 11: mod_base = OTHER; note = 2'-O-methyluridine-3'-phosphate
  modified_base 12: mod_base = OTHER; note = 2'-O-methyluridine-3'-phosphate
  modified_base 13: mod_base = OTHER; note = 2'-O-methyluridine-3'-phosphate
  modified_base 14: mod_base = OTHER; note = 2'-deoxy-2'-fluoroguanosine-3'-phosphate
  modified_base 15: mod_base = OTHER; note = 2'-O-methylguanosine-3'-phosphate
  modified_base 16: mod_base = OTHER; note = 2'-deoxy-2'-fluorouridine-3'-phosphate
  modified_base 17: mod_base = OTHER; note = 2'-O-methyladenosine-3'-phosphate
  modified_base 18: mod_base = OTHER; note = 2'-O-methyladenosine-3'-phosphate
  modified_base 19: mod_base = OTHER; note = 2'-O-methylcytidine-3'-phosphate
  modified_base 20: mod_base = OTHER; note = 2'-O-methyladenosine-3'-phosphate
  modified_base 21: mod_base = OTHER; note = 2'-O-methyluridine-3'-phosphate
  modified_base 22: mod_base = OTHER; note = 2'-O-methyluridine-3'-phosphate
  modified_base 23: mod_base = OTHER; note = 2'-O-methylguanosine
tgcattcggttttggtaacattg

SEQ ID NO: 4572 - RNA, 23 nt, synthetic construct
  source 1..23: mol_type = other RNA
  modified_base 1: mod_base = OTHER; note = 2'-O-methyluridine-3'-phosphate 5'-(E)-Vinylphosphonate
  modified_base 2: mod_base = OTHER; note = 2'-deoxy-2'-fluoroadenosine-3'-phosphate
  modified_base 3: mod_base = OTHER; note = 2'-O-methylguanosine-3'-phosphate
  modified_base 4: mod_base = OTHER; note = 2'-O-methylcytidine-3'-phosphate
  modified_base 5: mod_base = OTHER; note = 2'-O-methyladenosine-3'-phosphate
  modified_base 6: mod_base = OTHER; note = 2'-deoxy-2'-fluorouridine-3'-phosphate
  modified_base 7: mod_base = OTHER; note = 2'-O-methyluridine-3'-phosphate
  modified_base 8: mod_base = OTHER; note = 2'-O-methylcytidine-3'-phosphate
  modified_base 9: mod_base = OTHER; note = 2'-O-methylguanosine-3'-phosphate
  modified_base 10: mod_base = OTHER; note = 2'-O-methylguanosine-3'-phosphate
  modified_base 11: mod_base = OTHER; note = 2'-O-methyluridine-3'-phosphate
  modified_base 12: mod_base = OTHER; note = 2'-O-methyluridine-3'-phosphate
  modified_base 13: mod_base = OTHER; note = 2'-O-methyluridine-3'-phosphate
  modified_base 14: mod_base = OTHER; note = 2'-deoxy-2'-fluorouridine-3'-phosphate
  modified_base 15: mod_base = OTHER; note = 2'-O-methylguanosine-3'-phosphate
  modified_base 16: mod_base = OTHER; note = 2'-deoxy-2'-fluoroguanosine-3'-phosphate
  modified_base 17: mod_base = OTHER; note = 2'-O-methyluridine-3'-phosphate
  modified_base 18: mod_base = OTHER; note = 2'-O-methyladenosine-3'-phosphate
  modified_base 19: mod_base = OTHER; note = 2'-O-methyladenosine-3'-phosphate
  modified_base 20: mod_base = OTHER; note = 2'-O-methylcytidine-3'-phosphate
  modified_base 21: mod_base = OTHER; note = 2'-O-methyladenosine-3'-phosphate
  modified_base 22: mod_base = OTHER; note = 2'-O-methyluridine-3'-phosphate
  modified_base 23: mod_base = OTHER; note = 2'-O-methyluridine
tagcattcggttttggtaacatt

SEQ ID NO: 4573 - RNA, 23 nt, synthetic construct
  source 1..23: mol_type = other RNA
  modified_base 1: mod_base = OTHER; note = 2'-O-methyluridine-3'-phosphate 5'-(E)-Vinylphosphonate
  modified_base 2: mod_base = OTHER; note = 2'-deoxy-2'-fluorocytidine-3'-phosphate
  modified_base 3: mod_base = OTHER; note = 2'-O-methyladenosine-3'-phosphate
  modified_base 4: mod_base = OTHER; note = 2'-O-methylguanosine-3'-phosphate
  modified_base 5: mod_base = OTHER; note = 2'-O-methylcytidine-3'-phosphate
  modified_base 6: mod_base = OTHER; note = 2'-deoxy-2'-fluoroadenosine-3'-phosphate
  modified_base 7: mod_base = OTHER; note = 2'-O-methyluridine-3'-phosphate
  modified_base 8: mod_base = OTHER; note = 2'-O-methyluridine-3'-phosphate
  modified_base 9: mod_base = OTHER; note = 2'-O-methylcytidine-3'-phosphate
  modified_base 10: mod_base = OTHER; note = 2'-O-methylguanosine-3'-phosphate
  modified_base 11: mod_base = OTHER; note = 2'-O-methylguanosine-3'-phosphate
  modified_base 12: mod_base = OTHER; note = 2'-O-methyluridine-3'-phosphate
  modified_base 13: mod_base = OTHER; note = 2'-O-methyluridine-3'-phosphate
  modified_base 14: mod_base = OTHER; note = 2'-deoxy-2'-fluorouridine-3'-phosphate
  modified_base 15: mod_base = OTHER; note = 2'-O-methyluridine-3'-phosphate
  modified_base 16: mod_base = OTHER; note = 2'-deoxy-2'-fluoroguanosine-3'-phosphate
  modified_base 17: mod_base = OTHER; note = 2'-O-methylguanosine-3'-phosphate
  modified_base 18: mod_base = OTHER; note = 2'-O-methyluridine-3'-phosphate
  modified_base 19: mod_base = OTHER; note = 2'-O-methyladenosine-3'-phosphate
  modified_base 20: mod_base = OTHER; note = 2'-O-methyladenosine-3'-phosphate
  modified_base 21: mod_base = OTHER; note = 2'-O-methylcytidine-3'-phosphate
  modified_base 22: mod_base = OTHER; note = 2'-O-methyladenosine-3'-phosphate
  modified_base 23: mod_base = OTHER; note = 2'-O-methyluridine
tcagcattcggttttggtaacat

SEQ ID NO: 4574 - RNA, 23 nt, synthetic construct
  source 1..23: mol_type = other RNA
  modified_base 1: mod_base = OTHER; note = 2'-O-methyluridine-3'-phosphate 5'-(E)-Vinylphosphonate
  modified_base 2: mod_base = OTHER; note = 2'-deoxy-2'-fluoroguanosine-3'-phosphate
  modified_base 3: mod_base = OTHER; note = 2'-O-methylcytidine-3'-phosphate
  modified_base 4: mod_base = OTHER; note = 2'-O-methyladenosine-3'-phosphate
  modified_base 5: mod_base = OTHER; note = 2'-O-methylguanosine-3'-phosphate
  modified_base 6: mod_base = OTHER; note = 2'-deoxy-2'-fluorocytidine-3'-phosphate
  modified_base 7: mod_base = OTHER; note = 2'-O-methyladenosine-3'-phosphate
  modified_base 8: mod_base = OTHER; note = 2'-O-methyluridine-3'-phosphate
  modified_base 9: mod_base = OTHER; note = 2'-O-methyluridine-3'-phosphate
  modified_base 10: mod_base = OTHER; note = 2'-O-methylcytidine-3'-phosphate
  modified_base 11: mod_base = OTHER; note = 2'-O-methylguanosine-3'-phosphate
  modified_base 12: mod_base = OTHER; note = 2'-O-methylguanosine-3'-phosphate
  modified_base 13: mod_base = OTHER; note = 2'-O-methyluridine-3'-phosphate
  modified_base 14: mod_base = OTHER; note = 2'-deoxy-2'-fluorouridine-3'-phosphate
  modified_base 15: mod_base = OTHER; note = 2'-O-methyluridine-3'-phosphate
  modified_base 16: mod_base = OTHER; note = 2'-deoxy-2'-fluorouridine-3'-phosphate
  modified_base 17: mod_base = OTHER; note = 2'-O-methylguanosine-3'-phosphate
  modified_base 18: mod_base = OTHER; note = 2'-O-methylguanosine-3'-phosphate
  modified_base 19: mod_base = OTHER; note = 2'-O-methyluridine-3'-phosphate
  modified_base 20: mod_base = OTHER; note = 2'-O-methyladenosine-3'-phosphate
  modified_base 21: mod_base = OTHER; note = 2'-O-methyladenosine-3'-phosphate
  modified_base 22: mod_base = OTHER; note = 2'-O-methylcytidine-3'-phosphate
  modified_base 23: mod_base = OTHER; note = 2'-O-methyladenosine
tgcagcattcggttttggtaaca

SEQ ID NO: 4575 - RNA, 23 nt, synthetic construct
  source 1..23: mol_type = other RNA
  modified_base 1: mod_base = OTHER; note = 2'-O-methyluridine-3'-phosphate 5'-(E)-Vinylphosphonate
  modified_base 2: mod_base = OTHER; note = 2'-deoxy-2'-fluoroadenosine-3'-phosphate
  modified_base 3: mod_base = OTHER; note = 2'-O-methylguanosine-3'-phosphate
  modified_base 4: mod_base = OTHER; note = 2'-O-methylcytidine-3'-phosphate
  modified_base 5: mod_base = OTHER; note = 2'-O-methyladenosine-3'-phosphate
  modified_base 6: mod_base = OTHER; note = 2'-deoxy-2'-fluoroguanosine-3'-phosphate
  modified_base 7: mod_base = OTHER; note = 2'-O-methylcytidine-3'-phosphate
  modified_base 8: mod_base = OTHER; note = 2'-O-methyladenosine-3'-phosphate
  modified_base 9: mod_base = OTHER; note = 2'-O-methyluridine-3'-phosphate
  modified_base 10: mod_base = OTHER; note = 2'-O-methyluridine-3'-phosphate
  modified_base 11: mod_base = OTHER; note = 2'-O-methylcytidine-3'-phosphate
  modified_base 12: mod_base = OTHER; note = 2'-O-methylguanosine-3'-phosphate
  modified_base 13: mod_base = OTHER; note = 2'-O-methylguanosine-3'-phosphate
  modified_base 14: mod_base = OTHER; note = 2'-deoxy-2'-fluorouridine-3'-phosphate
  modified_base 15: mod_base = OTHER; note = 2'-O-methyluridine-3'-phosphate
  modified_base 16: mod_base = OTHER; note = 2'-deoxy-2'-fluorouridine-3'-phosphate
  modified_base 17: mod_base = OTHER; note = 2'-O-methyluridine-3'-phosphate
  modified_base 18: mod_base = OTHER; note = 2'-O-methylguanosine-3'-phosphate
  modified_base 19: mod_base = OTHER; note = 2'-O-methylguanosine-3'-phosphate
  modified_base 20: mod_base = OTHER; note = 2'-O-methyluridine-3'-phosphate
  modified_base 21: mod_base = OTHER; note = 2'-O-methyladenosine-3'-phosphate
  modified_base 22: mod_base = OTHER; note = 2'-O-methyladenosine-3'-phosphate
  modified_base 23: mod_base = OTHER; note = 2'-O-methylcytidine
tagcagcattcggttttggtaac

SEQ ID NO: 4576 - RNA, 23 nt, synthetic construct
  source 1..23: mol_type = other RNA
  modified_base 1: mod_base = OTHER; note = 2'-O-methyluridine-3'-phosphate 5'-(E)-Vinylphosphonate
  modified_base 2: mod_base = OTHER; note = 2'-deoxy-2'-fluoroadenosine-3'-phosphate
  modified_base 3: mod_base = OTHER; note = 2'-O-methyladenosine-3'-phosphate
  modified_base 4: mod_base = OTHER; note = 2'-O-methylguanosine-3'-phosphate
  modified_base 5: mod_base = OTHER; note = 2'-O-methylcytidine-3'-phosphate
  modified_base 6: mod_base = OTHER; note = 2'-deoxy-2'-fluoroadenosine-3'-phosphate
  modified_base 7: mod_base = OTHER; note = 2'-O-methylguanosine-3'-phosphate
  modified_base 8: mod_base = OTHER; note = 2'-O-methylcytidine-3'-phosphate
  modified_base 9: mod_base = OTHER; note = 2'-O-methyladenosine-3'-phosphate
  modified_base 10: mod_base = OTHER; note = 2'-O-methyluridine-3'-phosphate
  modified_base 11: mod_base = OTHER; note = 2'-O-methyluridine-3'-phosphate
  modified_base 12: mod_base = OTHER; note = 2'-O-methylcytidine-3'-phosphate
  modified_base 13: mod_base = OTHER; note = 2'-O-methylguanosine-3'-phosphate
  modified_base 14: mod_base = OTHER; note = 2'-deoxy-2'-fluoroguanosine-3'-phosphate
  modified_base 15: mod_base = OTHER; note = 2'-O-methyluridine-3'-phosphate
  modified_base 16: mod_base = OTHER; note = 2'-deoxy-2'-fluorouridine-3'-phosphate
  modified_base 17: mod_base = OTHER; note = 2'-O-methyluridine-3'-phosphate
  modified_base 18: mod_base = OTHER; note = 2'-O-methyluridine-3'-phosphate
  modified_base 19: mod_base = OTHER; note = 2'-O-methylguanosine-3'-phosphate
  modified_base 20: mod_base = OTHER; note = 2'-O-methylguanosine-3'-phosphate
  modified_base 21: mod_base = OTHER; note = 2'-O-methyluridine-3'-phosphate
  modified_base 22: mod_base = OTHER; note = 2'-O-methyladenosine-3'-phosphate
  modified_base 23: mod_base = OTHER; note = 2'-O-methyladenosine
taagcagcattcggttttggtaa

SEQ ID NO: 4577 - RNA, 23 nt, synthetic construct
  source 1..23: mol_type = other RNA
  modified_base 1: mod_base = OTHER; note = 2'-O-methyluridine-3'-phosphate 5'-(E)-Vinylphosphonate
  modified_base 2: mod_base = OTHER; note = 2'-deoxy-2'-fluoroguanosine-3'-phosphate
  modified_base 3: mod_base = OTHER; note = 2'-O-methyladenosine-3'-phosphate
  modified_base 4: mod_base = OTHER; note = 2'-O-methyladenosine-3'-phosphate
  modified_base 5: mod_base = OTHER; note = 2'-O-methylguanosine-3'-phosphate
  modified_base 6: mod_base = OTHER; note = 2'-deoxy-2'-fluorocytidine-3'-phosphate
  modified_base 7: mod_base = OTHER; note = 2'-O-methyladenosine-3'-phosphate
  modified_base 8: mod_base = OTHER; note = 2'-O-methylguanosine-3'-phosphate
  modified_base 9: mod_base = OTHER; note = 2'-O-methylcytidine-3'-phosphate
  modified_base 10: mod_base = OTHER; note = 2'-O-methyladenosine-3'-phosphate
  modified_base 11: mod_base = OTHER; note = 2'-O-methyluridine-3'-phosphate
  modified_base 12: mod_base = OTHER; note = 2'-O-methyluridine-3'-phosphate
  modified_base 13: mod_base = OTHER; note = 2'-O-methylcytidine-3'-phosphate
  modified_base 14: mod_base = OTHER; note = 2'-deoxy-2'-fluoroguanosine-3'-phosphate
  modified_base 15: mod_base = OTHER; note = 2'-O-methylguanosine-3'-phosphate
  modified_base 16: mod_base = OTHER; note = 2'-deoxy-2'-fluorouridine-3'-phosphate
  modified_base 17: mod_base = OTHER; note = 2'-O-methyluridine-3'-phosphate
  modified_base 18: mod_base = OTHER; note = 2'-O-methyluridine-3'-phosphate
  modified_base 19: mod_base = OTHER; note = 2'-O-methyluridine-3'-phosphate
  modified_base 20: mod_base = OTHER; note = 2'-O-methylguanosine-3'-phosphate
  modified_base 21: mod_base = OTHER; note = 2'-O-methylguanosine-3'-phosphate
  modified_base 22: mod_base = OTHER; note = 2'-O-methyluridine-3'-phosphate
  modified_base 23: mod_base = OTHER; note = 2'-O-methyladenosine
tgaagcagcattcggttttggta

SEQ ID NO: 4578 - RNA, 23 nt, synthetic construct
  source 1..23: mol_type = other RNA
  modified_base 1: mod_base = OTHER; note = 2'-O-methyluridine-3'-phosphate 5'-(E)-Vinylphosphonate
  modified_base 2: mod_base = OTHER; note = 2'-deoxy-2'-fluorouridine-3'-phosphate
  modified_base 3: mod_base = OTHER; note = 2'-O-methylguanosine-3'-phosphate
  modified_base 4: mod_base = OTHER; note = 2'-O-methyladenosine-3'-phosphate
  modified_base 5: mod_base = OTHER; note = 2'-O-methyladenosine-3'-phosphate
  modified_base 6: mod_base = OTHER; note = 2'-deoxy-2'-fluoroguanosine-3'-phosphate
  modified_base 7: mod_base = OTHER; note = 2'-O-methylcytidine-3'-phosphate
  modified_base 8: mod_base = OTHER; note = 2'-O-methyladenosine-3'-phosphate
  modified_base 9: mod_base = OTHER; note = 2'-O-methylguanosine-3'-phosphate
  modified_base 10: mod_base = OTHER; note = 2'-O-methylcytidine-3'-phosphate
  modified_base 11: mod_base = OTHER; note = 2'-O-methyladenosine-3'-phosphate
  modified_base 12: mod_base = OTHER; note = 2'-O-methyluridine-3'-phosphate
  modified_base 13: mod_base = OTHER; note = 2'-O-methyluridine-3'-phosphate
  modified_base 14: mod_base = OTHER; note = 2'-deoxy-2'-fluorocytidine-3'-phosphate
  modified_base 15: mod_base = OTHER; note = 2'-O-methylguanosine-3'-phosphate
  modified_base 16: mod_base = OTHER; note = 2'-deoxy-2'-fluoroguanosine-3'-phosphate
  modified_base 17: mod_base = OTHER; note = 2'-O-methyluridine-3'-phosphate
  modified_base 18: mod_base = OTHER; note = 2'-O-methyluridine-3'-phosphate
  modified_base 19: mod_base = OTHER; note = 2'-O-methyluridine-3'-phosphate
  modified_base 20: mod_base = OTHER; note = 2'-O-methyluridine-3'-phosphate
  modified_base 21: mod_base = OTHER; note = 2'-O-methylguanosine-3'-phosphate
  modified_base 22: mod_base = OTHER; note = 2'-O-methylguanosine-3'-phosphate
  modified_base 23: mod_base = OTHER; note = 2'-O-methyluridine
ttgaagcagcattcggttttggt

SEQ ID NO: 4579 - RNA, 23 nt, synthetic construct
  source 1..23: mol_type = other RNA
  modified_base 1: mod_base = OTHER; note = 2'-O-methyluridine-3'-phosphate 5'-(E)-Vinylphosphonate
  modified_base 2: mod_base = OTHER; note = 2'-deoxy-2'-fluoroguanosine-3'-phosphate
  modified_base 3: mod_base = OTHER; note = 2'-O-methyluridine-3'-phosphate
  modified_base 4: mod_base = OTHER; note = 2'-O-methylguanosine-3'-phosphate
  modified_base 5: mod_base = OTHER; note = 2'-O-methyladenosine-3'-phosphate
  modified_base 6: mod_base = OTHER; note = 2'-deoxy-2'-fluoroadenosine-3'-phosphate
  modified_base 7: mod_base = OTHER; note = 2'-O-methylguanosine-3'-phosphate
  modified_base 8: mod_base = OTHER; note = 2'-O-methylcytidine-3'-phosphate
  modified_base 9: mod_base = OTHER; note = 2'-O-methyladenosine-3'-phosphate
  modified_base 10: mod_base = OTHER; note = 2'-O-methylguanosine-3'-phosphate
  modified_base 11: mod_base = OTHER; note = 2'-O-methylcytidine-3'-phosphate
  modified_base 12: mod_base = OTHER; note = 2'-O-methyladenosine-3'-phosphate
  modified_base 13: mod_base = OTHER; note = 2'-O-methyluridine-3'-phosphate
  modified_base 14: mod_base = OTHER; note = 2'-deoxy-2'-fluorouridine-3'-phosphate
  modified_base 15: mod_base = OTHER; note = 2'-O-methylcytidine-3'-phosphate
  modified_base 16: mod_base = OTHER; note = 2'-deoxy-2'-fluoroguanosine-3'-phosphate
  modified_base 17: mod_base = OTHER; note = 2'-O-methylguanosine-3'-phosphate
  modified_base 18: mod_base = OTHER; note = 2'-O-methyluridine-3'-phosphate
  modified_base 19: mod_base = OTHER; note = 2'-O-methyluridine-3'-phosphate
  modified_base 20: mod_base = OTHER; note = 2'-O-methyluridine-3'-phosphate
  modified_base 21: mod_base = OTHER; note = 2'-O-methyluridine-3'-phosphate
  modified_base 22: mod_base = OTHER; note = 2'-O-methylguanosine-3'-phosphate
  modified_base 23: mod_base = OTHER; note = 2'-O-methylguanosine
tgtgaagcagcattcggttttgg

SEQ ID NO: 4580 - RNA, 23 nt, synthetic construct
  source 1..23: mol_type = other RNA
  modified_base 1: mod_base = OTHER; note = 2'-O-methyluridine-3'-phosphate 5'-(E)-Vinylphosphonate
  modified_base 2: mod_base = OTHER; note = 2'-deoxy-2'-fluorouridine-3'-phosphate
  modified_base 3: mod_base = OTHER; note = 2'-O-methylguanosine-3'-phosphate
  modified_base 4: mod_base = OTHER; note = 2'-O-methyluridine-3'-phosphate
  modified_base 5: mod_base = OTHER; note = 2'-O-methylguanosine-3'-phosphate
  modified_base 6: mod_base = OTHER; note = 2'-deoxy-2'-fluoroadenosine-3'-phosphate
  modified_base 7: mod_base = OTHER; note = 2'-O-methyladenosine-3'-phosphate
  modified_base 8: mod_base = OTHER; note = 2'-O-methylguanosine-3'-phosphate
  modified_base 9: mod_base = OTHER; note = 2'-O-methylcytidine-3'-phosphate
  modified_base 10: mod_base = OTHER; note = 2'-O-methyladenosine-3'-phosphate
  modified_base 11: mod_base = OTHER; note = 2'-O-methylguanosine-3'-phosphate
  modified_base 12: mod_base = OTHER; note = 2'-O-methylcytidine-3'-phosphate
  modified_base 13: mod_base = OTHER; note = 2'-O-methyladenosine-3'-phosphate
  modified_base 14: mod_base = OTHER; note = 2'-deoxy-2'-fluorouridine-3'-phosphate
  modified_base 15: mod_base = OTHER; note = 2'-O-methyluridine-3'-phosphate
  modified_base 16: mod_base = OTHER; note = 2'-deoxy-2'-fluorocytidine-3'-phosphate
  modified_base 17: mod_base = OTHER; note = 2'-O-methylguanosine-3'-phosphate
  modified_base 18: mod_base = OTHER; note = 2'-O-methylguanosine-3'-phosphate
  modified_base 19: mod_base = OTHER; note = 2'-O-methyluridine-3'-phosphate
  modified_base 20: mod_base = OTHER; note = 2'-O-methyluridine-3'-phosphate
  modified_base 21: mod_base = OTHER; note = 2'-O-methyluridine-3'-phosphate
  modified_base 22: mod_base = OTHER; note = 2'-O-methyluridine-3'-phosphate
  modified_base 23: mod_base = OTHER; note = 2'-O-methylguanosine
ttgtgaagcagcattcggttttg

SEQ ID NO: 4581 - RNA, 23 nt, synthetic construct
  source 1..23: mol_type = other RNA
  modified_base 1: mod_base = OTHER; note = 2'-O-methyluridine-3'-phosphate 5'-(E)-Vinylphosphonate
  modified_base 2: mod_base = OTHER; note = 2'-deoxy-2'-fluorocytidine-3'-phosphate
  modified_base 3: mod_base = OTHER; note = 2'-O-methyluridine-3'-phosphate
  modified_base 4: mod_base = OTHER; note = 2'-O-methylguanosine-3'-phosphate
  modified_base 5: mod_base = OTHER; note = 2'-O-methyluridine-3'-phosphate
  modified_base 6: mod_base = OTHER; note = 2'-deoxy-2'-fluoroguanosine-3'-phosphate
  modified_base 7: mod_base = OTHER; note = 2'-O-methyladenosine-3'-phosphate
  modified_base 8: mod_base = OTHER; note = 2'-O-methyladenosine-3'-phosphate
  modified_base 9: mod_base = OTHER; note = 2'-O-methylguanosine-3'-phosphate
  modified_base 10: mod_base = OTHER; note = 2'-O-methylcytidine-3'-phosphate
  modified_base 11: mod_base = OTHER; note = 2'-O-methyladenosine-3'-phosphate
  modified_base 12: mod_base = OTHER; note = 2'-O-methylguanosine-3'-phosphate
  modified_base 13: mod_base = OTHER; note = 2'-O-methylcytidine-3'-phosphate
  modified_base 14: mod_base = OTHER; note = 2'-deoxy-2'-fluoroadenosine-3'-phosphate
  modified_base 15: mod_base = OTHER; note = 2'-O-methyluridine-3'-phosphate
  modified_base 16: mod_base = OTHER; note = 2'-deoxy-2'-fluorouridine-3'-phosphate
  modified_base 17: mod_base = OTHER; note = 2'-O-methylcytidine-3'-phosphate
  modified_base 18: mod_base = OTHER; note = 2'-O-methylguanosine-3'-phosphate
  modified_base 19: mod_base = OTHER; note = 2'-O-methylguanosine-3'-phosphate
  modified_base 20: mod_base = OTHER; note = 2'-O-methyluridine-3'-phosphate
  modified_base 21: mod_base = OTHER; note = 2'-O-methyluridine-3'-phosphate
  modified_base 22: mod_base = OTHER; note = 2'-O-methyluridine-3'-phosphate
  modified_base 23: mod_base = OTHER; note = 2'-O-methyluridine
tctgtgaagcagcattcggtttt

SEQ ID NO: 4582 - RNA, 23 nt, synthetic construct
  source 1..23: mol_type = other RNA
  modified_base 1: mod_base = OTHER; note = 2'-O-methyluridine-3'-phosphate 5'-(E)-Vinylphosphonate
  modified_base 2: mod_base = OTHER; note = 2'-deoxy-2'-fluorouridine-3'-phosphate
  modified_base 3: mod_base = OTHER; note = 2'-O-methylcytidine-3'-phosphate
  modified_base 4: mod_base = OTHER; note = 2'-O-methyluridine-3'-phosphate
  modified_base 5: mod_base = OTHER; note = 2'-O-methylguanosine-3'-phosphate
  modified_base 6: mod_base = OTHER; note = 2'-deoxy-2'-fluorouridine-3'-phosphate
  modified_base 7: mod_base = OTHER; note = 2'-O-methylguanosine-3'-phosphate
  modified_base 8: mod_base = OTHER; note = 2'-O-methyladenosine-3'-phosphate
  modified_base 9: mod_base = OTHER; note = 2'-O-methyladenosine-3'-phosphate
  modified_base 10: mod_base = OTHER; note = 2'-O-methylguanosine-3'-phosphate
  modified_base 11: mod_base = OTHER; note = 2'-O-methylcytidine-3'-phosphate
  modified_base 12: mod_base = OTHER; note = 2'-O-methyladenosine-3'-phosphate
  modified_base 13: mod_base = OTHER; note = 2'-O-methylguanosine-3'-phosphate
  modified_base 14: mod_base = OTHER; note = 2'-deoxy-2'-fluorocytidine-3'-phosphate
  modified_base 15: mod_base = OTHER; note = 2'-O-methyladenosine-3'-phosphate
  modified_base 16: mod_base = OTHER; note = 2'-deoxy-2'-fluorouridine-3'-phosphate
  modified_base 17: mod_base = OTHER; note = 2'-O-methyluridine-3'-phosphate
  modified_base 18: mod_base = OTHER; note = 2'-O-methylcytidine-3'-phosphate
  modified_base 19: mod_base = OTHER; note = 2'-O-methylguanosine-3'-phosphate
  modified_base 20: mod_base = OTHER; note = 2'-O-methylguanosine-3'-phosphate
  modified_base 21: mod_base = OTHER; note = 2'-O-methyluridine-3'-phosphate
  modified_base 22: mod_base = OTHER; note = 2'-O-methyluridine-3'-phosphate
  modified_base 23: mod_base = OTHER; note = 2'-O-methyluridine
ttctgtgaagcagcattcggttt

SEQ ID NO: 4583 - RNA, 23 nt, synthetic construct
  source 1..23: mol_type = other RNA
  modified_base 1: mod_base = OTHER; note = 2'-O-methyluridine-3'-phosphate 5'-(E)-Vinylphosphonate
  modified_base 2: mod_base = OTHER; note = 2'-deoxy-2'-fluoroadenosine-3'-phosphate
  modified_base 3: mod_base = OTHER; note = 2'-O-methyladenosine-3'-phosphate
  modified_base 4: mod_base = OTHER; note = 2'-O-methyluridine-3'-phosphate
  modified_base 5: mod_base = OTHER; note = 2'-O-methylcytidine-3'-phosphate
  modified_base 6: mod_base = OTHER; note = 2'-deoxy-2'-fluorouridine-3'-phosphate
  modified_base 7: mod_base = OTHER; note = 2'-O-methylguanosine-3'-phosphate
  modified_base 8: mod_base = OTHER; note = 2'-O-methyluridine-3'-phosphate
  modified_base 9: mod_base = OTHER; note = 2'-O-methylguanosine-3'-phosphate
  modified_base 10: mod_base = OTHER; note = 2'-O-methyladenosine-3'-phosphate
  modified_base 11: mod_base = OTHER; note = 2'-O-methyladenosine-3'-phosphate
  modified_base 12: mod_base = OTHER; note = 2'-O-methylguanosine-3'-phosphate
  modified_base 13: mod_base = OTHER; note = 2'-O-methylcytidine-3'-phosphate
  modified_base 14: mod_base = OTHER; note = 2'-deoxy-2'-fluoroadenosine-3'-phosphate
  modified_base 15: mod_base = OTHER; note = 2'-O-methylguanosine-3'-phosphate
  modified_base 16: mod_base = OTHER; note = 2'-deoxy-2'-fluorocytidine-3'-phosphate
  modified_base 17: mod_base = OTHER; note = 2'-O-methyladenosine-3'-phosphate
  modified_base 18: mod_base = OTHER; note = 2'-O-methyluridine-3'-phosphate
  modified_base 19: mod_base = OTHER; note = 2'-O-methyluridine-3'-phosphate
  modified_base 20: mod_base = OTHER; note = 2'-O-methylcytidine-3'-phosphate
  modified_base 21: mod_base = OTHER; note = 2'-O-methylguanosine-3'-phosphate
  modified_base 22: mod_base = OTHER; note = 2'-O-methylguanosine-3'-phosphate
  modified_base 23: mod_base = OTHER; note = 2'-O-methyluridine
taatctgtgaagcagcattcggt

SEQ ID NO: 4584 - RNA, 23 nt, synthetic construct
  source 1..23: mol_type = other RNA
  modified_base 1: mod_base = OTHER; note = 2'-O-methyluridine-3'-phosphate 5'-(E)-Vinylphosphonate
  modified_base 2: mod_base = OTHER; note = 2'-deoxy-2'-fluoroadenosine-3'-phosphate
  modified_base 3: mod_base = OTHER; note = 2'-O-methyladenosine-3'-phosphate
  modified_base 4: mod_base = OTHER; note = 2'-O-methyladenosine-3'-phosphate
  modified_base 5: mod_base = OTHER; note = 2'-O-methyladenosine-3'-phosphate
  modified_base 6: mod_base = OTHER; note = 2'-deoxy-2'-fluoroadenosine-3'-phosphate
  modified_base 7: mod_base = OTHER; note = 2'-O-methyluridine-3'-phosphate
  modified_base 8: mod_base = OTHER; note = 2'-O-methylcytidine-3'-phosphate
  modified_base 9: mod_base = OTHER; note = 2'-O-methyluridine-3'-phosphate
  modified_base 10: mod_base = OTHER; note = 2'-O-methylguanosine-3'-phosphate
  modified_base 11: mod_base = OTHER; note = 2'-O-methyluridine-3'-phosphate
  modified_base 12: mod_base = OTHER; note = 2'-O-methylguanosine-3'-phosphate
  modified_base 13: mod_base = OTHER; note = 2'-O-methyladenosine-3'-phosphate
  modified_base 14: mod_base = OTHER; note = 2'-deoxy-2'-fluoroadenosine-3'-phosphate
  modified_base 15: mod_base = OTHER; note = 2'-O-methylguanosine-3'-phosphate
  modified_base 16: mod_base = OTHER; note = 2'-deoxy-2'-fluorocytidine-3'-phosphate
  modified_base 17: mod_base = OTHER; note = 2'-O-methyladenosine-3'-phosphate
  modified_base 18: mod_base = OTHER; note = 2'-O-methylguanosine-3'-phosphate
  modified_base 19: mod_base = OTHER; note = 2'-O-methylcytidine-3'-phosphate
  modified_base 20: mod_base = OTHER; note = 2'-O-methyladenosine-3'-phosphate
  modified_base 21: mod_base = OTHER; note = 2'-O-methyluridine-3'-phosphate
  modified_base 22: mod_base = OTHER; note = 2'-O-methyluridine-3'-phosphate
  modified_base 23: mod_base = OTHER; note = 2'-O-methylcytidine
taaaaatctgtgaagcagcattc

SEQ ID NO: 4585 - RNA, 23 nt, synthetic construct
  source 1..23: mol_type = other RNA
  modified_base 1: mod_base = OTHER; note = 2'-O-methyluridine-3'-phosphate 5'-(E)-Vinylphosphonate
  modified_base 2: mod_base = OTHER; note = 2'-deoxy-2'-fluorocytidine-3'-phosphate
  modified_base 3: mod_base = OTHER; note = 2'-O-methyladenosine-3'-phosphate
  modified_base 4: mod_base = OTHER; note = 2'-O-methyladenosine-3'-phosphate
  modified_base 5: mod_base = OTHER; note = 2'-O-methyladenosine-3'-phosphate
  modified_base 6: mod_base = OTHER; note = 2'-deoxy-2'-fluoroadenosine-3'-phosphate
  modified_base 7: mod_base = OTHER; note = 2'-O-methyladenosine-3'-phosphate
  modified_base 8: mod_base = OTHER; note = 2'-O-methyluridine-3'-phosphate
  modified_base 9: mod_base = OTHER; note = 2'-O-methylcytidine-3'-phosphate
  modified_base 10: mod_base = OTHER; note = 2'-O-methyluridine-3'-phosphate
  modified_base 11: mod_base = OTHER; note = 2'-O-methylguanosine-3'-phosphate
  modified_base 12: mod_base = OTHER; note = 2'-O-methyluridine-3'-phosphate
  modified_base 13: mod_base = OTHER; note = 2'-O-methylguanosine-3'-phosphate
  modified_base 14: mod_base = OTHER; note = 2'-deoxy-2'-fluoroadenosine-3'-phosphate
  modified_base 15: mod_base = OTHER; note = 2'-O-methyladenosine-3'-phosphate
  modified_base 16: mod_base = OTHER; note = 2'-deoxy-2'-fluoroguanosine-3'-phosphate
  modified_base 17: mod_base = OTHER; note = 2'-O-methylcytidine-3'-phosphate
  modified_base 18: mod_base = OTHER; note = 2'-O-methyladenosine-3'-phosphate
  modified_base 19: mod_base = OTHER; note = 2'-O-methylguanosine-3'-phosphate
  modified_base 20: mod_base = OTHER; note = 2'-O-methylcytidine-3'-phosphate
  modified_base 21: mod_base = OTHER; note = 2'-O-methyladenosine-3'-phosphate
  modified_base 22: mod_base = OTHER; note = 2'-O-methyluridine-3'-phosphate
  modified_base 23: mod_base = OTHER; note = 2'-O-methyluridine
tcaaaaatctgtgaagcagcatt

SEQ ID NO: 4586 - RNA, 23 nt, synthetic construct
  source 1..23: mol_type = other RNA
  modified_base 1: mod_base = OTHER; note = 2'-O-methyluridine-3'-phosphate 5'-(E)-Vinylphosphonate
  modified_base 2: mod_base = OTHER; note = 2'-deoxy-2'-fluoroguanosine-3'-phosphate
  modified_base 3: mod_base = OTHER; note = 2'-O-methylcytidine-3'-phosphate
  modified_base 4: mod_base = OTHER; note = 2'-O-methyladenosine-3'-phosphate
  modified_base 5: mod_base = OTHER; note = 2'-O-methyladenosine-3'-phosphate
  modified_base 6: mod_base = OTHER; note = 2'-deoxy-2'-fluoroadenosine-3'-phosphate
  modified_base 7: mod_base = OTHER; note = 2'-O-methyladenosine-3'-phosphate
  modified_base 8: mod_base = OTHER; note = 2'-O-methyladenosine-3'-phosphate
  modified_base 9: mod_base = OTHER; note = 2'-O-methyluridine-3'-phosphate
  modified_base 10: mod_base = OTHER; note = 2'-O-methylcytidine-3'-phosphate
  modified_base 11: mod_base = OTHER; note = 2'-O-methyluridine-3'-phosphate
  modified_base 12: mod_base = OTHER; note = 2'-O-methylguanosine-3'-phosphate
  modified_base 13: mod_base = OTHER; note = 2'-O-methyluridine-3'-phosphate
  modified_base 14: mod_base = OTHER; note = 2'-deoxy-2'-fluoroguanosine-3'-phosphate
  modified_base 15: mod_base = OTHER; note = 2'-O-methyladenosine-3'-phosphate
  modified_base 16: mod_base = OTHER; note = 2'-deoxy-2'-fluoroadenosine-3'-phosphate
  modified_base 17: mod_base = OTHER; note = 2'-O-methylguanosine-3'-phosphate
  modified_base 18: mod_base = OTHER; note = 2'-O-methylcytidine-3'-phosphate
  modified_base 19: mod_base = OTHER; note = 2'-O-methyladenosine-3'-phosphate
  modified_base 20: mod_base = OTHER; note = 2'-O-methylguanosine-3'-phosphate
  modified_base 21: mod_base = OTHER; note = 2'-O-methylcytidine-3'-phosphate
  modified_base 22: mod_base = OTHER; note = 2'-O-methyladenosine-3'-phosphate
  modified_base 23: mod_base = OTHER; note = 2'-O-methyluridine
tgcaaaaatctgtgaagcagcat

SEQ ID NO: 4587 - RNA, 23 nt, synthetic construct
  source 1..23: mol_type = other RNA
  modified_base 1: mod_base = OTHER; note = 2'-O-methyluridine-3'-phosphate 5'-(E)-Vinylphosphonate
  modified_base 2: mod_base = OTHER; note = 2'-deoxy-2'-fluorouridine-3'-phosphate
  modified_base 3: mod_base = OTHER; note = 2'-O-methylguanosine-3'-phosphate
  modified_base 4: mod_base = OTHER; note = 2'-O-methylcytidine-3'-phosphate
  modified_base 5: mod_base = OTHER; note = 2'-O-methyladenosine-3'-phosphate
  modified_base 6: mod_base = OTHER; note = 2'-deoxy-2'-fluoroadenosine-3'-phosphate
  modified_base 7: mod_base = OTHER; note = 2'-O-methyladenosine-3'-phosphate
  modified_base 8: mod_base = OTHER; note = 2'-O-methyladenosine-3'-phosphate
  modified_base 9: mod_base = OTHER; note = 2'-O-methyladenosine-3'-phosphate
  modified_base 10: mod_base = OTHER; note = 2'-O-methyluridine-3'-phosphate
  modified_base 11: mod_base = OTHER; note = 2'-O-methylcytidine-3'-phosphate
  modified_base 12: mod_base = OTHER; note = 2'-O-methyluridine-3'-phosphate
  modified_base 13: mod_base = OTHER; note = 2'-O-methylguanosine-3'-phosphate
  modified_base 14: mod_base = OTHER; note = 2'-deoxy-2'-fluorouridine-3'-phosphate
  modified_base 15: mod_base = OTHER; note = 2'-O-methylguanosine-3'-phosphate
  modified_base 16: mod_base = OTHER; note = 2'-deoxy-2'-fluoroadenosine-3'-phosphate
  modified_base 17: mod_base = OTHER; note = 2'-O-methyladenosine-3'-phosphate
  modified_base 18: mod_base = OTHER; note = 2'-O-methylguanosine-3'-phosphate
  modified_base 19: mod_base = OTHER; note = 2'-O-methylcytidine-3'-phosphate
  modified_base 20: mod_base = OTHER; note = 2'-O-methyladenosine-3'-phosphate
  modified_base 21: mod_base = OTHER; note = 2'-O-methylguanosine-3'-phosphate
  modified_base 22: mod_base = OTHER; note = 2'-O-methylcytidine-3'-phosphate
  modified_base 23: mod_base = OTHER; note = 2'-O-methyladenosine
ttgcaaaaatctgtgaagcagca

SEQ ID NO: 4588 - RNA, 23 nt, synthetic construct
  source 1..23: mol_type = other RNA
  modified_base 1: mod_base = OTHER; note = 2'-O-methyluridine-3'-phosphate 5'-(E)-Vinylphosphonate
  modified_base 2: mod_base = OTHER; note = 2'-deoxy-2'-fluorouridine-3'-phosphate
  modified_base 3: mod_base = OTHER; note = 2'-O-methyluridine-3'-phosphate
  modified_base 4: mod_base = OTHER; note = 2'-O-methylguanosine-3'-phosphate
  modified_base 5: mod_base = OTHER; note = 2'-O-methylcytidine-3'-phosphate
  modified_base 6: mod_base = OTHER; note = 2'-deoxy-2'-fluoroadenosine-3'-phosphate
  modified_base 7: mod_base = OTHER; note = 2'-O-methyladenosine-3'-phosphate
  modified_base 8: mod_base = OTHER; note = 2'-O-methyladenosine-3'-phosphate
  modified_base 9: mod_base = OTHER; note = 2'-O-methyladenosine-3'-phosphate
  modified_base 10: mod_base = OTHER; note = 2'-O-methyladenosine-3'-phosphate
  modified_base 11: mod_base = OTHER; note = 2'-O-methyluridine-3'-phosphate
  modified_base 12: mod_base = OTHER; note = 2'-O-methylcytidine-3'-phosphate
  modified_base 13: mod_base = OTHER; note = 2'-O-methyluridine-3'-phosphate
  modified_base 14: mod_base = OTHER; note = 2'-deoxy-2'-fluoroguanosine-3'-phosphate
  modified_base 15: mod_base = OTHER; note = 2'-O-methyluridine-3'-phosphate
  modified_base 16: mod_base = OTHER; note = 2'-deoxy-2'-fluoroguanosine-3'-phosphate
  modified_base 17: mod_base = OTHER; note = 2'-O-methyladenosine-3'-phosphate
  modified_base 18: mod_base = OTHER; note = 2'-O-methyladenosine-3'-phosphate
  modified_base 19: mod_base = OTHER; note = 2'-O-methylguanosine-3'-phosphate
  modified_base 20: mod_base = OTHER; note = 2'-O-methylcytidine-3'-phosphate
  modified_base 21: mod_base = OTHER; note = 2'-O-methyladenosine-3'-phosphate
  modified_base 22: mod_base = OTHER; note = 2'-O-methylguanosine-3'-phosphate
  modified_base 23: mod_base = OTHER; note = 2'-O-methylcytidine
tttgcaaaaatctgtgaagcagc

SEQ ID NO: 4589 - RNA, 23 nt, synthetic construct
  source 1..23: mol_type = other RNA
  modified_base 1: mod_base = OTHER; note = 2'-O-methyluridine-3'-phosphate 5'-(E)-Vinylphosphonate
  modified_base 2: mod_base = OTHER; note = 2'-deoxy-2'-fluoroguanosine-3'-phosphate
  modified_base 3: mod_base = OTHER; note = 2'-O-methyluridine-3'-phosphate
  modified_base 4: mod_base = OTHER; note = 2'-O-methyluridine-3'-phosphate
  modified_base 5: mod_base = OTHER; note = 2'-O-methylguanosine-3'-phosphate
  modified_base 6: mod_base = OTHER; note = 2'-deoxy-2'-fluorocytidine-3'-phosphate
  modified_base 7: mod_base = OTHER; note = 2'-O-methyladenosine-3'-phosphate
  modified_base 8: mod_base = OTHER; note = 2'-O-methyladenosine-3'-phosphate
  modified_base 9: mod_base = OTHER; note = 2'-O-methyladenosine-3'-phosphate
  modified_base 10: mod_base = OTHER; note = 2'-O-methyladenosine-3'-phosphate
  modified_base 11: mod_base = OTHER; note = 2'-O-methyladenosine-3'-phosphate
  modified_base 12: mod_base = OTHER; note = 2'-O-methyluridine-3'-phosphate
  modified_base 13: mod_base = OTHER; note = 2'-O-methylcytidine-3'-phosphate
  modified_base 14: mod_base = OTHER; note = 2'-deoxy-2'-fluorouridine-3'-phosphate
  modified_base 15: mod_base = OTHER; note = 2'-O-methylguanosine-3'-phosphate
  modified_base 16: mod_base = OTHER; note = 2'-deoxy-2'-fluorouridine-3'-phosphate
  modified_base 17: mod_base = OTHER; note = 2'-O-methylguanosine-3'-phosphate
  modified_base 18: mod_base = OTHER; note = 2'-O-methyladenosine-3'-phosphate
  modified_base 19: mod_base = OTHER; note = 2'-O-methyladenosine-3'-phosphate
  modified_base 20: mod_base = OTHER; note = 2'-O-methylguanosine-3'-phosphate
  modified_base 21: mod_base = OTHER; note = 2'-O-methylcytidine-3'-phosphate
  modified_base 22: mod_base = OTHER; note = 2'-O-methyladenosine-3'-phosphate
  modified_base 23: mod_base = OTHER; note = 2'-O-methylguanosine
tgttgcaaaaatctgtgaagcag

SEQ ID NO: 4590 - RNA, 23 nt, synthetic construct
  source 1..23: mol_type = other RNA
  modified_base 1: mod_base = OTHER; note = 2'-O-methyluridine-3'-phosphate 5'-(E)-Vinylphosphonate
  modified_base 2: mod_base = OTHER; note = 2'-deoxy-2'-fluorouridine-3'-phosphate
  modified_base 3: mod_base = OTHER; note = 2'-O-methylguanosine-3'-phosphate
  modified_base 4: mod_base = OTHER; note = 2'-O-methyluridine-3'-phosphate
  modified_base 5: mod_base = OTHER; note = 2'-O-methyluridine-3'-phosphate
  modified_base 6: mod_base = OTHER; note = 2'-deoxy-2'-fluoroguanosine-3'-phosphate
  modified_base 7: mod_base = OTHER; note = 2'-O-methylcytidine-3'-phosphate
  modified_base 8: mod_base = OTHER; note = 2'-O-methyladenosine-3'-phosphate
  modified_base 9: mod_base = OTHER; note = 2'-O-methyladenosine-3'-phosphate
  modified_base 10: mod_base = OTHER; note = 2'-O-methyladenosine-3'-phosphate
  modified_base 11: mod_base = OTHER; note = 2'-O-methyladenosine-3'-phosphate
  modified_base 12: mod_base = OTHER; note = 2'-O-methyladenosine-3'-phosphate
  modified_base 13: mod_base = OTHER; note = 2'-O-methyluridine-3'-phosphate
  modified_base 14: mod_base = OTHER; note = 2'-deoxy-2'-fluorocytidine-3'-phosphate
  modified_base 15: mod_base = OTHER; note = 2'-O-methyluridine-3'-phosphate
  modified_base 16: mod_base = OTHER; note = 2'-deoxy-2'-fluoroguanosine-3'-phosphate
  modified_base 17: mod_base = OTHER; note = 2'-O-methyluridine-3'-phosphate
  modified_base 18: mod_base = OTHER; note = 2'-O-methylguanosine-3'-phosphate
  modified_base 19: mod_base = OTHER; note = 2'-O-methyladenosine-3'-phosphate
  modified_base 20: mod_base = OTHER; note = 2'-O-methyladenosine-3'-phosphate
  modified_base 21: mod_base = OTHER; note = 2'-O-methylguanosine-3'-phosphate
  modified_base 22: mod_base = OTHER; note = 2'-O-methylcytidine-3'-phosphate
  modified_base 23: mod_base = OTHER; note = 2'-O-methyladenosine
ttgttgcaaaaatctgtgaagca

SEQ ID NO: 4591 - RNA, 23 nt, synthetic construct
  source 1..23: mol_type = other RNA
  modified_base 1: mod_base = OTHER; note = 2'-O-methyluridine-3'-phosphate 5'-(E)-Vinylphosphonate
  modified_base 2: mod_base = OTHER; note = 2'-deoxy-2'-fluorouridine-3'-phosphate
  modified_base 3: mod_base = OTHER; note = 2'-O-methyluridine-3'-phosphate
  modified_base 4: mod_base = OTHER; note = 2'-O-methylguanosine-3'-phosphate
  modified_base 5: mod_base = OTHER; note = 2'-O-methyluridine-3'-phosphate
  modified_base 6: mod_base = OTHER; note = 2'-deoxy-2'-fluorouridine-3'-phosphate
  modified_base 7: mod_base = OTHER; note = 2'-O-methylguanosine-3'-phosphate
  modified_base 8: mod_base = OTHER; note = 2'-O-methylcytidine-3'-phosphate
  modified_base 9: mod_base = OTHER; note = 2'-O-methyladenosine-3'-phosphate
  modified_base 10: mod_base = OTHER; note = 2'-O-methyladenosine-3'-phosphate
  modified_base 11: mod_base = OTHER; note = 2'-O-methyladenosine-3'-phosphate
  modified_base 12: mod_base = OTHER; note = 2'-O-methyladenosine-3'-phosphate
  modified_base 13: mod_base = OTHER; note = 2'-O-methyladenosine-3'-phosphate
  modified_base 14: mod_base = OTHER; note = 2'-deoxy-2'-fluorouridine-3'-phosphate
  modified_base 15: mod_base = OTHER; note = 2'-O-methylcytidine-3'-phosphate
  modified_base 16: mod_base = OTHER; note = 2'-deoxy-2'-fluorouridine-3'-phosphate
  modified_base 17: mod_base = OTHER; note = 2'-O-methylguanosine-3'-phosphate
  modified_base 18: mod_base = OTHER; note = 2'-O-methyluridine-3'-phosphate
  modified_base 19: mod_base = OTHER; note = 2'-O-methylguanosine-3'-phosphate
  modified_base 20: mod_base = OTHER; note = 2'-O-methyladenosine-3'-phosphate
  modified_base 21: mod_base = OTHER; note = 2'-O-methyladenosine-3'-phosphate
  modified_base 22: mod_base = OTHER; note = 2'-O-methylguanosine-3'-phosphate
  modified_base 23: mod_base = OTHER; note = 2'-O-methylcytidine
tttgttgcaaaaatctgtgaagc

SEQ ID NO: 4592 - RNA, 23 nt, synthetic construct
  source 1..23: mol_type = other RNA
  modified_base 1: mod_base = OTHER; note = 2'-O-methyluridine-3'-phosphate 5'-(E)-Vinylphosphonate
  modified_base 2: mod_base = OTHER; note = 2'-deoxy-2'-fluoroguanosine-3'-phosphate
  modified_base 3: mod_base = OTHER; note = 2'-O-methyluridine-3'-phosphate
  modified_base 4: mod_base = OTHER; note = 2'-O-methyluridine-3'-phosphate
  modified_base 5: mod_base = OTHER; note = 2'-O-methylguanosine-3'-phosphate
  modified_base 6: mod_base = OTHER; note = 2'-deoxy-2'-fluorouridine-3'-phosphate
  modified_base 7: mod_base = OTHER; note = 2'-O-methyluridine-3'-phosphate
  modified_base 8: mod_base = OTHER; note = 2'-O-methylguanosine-3'-phosphate
  modified_base 9: mod_base = OTHER; note = 2'-O-methylcytidine-3'-phosphate
  modified_base 10: mod_base = OTHER; note = 2'-O-methyladenosine-3'-phosphate
  modified_base 11: mod_base = OTHER; note = 2'-O-methyladenosine-3'-phosphate
  modified_base 12: mod_base = OTHER; note = 2'-O-methyladenosine-3'-phosphate
  modified_base 13: mod_base = OTHER; note = 2'-O-methyladenosine-3'-phosphate
  modified_base 14: mod_base = OTHER; note = 2'-deoxy-2'-fluoroadenosine-3'-phosphate
  modified_base 15: mod_base = OTHER; note = 2'-O-methyluridine-3'-phosphate
  modified_base 16: mod_base = OTHER; note = 2'-deoxy-2'-fluorocytidine-3'-phosphate
  modified_base 17: mod_base = OTHER; note = 2'-O-methyluridine-3'-phosphate
  modified_base 18: mod_base = OTHER; note = 2'-O-methylguanosine-3'-phosphate
  modified_base 19: mod_base = OTHER; note = 2'-O-methyluridine-3'-phosphate
  modified_base 20: mod_base = OTHER; note = 2'-O-methylguanosine-3'-phosphate
  modified_base 21: mod_base = OTHER; note = 2'-O-methyladenosine-3'-phosphate
  modified_base 22: mod_base = OTHER; note = 2'-O-methyladenosine-3'-phosphate
  modified_base 23: mod_base = OTHER; note = 2'-O-methylguanosine
tgttgttgcaaaaatctgtgaag

SEQ ID NO: 4593 - RNA, 23 nt, synthetic construct
  source 1..23: mol_type = other RNA
  modified_base 1: mod_base = OTHER; note = 2'-O-methyluridine-3'-phosphate 5'-(E)-Vinylphosphonate
  modified_base 2: mod_base = OTHER; note = 2'-deoxy-2'-fluorouridine-3'-phosphate
  modified_base 3: mod_base = OTHER; note = 2'-O-methylguanosine-3'-phosphate
  modified_base 4: mod_base = OTHER; note = 2'-O-methyluridine-3'-phosphate
  modified_base 5: mod_base = OTHER; note = 2'-O-methyluridine-3'-phosphate
  modified_base 6: mod_base = OTHER; note = 2'-deoxy-2'-fluoroguanosine-3'-phosphate
  modified_base 7: mod_base = OTHER; note = 2'-O-methyluridine-3'-phosphate
  modified_base 8: mod_base = OTHER; note = 2'-O-methyluridine-3'-phosphate
  modified_base 9: mod_base = OTHER; note = 2'-O-methylguanosine-3'-phosphate
  modified_base 10: mod_base = OTHER; note = 2'-O-methylcytidine-3'-phosphate
  modified_base 11: mod_base = OTHER; note = 2'-O-methyladenosine-3'-phosphate
  modified_base 12: mod_base = OTHER; note = 2'-O-methyladenosine-3'-phosphate
  modified_base 13: mod_base = OTHER; note = 2'-O-methyladenosine-3'-phosphate
  modified_base 14: mod_base = OTHER; note = 2'-deoxy-2'-fluoroadenosine-3'-phosphate
  modified_base 15: mod_base = OTHER; note = 2'-O-methyladenosine-3'-phosphate
  modified_base 16: mod_base = OTHER; note = 2'-deoxy-2'-fluorouridine-3'-phosphate
  modified_base 17: mod_base = OTHER; note = 2'-O-methylcytidine-3'-phosphate
  modified_base 18: mod_base = OTHER; note = 2'-O-methyluridine-3'-phosphate
  modified_base 19: mod_base = OTHER; note = 2'-O-methylguanosine-3'-phosphate
  modified_base 20: mod_base = OTHER; note = 2'-O-methyluridine-3'-phosphate
  modified_base 21: mod_base = OTHER; note = 2'-O-methylguanosine-3'-phosphate
  modified_base 22: mod_base = OTHER; note = 2'-O-methyladenosine-3'-phosphate
  modified_base 23: mod_base = OTHER; note = 2'-O-methyladenosine
ttgttgttgcaaaaatctgtgaa

SEQ ID NO: 4594 - RNA, 23 nt, synthetic construct
  source 1..23: mol_type = other RNA
  modified_base 1: mod_base = OTHER; note = 2'-O-methyluridine-3'-phosphate 5'-(E)-Vinylphosphonate
  modified_base 2: mod_base = OTHER; note = 2'-deoxy-2'-fluoroadenosine-3'-phosphate
  modified_base 3: mod_base = OTHER; note = 2'-O-methyluridine-3'-phosphate
  modified_base 4: mod_base = OTHER; note = 2'-O-methylguanosine-3'-phosphate
  modified_base 5: mod_base = OTHER; note = 2'-O-methyluridine-3'-phosphate
  modified_base 6: mod_base = OTHER; note = 2'-deoxy-2'-fluorouridine-3'-phosphate
  modified_base 7: mod_base = OTHER; note = 2'-O-methylguanosine-3'-phosphate
  modified_base 8: mod_base = OTHER; note = 2'-O-methyluridine-3'-phosphate
  modified_base 9: mod_base = OTHER; note = 2'-O-methyluridine-3'-phosphate
  modified_base 10: mod_base = OTHER; note = 2'-O-methylguanosine-3'-phosphate
  modified_base 11: mod_base = OTHER; note = 2'-O-methylcytidine-3'-phosphate
  modified_base 12: mod_base = OTHER; note = 2'-O-methyladenosine-3'-phosphate
  modified_base 13: mod_base = OTHER; note = 2'-O-methyladenosine-3'-phosphate
  modified_base 14: mod_base = OTHER; note = 2'-deoxy-2'-fluoroadenosine-3'-phosphate
  modified_base 15: mod_base = OTHER; note = 2'-O-methyladenosine-3'-phosphate
  modified_base 16: mod_base = OTHER; note = 2'-deoxy-2'-fluoroadenosine-3'-phosphate
  modified_base 17: mod_base = OTHER; note = 2'-O-methyluridine-3'-phosphate
  modified_base 18: mod_base = OTHER; note = 2'-O-methylcytidine-3'-phosphate
  modified_base 19: mod_base = OTHER; note = 2'-O-methyluridine-3'-phosphate
  modified_base 20: mod_base = OTHER; note = 2'-O-methylguanosine-3'-phosphate
  modified_base 21: mod_base = OTHER; note = 2'-O-methyluridine-3'-phosphate
  modified_base 22: mod_base = OTHER; note = 2'-O-methylguanosine-3'-phosphate
  modified_base 23: mod_base = OTHER; note = 2'-O-methyladenosine
tatgttgttgcaaaaatctgtga

SEQ ID NO: 4595 - RNA, 23 nt, synthetic construct
  source 1..23: mol_type = other RNA
  modified_base 1: mod_base = OTHER; note = 2'-O-methyluridine-3'-phosphate 5'-(E)-Vinylphosphonate
  modified_base 2: mod_base = OTHER; note = 2'-deoxy-2'-fluorouridine-3'-phosphate
  modified_base 3: mod_base = OTHER; note = 2'-O-methyladenosine-3'-phosphate
  modified_base 4: mod_base = OTHER; note = 2'-O-methyluridine-3'-phosphate
  modified_base 5: mod_base = OTHER; note = 2'-O-methylguanosine-3'-phosphate
  modified_base 6: mod_base = OTHER; note = 2'-deoxy-2'-fluorouridine-3'-phosphate
  modified_base 7: mod_base = OTHER; note = 2'-O-methyluridine-3'-phosphate
  modified_base 8: mod_base = OTHER; note = 2'-O-methylguanosine-3'-phosphate
  modified_base 9: mod_base = OTHER; note = 2'-O-methyluridine-3'-phosphate
  modified_base 10: mod_base = OTHER; note = 2'-O-methyluridine-3'-phosphate
  modified_base 11: mod_base = OTHER; note = 2'-O-methylguanosine-3'-phosphate
  modified_base 12: mod_base = OTHER; note = 2'-O-methylcytidine-3'-phosphate
  modified_base 13: mod_base = OTHER; note = 2'-O-methyladenosine-3'-phosphate
  modified_base 14: mod_base = OTHER; note = 2'-deoxy-2'-fluoroadenosine-3'-phosphate
  modified_base 15: mod_base = OTHER; note = 2'-O-methyladenosine-3'-phosphate
  modified_base 16: mod_base = OTHER; note = 2'-deoxy-2'-fluoroadenosine-3'-phosphate
  modified_base 17: mod_base = OTHER; note = 2'-O-methyladenosine-3'-phosphate
  modified_base 18: mod_base = OTHER; note = 2'-O-methyluridine-3'-phosphate
  modified_base 19: mod_base = OTHER; note = 2'-O-methylcytidine-3'-phosphate
  modified_base 20: mod_base = OTHER; note = 2'-O-methyluridine-3'-phosphate
  modified_base 21: mod_base = OTHER; note = 2'-O-methylguanosine-3'-phosphate
  modified_base 22: mod_base = OTHER; note = 2'-O-methyluridine-3'-phosphate
  modified_base 23: mod_base = OTHER; note = 2'-O-methylguanosine
ttatgttgttgcaaaaatctgtg

SEQ ID NO: 4596 - RNA, 23 nt, synthetic construct
  source 1..23: mol_type = other RNA
  modified_base 1: mod_base = OTHER; note = 2'-O-methyluridine-3'-phosphate 5'-(E)-Vinylphosphonate
  modified_base 2: mod_base = OTHER; note = 2'-deoxy-2'-fluorouridine-3'-phosphate
  modified_base 3: mod_base = OTHER; note = 2'-O-methyluridine-3'-phosphate
  modified_base 4: mod_base = OTHER; note = 2'-O-methyladenosine-3'-phosphate
  modified_base 5: mod_base = OTHER; note = 2'-O-methyluridine-3'-phosphate
  modified_base 6: mod_base = OTHER; note = 2'-deoxy-2'-fluoroguanosine-3'-phosphate
  modified_base 7: mod_base = OTHER; note = 2'-O-methyluridine-3'-phosphate
  modified_base 8: mod_base = OTHER; note = 2'-O-methyluridine-3'-phosphate
  modified_base 9: mod_base = OTHER; note = 2'-O-methylguanosine-3'-phosphate
  modified_base 10: mod_base = OTHER; note = 2'-O-methyluridine-3'-phosphate
  modified_base 11: mod_base = OTHER; note = 2'-O-methyluridine-3'-phosphate
  modified_base 12: mod_base = OTHER; note = 2'-O-methylguanosine-3'-phosphate
  modified_base 13: mod_base = OTHER; note = 2'-O-methylcytidine-3'-phosphate
  modified_base 14: mod_base = OTHER; note = 2'-deoxy-2'-fluoroadenosine-3'-phosphate
  modified_base 15: mod_base = OTHER; note = 2'-O-methyladenosine-3'-phosphate
  modified_base 16: mod_base = OTHER; note = 2'-deoxy-2'-fluoroadenosine-3'-phosphate
  modified_base 17: mod_base = OTHER; note = 2'-O-methyladenosine-3'-phosphate
  modified_base 18: mod_base = OTHER; note = 2'-O-methyladenosine-3'-phosphate
  modified_base 19: mod_base = OTHER; note = 2'-O-methyluridine-3'-phosphate
  modified_base 20: mod_base = OTHER; note = 2'-O-methylcytidine-3'-phosphate
  modified_base 21: mod_base = OTHER; note = 2'-O-methyluridine-3'-phosphate
  modified_base 22: mod_base = OTHER; note = 2'-O-methylguanosine-3'-phosphate
  modified_base 23: mod_base = OTHER; note = 2'-O-methyluridine
tttatgttgttgcaaaaatctgt

SEQ ID NO: 4597 - RNA, 23 nt, synthetic construct
  source 1..23: mol_type = other RNA
  modified_base 1: mod_base = OTHER; note = 2'-O-methyluridine-3'-phosphate 5'-(E)-Vinylphosphonate
  modified_base 2: mod_base = OTHER; note = 2'-deoxy-2'-fluoroguanosine-3'-phosphate
  modified_base 3: mod_base = OTHER; note = 2'-O-methyluridine-3'-phosphate
  modified_base 4: mod_base = OTHER; note = 2'-O-methyluridine-3'-phosphate
  modified_base 5: mod_base = OTHER; note = 2'-O-methyladenosine-3'-phosphate
  modified_base 6: mod_base = OTHER; note = 2'-deoxy-2'-fluorouridine-3'-phosphate
  modified_base 7: mod_base = OTHER; note = 2'-O-methylguanosine-3'-phosphate
  modified_base 8: mod_base = OTHER; note = 2'-O-methyluridine-3'-phosphate
  modified_base 9: mod_base = OTHER; note = 2'-O-methyluridine-3'-phosphate
  modified_base 10: mod_base = OTHER; note = 2'-O-methylguanosine-3'-phosphate
  modified_base 11: mod_base = OTHER; note = 2'-O-methyluridine-3'-phosphate
  modified_base 12: mod_base = OTHER; note = 2'-O-methyluridine-3'-phosphate
  modified_base 13: mod_base = OTHER; note = 2'-O-methylguanosine-3'-phosphate
  modified_base 14: mod_base = OTHER; note = 2'-deoxy-2'-fluorocytidine-3'-phosphate
  modified_base 15: mod_base = OTHER; note = 2'-O-methyladenosine-3'-phosphate
  modified_base 16: mod_base = OTHER; note = 2'-deoxy-2'-fluoroadenosine-3'-phosphate
  modified_base 17: mod_base = OTHER; note = 2'-O-methyladenosine-3'-phosphate
  modified_base 18: mod_base = OTHER; note = 2'-O-methyladenosine-3'-phosphate
  modified_base 19: mod_base = OTHER; note = 2'-O-methyladenosine-3'-phosphate
  modified_base 20: mod_base = OTHER; note = 2'-O-methyluridine-3'-phosphate
  modified_base 21: mod_base = OTHER; note = 2'-O-methylcytidine-3'-phosphate
  modified_base 22: mod_base = OTHER; note = 2'-O-methyluridine-3'-phosphate
  modified_base 23: mod_base = OTHER; note = 2'-O-methylguanosine
tgttatgttgttgcaaaaatctg

SEQ ID NO: 4598 - RNA, 23 nt, synthetic construct
  source 1..23: mol_type = other RNA
  modified_base 1: mod_base = OTHER; note = 2'-O-methyluridine-3'-phosphate 5'-(E)-Vinylphosphonate
  modified_base 2: mod_base = OTHER; note = 2'-deoxy-2'-fluorouridine-3'-phosphate
  modified_base 3: mod_base = OTHER; note = 2'-O-methylguanosine-3'-phosphate
  modified_base 4: mod_base = OTHER; note = 2'-O-methyluridine-3'-phosphate
  modified_base 5: mod_base = OTHER; note = 2'-O-methyluridine-3'-phosphate
  modified_base 6: mod_base = OTHER; note = 2'-deoxy-2'-fluoroadenosine-3'-phosphate
  modified_base 7: mod_base = OTHER; note = 2'-O-methyluridine-3'-phosphate
  modified_base 8: mod_base = OTHER; note = 2'-O-methylguanosine-3'-phosphate
  modified_base 9: mod_base = OTHER; note = 2'-O-methyluridine-3'-phosphate
  modified_base 10: mod_base = OTHER; note = 2'-O-methyluridine-3'-phosphate
  modified_base 11: mod_base = OTHER; note = 2'-O-methylguanosine-3'-phosphate
  modified_base 12: mod_base = OTHER; note = 2'-O-methyluridine-3'-phosphate
  modified_base 13: mod_base = OTHER; note = 2'-O-methyluridine-3'-phosphate
  modified_base 14: mod_base = OTHER; note = 2'-deoxy-2'-fluoroguanosine-3'-phosphate
  modified_base 15: mod_base = OTHER; note = 2'-O-methylcytidine-3'-phosphate
  modified_base 16: mod_base = OTHER; note = 2'-deoxy-2'-fluoroadenosine-3'-phosphate
  modified_base 17: mod_base = OTHER; note = 2'-O-methyladenosine-3'-phosphate
  modified_base 18: mod_base = OTHER; note = 2'-O-methyladenosine-3'-phosphate
  modified_base 19: mod_base = OTHER; note = 2'-O-methyladenosine-3'-phosphate
  modified_base 20: mod_base = OTHER; note = 2'-O-methyladenosine-3'-phosphate
  modified_base 21: mod_base = OTHER; note = 2'-O-methyluridine-3'-phosphate
  modified_base 22: mod_base = OTHER; note = 2'-O-methylcytidine-3'-phosphate
  modified_base 23: mod_base = OTHER; note = 2'-O-methyluridine
ttgttatgttgttgcaaaaatct

SEQ ID NO: 4599 - RNA, 23 nt, synthetic construct
  source 1..23: mol_type = other RNA
  modified_base 1: mod_base = OTHER; note = 2'-O-methyluridine-3'-phosphate 5'-(E)-Vinylphosphonate
  modified_base 2: mod_base = OTHER; note = 2'-deoxy-2'-fluoroguanosine-3'-phosphate
  modified_base 3: mod_base = OTHER; note = 2'-O-methyluridine-3'-phosphate
  modified_base 4: mod_base = OTHER; note = 2'-O-methylguanosine-3'-phosphate
  modified_base 5: mod_base = OTHER; note = 2'-O-methyluridine-3'-phosphate
  modified_base 6: mod_base = OTHER; note = 2'-deoxy-2'-fluorouridine-3'-phosphate
  modified_base 7: mod_base = OTHER; note = 2'-O-methyladenosine-3'-phosphate
  modified_base 8: mod_base = OTHER; note = 2'-O-methyluridine-3'-phosphate
  modified_base 9: mod_base = OTHER; note = 2'-O-methylguanosine-3'-phosphate
  modified_base 10: mod_base = OTHER; note = 2'-O-methyluridine-3'-phosphate
  modified_base 11: mod_base = OTHER; note = 2'-O-methyluridine-3'-phosphate
  modified_base 12: mod_base = OTHER; note = 2'-O-methylguanosine-3'-phosphate
  modified_base 13: mod_base = OTHER; note = 2'-O-methyluridine-3'-phosphate
  modified_base 14: mod_base = OTHER; note = 2'-deoxy-2'-fluorouridine-3'-phosphate
  modified_base 15: mod_base = OTHER; note = 2'-O-methylguanosine-3'-phosphate
  modified_base 16: mod_base = OTHER; note = 2'-deoxy-2'-fluorocytidine-3'-phosphate
  modified_base 17: mod_base = OTHER; note = 2'-O-methyladenosine-3'-phosphate
  modified_base 18: mod_base = OTHER; note = 2'-O-methyladenosine-3'-phosphate
  modified_base 19: mod_base = OTHER; note = 2'-O-methyladenosine-3'-phosphate
  modified_base 20: mod_base = OTHER; note = 2'-O-methyladenosine-3'-phosphate
  modified_base 21: mod_base = OTHER; note = 2'-O-methyladenosine-3'-phosphate
  modified_base 22: mod_base = OTHER; note = 2'-O-methyluridine-3'-phosphate
  modified_base 23: mod_base = OTHER; note = 2'-O-methylcytidine
tgtgttatgttgttgcaaaaatc

SEQ ID NO: 4600 - RNA, 23 nt, synthetic construct
  source 1..23: mol_type = other RNA
  modified_base 1: mod_base = OTHER; note = 2'-O-methyluridine-3'-phosphate 5'-(E)-Vinylphosphonate
  modified_base 2: mod_base = OTHER; note = 2'-deoxy-2'-fluoroadenosine-3'-phosphate
  modified_base 3: mod_base = OTHER; note = 2'-O-methylguanosine-3'-phosphate
  modified_base 4: mod_base = OTHER; note = 2'-O-methyluridine-3'-phosphate
  modified_base 5: mod_base = OTHER; note = 2'-O-methylguanosine-3'-phosphate
  modified_base 6: mod_base = OTHER; note = 2'-deoxy-2'-fluorouridine-3'-phosphate
  modified_base 7: mod_base = OTHER; note = 2'-O-methyluridine-3'-phosphate
  modified_base 8: mod_base = OTHER; note = 2'-O-methyladenosine-3'-phosphate
  modified_base 9: mod_base = OTHER; note = 2'-O-methyluridine-3'-phosphate
  modified_base 10: mod_base = OTHER; note = 2'-O-methylguanosine-3'-phosphate
  modified_base 11: mod_base = OTHER; note = 2'-O-methyluridine-3'-phosphate
  modified_base 12: mod_base = OTHER; note = 2'-O-methyluridine-3'-phosphate
  modified_base 13: mod_base = OTHER; note = 2'-O-methylguanosine-3'-phosphate
  modified_base 14: mod_base = OTHER; note = 2'-deoxy-2'-fluorouridine-3'-phosphate
  modified_base 15: mod_base = OTHER; note = 2'-O-methyluridine-3'-phosphate
  modified_base 16: mod_base = OTHER; note = 2'-deoxy-2'-fluoroguanosine-3'-phosphate
  modified_base 17: mod_base = OTHER; note = 2'-O-methylcytidine-3'-phosphate
  modified_base 18: mod_base = OTHER; note = 2'-O-methyladenosine-3'-phosphate
  modified_base 19: mod_base = OTHER; note = 2'-O-methyladenosine-3'-phosphate
  modified_base 20: mod_base = OTHER; note = 2'-O-methyladenosine-3'-phosphate
  modified_base 21: mod_base = OTHER; note = 2'-O-methyladenosine-3'-phosphate
  modified_base 22: mod_base = OTHER; note = 2'-O-methyladenosine-3'-phosphate
  modified_base 23: mod_base = OTHER; note = 2'-O-methyluridine
tagtgttatgttgttgcaaaaat

SEQ ID NO: 4601 - RNA, 23 nt, synthetic construct
  source 1..23: mol_type = other RNA
  modified_base 1: mod_base = OTHER; note = 2'-O-methyluridine-3'-phosphate 5'-(E)-Vinylphosphonate
  modified_base 2: mod_base = OTHER; note = 2'-deoxy-2'-fluorocytidine-3'-phosphate
  modified_base 3: mod_base = OTHER; note = 2'-O-methyladenosine-3'-phosphate
  modified_base 4: mod_base = OTHER; note = 2'-O-methylguanosine-3'-phosphate
  modified_base 5: mod_base = OTHER; note = 2'-O-methyluridine-3'-phosphate
  modified_base 6: mod_base = OTHER; note = 2'-deoxy-2'-fluoroguanosine-3'-phosphate
  modified_base 7: mod_base = OTHER; note = 2'-O-methyluridine-3'-phosphate
  modified_base 8: mod_base = OTHER; note = 2'-O-methyluridine-3'-phosphate
  modified_base 9: mod_base = OTHER; note = 2'-O-methyladenosine-3'-phosphate
  modified_base 10: mod_base = OTHER; note = 2'-O-methyluridine-3'-phosphate
  modified_base 11: mod_base = OTHER; note = 2'-O-methylguanosine-3'-phosphate
  modified_base 12: mod_base = OTHER; note = 2'-O-methyluridine-3'-phosphate
  modified_base 13: mod_base = OTHER; note = 2'-O-methyluridine-3'-phosphate
  modified_base 14: mod_base = OTHER; note = 2'-deoxy-2'-fluoroguanosine-3'-phosphate
  modified_base 15: mod_base = OTHER; note = 2'-O-methyluridine-3'-phosphate
  modified_base 16: mod_base = OTHER; note = 2'-deoxy-2'-fluorouridine-3'-phosphate
  modified_base 17: mod_base = OTHER; note = 2'-O-methylguanosine-3'-phosphate
  modified_base 18: mod_base = OTHER; note = 2'-O-methylcytidine-3'-phosphate
  modified_base 19: mod_base = OTHER; note = 2'-O-methyladenosine-3'-phosphate
  modified_base 20: mod_base = OTHER; note = 2'-O-methyladenosine-3'-phosphate
  modified_base 21: mod_base = OTHER; note = 2'-O-methyladenosine-3'-phosphate
  modified_base 22: mod_base = OTHER; note = 2'-O-methyladenosine-3'-phosphate
  modified_base 23: mod_base = OTHER; note = 2'-O-methyladenosine
tcagtgttatgttgttgcaaaaa

SEQ ID NO: 4602 - RNA, 23 nt, synthetic construct
  source 1..23: mol_type = other RNA
  modified_base 1: mod_base = OTHER; note = 2'-O-methyluridine-3'-phosphate 5'-(E)-Vinylphosphonate
  modified_base 2: mod_base = OTHER; note = 2'-deoxy-2'-fluoroguanosine-3'-phosphate
  modified_base 3: mod_base = OTHER; note = 2'-O-methylcytidine-3'-phosphate
  modified_base 4: mod_base = OTHER; note = 2'-O-methyladenosine-3'-phosphate
  modified_base 5: mod_base = OTHER; note = 2'-O-methylguanosine-3'-phosphate
  modified_base 6: mod_base = OTHER; note = 2'-deoxy-2'-fluorouridine-3'-phosphate
  modified_base 7: mod_base = OTHER; note = 2'-O-methylguanosine-3'-phosphate
  modified_base 8: mod_base = OTHER; note = 2'-O-methyluridine-3'-phosphate
  modified_base 9: mod_base = OTHER; note = 2'-O-methyluridine-3'-phosphate
  modified_base 10: mod_base = OTHER; note = 2'-O-methyladenosine-3'-phosphate
  modified_base 11: mod_base = OTHER; note = 2'-O-methyluridine-3'-phosphate
  modified_base 12: mod_base = OTHER; note = 2'-O-methylguanosine-3'-phosphate
  modified_base 13: mod_base = OTHER; note = 2'-O-methyluridine-3'-phosphate
  modified_base 14: mod_base = OTHER; note = 2'-deoxy-2'-fluorouridine-3'-phosphate
  modified_base 15: mod_base = OTHER; note = 2'-O-methylguanosine-3'-phosphate
  modified_base 16: mod_base = OTHER; note = 2'-deoxy-2'-fluorouridine-3'-phosphate
  modified_base 17: mod_base = OTHER; note = 2'-O-methyluridine-3'-phosphate
  modified_base 18: mod_base = OTHER; note = 2'-O-methylguanosine-3'-phosphate
  modified_base 19: mod_base = OTHER; note = 2'-O-methylcytidine-3'-phosphate
  modified_base 20: mod_base = OTHER; note = 2'-O-methyladenosine-3'-phosphate
  modified_base 21: mod_base = OTHER; note = 2'-O-methyladenosine-3'-phosphate
  modified_base 22: mod_base = OTHER; note = 2'-O-methyladenosine-3'-phosphate
  modified_base 23: mod_base = OTHER; note = 2'-O-methyladenosine
tgcagtgttatgttgttgcaaaa

SEQ ID NO: 4603 - RNA, 23 nt, synthetic construct
  source 1..23: mol_type = other RNA
  modified_base 1: mod_base = OTHER; note = 2'-O-methyluridine-3'-phosphate 5'-(E)-Vinylphosphonate
  modified_base 2: mod_base = OTHER; note = 2'-deoxy-2'-fluorouridine-3'-phosphate
  modified_base 3: mod_base = OTHER; note = 2'-O-methylguanosine-3'-phosphate
  modified_base 4: mod_base = OTHER; note = 2'-O-methylcytidine-3'-phosphate
  modified_base 5: mod_base = OTHER; note = 2'-O-methyladenosine-3'-phosphate
  modified_base 6: mod_base = OTHER; note = 2'-deoxy-2'-fluoroguanosine-3'-phosphate
  modified_base 7: mod_base = OTHER; note = 2'-O-methyluridine-3'-phosphate
  modified_base 8: mod_base = OTHER; note = 2'-O-methylguanosine-3'-phosphate
  modified_base 9: mod_base = OTHER; note = 2'-O-methyluridine-3'-phosphate
  modified_base 10: mod_base = OTHER; note = 2'-O-methyluridine-3'-phosphate
  modified_base 11: mod_base = OTHER; note = 2'-O-methyladenosine-3'-phosphate
  modified_base 12: mod_base = OTHER; note = 2'-O-methyluridine-3'-phosphate
  modified_base 13: mod_base = OTHER; note = 2'-O-methylguanosine-3'-phosphate
  modified_base 14: mod_base = OTHER; note = 2'-deoxy-2'-fluorouridine-3'-phosphate
  modified_base 15: mod_base = OTHER; note = 2'-O-methyluridine-3'-phosphate
  modified_base 16: mod_base = OTHER; note = 2'-deoxy-2'-fluoroguanosine-3'-phosphate
  modified_base 17: mod_base = OTHER; note = 2'-O-methyluridine-3'-phosphate
  modified_base 18: mod_base = OTHER; note = 2'-O-methyluridine-3'-phosphate
  modified_base 19: mod_base = OTHER; note = 2'-O-methylguanosine-3'-phosphate
  modified_base 20: mod_base = OTHER; note = 2'-O-methylcytidine-3'-phosphate
  modified_base 21: mod_base = OTHER; note = 2'-O-methyladenosine-3'-phosphate
  modified_base 22: mod_base = OTHER; note = 2'-O-methyladenosine-3'-phosphate
  modified_base 23: mod_base = OTHER; note = 2'-O-methyladenosine
ttgcagtgttatgttgttgcaaa

SEQ ID NO: 4604 - RNA, 23 nt, synthetic construct
  source 1..23: mol_type = other RNA
  modified_base 1: mod_base = OTHER; note = 2'-O-methyluridine-3'-phosphate 5'-(E)-Vinylphosphonate
  modified_base 2: mod_base = OTHER; note = 2'-deoxy-2'-fluoroguanosine-3'-phosphate
  modified_base 3: mod_base = OTHER; note = 2'-O-methyluridine-3'-phosphate
  modified_base 4: mod_base = OTHER; note = 2'-O-methylguanosine-3'-phosphate
  modified_base 5: mod_base = OTHER; note = 2'-O-methylcytidine-3'-phosphate
  modified_base 6: mod_base = OTHER; note = 2'-deoxy-2'-fluoroadenosine-3'-phosphate
  modified_base 7: mod_base = OTHER; note = 2'-O-methylguanosine-3'-phosphate
  modified_base 8: mod_base = OTHER; note = 2'-O-methyluridine-3'-phosphate
  modified_base 9: mod_base = OTHER; note = 2'-O-methylguanosine-3'-phosphate
  modified_base 10: mod_base = OTHER; note = 2'-O-methyluridine-3'-phosphate
  modified_base 11: mod_base = OTHER; note = 2'-O-methyluridine-3'-phosphate
  modified_base 12: mod_base = OTHER; note = 2'-O-methyladenosine-3'-phosphate
  modified_base 13: mod_base = OTHER; note = 2'-O-methyluridine-3'-phosphate
  modified_base 14: mod_base = OTHER; note = 2'-deoxy-2'-fluoroguanosine-3'-phosphate
  modified_base 15: mod_base = OTHER; note = 2'-O-methyluridine-3'-phosphate
  modified_base 16: mod_base = OTHER; note = 2'-deoxy-2'-fluorouridine-3'-phosphate
  modified_base 17: mod_base = OTHER; note = 2'-O-methylguanosine-3'-phosphate
  modified_base 18: mod_base = OTHER; note = 2'-O-methyluridine-3'-phosphate
  modified_base 19: mod_base = OTHER; note = 2'-O-methyluridine-3'-phosphate
  modified_base 20: mod_base = OTHER; note = 2'-O-methylguanosine-3'-phosphate
  modified_base 21: mod_base = OTHER; note = 2'-O-methylcytidine-3'-phosphate
  modified_base 22: mod_base = OTHER; note = 2'-O-methyladenosine-3'-phosphate
  modified_base 23: mod_base = OTHER; note = 2'-O-methyladenosine
tgtgcagtgttatgttgttgcaa

SEQ ID NO: 4605 - RNA, 23 nt, synthetic construct
  source 1..23: mol_type = other RNA
  modified_base 1: mod_base = OTHER; note = 2'-O-methyluridine-3'-phosphate 5'-(E)-Vinylphosphonate
  modified_base 2: mod_base = OTHER; note = 2'-deoxy-2'-fluoroguanosine-3'-phosphate
  modified_base 3: mod_base = OTHER; note = 2'-O-methylguanosine-3'-phosphate
  modified_base 4: mod_base = OTHER; note = 2'-O-methyluridine-3'-phosphate
  modified_base 5: mod_base = OTHER; note = 2'-O-methylguanosine-3'-phosphate
  modified_base 6: mod_base = OTHER; note = 2'-deoxy-2'-fluorocytidine-3'-phosphate
  modified_base 7: mod_base = OTHER; note = 2'-O-methyladenosine-3'-phosphate
  modified_base 8: mod_base = OTHER; note = 2'-O-methylguanosine-3'-phosphate
  modified_base 9: mod_base = OTHER; note = 2'-O-methyluridine-3'-phosphate
  modified_base 10: mod_base = OTHER; note = 2'-O-methylguanosine-3'-phosphate
  modified_base 11: mod_base = OTHER; note = 2'-O-methyluridine-3'-phosphate
  modified_base 12: mod_base = OTHER; note = 2'-O-methyluridine-3'-phosphate
  modified_base 13: mod_base = OTHER; note = 2'-O-methyladenosine-3'-phosphate
  modified_base 14: mod_base = OTHER; note = 2'-deoxy-2'-fluorouridine-3'-phosphate
  modified_base 15: mod_base = OTHER; note = 2'-O-methylguanosine-3'-phosphate
  modified_base 16: mod_base = OTHER; note = 2'-deoxy-2'-fluorouridine-3'-phosphate
  modified_base 17: mod_base = OTHER; note = 2'-O-methyluridine-3'-phosphate
  modified_base 18: mod_base = OTHER; note = 2'-O-methylguanosine-3'-phosphate
  modified_base 19: mod_base = OTHER; note = 2'-O-methyluridine-3'-phosphate
  modified_base 20: mod_base = OTHER; note = 2'-O-methyluridine-3'-phosphate
  modified_base 21: mod_base = OTHER; note = 2'-O-methylguanosine-3'-phosphate
  modified_base 22: mod_base = OTHER; note = 2'-O-methylcytidine-3'-phosphate
  modified_base 23: mod_base = OTHER; note = 2'-O-methyladenosine
tggtgcagtgttatgttgttgca

SEQ ID NO: 4606 - RNA, 23 nt, synthetic construct
  source 1..23: mol_type = other RNA
  modified_base 1: mod_base = OTHER; note = 2'-O-methyluridine-3'-phosphate 5'-(E)-Vinylphosphonate
  modified_base 2: mod_base = OTHER; note = 2'-deoxy-2'-fluoroadenosine-3'-phosphate
  modified_base 3: mod_base = OTHER; note = 2'-O-methylguanosine-3'-phosphate
  modified_base 4: mod_base = OTHER; note = 2'-O-methylguanosine-3'-phosphate
  modified_base 5: mod_base = OTHER; note = 2'-O-methyluridine-3'-phosphate
  modified_base 6: mod_base = OTHER; note = 2'-deoxy-2'-fluoroguanosine-3'-phosphate
  modified_base 7: mod_base = OTHER; note = 2'-O-methylcytidine-3'-phosphate
  modified_base 8: mod_base = OTHER; note = 2'-O-methyladenosine-3'-phosphate
  modified_base 9: mod_base = OTHER; note = 2'-O-methylguanosine-3'-phosphate
  modified_base 10: mod_base = OTHER; note = 2'-O-methyluridine-3'-phosphate
  modified_base 11: mod_base = OTHER; note = 2'-O-methylguanosine-3'-phosphate
  modified_base 12: mod_base = OTHER; note = 2'-O-methyluridine-3'-phosphate
  modified_base 13: mod_base = OTHER; note = 2'-O-methyluridine-3'-phosphate
  modified_base 14: mod_base = OTHER; note = 2'-deoxy-2'-fluoroadenosine-3'-phosphate
  modified_base 15: mod_base = OTHER; note = 2'-O-methyluridine-3'-phosphate
  modified_base 16: mod_base = OTHER; note = 2'-deoxy-2'-fluoroguanosine-3'-phosphate
  modified_base 17: mod_base = OTHER; note = 2'-O-methyluridine-3'-phosphate
  modified_base 18: mod_base = OTHER; note = 2'-O-methyluridine-3'-phosphate
  modified_base 19: mod_base = OTHER; note = 2'-O-methylguanosine-3'-phosphate
  modified_base 20: mod_base = OTHER; note = 2'-O-methyluridine-3'-phosphate
  modified_base 21: mod_base = OTHER; note = 2'-O-methyluridine-3'-phosphate
  modified_base 22: mod_base = OTHER; note = 2'-O-methylguanosine-3'-phosphate
  modified_base 23: mod_base = OTHER; note = 2'-O-methylcytidine
taggtgcagtgttatgttgttgc

SEQ ID NO: 4607 - RNA, 23 nt, synthetic construct
  source 1..23: mol_type = other RNA
  modified_base 1: mod_base = OTHER; note = 2'-O-methyluridine-3'-phosphate 5'-(E)-Vinylphosphonate
  modified_base 2: mod_base = OTHER; note = 2'-deoxy-2'-fluoroadenosine-3'-phosphate
  modified_base 3: mod_base = OTHER; note = 2'-O-methyladenosine-3'-phosphate
  modified_base 4: mod_base = OTHER; note = 2'-O-methylguanosine-3'-phosphate
  modified_base 5: mod_base = OTHER; note = 2'-O-methylguanosine-3'-phosphate
  modified_base 6: mod_base = OTHER; note = 2'-deoxy-2'-fluorouridine-3'-phosphate
  modified_base 7: mod_base = OTHER; note = 2'-O-methylguanosine-3'-phosphate
  modified_base 8: mod_base = OTHER; note = 2'-O-methylcytidine-3'-phosphate
  modified_base 9: mod_base = OTHER; note = 2'-O-methyladenosine-3'-phosphate
  modified_base 10: mod_base = OTHER; note = 2'-O-methylguanosine-3'-phosphate
  modified_base 11: mod_base = OTHER; note = 2'-O-methyluridine-3'-phosphate
  modified_base 12: mod_base = OTHER; note = 2'-O-methylguanosine-3'-phosphate
  modified_base 13: mod_base = OTHER; note = 2'-O-methyluridine-3'-phosphate
  modified_base 14: mod_base = OTHER; note = 2'-deoxy-2'-fluorouridine-3'-phosphate
  modified_base 15: mod_base = OTHER; note = 2'-O-methyladenosine-3'-phosphate
  modified_base 16: mod_base = OTHER; note = 2'-deoxy-2'-fluorouridine-3'-phosphate
  modified_base 17: mod_base = OTHER; note = 2'-O-methylguanosine-3'-phosphate
  modified_base 18: mod_base = OTHER; note = 2'-O-methyluridine-3'-phosphate
  modified_base 19: mod_base = OTHER; note = 2'-O-methyluridine-3'-phosphate
  modified_base 20: mod_base = OTHER; note = 2'-O-methylguanosine-3'-phosphate
  modified_base 21: mod_base = OTHER; note = 2'-O-methyluridine-3'-phosphate
  modified_base 22: mod_base = OTHER; note = 2'-O-methyluridine-3'-phosphate
  modified_base 23: mod_base = OTHER; note = 2'-O-methylguanosine
taaggtgcagtgttatgttgttg

SEQ ID NO: 4608 - RNA, 23 nt, synthetic construct
  source 1..23: mol_type = other RNA
  modified_base 1: mod_base = OTHER; note = 2'-O-methyluridine-3'-phosphate 5'-(E)-Vinylphosphonate
  modified_base 2: mod_base = OTHER; note = 2'-deoxy-2'-fluoroguanosine-3'-phosphate
  modified_base 3: mod_base = OTHER; note = 2'-O-methyladenosine-3'-phosphate
  modified_base 4: mod_base = OTHER; note = 2'-O-methyladenosine-3'-phosphate
  modified_base 5: mod_base = OTHER; note = 2'-O-methylguanosine-3'-phosphate
  modified_base 6: mod_base = OTHER; note = 2'-deoxy-2'-fluoroguanosine-3'-phosphate
  modified_base 7: mod_base = OTHER; note = 2'-O-methyluridine-3'-phosphate
  modified_base 8: mod_base = OTHER; note = 2'-O-methylguanosine-3'-phosphate
  modified_base 9: mod_base = OTHER; note = 2'-O-methylcytidine-3'-phosphate
  modified_base 10: mod_base = OTHER; note = 2'-O-methyladenosine-3'-phosphate
  modified_base 11: mod_base = OTHER; note = 2'-O-methylguanosine-3'-phosphate
  modified_base 12: mod_base = OTHER; note = 2'-O-methyluridine-3'-phosphate
  modified_base 13: mod_base = OTHER; note = 2'-O-methylguanosine-3'-phosphate
  modified_base 14: mod_base = OTHER; note = 2'-deoxy-2'-fluorouridine-3'-phosphate
  modified_base 15: mod_base = OTHER; note = 2'-O-methyluridine-3'-phosphate
  modified_base 16: mod_base = OTHER; note = 2'-deoxy-2'-fluoroadenosine-3'-phosphate
  modified_base 17: mod_base = OTHER; note = 2'-O-methyluridine-3'-phosphate
  modified_base 18: mod_base = OTHER; note = 2'-O-methylguanosine-3'-phosphate
  modified_base 19: mod_base = OTHER; note = 2'-O-methyluridine-3'-phosphate
  modified_base 20: mod_base = OTHER; note = 2'-O-methyluridine-3'-phosphate
  modified_base 21: mod_base = OTHER; note = 2'-O-methylguanosine-3'-phosphate
  modified_base 22: mod_base = OTHER; note = 2'-O-methyluridine-3'-phosphate
  modified_base 23: mod_base = OTHER; note = 2'-O-methyluridine
tgaaggtgcagtgttatgttgtt

SEQ ID NO: 4609 - RNA, 23 nt, synthetic construct
  source 1..23: mol_type = other RNA
  modified_base 1: mod_base = OTHER; note = 2'-O-methyluridine-3'-phosphate 5'-(E)-Vinylphosphonate
  modified_base 2: mod_base = OTHER; note = 2'-deoxy-2'-fluoroguanosine-3'-phosphate
  modified_base 3: mod_base = OTHER; note = 2'-O-methylguanosine-3'-phosphate
  modified_base 4: mod_base = OTHER; note = 2'-O-methyladenosine-3'-phosphate
  modified_base 5: mod_base = OTHER; note = 2'-O-methyladenosine-3'-phosphate
  modified_base 6: mod_base = OTHER; note = 2'-deoxy-2'-fluoroguanosine-3'-phosphate
  modified_base 7: mod_base = OTHER; note = 2'-O-methylguanosine-3'-phosphate
  modified_base 8: mod_base = OTHER; note = 2'-O-methyluridine-3'-phosphate
  modified_base 9: mod_base = OTHER; note = 2'-O-methylguanosine-3'-phosphate
  modified_base 10: mod_base = OTHER; note = 2'-O-methylcytidine-3'-phosphate
  modified_base 11: mod_base = OTHER; note = 2'-O-methyladenosine-3'-phosphate
  modified_base 12: mod_base = OTHER; note = 2'-O-methylguanosine-3'-phosphate
  modified_base 13: mod_base = OTHER; note = 2'-O-methyluridine-3'-phosphate
  modified_base 14: mod_base = OTHER; note = 2'-deoxy-2'-fluoroguanosine-3'-phosphate
  modified_base 15: mod_base = OTHER; note = 2'-O-methyluridine-3'-phosphate
  modified_base 16: mod_base = OTHER; note = 2'-deoxy-2'-fluorouridine-3'-phosphate
  modified_base 17: mod_base = OTHER; note = 2'-O-methyladenosine-3'-phosphate
  modified_base 18: mod_base = OTHER; note = 2'-O-methyluridine-3'-phosphate
  modified_base 19: mod_base = OTHER; note = 2'-O-methylguanosine-3'-phosphate
  modified_base 20: mod_base = OTHER; note = 2'-O-methyluridine-3'-phosphate
  modified_base 21: mod_base = OTHER; note = 2'-O-methyluridine-3'-phosphate
  modified_base 22: mod_base = OTHER; note = 2'-O-methylguanosine-3'-phosphate
  modified_base 23: mod_base = OTHER; note = 2'-O-methyluridine
tggaaggtgcagtgttatgttgt

SEQ ID NO: 4610 - RNA, 23 nt, synthetic construct
  source 1..23: mol_type = other RNA
  modified_base 1: mod_base = OTHER; note = 2'-O-methyluridine-3'-phosphate 5'-(E)-Vinylphosphonate
  modified_base 2: mod_base = OTHER; note = 2'-deoxy-2'-fluorouridine-3'-phosphate
  modified_base 3: mod_base = OTHER; note = 2'-O-methylguanosine-3'-phosphate
  modified_base 4: mod_base = OTHER; note = 2'-O-methylguanosine-3'-phosphate
  modified_base 5: mod_base = OTHER; note = 2'-O-methyladenosine-3'-phosphate
  modified_base 6: mod_base = OTHER; note = 2'-deoxy-2'-fluoroadenosine-3'-phosphate
  modified_base 7: mod_base = OTHER; note = 2'-O-methylguanosine-3'-phosphate
  modified_base 8: mod_base = OTHER; note = 2'-O-methylguanosine-3'-phosphate
  modified_base 9: mod_base = OTHER; note = 2'-O-methyluridine-3'-phosphate
  modified_base 10: mod_base = OTHER; note = 2'-O-methylguanosine-3'-phosphate
  modified_base 11: mod_base = OTHER; note = 2'-O-methylcytidine-3'-phosphate
  modified_base 12: mod_base = OTHER; note = 2'-O-methyladenosine-3'-phosphate
  modified_base 13: mod_base = OTHER; note = 2'-O-methylguanosine-3'-phosphate
  modified_base 14: mod_base = OTHER; note = 2'-deoxy-2'-fluorouridine-3'-phosphate
  modified_base 15: mod_base = OTHER; note = 2'-O-methylguanosine-3'-phosphate
  modified_base 16: mod_base = OTHER; note = 2'-deoxy-2'-fluorouridine-3'-phosphate
  modified_base 17: mod_base = OTHER; note = 2'-O-methyluridine-3'-phosphate
  modified_base 18: mod_base = OTHER; note = 2'-O-methyladenosine-3'-phosphate
  modified_base 19: mod_base = OTHER; note = 2'-O-methyluridine-3'-phosphate
  modified_base 20: mod_base = OTHER; note = 2'-O-methylguanosine-3'-phosphate
  modified_base 21: mod_base = OTHER; note = 2'-O-methyluridine-3'-phosphate
  modified_base 22: mod_base = OTHER; note = 2'-O-methyluridine-3'-phosphate
  modified_base 23: mod_base = OTHER; note = 2'-O-methylguanosine
ttggaaggtgcagtgttatgttg

SEQ ID NO: 4611 - RNA, 23 nt, synthetic construct
  source 1..23: mol_type = other RNA
  modified_base 1: mod_base = OTHER; note = 2'-O-methyluridine-3'-phosphate 5'-(E)-Vinylphosphonate
  modified_base 2: mod_base = OTHER; note = 2'-deoxy-2'-fluorouridine-3'-phosphate
  modified_base 3: mod_base = OTHER; note = 2'-O-methyluridine-3'-phosphate
  modified_base 4: mod_base = OTHER; note = 2'-O-methylguanosine-3'-phosphate
  modified_base 5: mod_base = OTHER; note = 2'-O-methylguanosine-3'-phosphate
  modified_base 6: mod_base = OTHER; note = 2'-deoxy-2'-fluoroadenosine-3'-phosphate
  modified_base 7: mod_base = OTHER; note = 2'-O-methyladenosine-3'-phosphate
  modified_base 8: mod_base = OTHER; note = 2'-O-methylguanosine-3'-phosphate
  modified_base 9: mod_base = OTHER; note = 2'-O-methylguanosine-3'-phosphate
  modified_base 10: mod_base = OTHER; note = 2'-O-methyluridine-3'-phosphate
  modified_base 11: mod_base = OTHER; note = 2'-O-methylguanosine-3'-phosphate
  modified_base 12: mod_base = OTHER; note = 2'-O-methylcytidine-3'-phosphate
  modified_base 13: mod_base = OTHER; note = 2'-O-methyladenosine-3'-phosphate
  modified_base 14: mod_base = OTHER; note = 2'-deoxy-2'-fluoroguanosine-3'-phosphate
  modified_base 15: mod_base = OTHER; note = 2'-O-methyluridine-3'-phosphate
  modified_base 16: mod_base = OTHER; note = 2'-deoxy-2'-fluoroguanosine-3'-phosphate
  modified_base 17: mod_base = OTHER; note = 2'-O-methyluridine-3'-phosphate
  modified_base 18: mod_base = OTHER; note = 2'-O-methyluridine-3'-phosphate
  modified_base 19: mod_base = OTHER; note = 2'-O-methyladenosine-3'-phosphate
  modified_base 20: mod_base = OTHER; note = 2'-O-methyluridine-3'-phosphate
  modified_base 21: mod_base = OTHER; note = 2'-O-methylguanosine-3'-phosphate
  modified_base 22: mod_base = OTHER; note = 2'-O-methyluridine-3'-phosphate
  modified_base 23: mod_base = OTHER; note = 2'-O-methyluridine
tttggaaggtgcagtgttatgtt

SEQ ID NO: 4612 - RNA, 23 nt, synthetic construct
  source 1..23: mol_type = other RNA
  modified_base 1: mod_base = OTHER; note = 2'-O-methyluridine-3'-phosphate 5'-(E)-Vinylphosphonate
  modified_base 2: mod_base = OTHER; note = 2'-deoxy-2'-fluoroguanosine-3'-phosphate
  modified_base 3: mod_base = OTHER; note = 2'-O-methyluridine-3'-phosphate
  modified_base 4: mod_base = OTHER; note = 2'-O-methyluridine-3'-phosphate
  modified_base 5: mod_base = OTHER; note = 2'-O-methylguanosine-3'-phosphate
  modified_base 6: mod_base = OTHER; note = 2'-deoxy-2'-fluoroguanosine-3'-phosphate
  modified_base 7: mod_base = OTHER; note = 2'-O-methyladenosine-3'-phosphate
  modified_base 8: mod_base = OTHER; note = 2'-O-methyladenosine-3'-phosphate
  modified_base 9: mod_base = OTHER; note = 2'-O-methylguanosine-3'-phosphate
  modified_base 10: mod_base = OTHER; note = 2'-O-methylguanosine-3'-phosphate
  modified_base 11: mod_base = OTHER; note = 2'-O-methyluridine-3'-phosphate
  modified_base 12: mod_base = OTHER; note = 2'-O-methylguanosine-3'-phosphate
  modified_base 13: mod_base = OTHER; note = 2'-O-methylcytidine-3'-phosphate
  modified_base 14: mod_base = OTHER; note = 2'-deoxy-2'-fluoroadenosine-3'-phosphate
  modified_base 15: mod_base = OTHER; note = 2'-O-methylguanosine-3'-phosphate
  modified_base 16: mod_base = OTHER; note = 2'-deoxy-2'-fluorouridine-3'-phosphate
  modified_base 17: mod_base = OTHER; note = 2'-O-methylguanosine-3'-phosphate
  modified_base 18: mod_base = OTHER; note = 2'-O-methyluridine-3'-phosphate
  modified_base 19: mod_base = OTHER; note = 2'-O-methyluridine-3'-phosphate
  modified_base 20: mod_base = OTHER; note = 2'-O-methyladenosine-3'-phosphate
  modified_base 21: mod_base = OTHER; note = 2'-O-methyluridine-3'-phosphate
  modified_base 22: mod_base = OTHER; note = 2'-O-methylguanosine-3'-phosphate
  modified_base 23: mod_base = OTHER; note = 2'-O-methyluridine
tgttggaaggtgcagtgttatgt

SEQ ID NO: 4613 - RNA, 23 nt, synthetic construct
  source 1..23: mol_type = other RNA
  modified_base 1: mod_base = OTHER; note = 2'-O-methyluridine-3'-phosphate 5'-(E)-Vinylphosphonate
  modified_base 2: mod_base = OTHER; note = 2'-deoxy-2'-fluorouridine-3'-phosphate
  modified_base 3: mod_base = OTHER; note = 2'-O-methylguanosine-3'-phosphate
  modified_base 4: mod_base = OTHER; note = 2'-O-methyluridine-3'-phosphate
  modified_base 5: mod_base = OTHER; note = 2'-O-methyluridine-3'-phosphate
  modified_base 6: mod_base = OTHER; note = 2'-deoxy-2'-fluoroguanosine-3'-phosphate
  modified_base 7: mod_base = OTHER; note = 2'-O-methylguanosine-3'-phosphate
  modified_base 8: mod_base = OTHER; note = 2'-O-methyladenosine-3'-phosphate
  modified_base 9: mod_base = OTHER; note = 2'-O-methyladenosine-3'-phosphate
  modified_base 10: mod_base = OTHER; note = 2'-O-methylguanosine-3'-phosphate
  modified_base 11: mod_base = OTHER; note = 2'-O-methylguanosine-3'-phosphate
  modified_base 12: mod_base = OTHER; note = 2'-O-methyluridine-3'-phosphate
  modified_base 13: mod_base = OTHER; note = 2'-O-methylguanosine-3'-phosphate
  modified_base 14: mod_base = OTHER; note = 2'-deoxy-2'-fluorocytidine-3'-phosphate
  modified_base 15: mod_base = OTHER; note = 2'-O-methyladenosine-3'-phosphate
  modified_base 16: mod_base = OTHER; note = 2'-deoxy-2'-fluoroguanosine-3'-phosphate
  modified_base 17: mod_base = OTHER; note = 2'-O-methyluridine-3'-phosphate
  modified_base 18: mod_base = OTHER; note = 2'-O-methylguanosine-3'-phosphate
  modified_base 19: mod_base = OTHER; note = 2'-O-methyluridine-3'-phosphate
  modified_base 20: mod_base = OTHER; note = 2'-O-methyluridine-3'-phosphate
  modified_base 21: mod_base = OTHER; note = 2'-O-methyladenosine-3'-phosphate
  modified_base 22: mod_base = OTHER; note = 2'-O-methyluridine-3'-phosphate
  modified_base 23: mod_base = OTHER; note = 2'-O-methylguanosine
ttgttggaaggtgcagtgttatg

SEQ ID NO: 4614 - RNA, 23 nt, synthetic construct
  source 1..23: mol_type = other RNA
  modified_base 1: mod_base = OTHER; note = 2'-O-methyluridine-3'-phosphate 5'-(E)-Vinylphosphonate
  modified_base 2: mod_base = OTHER; note = 2'-deoxy-2'-fluorocytidine-3'-phosphate
  modified_base 3: mod_base = OTHER; note = 2'-O-methyluridine-3'-phosphate
  modified_base 4: mod_base = OTHER; note = 2'-O-methylguanosine-3'-phosphate
  modified_base 5: mod_base = OTHER; note = 2'-O-methyluridine-3'-phosphate
  modified_base 6: mod_base = OTHER; note = 2'-deoxy-2'-fluorouridine-3'-phosphate
  modified_base 7: mod_base = OTHER; note = 2'-O-methylguanosine-3'-phosphate
  modified_base 8: mod_base = OTHER; note = 2'-O-methylguanosine-3'-phosphate
  modified_base 9: mod_base = OTHER; note = 2'-O-methyladenosine-3'-phosphate
  modified_base 10: mod_base = OTHER; note = 2'-O-methyladenosine-3'-phosphate
  modified_base 11: mod_base = OTHER; note = 2'-O-methylguanosine-3'-phosphate
  modified_base 12: mod_base = OTHER; note = 2'-O-methylguanosine-3'-phosphate
  modified_base 13: mod_base = OTHER; note = 2'-O-methyluridine-3'-phosphate
  modified_base 14: mod_base = OTHER; note = 2'-deoxy-2'-fluoroguanosine-3'-phosphate
  modified_base 15: mod_base = OTHER; note = 2'-O-methylcytidine-3'-phosphate
  modified_base 16: mod_base = OTHER; note = 2'-deoxy-2'-fluoroadenosine-3'-phosphate
  modified_base 17: mod_base = OTHER; note = 2'-O-methylguanosine-3'-phosphate
  modified_base 18: mod_base = OTHER; note = 2'-O-methyluridine-3'-phosphate
  modified_base 19: mod_base = OTHER; note = 2'-O-methylguanosine-3'-phosphate
  modified_base 20: mod_base = OTHER; note = 2'-O-methyluridine-3'-phosphate
  modified_base 21: mod_base = OTHER; note = 2'-O-methyluridine-3'-phosphate
  modified_base 22: mod_base = OTHER; note = 2'-O-methyladenosine-3'-phosphate
  modified_base 23: mod_base = OTHER; note = 2'-O-methyluridine
tctgttggaaggtgcagtgttat

SEQ ID NO: 4615 - RNA, 23 nt, synthetic construct
  source 1..23: mol_type = other RNA
  modified_base 1: mod_base = OTHER; note = 2'-O-methyluridine-3'-phosphate 5'-(E)-Vinylphosphonate
  modified_base 2: mod_base = OTHER; note = 2'-deoxy-2'-fluoroguanosine-3'-phosphate
  modified_base 3: mod_base = OTHER; note = 2'-O-methylcytidine-3'-phosphate
  modified_base 4: mod_base = OTHER; note = 2'-O-methyluridine-3'-phosphate
  modified_base 5: mod_base = OTHER; note = 2'-O-methylguanosine-3'-phosphate
  modified_base 6: mod_base = OTHER; note = 2'-deoxy-2'-fluorouridine-3'-phosphate
  modified_base 7: mod_base = OTHER; note = 2'-O-methyluridine-3'-phosphate
  modified_base 8: mod_base = OTHER; note = 2'-O-methylguanosine-3'-phosphate
  modified_base 9: mod_base = OTHER; note = 2'-O-methylguanosine-3'-phosphate
  modified_base 10: mod_base = OTHER; note = 2'-O-methyladenosine-3'-phosphate
  modified_base 11: mod_base = OTHER; note = 2'-O-methyladenosine-3'-phosphate
  modified_base 12: mod_base = OTHER; note = 2'-O-methylguanosine-3'-phosphate
  modified_base 13: mod_base = OTHER; note = 2'-O-methylguanosine-3'-phosphate
  modified_base 14: mod_base = OTHER; note = 2'-deoxy-2'-fluorouridine-3'-phosphate
  modified_base 15: mod_base = OTHER; note = 2'-O-methylguanosine-3'-phosphate
  modified_base 16: mod_base = OTHER; note = 2'-deoxy-2'-fluorocytidine-3'-phosphate
  modified_base 17: mod_base = OTHER; note = 2'-O-methyladenosine-3'-phosphate
  modified_base 18: mod_base = OTHER; note = 2'-O-methylguanosine-3'-phosphate
  modified_base 19: mod_base = OTHER; note = 2'-O-methyluridine-3'-phosphate
  modified_base 20: mod_base = OTHER; note = 2'-O-methylguanosine-3'-phosphate
  modified_base 21: mod_base = OTHER; note = 2'-O-methyluridine-3'-phosphate
  modified_base 22: mod_base = OTHER; note = 2'-O-methyluridine-3'-phosphate
  modified_base 23: mod_base = OTHER; note = 2'-O-methyladenosine
tgctgttggaaggtgcagtgtta

SEQ ID NO: 4616 - RNA, 23 nt, synthetic construct
  source 1..23: mol_type = other RNA
  modified_base 1: mod_base = OTHER; note = 2'-O-methyluridine-3'-phosphate 5'-(E)-Vinylphosphonate
  modified_base 2: mod_base = OTHER; note = 2'-deoxy-2'-fluorouridine-3'-phosphate
  modified_base 3: mod_base = OTHER; note = 2'-O-methylguanosine-3'-phosphate
  modified_base 4: mod_base = OTHER; note = 2'-O-methylcytidine-3'-phosphate
  modified_base 5: mod_base = OTHER; note = 2'-O-methyluridine-3'-phosphate
  modified_base 6: mod_base = OTHER; note = 2'-deoxy-2'-fluoroguanosine-3'-phosphate
  modified_base 7: mod_base = OTHER; note = 2'-O-methyluridine-3'-phosphate
  modified_base 8: mod_base = OTHER; note = 2'-O-methyluridine-3'-phosphate
  modified_base 9: mod_base = OTHER; note = 2'-O-methylguanosine-3'-phosphate
  modified_base 10: mod_base = OTHER; note = 2'-O-methylguanosine-3'-phosphate
  modified_base 11: mod_base = OTHER; note = 2'-O-methyladenosine-3'-phosphate
  modified_base 12: mod_base = OTHER; note = 2'-O-methyladenosine-3'-phosphate
  modified_base 13: mod_base = OTHER; note = 2'-O-methylguanosine-3'-phosphate
  modified_base 14: mod_base = OTHER; note = 2'-deoxy-2'-fluoroguanosine-3'-phosphate
  modified_base 15: mod_base = OTHER; note = 2'-O-methyluridine-3'-phosphate
  modified_base 16: mod_base = OTHER; note = 2'-deoxy-2'-fluoroguanosine-3'-phosphate
  modified_base 17: mod_base = OTHER; note = 2'-O-methylcytidine-3'-phosphate
  modified_base 18: mod_base = OTHER; note = 2'-O-methyladenosine-3'-phosphate
  modified_base 19: mod_base = OTHER; note = 2'-O-methylguanosine-3'-phosphate
  modified_base 20: mod_base = OTHER; note = 2'-O-methyluridine-3'-phosphate
  modified_base 21: mod_base = OTHER; note = 2'-O-methylguanosine-3'-phosphate
  modified_base 22: mod_base = OTHER; note = 2'-O-methyluridine-3'-phosphate
  modified_base 23: mod_base = OTHER; note = 2'-O-methyluridine
ttgctgttggaaggtgcagtgtt

SEQ ID NO: 4617 - RNA, 23 nt, synthetic construct
  source 1..23: mol_type = other RNA
  modified_base 1: mod_base = OTHER; note = 2'-O-methyluridine-3'-phosphate 5'-(E)-Vinylphosphonate
  modified_base 2: mod_base = OTHER; note = 2'-deoxy-2'-fluoroadenosine-3'-phosphate
  modified_base 3: mod_base = OTHER; note = 2'-O-methyluridine-3'-phosphate
  modified_base 4: mod_base = OTHER; note = 2'-O-methylguanosine-3'-phosphate
  modified_base 5: mod_base = OTHER; note = 2'-O-methylcytidine-3'-phosphate
  modified_base 6: mod_base = OTHER; note = 2'-deoxy-2'-fluorouridine-3'-phosphate
  modified_base 7: mod_base = OTHER; note = 2'-O-methylguanosine-3'-phosphate
  modified_base 8: mod_base = OTHER; note = 2'-O-methyluridine-3'-phosphate
  modified_base 9: mod_base = OTHER; note = 2'-O-methyluridine-3'-phosphate
  modified_base 10: mod_base = OTHER; note = 2'-O-methylguanosine-3'-phosphate
  modified_base 11: mod_base = OTHER; note = 2'-O-methylguanosine-3'-phosphate
  modified_base 12: mod_base = OTHER; note = 2'-O-methyladenosine-3'-phosphate
  modified_base 13: mod_base = OTHER; note = 2'-O-methyladenosine-3'-phosphate
  modified_base 14: mod_base = OTHER; note = 2'-deoxy-2'-fluoroguanosine-3'-phosphate
  modified_base 15: mod_base = OTHER; note = 2'-O-methylguanosine-3'-phosphate
  modified_base 16: mod_base = OTHER; note = 2'-deoxy-2'-fluorouridine-3'-phosphate
  modified_base 17: mod_base = OTHER; note = 2'-O-methylguanosine-3'-phosphate
  modified_base 18: mod_base = OTHER; note = 2'-O-methylcytidine-3'-phosphate
  modified_base 19: mod_base = OTHER; note = 2'-O-methyladenosine-3'-phosphate
  modified_base 20: mod_base = OTHER; note = 2'-O-methylguanosine-3'-phosphate
  modified_base 21: mod_base = OTHER; note = 2'-O-methyluridine-3'-phosphate
  modified_base 22: mod_base = OTHER; note = 2'-O-methylguanosine-3'-phosphate
  modified_base 23: mod_base = OTHER; note = 2'-O-methyluridine
tatgctgttggaaggtgcagtgt

SEQ ID NO: 4618 - RNA, 23 nt, synthetic construct
  source 1..23: mol_type = other RNA
  modified_base 1: mod_base = OTHER; note = 2'-O-methyluridine-3'-phosphate 5'-(E)-Vinylphosphonate
  modified_base 2: mod_base = OTHER; note = 2'-deoxy-2'-fluoroguanosine-3'-phosphate
  modified_base 3: mod_base = OTHER; note = 2'-O-methyladenosine-3'-phosphate
  modified_base 4: mod_base = OTHER; note = 2'-O-methyluridine-3'-phosphate
  modified_base 5: mod_base = OTHER; note = 2'-O-methylguanosine-3'-phosphate
  modified_base 6: mod_base = OTHER; note = 2'-deoxy-2'-fluorocytidine-3'-phosphate
  modified_base 7: mod_base = OTHER; note = 2'-O-methyluridine-3'-phosphate
  modified_base 8: mod_base = OTHER; note = 2'-O-methylguanosine-3'-phosphate
  modified_base 9: mod_base = OTHER; note = 2'-O-methyluridine-3'-phosphate
  modified_base 10: mod_base = OTHER; note = 2'-O-methyluridine-3'-phosphate
  modified_base 11: mod_base = OTHER; note = 2'-O-methylguanosine-3'-phosphate
  modified_base 12: mod_base = OTHER; note = 2'-O-methylguanosine-3'-phosphate
  modified_base 13: mod_base = OTHER; note = 2'-O-methyladenosine-3'-phosphate
  modified_base 14: mod_base = OTHER; note = 2'-deoxy-2'-fluoroadenosine-3'-phosphate
  modified_base 15: mod_base = OTHER; note = 2'-O-methylguanosine-3'-phosphate
  modified_base 16: mod_base = OTHER; note = 2'-deoxy-2'-fluoroguanosine-3'-phosphate
  modified_base 17: mod_base = OTHER; note = 2'-O-methyluridine-3'-phosphate
  modified_base 18: mod_base = OTHER; note = 2'-O-methylguanosine-3'-phosphate
  modified_base 19: mod_base = OTHER; note = 2'-O-methylcytidine-3'-phosphate
  modified_base 20: mod_base = OTHER; note = 2'-O-methyladenosine-3'-phosphate
  modified_base 21: mod_base = OTHER; note = 2'-O-methylguanosine-3'-phosphate
  modified_base 22: mod_base = OTHER; note = 2'-O-methyluridine-3'-phosphate
  modified_base 23: mod_base = OTHER; note = 2'-O-methylguanosine
tgatgctgttggaaggtgcagtg

SEQ ID NO: 4619 - RNA, 23 nt, synthetic construct
  source 1..23: mol_type = other RNA
  modified_base 1: mod_base = OTHER; note = 2'-O-methyluridine-3'-phosphate 5'-(E)-Vinylphosphonate
  modified_base 2: mod_base = OTHER; note = 2'-deoxy-2'-fluorouridine-3'-phosphate
  modified_base 3: mod_base = OTHER; note = 2'-O-methylguanosine-3'-phosphate
  modified_base 4: mod_base = OTHER; note = 2'-O-methyladenosine-3'-phosphate
  modified_base 5: mod_base = OTHER; note = 2'-O-methyluridine-3'-phosphate
  modified_base 6: mod_base = OTHER; note = 2'-deoxy-2'-fluoroguanosine-3'-phosphate
  modified_base 7: mod_base = OTHER; note = 2'-O-methylcytidine-3'-phosphate
  modified_base 8: mod_base = OTHER; note = 2'-O-methyluridine-3'-phosphate
  modified_base 9: mod_base = OTHER; note = 2'-O-methylguanosine-3'-phosphate
  modified_base 10: mod_base = OTHER; note = 2'-O-methyluridine-3'-phosphate
  modified_base 11: mod_base = OTHER; note = 2'-O-methyluridine-3'-phosphate
  modified_base 12: mod_base = OTHER; note = 2'-O-methylguanosine-3'-phosphate
  modified_base 13: mod_base = OTHER; note = 2'-O-methylguanosine-3'-phosphate
  modified_base 14: mod_base = OTHER; note = 2'-deoxy-2'-fluoroadenosine-3'-phosphate
  modified_base 15: mod_base = OTHER; note = 2'-O-methyladenosine-3'-phosphate
  modified_base 16: mod_base = OTHER; note = 2'-deoxy-2'-fluoroguanosine-3'-phosphate
  modified_base 17: mod_base = OTHER; note = 2'-O-methylguanosine-3'-phosphate
  modified_base 18: mod_base = OTHER; note = 2'-O-methyluridine-3'-phosphate
  modified_base 19: mod_base = OTHER; note = 2'-O-methylguanosine-3'-phosphate
  modified_base 20: mod_base = OTHER; note = 2'-O-methylcytidine-3'-phosphate
  modified_base 21: mod_base = OTHER; note = 2'-O-methyladenosine-3'-phosphate
  modified_base 22: mod_base = OTHER; note = 2'-O-methylguanosine-3'-phosphate
  modified_base 23: mod_base = OTHER; note = 2'-O-methyluridine
ttgatgctgttggaaggtgcagt

SEQ ID NO: 4620 - RNA, 23 nt, synthetic construct
  source 1..23: mol_type = other RNA
  modified_base 1: mod_base = OTHER; note = 2'-O-methyluridine-3'-phosphate 5'-(E)-Vinylphosphonate
  modified_base 2: mod_base = OTHER; note = 2'-deoxy-2'-fluoroguanosine-3'-phosphate
  modified_base 3: mod_base = OTHER; note = 2'-O-methyluridine-3'-phosphate
  modified_base 4: mod_base = OTHER; note = 2'-O-methylguanosine-3'-phosphate
  modified_base 5: mod_base = OTHER; note = 2'-O-methyladenosine-3'-phosphate
  modified_base 6: mod_base = OTHER; note = 2'-deoxy-2'-fluorouridine-3'-phosphate
  modified_base 7: mod_base = OTHER; note = 2'-O-methylguanosine-3'-phosphate
  modified_base 8: mod_base = OTHER; note = 2'-O-methylcytidine-3'-phosphate
  modified_base 9: mod_base = OTHER; note = 2'-O-methyluridine-3'-phosphate
  modified_base 10: mod_base = OTHER; note = 2'-O-methylguanosine-3'-phosphate
  modified_base 11: mod_base = OTHER; note = 2'-O-methyluridine-3'-phosphate
  modified_base 12: mod_base = OTHER; note = 2'-O-methyluridine-3'-phosphate
  modified_base 13: mod_base = OTHER; note = 2'-O-methylguanosine-3'-phosphate
  modified_base 14: mod_base = OTHER; note = 2'-deoxy-2'-fluoroguanosine-3'-phosphate
  modified_base 15: mod_base = OTHER; note = 2'-O-methyladenosine-3'-phosphate
  modified_base 16: mod_base = OTHER; note = 2'-deoxy-2'-fluoroadenosine-3'-phosphate
  modified_base 17: mod_base = OTHER; note = 2'-O-methylguanosine-3'-phosphate
  modified_base 18: mod_base = OTHER; note = 2'-O-methylguanosine-3'-phosphate
  modified_base 19: mod_base = OTHER; note = 2'-O-methyluridine-3'-phosphate
  modified_base 20: mod_base = OTHER; note = 2'-O-methylguanosine-3'-phosphate
  modified_base 21: mod_base = OTHER; note = 2'-O-methylcytidine-3'-phosphate
  modified_base 22: mod_base = OTHER; note = 2'-O-methyladenosine-3'-phosphate
  modified_base 23: mod_base = OTHER; note = 2'-O-methylguanosine
tgtgatgctgttggaaggtgcag

SEQ ID NO: 4621 - RNA, 23 nt, synthetic construct
  source 1..23: mol_type = other RNA
  modified_base 1: mod_base = OTHER; note = 2'-O-methyluridine-3'-phosphate 5'-(E)-Vinylphosphonate
  modified_base 2: mod_base = OTHER; note = 2'-deoxy-2'-fluoroguanosine-3'-phosphate
  modified_base 3: mod_base = OTHER; note = 2'-O-methylguanosine-3'-phosphate
  modified_base 4: mod_base = OTHER; note = 2'-O-methyluridine-3'-phosphate
  modified_base 5: mod_base = OTHER; note = 2'-O-methylguanosine-3'-phosphate
  modified_base 6: mod_base = OTHER; note = 2'-deoxy-2'-fluoroadenosine-3'-phosphate
  modified_base 7: mod_base = OTHER; note = 2'-O-methyluridine-3'-phosphate
  modified_base 8: mod_base = OTHER; note = 2'-O-methylguanosine-3'-phosphate
  modified_base 9: mod_base = OTHER; note = 2'-O-methylcytidine-3'-phosphate
  modified_base 10: mod_base = OTHER; note = 2'-O-methyluridine-3'-phosphate
  modified_base 11: mod_base = OTHER; note = 2'-O-methylguanosine-3'-phosphate
  modified_base 12: mod_base = OTHER; note = 2'-O-methyluridine-3'-phosphate
  modified_base 13: mod_base = OTHER; note = 2'-O-methyluridine-3'-phosphate
  modified_base 14: mod_base = OTHER; note = 2'-deoxy-2'-fluoroguanosine-3'-phosphate
  modified_base 15: mod_base = OTHER; note = 2'-O-methylguanosine-3'-phosphate
  modified_base 16: mod_base = OTHER; note = 2'-deoxy-2'-fluoroadenosine-3'-phosphate
  modified_base 17: mod_base = OTHER; note = 2'-O-methyladenosine-3'-phosphate
  modified_base 18: mod_base = OTHER; note = 2'-O-methylguanosine-3'-phosphate
  modified_base 19: mod_base = OTHER; note = 2'-O-methylguanosine-3'-phosphate
  modified_base 20: mod_base = OTHER; note = 2'-O-methyluridine-3'-phosphate
  modified_base 21: mod_base = OTHER; note = 2'-O-methylguanosine-3'-phosphate
  modified_base 22: mod_base = OTHER; note = 2'-O-methylcytidine-3'-phosphate
  modified_base 23: mod_base = OTHER; note = 2'-O-methyladenosine
tggtgatgctgttggaaggtgca

SEQ ID NO: 4622 - RNA, 23 nt, synthetic construct
  source 1..23: mol_type = other RNA
  modified_base 1: mod_base = OTHER; note = 2'-O-methyluridine-3'-phosphate 5'-(E)-Vinylphosphonate
  modified_base 2: mod_base = OTHER; note = 2'-deoxy-2'-fluorouridine-3'-phosphate
  modified_base 3: mod_base = OTHER; note = 2'-O-methylguanosine-3'-phosphate
  modified_base 4: mod_base = OTHER; note = 2'-O-methylguanosine-3'-phosphate
  modified_base 5: mod_base = OTHER; note = 2'-O-methyluridine-3'-phosphate
  modified_base 6: mod_base = OTHER; note = 2'-deoxy-2'-fluoroguanosine-3'-phosphate
  modified_base 7: mod_base = OTHER; note = 2'-O-methyladenosine-3'-phosphate
  modified_base 8: mod_base = OTHER; note = 2'-O-methyluridine-3'-phosphate
  modified_base 9: mod_base = OTHER; note = 2'-O-methylguanosine-3'-phosphate
  modified_base 10: mod_base = OTHER; note = 2'-O-methylcytidine-3'-phosphate
  modified_base 11: mod_base = OTHER; note = 2'-O-methyluridine-3'-phosphate
  modified_base 12: mod_base = OTHER; note = 2'-O-methylguanosine-3'-phosphate
  modified_base 13: mod_base = OTHER; note = 2'-O-methyluridine-3'-phosphate
  modified_base 14: mod_base = OTHER; note = 2'-deoxy-2'-fluorouridine-3'-phosphate
  modified_base 15: mod_base = OTHER; note = 2'-O-methylguanosine-3'-phosphate
  modified_base 16: mod_base = OTHER; note = 2'-deoxy-2'-fluoroguanosine-3'-phosphate
  modified_base 17: mod_base = OTHER; note = 2'-O-methyladenosine-3'-phosphate
  modified_base 18: mod_base = OTHER; note = 2'-O-methyladenosine-3'-phosphate
  modified_base 19: mod_base = OTHER; note = 2'-O-methylguanosine-3'-phosphate
  modified_base 20: mod_base = OTHER; note = 2'-O-methylguanosine-3'-phosphate
  modified_base 21: mod_base = OTHER; note = 2'-O-methyluridine-3'-phosphate
  modified_base 22: mod_base = OTHER; note = 2'-O-methylguanosine-3'-phosphate
  modified_base 23: mod_base = OTHER; note = 2'-O-methylcytidine
ttggtgatgctgttggaaggtgc

SEQ ID NO: 4623 - RNA, 23 nt, synthetic construct
  source 1..23: mol_type = other RNA
  modified_base 1: mod_base = OTHER; note = 2'-O-methyluridine-3'-phosphate 5'-(E)-Vinylphosphonate
  modified_base 2: mod_base = OTHER; note = 2'-deoxy-2'-fluorouridine-3'-phosphate
  modified_base 3: mod_base = OTHER; note = 2'-O-methyluridine-3'-phosphate
  modified_base 4: mod_base = OTHER; note = 2'-O-methylguanosine-3'-phosphate
  modified_base 5: mod_base = OTHER; note = 2'-O-methylguanosine-3'-phosphate
  modified_base 6: mod_base = OTHER; note = 2'-deoxy-2'-fluorouridine-3'-phosphate
  modified_base 7: mod_base = OTHER; note = 2'-O-methylguanosine-3'-phosphate
  modified_base 8: mod_base = OTHER; note = 2'-O-methyladenosine-3'-phosphate
  modified_base 9: mod_base = OTHER; note = 2'-O-methyluridine-3'-phosphate
  modified_base 10: mod_base = OTHER; note = 2'-O-methylguanosine-3'-phosphate
  modified_base 11: mod_base = OTHER; note = 2'-O-methylcytidine-3'-phosphate
  modified_base 12: mod_base = OTHER; note = 2'-O-methyluridine-3'-phosphate
  modified_base 13: mod_base = OTHER; note = 2'-O-methylguanosine-3'-phosphate
  modified_base 14: mod_base = OTHER; note = 2'-deoxy-2'-fluorouridine-3'-phosphate
  modified_base 15: mod_base = OTHER; note = 2'-O-methyluridine-3'-phosphate
  modified_base 16: mod_base = OTHER; note = 2'-deoxy-2'-fluoroguanosine-3'-phosphate
  modified_base 17: mod_base = OTHER; note = 2'-O-methylguanosine-3'-phosphate
  modified_base 18: mod_base = OTHER; note = 2'-O-methyladenosine-3'-phosphate
  modified_base 19: mod_base = OTHER; note = 2'-O-methyladenosine-3'-phosphate
  modified_base 20: mod_base = OTHER; note = 2'-O-methylguanosine-3'-phosphate
  modified_base 21: mod_base = OTHER; note = 2'-O-methylguanosine-3'-phosphate
  modified_base 22: mod_base = OTHER; note = 2'-O-methyluridine-3'-phosphate
  modified_base 23: mod_base = OTHER; note = 2'-O-methylguanosine
tttggtgatgctgttggaaggtg

SEQ ID NO: 4624 - RNA, 23 nt, synthetic construct
  source 1..23: mol_type = other RNA
  modified_base 1: mod_base = OTHER; note = 2'-O-methyluridine-3'-phosphate 5'-(E)-Vinylphosphonate
  modified_base 2: mod_base = OTHER; note = 2'-deoxy-2'-fluorouridine-3'-phosphate
  modified_base 3: mod_base = OTHER; note = 2'-O-methyluridine-3'-phosphate
  modified_base 4: mod_base = OTHER; note = 2'-O-methyluridine-3'-phosphate
  modified_base 5: mod_base = OTHER; note = 2'-O-methylguanosine-3'-phosphate
  modified_base 6: mod_base = OTHER; note = 2'-deoxy-2'-fluoroguanosine-3'-phosphate
  modified_base 7: mod_base = OTHER; note = 2'-O-methyluridine-3'-phosphate
  modified_base 8: mod_base = OTHER; note = 2'-O-methylguanosine-3'-phosphate
  modified_base 9: mod_base = OTHER; note = 2'-O-methyladenosine-3'-phosphate
  modified_base 10: mod_base = OTHER; note = 2'-O-methyluridine-3'-phosphate
  modified_base 11: mod_base = OTHER; note = 2'-O-methylguanosine-3'-phosphate
  modified_base 12: mod_base = OTHER; note = 2'-O-methylcytidine-3'-phosphate
  modified_base 13: mod_base = OTHER; note = 2'-O-methyluridine-3'-phosphate
  modified_base 14: mod_base = OTHER; note = 2'-deoxy-2'-fluoroguanosine-3'-phosphate
  modified_base 15: mod_base = OTHER; note = 2'-O-methyluridine-3'-phosphate
  modified_base 16: mod_base = OTHER; note = 2'-deoxy-2'-fluorouridine-3'-phosphate
  modified_base 17: mod_base = OTHER; note = 2'-O-methylguanosine-3'-phosphate
  modified_base 18: mod_base = OTHER; note = 2'-O-methylguanosine-3'-phosphate
  modified_base 19: mod_base = OTHER; note = 2'-O-methyladenosine-3'-phosphate
  modified_base 20: mod_base = OTHER; note = 2'-O-methyladenosine-3'-phosphate
  modified_base 21: mod_base = OTHER; note = 2'-O-methylguanosine-3'-phosphate
  modified_base 22: mod_base = OTHER; note = 2'-O-methylguanosine-3'-phosphate
  modified_base 23: mod_base = OTHER; note = 2'-O-methyluridine
ttttggtgatgctgttggaaggt

SEQ ID NO: 4625 - RNA, 23 nt, synthetic construct
  source 1..23: mol_type = other RNA
  modified_base 1: mod_base = OTHER; note = 2'-O-methyluridine-3'-phosphate 5'-(E)-Vinylphosphonate
  modified_base 2: mod_base = OTHER; note = 2'-deoxy-2'-fluoroadenosine-3'-phosphate
  modified_base 3: mod_base = OTHER; note = 2'-O-methyluridine-3'-phosphate
  modified_base 4: mod_base = OTHER; note = 2'-O-methyluridine-3'-phosphate
  modified_base 5: mod_base = OTHER; note = 2'-O-methyluridine-3'-phosphate
  modified_base 6: mod_base = OTHER; note = 2'-deoxy-2'-fluoroguanosine-3'-phosphate
  modified_base 7: mod_base = OTHER; note = 2'-O-methylguanosine-3'-phosphate
  modified_base 8: mod_base = OTHER; note = 2'-O-methyluridine-3'-phosphate
  modified_base 9: mod_base = OTHER; note = 2'-O-methylguanosine-3'-phosphate
  modified_base 10: mod_base = OTHER; note = 2'-O-methyladenosine-3'-phosphate
  modified_base 11: mod_base = OTHER; note = 2'-O-methyluridine-3'-phosphate
  modified_base 12: mod_base = OTHER; note = 2'-O-methylguanosine-3'-phosphate
  modified_base 13: mod_base = OTHER; note = 2'-O-methylcytidine-3'-phosphate
  modified_base 14: mod_base = OTHER; note = 2'-deoxy-2'-fluorouridine-3'-phosphate
  modified_base 15: mod_base = OTHER; note = 2'-O-methylguanosine-3'-phosphate
  modified_base 16: mod_base = OTHER; note = 2'-deoxy-2'-fluorouridine-3'-phosphate
  modified_base 17: mod_base = OTHER; note = 2'-O-methyluridine-3'-phosphate
  modified_base 18: mod_base = OTHER; note = 2'-O-methylguanosine-3'-phosphate
  modified_base 19: mod_base = OTHER; note = 2'-O-methylguanosine-3'-phosphate
  modified_base 20: mod_base = OTHER; note = 2'-O-methyladenosine-3'-phosphate
  modified_base 21: mod_base = OTHER; note = 2'-O-methyladenosine-3'-phosphate
  modified_base 22: mod_base = OTHER; note = 2'-O-methylguanosine-3'-phosphate
  modified_base 23: mod_base = OTHER; note = 2'-O-methylguanosine
tatttggtgatgctgttggaagg

SEQ ID NO: 4626 - RNA, 23 nt, synthetic construct
  source 1..23: mol_type = other RNA
  modified_base 1: mod_base = OTHER; note = 2'-O-methyluridine-3'-phosphate 5'-(E)-Vinylphosphonate
  modified_base 2: mod_base = OTHER; note = 2'-deoxy-2'-fluorocytidine-3'-phosphate
  modified_base 3: mod_base = OTHER; note = 2'-O-methyladenosine-3'-phosphate
  modified_base 4: mod_base = OTHER; note = 2'-O-methyluridine-3'-phosphate
  modified_base 5: mod_base = OTHER; note = 2'-O-methyluridine-3'-phosphate
  modified_base 6: mod_base = OTHER; note = 2'-deoxy-2'-fluorouridine-3'-phosphate
  modified_base 7: mod_base = OTHER; note = 2'-O-methylguanosine-3'-phosphate
  modified_base 8: mod_base = OTHER; note = 2'-O-methylguanosine-3'-phosphate
  modified_base 9: mod_base = OTHER; note = 2'-O-methyluridine-3'-phosphate
  modified_base 10: mod_base = OTHER; note = 2'-O-methylguanosine-3'-phosphate
  modified_base 11: mod_base = OTHER; note = 2'-O-methyladenosine-3'-phosphate
  modified_base 12: mod_base = OTHER; note = 2'-O-methyluridine-3'-phosphate
  modified_base 13: mod_base = OTHER; note = 2'-O-methylguanosine-3'-phosphate
  modified_base 14: mod_base = OTHER; note = 2'-deoxy-2'-fluorocytidine-3'-phosphate
  modified_base 15: mod_base = OTHER; note = 2'-O-methyluridine-3'-phosphate
  modified_base 16: mod_base = OTHER; note = 2'-deoxy-2'-fluoroguanosine-3'-phosphate
  modified_base 17: mod_base = OTHER; note = 2'-O-methyluridine-3'-phosphate
  modified_base 18: mod_base = OTHER; note = 2'-O-methyluridine-3'-phosphate
  modified_base 19: mod_base = OTHER; note = 2'-O-methylguanosine-3'-phosphate
  modified_base 20: mod_base = OTHER; note = 2'-O-methylguanosine-3'-phosphate
  modified_base 21: mod_base = OTHER; note = 2'-O-methyladenosine-3'-phosphate
  modified_base 22: mod_base = OTHER; note = 2'-O-methyladenosine-3'-phosphate
  modified_base 23: mod_base = OTHER; note = 2'-O-methylguanosine
tcatttggtgatgctgttggaag

SEQ ID NO: 4627 - RNA, 23 nt, synthetic construct
  source 1..23: mol_type = other RNA
  modified_base 1: mod_base = OTHER; note = 2'-O-methyluridine-3'-phosphate 5'-(E)-Vinylphosphonate
  modified_base 2: mod_base = OTHER; note = 2'-deoxy-2'-fluoroguanosine-3'-phosphate
  modified_base 3: mod_base = OTHER; note = 2'-O-methylcytidine-3'-phosphate
  modified_base 4: mod_base = OTHER; note = 2'-O-methyladenosine-3'-phosphate
  modified_base 5: mod_base = OTHER; note = 2'-O-methyluridine-3'-phosphate
  modified_base 6: mod_base = OTHER; note = 2'-deoxy-2'-fluorouridine-3'-phosphate
  modified_base 7: mod_base = OTHER; note = 2'-O-methyluridine-3'-phosphate
  modified_base 8: mod_base = OTHER; note = 2'-O-methylguanosine-3'-phosphate
  modified_base 9: mod_base = OTHER; note = 2'-O-methylguanosine-3'-phosphate
  modified_base 10: mod_base = OTHER; note = 2'-O-methyluridine-3'-phosphate
  modified_base 11: mod_base = OTHER; note = 2'-O-methylguanosine-3'-phosphate
  modified_base 12: mod_base = OTHER; note = 2'-O-methyladenosine-3'-phosphate
  modified_base 13: mod_base = OTHER; note = 2'-O-methyluridine-3'-phosphate
  modified_base 14: mod_base = OTHER; note = 2'-deoxy-2'-fluoroguanosine-3'-phosphate
  modified_base 15: mod_base = OTHER; note = 2'-O-methylcytidine-3'-phosphate
  modified_base 16: mod_base = OTHER; note = 2'-deoxy-2'-fluorouridine-3'-phosphate
  modified_base 17: mod_base = OTHER; note = 2'-O-methylguanosine-3'-phosphate
  modified_base 18: mod_base = OTHER; note = 2'-O-methyluridine-3'-phosphate
  modified_base 19: mod_base = OTHER; note = 2'-O-methyluridine-3'-phosphate
  modified_base 20: mod_base = OTHER; note = 2'-O-methylguanosine-3'-phosphate
  modified_base 21: mod_base = OTHER; note = 2'-O-methylguanosine-3'-phosphate
  modified_base 22: mod_base = OTHER; note = 2'-O-methyladenosine-3'-phosphate
  modified_base 23: mod_base = OTHER; note = 2'-O-methyladenosine
tgcatttggtgatgctgttggaa

SEQ ID NO: 4628 - RNA, 23 nt, synthetic construct
  source 1..23: mol_type = other RNA
  modified_base 1: mod_base = OTHER; note = 2'-O-methyluridine-3'-phosphate 5'-(E)-Vinylphosphonate
  modified_base 2: mod_base = OTHER; note = 2'-deoxy-2'-fluoroguanosine-3'-phosphate
  modified_base 3: mod_base = OTHER; note = 2'-O-methylguanosine-3'-phosphate
  modified_base 4: mod_base = OTHER; note = 2'-O-methylcytidine-3'-phosphate
  modified_base 5: mod_base = OTHER; note = 2'-O-methyladenosine-3'-phosphate
  modified_base 6: mod_base = OTHER; note = 2'-deoxy-2'-fluorouridine-3'-phosphate
  modified_base 7: mod_base = OTHER; note = 2'-O-methyluridine-3'-phosphate
  modified_base 8: mod_base = OTHER; note = 2'-O-methyluridine-3'-phosphate
  modified_base 9: mod_base = OTHER; note = 2'-O-methylguanosine-3'-phosphate
  modified_base 10: mod_base = OTHER; note = 2'-O-methylguanosine-3'-phosphate
  modified_base 11: mod_base = OTHER; note = 2'-O-methyluridine-3'-phosphate
  modified_base 12: mod_base = OTHER; note = 2'-O-methylguanosine-3'-phosphate
  modified_base 13: mod_base = OTHER; note = 2'-O-methyladenosine-3'-phosphate
  modified_base 14: mod_base = OTHER; note = 2'-deoxy-2'-fluorouridine-3'-phosphate
  modified_base 15: mod_base = OTHER; note = 2'-O-methylguanosine-3'-phosphate
  modified_base 16: mod_base = OTHER; note = 2'-deoxy-2'-fluorocytidine-3'-phosphate
  modified_base 17: mod_base = OTHER; note = 2'-O-methyluridine-3'-phosphate
  modified_base 18: mod_base = OTHER; note = 2'-O-methylguanosine-3'-phosphate
  modified_base 19: mod_base = OTHER; note = 2'-O-methyluridine-3'-phosphate
  modified_base 20: mod_base = OTHER; note = 2'-O-methyluridine-3'-phosphate
  modified_base 21: mod_base = OTHER; note = 2'-O-methylguanosine-3'-phosphate
  modified_base 22: mod_base = OTHER; note = 2'-O-methylguanosine-3'-phosphate
  modified_base 23: mod_base = OTHER; note = 2'-O-methyladenosine
tggcatttggtgatgctgttgga

SEQ ID NO: 4629 - RNA, 23 nt, synthetic construct
  source 1..23: mol_type = other RNA
  modified_base 1: mod_base = OTHER; note = 2'-O-methyluridine-3'-phosphate 5'-(E)-Vinylphosphonate
  modified_base 2: mod_base = OTHER; note = 2'-deoxy-2'-fluorouridine-3'-phosphate
  modified_base 3: mod_base = OTHER; note = 2'-O-methyladenosine-3'-phosphate
  modified_base 4: mod_base = OTHER; note = 2'-O-methyladenosine-3'-phosphate
  modified_base 5: mod_base = OTHER; note = 2'-O-methyluridine-3'-phosphate
  modified_base 6: mod_base = OTHER; note = 2'-deoxy-2'-fluoroadenosine-3'-phosphate
  modified_base 7: mod_base = OTHER; note = 2'-O-methyladenosine-3'-phosphate
  modified_base 8: mod_base = OTHER; note = 2'-O-methyluridine-3'-phosphate
  modified_base 9: mod_base = OTHER; note = 2'-O-methylguanosine-3'-phosphate
  modified_base 10: mod_base = OTHER; note = 2'-O-methyladenosine-3'-phosphate
  modified_base 11: mod_base = OTHER; note = 2'-O-methyluridine-3'-phosphate
  modified_base 12: mod_base = OTHER; note = 2'-O-methylguanosine-3'-phosphate
  modified_base 13: mod_base = OTHER; note = 2'-O-methylguanosine-3'-phosphate
  modified_base 14: mod_base = OTHER; note = 2'-deoxy-2'-fluorocytidine-3'-phosphate
  modified_base 15: mod_base = OTHER; note = 2'-O-methylcytidine-3'-phosphate
  modified_base 16: mod_base = OTHER; note = 2'-deoxy-2'-fluoroadenosine-3'-phosphate
  modified_base 17: mod_base = OTHER; note = 2'-O-methylguanosine-3'-phosphate
  modified_base 18: mod_base = OTHER; note = 2'-O-methylcytidine-3'-phosphate
  modified_base 19: mod_base = OTHER; note = 2'-O-methyluridine-3'-phosphate
  modified_base 20: mod_base = OTHER; note = 2'-O-methylcytidine-3'-phosphate
  modified_base 21: mod_base = OTHER; note = 2'-O-methylcytidine-3'-phosphate
  modified_base 22: mod_base = OTHER; note = 2'-O-methyladenosine-3'-phosphate
  modified_base 23: mod_base = OTHER; note = 2'-O-methyluridine
ttaataatgatggccagctccat

SEQ ID NO: 4630 - RNA, 23 nt, synthetic construct
  source 1..23: mol_type = other RNA
  modified_base 1: mod_base = OTHER; note = 2'-O-methyluridine-3'-phosphate 5'-(E)-Vinylphosphonate
  modified_base 2: mod_base = OTHER; note = 2'-deoxy-2'-fluorocytidine-3'-phosphate
  modified_base 3: mod_base = OTHER; note = 2'-O-methyladenosine-3'-phosphate
  modified_base 4: mod_base = OTHER; note = 2'-O-methylguanosine-3'-phosphate
  modified_base 5: mod_base = OTHER; note = 2'-O-methyluridine-3'-phosphate
  modified_base 6: mod_base = OTHER; note = 2'-deoxy-2'-fluoroadenosine-3'-phosphate
  modified_base 7: mod_base = OTHER; note = 2'-O-methyladenosine-3'-phosphate
  modified_base 8: mod_base = OTHER; note = 2'-O-methyluridine-3'-phosphate
  modified_base 9: mod_base = OTHER; note = 2'-O-methyladenosine-3'-phosphate
  modified_base 10: mod_base = OTHER; note = 2'-O-methyladenosine-3'-phosphate
  modified_base 11: mod_base = OTHER; note = 2'-O-methyluridine-3'-phosphate
  modified_base 12: mod_base = OTHER; note = 2'-O-methylguanosine-3'-phosphate
  modified_base 13: mod_base = OTHER; note = 2'-O-methyladenosine-3'-phosphate
  modified_base 14: mod_base = OTHER; note = 2'-deoxy-2'-fluorouridine-3'-phosphate
  modified_base 15: mod_base = OTHER; note = 2'-O-methylguanosine-3'-phosphate
  modified_base 16: mod_base = OTHER; note = 2'-deoxy-2'-fluoroguanosine-3'-phosphate
  modified_base 17: mod_base = OTHER; note = 2'-O-methylcytidine-3'-phosphate
  modified_base 18: mod_base = OTHER; note = 2'-O-methylcytidine-3'-phosphate
  modified_base 19: mod_base = OTHER; note = 2'-O-methyladenosine-3'-phosphate
  modified_base 20: mod_base = OTHER; note = 2'-O-methylguanosine-3'-phosphate
  modified_base 21: mod_base = OTHER; note = 2'-O-methylcytidine-3'-phosphate
  modified_base 22: mod_base = OTHER; note = 2'-O-methyluridine-3'-phosphate
  modified_base 23: mod_base = OTHER; note = 2'-O-methylcytidine
tcagtaataatgatggccagctc

SEQ ID NO: 4631 - RNA, 23 nt, synthetic construct
  source 1..23: mol_type = other RNA
  modified_base 1: mod_base = OTHER; note = 2'-O-methyluridine-3'-phosphate 5'-(E)-Vinylphosphonate
  modified_base 2: mod_base = OTHER; note = 2'-deoxy-2'-fluoroadenosine-3'-phosphate
  modified_base 3: mod_base = OTHER; note = 2'-O-methylcytidine-3'-phosphate
  modified_base 4: mod_base = OTHER; note = 2'-O-methyladenosine-3'-phosphate
  modified_base 5: mod_base = OTHER; note = 2'-O-methylguanosine-3'-phosphate
  modified_base 6: mod_base = OTHER; note = 2'-deoxy-2'-fluorouridine-3'-phosphate
  modified_base 7: mod_base = OTHER; note = 2'-O-methyladenosine-3'-phosphate
  modified_base 8: mod_base = OTHER; note = 2'-O-methyladenosine-3'-phosphate
  modified_base 9: mod_base = OTHER; note = 2'-O-methyluridine-3'-phosphate
  modified_base 10: mod_base = OTHER; note = 2'-O-methyladenosine-3'-phosphate
  modified_base 11: mod_base = OTHER; note = 2'-O-methyladenosine-3'-phosphate
  modified_base 12: mod_base = OTHER; note = 2'-O-methyluridine-3'-phosphate
  modified_base 13: mod_base = OTHER; note = 2'-O-methylguanosine-3'-phosphate
  modified_base 14: mod_base = OTHER; note = 2'-deoxy-2'-fluoroadenosine-3'-phosphate
  modified_base 15: mod_base = OTHER; note = 2'-O-methyluridine-3'-phosphate
  modified_base 16: mod_base = OTHER; note = 2'-deoxy-2'-fluoroguanosine-3'-phosphate
  modified_base 17: mod_base = OTHER; note = 2'-O-methylguanosine-3'-phosphate
  modified_base 18: mod_base = OTHER; note = 2'-O-methylcytidine-3'-phosphate
  modified_base 19: mod_base = OTHER; note = 2'-O-methylcytidine-3'-phosphate
  modified_base 20: mod_base = OTHER; note = 2'-O-methyladenosine-3'-phosphate
  modified_base 21: mod_base = OTHER; note = 2'-O-methylguanosine-3'-phosphate
  modified_base 22: mod_base = OTHER; note = 2'-O-methylcytidine-3'-phosphate
  modified_base 23: mod_base = OTHER; note = 2'-O-methyluridine
tacagtaataatgatggccagct

SEQ ID NO: 4632 - RNA, 23 nt, synthetic construct
  source 1..23: mol_type = other RNA
  modified_base 1: mod_base = OTHER; note = 2'-O-methyluridine-3'-phosphate 5'-(E)-Vinylphosphonate
  modified_base 2: mod_base = OTHER; note = 2'-deoxy-2'-fluoroguanosine-3'-phosphate
  modified_base 3: mod_base = OTHER; note = 2'-O-methylcytidine-3'-phosphate
  modified_base 4: mod_base = OTHER; note = 2'-O-methyladenosine-3'-phosphate
  modified_base 5: mod_base = OTHER; note = 2'-O-methylcytidine-3'-phosphate
  modified_base 6: mod_base = OTHER; note = 2'-deoxy-2'-fluoroadenosine-3'-phosphate
  modified_base 7: mod_base = OTHER; note = 2'-O-methylguanosine-3'-phosphate
  modified_base 8: mod_base = OTHER; note = 2'-O-methyluridine-3'-phosphate
  modified_base 9: mod_base = OTHER; note = 2'-O-methyladenosine-3'-phosphate
  modified_base 10: mod_base = OTHER; note = 2'-O-methyladenosine-3'-phosphate
  modified_base 11: mod_base = OTHER; note = 2'-O-methyluridine-3'-phosphate
  modified_base 12: mod_base = OTHER; note = 2'-O-methyladenosine-3'-phosphate
  modified_base 13: mod_base = OTHER; note = 2'-O-methyladenosine-3'-phosphate
  modified_base 14: mod_base = OTHER; note = 2'-deoxy-2'-fluorouridine-3'-phosphate
  modified_base 15: mod_base = OTHER; note = 2'-O-methylguanosine-3'-phosphate
  modified_base 16: mod_base = OTHER; note = 2'-deoxy-2'-fluoroadenosine-3'-phosphate
  modified_base 17: mod_base = OTHER; note = 2'-O-methyluridine-3'-phosphate
  modified_base 18: mod_base = OTHER; note = 2'-O-methylguanosine-3'-phosphate
  modified_base 19: mod_base = OTHER; note = 2'-O-methylguanosine-3'-phosphate
  modified_base 20: mod_base = OTHER; note = 2'-O-methylcytidine-3'-phosphate
  modified_base 21: mod_base = OTHER; note = 2'-O-methylcytidine-3'-phosphate
  modified_base 22: mod_base = OTHER; note = 2'-O-methyladenosine-3'-phosphate
  modified_base 23: mod_base = OTHER; note = 2'-O-methylguanosine
tgcacagtaataatgatggccag

SEQ ID NO: 4633 - RNA, 23 nt, synthetic construct
  source 1..23: mol_type = other RNA
  modified_base 1: mod_base = OTHER; note = 2'-O-methyluridine-3'-phosphate 5'-(E)-Vinylphosphonate
  modified_base 2: mod_base = OTHER; note = 2'-deoxy-2'-fluoroadenosine-3'-phosphate
  modified_base 3: mod_base = OTHER; note = 2'-O-methyladenosine-3'-phosphate
  modified_base 4: mod_base = OTHER; note = 2'-O-methyladenosine-3'-phosphate
  modified_base 5: mod_base = OTHER; note = 2'-O-methylcytidine-3'-phosphate
  modified_base 6: mod_base = OTHER; note = 2'-deoxy-2'-fluoroadenosine-3'-phosphate
  modified_base 7: mod_base = OTHER; note = 2'-O-methylguanosine-3'-phosphate
  modified_base 8: mod_base = OTHER; note = 2'-O-methylguanosine-3'-phosphate
  modified_base 9: mod_base = OTHER; note = 2'-O-methylcytidine-3'-phosphate
  modified_base 10: mod_base = OTHER; note = 2'-O-methyladenosine-3'-phosphate
  modified_base 11: mod_base = OTHER; note = 2'-O-methylcytidine-3'-phosphate
  modified_base 12: mod_base = OTHER; note = 2'-O-methyladenosine-3'-phosphate
  modified_base 13: mod_base = OTHER; note = 2'-O-methylguanosine-3'-phosphate
  modified_base 14: mod_base = OTHER; note = 2'-deoxy-2'-fluorouridine-3'-phosphate
  modified_base 15: mod_base = OTHER; note = 2'-O-methyladenosine-3'-phosphate
  modified_base 16: mod_base = OTHER; note = 2'-deoxy-2'-fluoroadenosine-3'-phosphate
  modified_base 17: mod_base = OTHER; note = 2'-O-methyluridine-3'-phosphate
  modified_base 18: mod_base = OTHER; note = 2'-O-methyladenosine-3'-phosphate
  modified_base 19: mod_base = OTHER; note = 2'-O-methyladenosine-3'-phosphate
  modified_base 20: mod_base = OTHER; note = 2'-O-methyluridine-3'-phosphate
  modified_base 21: mod_base = OTHER; note = 2'-O-methylguanosine-3'-phosphate
  modified_base 22: mod_base = OTHER; note = 2'-O-methyladenosine-3'-phosphate
  modified_base 23: mod_base = OTHER; note = 2'-O-methyluridine
taaacaggcacagtaataatgat

SEQ ID NO: 4634 - RNA, 23 nt, synthetic construct
  source 1..23: mol_type = other RNA
  modified_base 1: mod_base = OTHER; note = 2'-O-methyluridine-3'-phosphate 5'-(E)-Vinylphosphonate
  modified_base 2: mod_base = OTHER; note = 2'-deoxy-2'-fluoroadenosine-3'-phosphate
  modified_base 3: mod_base = OTHER; note = 2'-O-methylguanosine-3'-phosphate
  modified_base 4: mod_base = OTHER; note = 2'-O-methylguanosine-3'-phosphate
  modified_base 5: mod_base = OTHER; note = 2'-O-methylcytidine-3'-phosphate
  modified_base 6: mod_base = OTHER; note = 2'-deoxy-2'-fluoroadenosine-3'-phosphate
  modified_base 7: mod_base = OTHER; note = 2'-O-methyladenosine-3'-phosphate
  modified_base 8: mod_base = OTHER; note = 2'-O-methyladenosine-3'-phosphate
  modified_base 9: mod_base = OTHER; note = 2'-O-methylcytidine-3'-phosphate
  modified_base 10: mod_base = OTHER; note = 2'-O-methyladenosine-3'-phosphate
  modified_base 11: mod_base = OTHER; note = 2'-O-methylguanosine-3'-phosphate
  modified_base 12: mod_base = OTHER; note = 2'-O-methylguanosine-3'-phosphate
  modified_base 13: mod_base = OTHER; note = 2'-O-methylcytidine-3'-phosphate
  modified_base 14: mod_base = OTHER; note = 2'-deoxy-2'-fluoroadenosine-3'-phosphate
  modified_base 15: mod_base = OTHER; note = 2'-O-methylcytidine-3'-phosphate
  modified_base 16: mod_base = OTHER; note = 2'-deoxy-2'-fluoroadenosine-3'-phosphate
  modified_base 17: mod_base = OTHER; note = 2'-O-methylguanosine-3'-phosphate
  modified_base 18: mod_base = OTHER; note = 2'-O-methyluridine-3'-phosphate
  modified_base 19: mod_base = OTHER; note = 2'-O-methyladenosine-3'-phosphate
  modified_base 20: mod_base = OTHER; note = 2'-O-methyladenosine-3'-phosphate
  modified_base 21: mod_base = OTHER; note = 2'-O-methyluridine-3'-phosphate
  modified_base 22: mod_base = OTHER; note = 2'-O-methyladenosine-3'-phosphate
  modified_base 23: mod_base = OTHER; note = 2'-O-methyladenosine
taggcaaacaggcacagtaataa

SEQ ID NO: 4635 - RNA, 23 nt, synthetic construct
  source 1..23: mol_type = other RNA
  modified_base 1: mod_base = OTHER; note = 2'-O-methyluridine-3'-phosphate 5'-(E)-Vinylphosphonate
  modified_base 2: mod_base = OTHER; note = 2'-deoxy-2'-fluorouridine-3'-phosphate
  modified_base 3: mod_base = OTHER; note = 2'-O-methylguanosine-3'-phosphate
  modified_base 4: mod_base = OTHER; note = 2'-O-methylguanosine-3'-phosphate
  modified_base 5: mod_base = OTHER; note = 2'-O-methyladenosine-3'-phosphate
  modified_base 6: mod_base = OTHER; note = 2'-deoxy-2'-fluorocytidine-3'-phosphate
  modified_base 7: mod_base = OTHER; note = 2'-O-methyladenosine-3'-phosphate
  modified_base 8: mod_base = OTHER; note = 2'-O-methylguanosine-3'-phosphate
  modified_base 9: mod_base = OTHER; note = 2'-O-methylguanosine-3'-phosphate
  modified_base 10: mod_base = OTHER; note = 2'-O-methyladenosine-3'-phosphate
  modified_base 11: mod_base = OTHER; note = 2'-O-methylguanosine-3'-phosphate
  modified_base 12: mod_base = OTHER; note = 2'-O-methylguanosine-3'-phosphate
  modified_base 13: mod_base = OTHER; note = 2'-O-methylcytidine-3'-phosphate
  modified_base 14: mod_base = OTHER; note = 2'-deoxy-2'-fluoroadenosine-3'-phosphate
  modified_base 15: mod_base = OTHER; note = 2'-O-methyladenosine-3'-phosphate
  modified_base 16: mod_base = OTHER; note = 2'-deoxy-2'-fluoroadenosine-3'-phosphate
  modified_base 17: mod_base = OTHER; note = 2'-O-methylcytidine-3'-phosphate
  modified_base 18: mod_base = OTHER; note = 2'-O-methyladenosine-3'-phosphate
  modified_base 19: mod_base = OTHER; note = 2'-O-methylguanosine-3'-phosphate
  modified_base 20: mod_base = OTHER; note = 2'-O-methylguanosine-3'-phosphate
  modified_base 21: mod_base = OTHER; note = 2'-O-methylcytidine-3'-phosphate
  modified_base 22: mod_base = OTHER; note = 2'-O-methyladenosine-3'-phosphate
  modified_base 23: mod_base = OTHER; note = 2'-O-methylcytidine
ttggacaggaggcaaacaggcac

SEQ ID NO: 4636 - RNA, 23 nt, synthetic construct
  source 1..23: mol_type = other RNA
  modified_base 1: mod_base = OTHER; note = 2'-O-methyluridine-3'-phosphate 5'-(E)-Vinylphosphonate
  modified_base 2: mod_base = OTHER; note = 2'-deoxy-2'-fluoroadenosine-3'-phosphate
  modified_base 3: mod_base = OTHER; note = 2'-O-methyluridine-3'-phosphate
  modified_base 4: mod_base = OTHER; note = 2'-O-methyladenosine-3'-phosphate
  modified_base 5: mod_base = OTHER; note = 2'-O-methylcytidine-3'-phosphate
  modified_base 6: mod_base = OTHER; note = 2'-deoxy-2'-fluorouridine-3'-phosphate
  modified_base 7: mod_base = OTHER; note = 2'-O-methylguanosine-3'-phosphate
  modified_base 8: mod_base = OTHER; note = 2'-O-methyluridine-3'-phosphate
  modified_base 9: mod_base = OTHER; note = 2'-O-methylcytidine-3'-phosphate
  modified_base 10: mod_base = OTHER; note = 2'-O-methyladenosine-3'-phosphate
  modified_base 11: mod_base = OTHER; note = 2'-O-methylguanosine-3'-phosphate
  modified_base 12: mod_base = OTHER; note = 2'-O-methylcytidine-3'-phosphate
  modified_base 13: mod_base = OTHER; note = 2'-O-methyladenosine-3'-phosphate
  modified_base 14: mod_base = OTHER; note = 2'-deoxy-2'-fluorouridine-3'-phosphate
  modified_base 15: mod_base = OTHER; note = 2'-O-methylcytidine-3'-phosphate
  modified_base 16: mod_base = OTHER; note = 2'-deoxy-2'-fluoroguanosine-3'-phosphate
  modified_base 17: mod_base = OTHER; note = 2'-O-methylcytidine-3'-phosphate
  modified_base 18: mod_base = OTHER; note = 2'-O-methyladenosine-3'-phosphate
  modified_base 19: mod_base = OTHER; note = 2'-O-methylguanosine-3'-phosphate
  modified_base 20: mod_base = OTHER; note = 2'-O-methylcytidine-3'-phosphate
  modified_base 21: mod_base = OTHER; note = 2'-O-methyluridine-3'-phosphate
  modified_base 22: mod_base = OTHER; note = 2'-O-methyladenosine-3'-phosphate
  modified_base 23: mod_base = OTHER; note = 2'-O-methyluridine
tatactgtcagcatcgcagctat

SEQ ID NO: 4637 - RNA, 23 nt, synthetic construct
  source 1..23: mol_type = other RNA
  modified_base 1: mod_base = OTHER; note = 2'-O-methyluridine-3'-phosphate 5'-(E)-Vinylphosphonate
  modified_base 2: mod_base = OTHER; note = 2'-deoxy-2'-fluorouridine-3'-phosphate
  modified_base 3: mod_base = OTHER; note = 2'-O-methyluridine-3'-phosphate
  modified_base 4: mod_base = OTHER; note = 2'-O-methyluridine-3'-phosphate
  modified_base 5: mod_base = OTHER; note = 2'-O-methyluridine-3'-phosphate
  modified_base 6: mod_base = OTHER; note = 2'-deoxy-2'-fluorocytidine-3'-phosphate
  modified_base 7: mod_base = OTHER; note = 2'-O-methyluridine-3'-phosphate
  modified_base 8: mod_base = OTHER; note = 2'-O-methyluridine-3'-phosphate
  modified_base 9: mod_base = OTHER; note = 2'-O-methylcytidine-3'-phosphate
  modified_base 10: mod_base = OTHER; note = 2'-O-methylcytidine-3'-phosphate
  modified_base 11: mod_base = OTHER; note = 2'-O-methyluridine-3'-phosphate
  modified_base 12: mod_base = OTHER; note = 2'-O-methylguanosine-3'-phosphate
  modified_base 13: mod_base = OTHER; note = 2'-O-methyluridine-3'-phosphate
  modified_base 14: mod_base = OTHER; note = 2'-deoxy-2'-fluoroadenosine-3'-phosphate
  modified_base 15: mod_base = OTHER; note = 2'-O-methylguanosine-3'-phosphate
  modified_base 16: mod_base = OTHER; note = 2'-deoxy-2'-fluoroguanosine-3'-phosphate
  modified_base 17: mod_base = OTHER; note = 2'-O-methyladenosine-3'-phosphate
  modified_base 18: mod_base = OTHER; note = 2'-O-methylguanosine-3'-phosphate
  modified_base 19: mod_base = OTHER; note = 2'-O-methylcytidine-3'-phosphate
  modified_base 20: mod_base = OTHER; note = 2'-O-methyladenosine-3'-phosphate
  modified_base 21: mod_base = OTHER; note = 2'-O-methylcytidine-3'-phosphate
  modified_base 22: mod_base = OTHER; note = 2'-O-methyluridine-3'-phosphate
  modified_base 23: mod_base = OTHER; note = 2'-O-methylguanosine
tttttcttcctgtaggagcactg

SEQ ID NO: 4638 - RNA, 23 nt, synthetic construct
  source 1..23: mol_type = other RNA
  modified_base 1: mod_base = OTHER; note = 2'-O-methyluridine-3'-phosphate 5'-(E)-Vinylphosphonate
  modified_base 2: mod_base = OTHER; note = 2'-deoxy-2'-fluorouridine-3'-phosphate
  modified_base 3: mod_base = OTHER; note = 2'-O-methyluridine-3'-phosphate
  modified_base 4: mod_base = OTHER; note = 2'-O-methyluridine-3'-phosphate
  modified_base 5: mod_base = OTHER; note = 2'-O-methyluridine-3'-phosphate
  modified_base 6: mod_base = OTHER; note = 2'-deoxy-2'-fluorouridine-3'-phosphate
  modified_base 7: mod_base = OTHER; note = 2'-O-methylcytidine-3'-phosphate
  modified_base 8: mod_base = OTHER; note = 2'-O-methyluridine-3'-phosphate
  modified_base 9: mod_base = OTHER; note = 2'-O-methyluridine-3'-phosphate
  modified_base 10: mod_base = OTHER; note = 2'-O-methylcytidine-3'-phosphate
  modified_base 11: mod_base = OTHER; note = 2'-O-methylcytidine-3'-phosphate
  modified_base 12: mod_base = OTHER; note = 2'-O-methyluridine-3'-phosphate
  modified_base 13: mod_base = OTHER; note = 2'-O-methylguanosine-3'-phosphate
  modified_base 14: mod_base = OTHER; note = 2'-deoxy-2'-fluorouridine-3'-phosphate
  modified_base 15: mod_base = OTHER; note = 2'-O-methyladenosine-3'-phosphate
  modified_base 16: mod_base = OTHER; note = 2'-deoxy-2'-fluoroguanosine-3'-phosphate
  modified_base 17: mod_base = OTHER; note = 2'-O-methylguanosine-3'-phosphate
  modified_base 18: mod_base = OTHER; note = 2'-O-methyladenosine-3'-phosphate
  modified_base 19: mod_base = OTHER; note = 2'-O-methylguanosine-3'-phosphate
  modified_base 20: mod_base = OTHER; note = 2'-O-methylcytidine-3'-phosphate
  modified_base 21: mod_base = OTHER; note = 2'-O-methyladenosine-3'-phosphate
  modified_base 22: mod_base = OTHER; note = 2'-O-methylcytidine-3'-phosphate
  modified_base 23: mod_base = OTHER; note = 2'-O-methyluridine
ttttttcttcctgtaggagcact

SEQ ID NO: 4639 - RNA, 23 nt, synthetic construct
  source 1..23: mol_type = other RNA
  modified_base 1: mod_base = OTHER; note = 2'-O-methyluridine-3'-phosphate 5'-(E)-Vinylphosphonate
  modified_base 2: mod_base = OTHER; note = 2'-deoxy-2'-fluorouridine-3'-phosphate
  modified_base 3: mod_base = OTHER; note = 2'-O-methylcytidine-3'-phosphate
  modified_base 4: mod_base = OTHER; note = 2'-O-methyluridine-3'-phosphate
  modified_base 5: mod_base = OTHER; note = 2'-O-methyluridine-3'-phosphate
  modified_base 6: mod_base = OTHER; note = 2'-deoxy-2'-fluorouridine-3'-phosphate
  modified_base 7: mod_base = OTHER; note = 2'-O-methyluridine-3'-phosphate
  modified_base 8: mod_base = OTHER; note = 2'-O-methyluridine-3'-phosphate
  modified_base 9: mod_base = OTHER; note = 2'-O-methylcytidine-3'-phosphate
  modified_base 10: mod_base = OTHER; note = 2'-O-methyluridine-3'-phosphate
  modified_base 11: mod_base = OTHER; note = 2'-O-methyluridine-3'-phosphate
  modified_base 12: mod_base = OTHER; note = 2'-O-methylcytidine-3'-phosphate
  modified_base 13: mod_base = OTHER; note = 2'-O-methylcytidine-3'-phosphate
  modified_base 14: mod_base = OTHER; note = 2'-deoxy-2'-fluorouridine-3'-phosphate
  modified_base 15: mod_base = OTHER; note = 2'-O-methylguanosine-3'-phosphate
  modified_base 16: mod_base = OTHER; note = 2'-deoxy-2'-fluorouridine-3'-phosphate
  modified_base 17: mod_base = OTHER; note = 2'-O-methyladenosine-3'-phosphate
  modified_base 18: mod_base = OTHER; note = 2'-O-methylguanosine-3'-phosphate
  modified_base 19: mod_base = OTHER; note = 2'-O-methylguanosine-3'-phosphate
  modified_base 20: mod_base = OTHER; note = 2'-O-methyladenosine-3'-phosphate
  modified_base 21: mod_base = OTHER; note = 2'-O-methylguanosine-3'-phosphate
  modified_base 22: mod_base = OTHER; note = 2'-O-methylcytidine-3'-phosphate
  modified_base 23: mod_base = OTHER; note = 2'-O-methyladenosine
ttctttttcttcctgtaggagca

SEQ ID NO: 4640 - RNA, 23 nt, synthetic construct
  source 1..23: mol_type = other RNA
  modified_base 1: mod_base = OTHER; note = 2'-O-methyluridine-3'-phosphate 5'-(E)-Vinylphosphonate
  modified_base 2: mod_base = OTHER; note = 2'-deoxy-2'-fluoroguanosine-3'-phosphate
  modified_base 3: mod_base = OTHER; note = 2'-O-methyluridine-3'-phosphate
  modified_base 4: mod_base = OTHER; note = 2'-O-methylcytidine-3'-phosphate
  modified_base 5: mod_base = OTHER; note = 2'-O-methyluridine-3'-phosphate
  modified_base 6: mod_base = OTHER; note = 2'-deoxy-2'-fluorocytidine-3'-phosphate
  modified_base 7: mod_base = OTHER; note = 2'-O-methyluridine-3'-phosphate
  modified_base 8: mod_base = OTHER; note = 2'-O-methyluridine-3'-phosphate
  modified_base 9: mod_base = OTHER; note = 2'-O-methyluridine-3'-phosphate
  modified_base 10: mod_base = OTHER; note = 2'-O-methyluridine-3'-phosphate
  modified_base 11: mod_base = OTHER; note = 2'-O-methyluridine-3'-phosphate
  modified_base 12: mod_base = OTHER; note = 2'-O-methylcytidine-3'-phosphate
  modified_base 13: mod_base = OTHER; note = 2'-O-methyluridine-3'-phosphate
  modified_base 14: mod_base = OTHER; note = 2'-deoxy-2'-fluorouridine-3'-phosphate
  modified_base 15: mod_base = OTHER; note = 2'-O-methylcytidine-3'-phosphate
  modified_base 16: mod_base = OTHER; note = 2'-deoxy-2'-fluorocytidine-3'-phosphate
  modified_base 17: mod_base = OTHER; note = 2'-O-methyluridine-3'-phosphate
  modified_base 18: mod_base = OTHER; note = 2'-O-methylguanosine-3'-phosphate
  modified_base 19: mod_base = OTHER; note = 2'-O-methyluridine-3'-phosphate
  modified_base 20: mod_base = OTHER; note = 2'-O-methyladenosine-3'-phosphate
  modified_base 21: mod_base = OTHER; note = 2'-O-methylguanosine-3'-phosphate
  modified_base 22: mod_base = OTHER; note = 2'-O-methylguanosine-3'-phosphate
  modified_base 23: mod_base = OTHER; note = 2'-O-methyladenosine
tgtctctttttcttcctgtagga

SEQ ID NO: 4641 - RNA, 23 nt, synthetic construct
  source 1..23: mol_type = other RNA
  modified_base 1: mod_base = OTHER; note = 2'-O-methyluridine-3'-phosphate 5'-(E)-Vinylphosphonate
  modified_base 2: mod_base = OTHER; note = 2'-deoxy-2'-fluorocytidine-3'-phosphate
  modified_base 3: mod_base = OTHER; note = 2'-O-methyladenosine-3'-phosphate
  modified_base 4: mod_base = OTHER; note = 2'-O-methylguanosine-3'-phosphate
  modified_base 5: mod_base = OTHER; note = 2'-O-methyladenosine-3'-phosphate
  modified_base 6: mod_base = OTHER; note = 2'-deoxy-2'-fluorouridine-3'-phosphate
  modified_base 7: mod_base = OTHER; note = 2'-O-methyluridine-3'-phosphate
  modified_base 8: mod_base = OTHER; note = 2'-O-methylguanosine-3'-phosphate
  modified_base 9: mod_base = OTHER; note = 2'-O-methylcytidine-3'-phosphate
  modified_base 10: mod_base = OTHER; note = 2'-O-methyladenosine-3'-phosphate
  modified_base 11: mod_base = OTHER; note = 2'-O-methylcytidine-3'-phosphate
  modified_base 12: mod_base = OTHER; note = 2'-O-methyluridine-3'-phosphate
  modified_base 13: mod_base = OTHER; note = 2'-O-methylcytidine-3'-phosphate
  modified_base 14: mod_base = OTHER; note = 2'-deoxy-2'-fluoroadenosine-3'-phosphate
  modified_base 15: mod_base = OTHER; note = 2'-O-methylguanosine-3'-phosphate
  modified_base 16: mod_base = OTHER; note = 2'-deoxy-2'-fluoroadenosine-3'-phosphate
  modified_base 17: mod_base = OTHER; note = 2'-O-methylguanosine-3'-phosphate
  modified_base 18: mod_base = OTHER; note = 2'-O-methyladenosine-3'-phosphate
  modified_base 19: mod_base = OTHER; note = 2'-O-methylguanosine-3'-phosphate
  modified_base 20: mod_base = OTHER; note = 2'-O-methyluridine-3'-phosphate
  modified_base 21: mod_base = OTHER; note = 2'-O-methylguanosine-3'-phosphate
  modified_base 22: mod_base = OTHER; note = 2'-O-methylguanosine-3'-phosphate
  modified_base 23: mod_base = OTHER; note = 2'-O-methyluridine
tcagattgcactcagagagtggt

SEQ ID NO: 4642 - RNA, 23 nt, synthetic construct
  source 1..23: mol_type = other RNA
  modified_base 1: mod_base = OTHER; note = 2'-O-methyluridine-3'-phosphate 5'-(E)-Vinylphosphonate
  modified_base 2: mod_base = OTHER; note = 2'-deoxy-2'-fluorouridine-3'-phosphate
  modified_base 3: mod_base = OTHER; note = 2'-O-methyluridine-3'-phosphate
  modified_base 4: mod_base = OTHER; note = 2'-O-methyladenosine-3'-phosphate
  modified_base 5: mod_base = OTHER; note = 2'-O-methylcytidine-3'-phosphate
  modified_base 6: mod_base = OTHER; note = 2'-deoxy-2'-fluorocytidine-3'-phosphate
  modified_base 7: mod_base = OTHER; note = 2'-O-methyladenosine-3'-phosphate
  modified_base 8: mod_base = OTHER; note = 2'-O-methylguanosine-3'-phosphate
  modified_base 9: mod_base = OTHER; note = 2'-O-methyladenosine-3'-phosphate
  modified_base 10: mod_base = OTHER; note = 2'-O-methyluridine-3'-phosphate
  modified_base 11: mod_base = OTHER; note = 2'-O-methyluridine-3'-phosphate
  modified_base 12: mod_base = OTHER; note = 2'-O-methylguanosine-3'-phosphate
  modified_base 13: mod_base = OTHER; note = 2'-O-methylcytidine-3'-phosphate
  modified_base 14: mod_base = OTHER; note = 2'-deoxy-2'-fluoroadenosine-3'-phosphate
  modified_base 15: mod_base = OTHER; note = 2'-O-methylcytidine-3'-phosphate
  modified_base 16: mod_base = OTHER; note = 2'-deoxy-2'-fluorouridine-3'-phosphate
  modified_base 17: mod_base = OTHER; note = 2'-O-methylcytidine-3'-phosphate
  modified_base 18: mod_base = OTHER; note = 2'-O-methyladenosine-3'-phosphate
  modified_base 19: mod_base = OTHER; note = 2'-O-methylguanosine-3'-phosphate
  modified_base 20: mod_base = OTHER; note = 2'-O-methyladenosine-3'-phosphate
  modified_base 21: mod_base = OTHER; note = 2'-O-methylguanosine-3'-phosphate
  modified_base 22: mod_base = OTHER; note = 2'-O-methyladenosine-3'-phosphate
  modified_base 23: mod_base = OTHER; note = 2'-O-methylguanosine
tttaccagattgcactcagagag

SEQ ID NO: 4643 - RNA, 23 nt, synthetic construct
  source 1..23: mol_type = other RNA
  modified_base 1: mod_base = OTHER; note = 2'-O-methyluridine-3'-phosphate 5'-(E)-Vinylphosphonate
  modified_base 2: mod_base = OTHER; note = 2'-deoxy-2'-fluorocytidine-3'-phosphate
  modified_base 3: mod_base = OTHER; note = 2'-O-methyladenosine-3'-phosphate
  modified_base 4: mod_base = OTHER; note = 2'-O-methyluridine-3'-phosphate
  modified_base 5: mod_base = OTHER; note = 2'-O-methyluridine-3'-phosphate
  modified_base 6: mod_base = OTHER; note = 2'-deoxy-2'-fluorouridine-3'-phosphate
  modified_base 7: mod_base = OTHER; note = 2'-O-methyladenosine-3'-phosphate
  modified_base 8: mod_base = OTHER; note = 2'-O-methylcytidine-3'-phosphate
  modified_base 9: mod_base = OTHER; note = 2'-O-methylcytidine-3'-phosphate
  modified_base 10: mod_base = OTHER; note = 2'-O-methyladenosine-3'-phosphate
  modified_base 11: mod_base = OTHER; note = 2'-O-methylguanosine-3'-phosphate
  modified_base 12: mod_base = OTHER; note = 2'-O-methyladenosine-3'-phosphate
  modified_base 13: mod_base = OTHER; note = 2'-O-methyluridine-3'-phosphate
  modified_base 14: mod_base = OTHER; note = 2'-deoxy-2'-fluorouridine-3'-phosphate
  modified_base 15: mod_base = OTHER; note = 2'-O-methylguanosine-3'-phosphate
  modified_base 16: mod_base = OTHER; note = 2'-deoxy-2'-fluorocytidine-3'-phosphate
  modified_base 17: mod_base = OTHER; note = 2'-O-methyladenosine-3'-phosphate
  modified_base 18: mod_base = OTHER; note = 2'-O-methylcytidine-3'-phosphate
  modified_base 19: mod_base = OTHER; note = 2'-O-methyluridine-3'-phosphate
  modified_base 20: mod_base = OTHER; note = 2'-O-methylcytidine-3'-phosphate
  modified_base 21: mod_base = OTHER; note = 2'-O-methyladenosine-3'-phosphate
  modified_base 22: mod_base = OTHER; note = 2'-O-methylguanosine-3'-phosphate
  modified_base 23: mod_base = OTHER; note = 2'-O-methyladenosine
tcatttaccagattgcactcaga

SEQ ID NO: 4644 - RNA, 23 nt, synthetic construct
  source 1..23: mol_type = other RNA
  modified_base 1: mod_base = OTHER; note = 2'-O-methyluridine-3'-phosphate 5'-(E)-Vinylphosphonate
  modified_base 2: mod_base = OTHER; note = 2'-deoxy-2'-fluorouridine-3'-phosphate
  modified_base 3: mod_base = OTHER; note = 2'-O-methyluridine-3'-phosphate
  modified_base 4: mod_base = OTHER; note = 2'-O-methyluridine-3'-phosphate
  modified_base 5: mod_base = OTHER; note = 2'-O-methylcytidine-3'-phosphate
  modified_base 6: mod_base = OTHER; note = 2'-deoxy-2'-fluorocytidine-3'-phosphate
  modified_base 7: mod_base = OTHER; note = 2'-O-methyladenosine-3'-phosphate
  modified_base 8: mod_base = OTHER; note = 2'-O-methylguanosine-3'-phosphate
  modified_base 9: mod_base = OTHER; note = 2'-O-methylcytidine-3'-phosphate
  modified_base 10: mod_base = OTHER; note = 2'-O-methyladenosine-3'-phosphate
  modified_base 11: mod_base = OTHER; note = 2'-O-methyluridine-3'-phosphate
  modified_base 12: mod_base = OTHER; note = 2'-O-methyluridine-3'-phosphate
  modified_base 13: mod_base = OTHER; note = 2'-O-methyluridine-3'-phosphate
  modified_base 14: mod_base = OTHER; note = 2'-deoxy-2'-fluoroadenosine-3'-phosphate
  modified_base 15: mod_base = OTHER; note = 2'-O-methylcytidine-3'-phosphate
  modified_base 16: mod_base = OTHER; note = 2'-deoxy-2'-fluorocytidine-3'-phosphate
  modified_base 17: mod_base = OTHER; note = 2'-O-methyladenosine-3'-phosphate
  modified_base 18: mod_base = OTHER; note = 2'-O-methylguanosine-3'-phosphate
  modified_base 19: mod_base = OTHER; note = 2'-O-methyladenosine-3'-phosphate
  modified_base 20: mod_base = OTHER; note = 2'-O-methyluridine-3'-phosphate
  modified_base 21: mod_base = OTHER; note = 2'-O-methyluridine-3'-phosphate
  modified_base 22: mod_base = OTHER; note = 2'-O-methylguanosine-3'-phosphate
  modified_base 23: mod_base = OTHER; note = 2'-O-methylcytidine
ttttccagcatttaccagattgc

SEQ ID NO: 4645 - RNA, 23 nt, synthetic construct
  source 1..23: mol_type = other RNA
  modified_base 1: mod_base = OTHER; note = 2'-O-methyluridine-3'-phosphate 5'-(E)-Vinylphosphonate
  modified_base 2: mod_base = OTHER; note = 2'-deoxy-2'-fluoroguanosine-3'-phosphate
  modified_base 3: mod_base = OTHER; note = 2'-O-methyluridine-3'-phosphate
  modified_base 4: mod_base = OTHER; note = 2'-O-methyluridine-3'-phosphate
  modified_base 5: mod_base = OTHER; note = 2'-O-methyluridine-3'-phosphate
  modified_base 6: mod_base = OTHER; note = 2'-deoxy-2'-fluorouridine-3'-phosphate
  modified_base 7: mod_base = OTHER; note = 2'-O-methyluridine-3'-phosphate
  modified_base 8: mod_base = OTHER; note = 2'-O-methylcytidine-3'-phosphate
  modified_base 9: mod_base = OTHER; note = 2'-O-methylcytidine-3'-phosphate
  modified_base 10: mod_base = OTHER; note = 2'-O-methyladenosine-3'-phosphate
  modified_base 11: mod_base = OTHER; note = 2'-O-methylguanosine-3'-phosphate
  modified_base 12: mod_base = OTHER; note = 2'-O-methylcytidine-3'-phosphate
  modified_base 13: mod_base = OTHER; note = 2'-O-methyladenosine-3'-phosphate
  modified_base 14: mod_base = OTHER; note = 2'-deoxy-2'-fluorouridine-3'-phosphate
  modified_base 15: mod_base = OTHER; note = 2'-O-methyluridine-3'-phosphate
  modified_base 16: mod_base = OTHER; note = 2'-deoxy-2'-fluorouridine-3'-phosphate
  modified_base 17: mod_base = OTHER; note = 2'-O-methyladenosine-3'-phosphate
  modified_base 18: mod_base = OTHER; note = 2'-O-methylcytidine-3'-phosphate
  modified_base 19: mod_base = OTHER; note = 2'-O-methylcytidine-3'-phosphate
  modified_base 20: mod_base = OTHER; note = 2'-O-methyladenosine-3'-phosphate
  modified_base 21: mod_base = OTHER; note = 2'-O-methylguanosine-3'-phosphate
  modified_base 22: mod_base = OTHER; note = 2'-O-methyladenosine-3'-phosphate
  modified_base 23: mod_base = OTHER; note = 2'-O-methyluridine
tgtttttccagcatttaccagat

SEQ ID NO: 4646 - RNA, 23 nt, synthetic construct
  source 1..23: mol_type = other RNA
  modified_base 1: mod_base = OTHER; note = 2'-O-methyluridine-3'-phosphate 5'-(E)-Vinylphosphonate
  modified_base 2: mod_base = OTHER; note = 2'-deoxy-2'-fluorouridine-3'-phosphate
  modified_base 3: mod_base = OTHER; note = 2'-O-methylcytidine-3'-phosphate
  modified_base 4: mod_base = OTHER; note = 2'-O-methyluridine-3'-phosphate
  modified_base 5: mod_base = OTHER; note = 2'-O-methyluridine-3'-phosphate
  modified_base 6: mod_base = OTHER; note = 2'-deoxy-2'-fluorouridine-3'-phosphate
  modified_base 7: mod_base = OTHER; note = 2'-O-methylcytidine-3'-phosphate
  modified_base 8: mod_base = OTHER; note = 2'-O-methyladenosine-3'-phosphate
  modified_base 9: mod_base = OTHER; note = 2'-O-methylguanosine-3'-phosphate
  modified_base 10: mod_base = OTHER; note = 2'-O-methyladenosine-3'-phosphate
  modified_base 11: mod_base = OTHER; note = 2'-O-methylguanosine-3'-phosphate
  modified_base 12: mod_base = OTHER; note = 2'-O-methyluridine-3'-phosphate
  modified_base 13: mod_base = OTHER; note = 2'-O-methyluridine-3'-phosphate
  modified_base 14: mod_base = OTHER; note = 2'-deoxy-2'-fluorouridine-3'-phosphate
  modified_base 15: mod_base = OTHER; note = 2'-O-methyluridine-3'-phosphate
  modified_base 16: mod_base = OTHER; note = 2'-deoxy-2'-fluorouridine-3'-phosphate
  modified_base 17: mod_base = OTHER; note = 2'-O-methylcytidine-3'-phosphate
  modified_base 18: mod_base = OTHER; note = 2'-O-methylcytidine-3'-phosphate
  modified_base 19: mod_base = OTHER; note = 2'-O-methyladenosine-3'-phosphate
  modified_base 20: mod_base = OTHER; note = 2'-O-methylguanosine-3'-phosphate
  modified_base 21: mod_base = OTHER; note = 2'-O-methylcytidine-3'-phosphate
  modified_base 22: mod_base = OTHER; note = 2'-O-methyladenosine-3'-phosphate
  modified_base 23: mod_base = OTHER; note = 2'-O-methyluridine
ttctttcagagtttttccagcat

SEQ ID NO: 4647 - RNA, 23 nt, synthetic construct
  source 1..23: mol_type = other RNA
  modified_base 1: mod_base = OTHER; note = 2'-O-methyluridine-3'-phosphate 5'-(E)-Vinylphosphonate
  modified_base 2: mod_base = OTHER; note = 2'-deoxy-2'-fluoroguanosine-3'-phosphate
  modified_base 3: mod_base = OTHER; note = 2'-O-methyladenosine-3'-phosphate
  modified_base 4: mod_base = OTHER; note = 2'-O-methyluridine-3'-phosphate
  modified_base 5: mod_base = OTHER; note = 2'-O-methylcytidine-3'-phosphate
  modified_base 6: mod_base = OTHER; note = 2'-deoxy-2'-fluorouridine-3'-phosphate
  modified_base 7: mod_base = OTHER; note = 2'-O-methyluridine-3'-phosphate
  modified_base 8: mod_base = OTHER; note = 2'-O-methyluridine-3'-phosphate
  modified_base 9: mod_base = OTHER; note = 2'-O-methylcytidine-3'-phosphate
  modified_base 10: mod_base = OTHER; note = 2'-O-methyladenosine-3'-phosphate
  modified_base 11: mod_base = OTHER; note = 2'-O-methylguanosine-3'-phosphate
  modified_base 12: mod_base = OTHER; note = 2'-O-methyladenosine-3'-phosphate
  modified_base 13: mod_base = OTHER; note = 2'-O-methylguanosine-3'-phosphate
  modified_base 14: mod_base = OTHER; note = 2'-deoxy-2'-fluorouridine-3'-phosphate
  modified_base 15: mod_base = OTHER; note = 2'-O-methyluridine-3'-phosphate
  modified_base 16: mod_base = OTHER; note = 2'-deoxy-2'-fluorouridine-3'-phosphate
  modified_base 17: mod_base = OTHER; note = 2'-O-methyluridine-3'-phosphate
  modified_base 18: mod_base = OTHER; note = 2'-O-methyluridine-3'-phosphate
  modified_base 19: mod_base = OTHER; note = 2'-O-methylcytidine-3'-phosphate
  modified_base 20: mod_base = OTHER; note = 2'-O-methylcytidine-3'-phosphate
  modified_base 21: mod_base = OTHER; note = 2'-O-methyladenosine-3'-phosphate
  modified_base 22: mod_base = OTHER; note = 2'-O-methylguanosine-3'-phosphate
  modified_base 23: mod_base = OTHER; note = 2'-O-methylcytidine
tgatctttcagagtttttccagc

SEQ ID NO: 4648 - RNA, 23 nt, synthetic construct
  source 1..23: mol_type = other RNA
  modified_base 1: mod_base = OTHER; note = 2'-O-methyluridine-3'-phosphate 5'-(E)-Vinylphosphonate
  modified_base 2: mod_base = OTHER; note = 2'-deoxy-2'-fluoroadenosine-3'-phosphate
  modified_base 3: mod_base = OTHER; note = 2'-O-methylguanosine-3'-phosphate
  modified_base 4: mod_base = OTHER; note = 2'-O-methyladenosine-3'-phosphate
  modified_base 5: mod_base = OTHER; note = 2'-O-methyluridine-3'-phosphate
  modified_base 6: mod_base = OTHER; note = 2'-deoxy-2'-fluorocytidine-3'-phosphate
  modified_base 7: mod_base = OTHER; note = 2'-O-methyluridine-3'-phosphate
  modified_base 8: mod_base = OTHER; note = 2'-O-methyluridine-3'-phosphate
  modified_base 9: mod_base = OTHER; note = 2'-O-methyluridine-3'-phosphate
  modified_base 10: mod_base = OTHER; note = 2'-O-methylcytidine-3'-phosphate
  modified_base 11: mod_base = OTHER; note = 2'-O-methyladenosine-3'-phosphate
  modified_base 12: mod_base = OTHER; note = 2'-O-methylguanosine-3'-phosphate
  modified_base 13: mod_base = OTHER; note = 2'-O-methyladenosine-3'-phosphate
  modified_base 14: mod_base = OTHER; note = 2'-deoxy-2'-fluoroguanosine-3'-phosphate
  modified_base 15: mod_base = OTHER; note = 2'-O-methyluridine-3'-phosphate
  modified_base 16: mod_base = OTHER; note = 2'-deoxy-2'-fluorouridine-3'-phosphate
  modified_base 17: mod_base = OTHER; note = 2'-O-methyluridine-3'-phosphate
  modified_base 18: mod_base = OTHER; note = 2'-O-methyluridine-3'-phosphate
  modified_base 19: mod_base = OTHER; note = 2'-O-methyluridine-3'-phosphate
  modified_base 20: mod_base = OTHER; note = 2'-O-methylcytidine-3'-phosphate
  modified_base 21: mod_base = OTHER; note = 2'-O-methylcytidine-3'-phosphate
  modified_base 22: mod_base = OTHER; note = 2'-O-methyladenosine-3'-phosphate
  modified_base 23: mod_base = OTHER; note = 2'-O-methylguanosine
tagatctttcagagtttttccag

SEQ ID NO: 4649 - RNA, 23 nt, synthetic construct
  source 1..23: mol_type = other RNA
  modified_base 1: mod_base = OTHER; note = 2'-O-methyluridine-3'-phosphate 5'-(E)-Vinylphosphonate
  modified_base 2: mod_base = OTHER; note = 2'-deoxy-2'-fluorocytidine-3'-phosphate
  modified_base 3: mod_base = OTHER; note = 2'-O-methyladenosine-3'-phosphate
  modified_base 4: mod_base = OTHER; note = 2'-O-methylguanosine-3'-phosphate
  modified_base 5: mod_base = OTHER; note = 2'-O-methyladenosine-3'-phosphate
  modified_base 6: mod_base = OTHER; note = 2'-deoxy-2'-fluorouridine-3'-phosphate
  modified_base 7: mod_base = OTHER; note = 2'-O-methylcytidine-3'-phosphate
  modified_base 8: mod_base = OTHER; note = 2'-O-methyluridine-3'-phosphate
  modified_base 9: mod_base = OTHER; note = 2'-O-methyluridine-3'-phosphate
  modified_base 10: mod_base = OTHER; note = 2'-O-methyluridine-3'-phosphate
  modified_base 11: mod_base = OTHER; note = 2'-O-methylcytidine-3'-phosphate
  modified_base 12: mod_base = OTHER; note = 2'-O-methyladenosine-3'-phosphate
  modified_base 13: mod_base = OTHER; note = 2'-O-methylguanosine-3'-phosphate
  modified_base 14: mod_base = OTHER; note = 2'-deoxy-2'-fluoroadenosine-3'-phosphate
  modified_base 15: mod_base = OTHER; note = 2'-O-methylguanosine-3'-phosphate
  modified_base 16: mod_base = OTHER; note = 2'-deoxy-2'-fluorouridine-3'-phosphate
  modified_base 17: mod_base = OTHER; note = 2'-O-methyluridine-3'-phosphate
  modified_base 18: mod_base = OTHER; note = 2'-O-methyluridine-3'-phosphate
  modified_base 19: mod_base = OTHER; note = 2'-O-methyluridine-3'-phosphate
  modified_base 20: mod_base = OTHER; note = 2'-O-methyluridine-3'-phosphate
  modified_base 21: mod_base = OTHER; note = 2'-O-methylcytidine-3'-phosphate
  modified_base 22: mod_base = OTHER; note = 2'-O-methylcytidine-3'-phosphate
  modified_base 23: mod_base = OTHER; note = 2'-O-methyladenosine
tcagatctttcagagtttttcca

SEQ ID NO: 4650 - RNA, 23 nt, synthetic construct
  source 1..23: mol_type = other RNA
  modified_base 1: mod_base = OTHER; note = 2'-O-methyluridine-3'-phosphate 5'-(E)-Vinylphosphonate
  modified_base 2: mod_base = OTHER; note = 2'-deoxy-2'-fluorouridine-3'-phosphate
  modified_base 3: mod_base = OTHER; note = 2'-O-methylcytidine-3'-phosphate
  modified_base 4: mod_base = OTHER; note = 2'-O-methyladenosine-3'-phosphate
  modified_base 5: mod_base = OTHER; note = 2'-O-methylguanosine-3'-phosphate
  modified_base 6: mod_base = OTHER; note = 2'-deoxy-2'-fluoroadenosine-3'-phosphate
  modified_base 7: mod_base = OTHER; note = 2'-O-methyluridine-3'-phosphate
  modified_base 8: mod_base = OTHER; note = 2'-O-methylcytidine-3'-phosphate
  modified_base 9: mod_base = OTHER; note = 2'-O-methyluridine-3'-phosphate
  modified_base 10: mod_base = OTHER; note = 2'-O-methyluridine-3'-phosphate
  modified_base 11: mod_base = OTHER; note = 2'-O-methyluridine-3'-phosphate
  modified_base 12: mod_base = OTHER; note = 2'-O-methylcytidine-3'-phosphate
  modified_base 13: mod_base = OTHER; note = 2'-O-methyladenosine-3'-phosphate
  modified_base 14: mod_base = OTHER; note = 2'-deoxy-2'-fluoroguanosine-3'-phosphate
  modified_base 15: mod_base = OTHER; note = 2'-O-methyladenosine-3'-phosphate
  modified_base 16: mod_base = OTHER; note = 2'-deoxy-2'-fluoroguanosine-3'-phosphate
  modified_base 17: mod_base = OTHER; note = 2'-O-methyluridine-3'-phosphate
  modified_base 18: mod_base = OTHER; note = 2'-O-methyluridine-3'-phosphate
  modified_base 19: mod_base = OTHER; note = 2'-O-methyluridine-3'-phosphate
  modified_base 20: mod_base = OTHER; note = 2'-O-methyluridine-3'-phosphate
  modified_base 21: mod_base = OTHER; note = 2'-O-methyluridine-3'-phosphate
  modified_base 22: mod_base = OTHER; note = 2'-O-methylcytidine-3'-phosphate
  modified_base 23: mod_base = OTHER; note = 2'-O-methylcytidine
ttcagatctttcagagtttttcc

SEQ ID NO: 4651 - RNA, 23 nt, synthetic construct
  source 1..23: mol_type = other RNA
  modified_base 1: mod_base = OTHER; note = 2'-O-methyluridine-3'-phosphate 5'-(E)-Vinylphosphonate
  modified_base 2: mod_base = OTHER; note = 2'-deoxy-2'-fluoroadenosine-3'-phosphate
  modified_base 3: mod_base = OTHER; note = 2'-O-methyluridine-3'-phosphate
  modified_base 4: mod_base = OTHER; note = 2'-O-methylcytidine-3'-phosphate
  modified_base 5: mod_base = OTHER; note = 2'-O-methyladenosine-3'-phosphate
  modified_base 6: mod_base = OTHER; note = 2'-deoxy-2'-fluoroguanosine-3'-phosphate
  modified_base 7: mod_base = OTHER; note = 2'-O-methyladenosine-3'-phosphate
  modified_base 8: mod_base = OTHER; note = 2'-O-methyluridine-3'-phosphate
  modified_base 9: mod_base = OTHER; note = 2'-O-methylcytidine-3'-phosphate
  modified_base 10: mod_base = OTHER; note = 2'-O-methyluridine-3'-phosphate
  modified_base 11: mod_base = OTHER; note = 2'-O-methyluridine-3'-phosphate
  modified_base 12: mod_base = OTHER; note = 2'-O-methyluridine-3'-phosphate
  modified_base 13: mod_base = OTHER; note = 2'-O-methylcytidine-3'-phosphate
  modified_base 14: mod_base = OTHER; note = 2'-deoxy-2'-fluoroadenosine-3'-phosphate
  modified_base 15: mod_base = OTHER; note = 2'-O-methylguanosine-3'-phosphate
  modified_base 16: mod_base = OTHER; note = 2'-deoxy-2'-fluoroadenosine-3'-phosphate
  modified_base 17: mod_base = OTHER; note = 2'-O-methylguanosine-3'-phosphate
  modified_base 18: mod_base = OTHER; note = 2'-O-methyluridine-3'-phosphate
  modified_base 19: mod_base = OTHER; note = 2'-O-methyluridine-3'-phosphate
  modified_base 20: mod_base = OTHER; note = 2'-O-methyluridine-3'-phosphate
  modified_base 21: mod_base = OTHER; note = 2'-O-methyluridine-3'-phosphate
  modified_base 22: mod_base = OTHER; note = 2'-O-methyluridine-3'-phosphate
  modified_base 23: mod_base = OTHER; note = 2'-O-methylcytidine
tatcagatctttcagagtttttc

SEQ ID NO: 4652 - RNA, 23 nt, synthetic construct
  source 1..23: mol_type = other RNA
  modified_base 1: mod_base = OTHER; note = 2'-O-methyluridine-3'-phosphate 5'-(E)-Vinylphosphonate
  modified_base 2: mod_base = OTHER; note = 2'-deoxy-2'-fluoroadenosine-3'-phosphate
  modified_base 3: mod_base = OTHER; note = 2'-O-methyladenosine-3'-phosphate
  modified_base 4: mod_base = OTHER; note = 2'-O-methyluridine-3'-phosphate
  modified_base 5: mod_base = OTHER; note = 2'-O-methylcytidine-3'-phosphate
  modified_base 6: mod_base = OTHER; note = 2'-deoxy-2'-fluoroadenosine-3'-phosphate
  modified_base 7: mod_base = OTHER; note = 2'-O-methylguanosine-3'-phosphate
  modified_base 8: mod_base = OTHER; note = 2'-O-methyladenosine-3'-phosphate
  modified_base 9: mod_base = OTHER; note = 2'-O-methyluridine-3'-phosphate
  modified_base 10: mod_base = OTHER; note = 2'-O-methylcytidine-3'-phosphate
  modified_base 11: mod_base = OTHER; note = 2'-O-methyluridine-3'-phosphate
  modified_base 12: mod_base = OTHER; note = 2'-O-methyluridine-3'-phosphate
  modified_base 13: mod_base = OTHER; note = 2'-O-methyluridine-3'-phosphate
  modified_base 14: mod_base = OTHER; note = 2'-deoxy-2'-fluorocytidine-3'-phosphate
  modified_base 15: mod_base = OTHER; note = 2'-O-methyladenosine-3'-phosphate
  modified_base 16: mod_base = OTHER; note = 2'-deoxy-2'-fluoroguanosine-3'-phosphate
  modified_base 17: mod_base = OTHER; note = 2'-O-methyladenosine-3'-phosphate
  modified_base 18: mod_base = OTHER; note = 2'-O-methylguanosine-3'-phosphate
  modified_base 19: mod_base = OTHER; note = 2'-O-methyluridine-3'-phosphate
  modified_base 20: mod_base = OTHER; note = 2'-O-methyluridine-3'-phosphate
  modified_base 21: mod_base = OTHER; note = 2'-O-methyluridine-3'-phosphate
  modified_base 22: mod_base = OTHER; note = 2'-O-methyluridine-3'-phosphate
  modified_base 23: mod_base = OTHER; note = 2'-O-methyluridine
taatcagatctttcagagttttt

SEQ ID NO: 4653 - RNA, 23 nt, synthetic construct
  source 1..23: mol_type = other RNA
  modified_base 1: mod_base = OTHER; note = 2'-O-methyluridine-3'-phosphate 5'-(E)-Vinylphosphonate
  modified_base 2: mod_base = OTHER; note = 2'-deoxy-2'-fluoroadenosine-3'-phosphate
  modified_base 3: mod_base = OTHER; note = 2'-O-methyladenosine-3'-phosphate
  modified_base 4: mod_base = OTHER; note = 2'-O-methyladenosine-3'-phosphate
  modified_base 5: mod_base = OTHER; note = 2'-O-methyluridine-3'-phosphate
  modified_base 6: mod_base = OTHER; note = 2'-deoxy-2'-fluorocytidine-3'-phosphate
  modified_base 7: mod_base = OTHER; note = 2'-O-methyladenosine-3'-phosphate
  modified_base 8: mod_base = OTHER; note = 2'-O-methylguanosine-3'-phosphate
  modified_base 9: mod_base = OTHER; note = 2'-O-methyladenosine-3'-phosphate
  modified_base 10: mod_base = OTHER; note = 2'-O-methyluridine-3'-phosphate
  modified_base 11: mod_base = OTHER; note = 2'-O-methylcytidine-3'-phosphate
  modified_base 12: mod_base = OTHER; note = 2'-O-methyluridine-3'-phosphate
  modified_base 13: mod_base = OTHER; note = 2'-O-methyluridine-3'-phosphate
  modified_base 14: mod_base = OTHER; note = 2'-deoxy-2'-fluorouridine-3'-phosphate
  modified_base 15: mod_base = OTHER; note = 2'-O-methylcytidine-3'-phosphate
  modified_base 16: mod_base = OTHER; note = 2'-deoxy-2'-fluoroadenosine-3'-phosphate
  modified_base 17: mod_base = OTHER; note = 2'-O-methylguanosine-3'-phosphate
  modified_base 18: mod_base = OTHER; note = 2'-O-methyladenosine-3'-phosphate
  modified_base 19: mod_base = OTHER; note = 2'-O-methylguanosine-3'-phosphate
  modified_base 20: mod_base = OTHER; note = 2'-O-methyluridine-3'-phosphate
  modified_base 21: mod_base = OTHER; note = 2'-O-methyluridine-3'-phosphate
  modified_base 22: mod_base = OTHER; note = 2'-O-methyluridine-3'-phosphate
  modified_base 23: mod_base = OTHER; note = 2'-O-methyluridine
taaatcagatctttcagagtttt

SEQ ID NO: 4654 - RNA, 23 nt, synthetic construct
  source 1..23: mol_type = other RNA
  modified_base 1: mod_base = OTHER; note = 2'-O-methyluridine-3'-phosphate 5'-(E)-Vinylphosphonate
  modified_base 2: mod_base = OTHER; note = 2'-deoxy-2'-fluorouridine-3'-phosphate
  modified_base 3: mod_base = OTHER; note = 2'-O-methyladenosine-3'-phosphate
  modified_base 4: mod_base = OTHER; note = 2'-O-methyladenosine-3'-phosphate
  modified_base 5: mod_base = OTHER; note = 2'-O-methyladenosine-3'-phosphate
  modified_base 6: mod_base = OTHER; note = 2'-deoxy-2'-fluorouridine-3'-phosphate
  modified_base 7: mod_base = OTHER; note = 2'-O-methylcytidine-3'-phosphate
  modified_base 8: mod_base = OTHER; note = 2'-O-methyladenosine-3'-phosphate
  modified_base 9: mod_base = OTHER; note = 2'-O-methylguanosine-3'-phosphate
  modified_base 10: mod_base = OTHER; note = 2'-O-methyladenosine-3'-phosphate
  modified_base 11: mod_base = OTHER; note = 2'-O-methyluridine-3'-phosphate
  modified_base 12: mod_base = OTHER; note = 2'-O-methylcytidine-3'-phosphate
  modified_base 13: mod_base = OTHER; note = 2'-O-methyluridine-3'-phosphate
  modified_base 14: mod_base = OTHER; note = 2'-deoxy-2'-fluorouridine-3'-phosphate
  modified_base 15: mod_base = OTHER; note = 2'-O-methyluridine-3'-phosphate
  modified_base 16: mod_base = OTHER; note = 2'-deoxy-2'-fluorocytidine-3'-phosphate
  modified_base 17: mod_base = OTHER; note = 2'-O-methyladenosine-3'-phosphate
  modified_base 18: mod_base = OTHER; note = 2'-O-methylguanosine-3'-phosphate
  modified_base 19: mod_base = OTHER; note = 2'-O-methyladenosine-3'-phosphate
  modified_base 20: mod_base = OTHER; note = 2'-O-methylguanosine-3'-phosphate
  modified_base 21: mod_base = OTHER; note = 2'-O-methyluridine-3'-phosphate
  modified_base 22: mod_base = OTHER; note = 2'-O-methyluridine-3'-phosphate
  modified_base 23: mod_base = OTHER; note = 2'-O-methyluridine
ttaaatcagatctttcagagttt

SEQ ID NO: 4655 - RNA, 23 nt, synthetic construct
  source 1..23: mol_type = other RNA
  modified_base 1: mod_base = OTHER; note = 2'-O-methyluridine-3'-phosphate 5'-(E)-Vinylphosphonate
  modified_base 2: mod_base = OTHER; note = 2'-deoxy-2'-fluoroadenosine-3'-phosphate
  modified_base 3: mod_base = OTHER; note = 2'-O-methyluridine-3'-phosphate
  modified_base 4: mod_base = OTHER; note = 2'-O-methyladenosine-3'-phosphate
  modified_base 5: mod_base = OTHER; note = 2'-O-methyladenosine-3'-phosphate
  modified_base 6: mod_base = OTHER; note = 2'-deoxy-2'-fluoroadenosine-3'-phosphate
  modified_base 7: mod_base = OTHER; note = 2'-O-methyluridine-3'-phosphate
  modified_base 8: mod_base = OTHER; note = 2'-O-methylcytidine-3'-phosphate
  modified_base 9: mod_base = OTHER; note = 2'-O-methyladenosine-3'-phosphate
  modified_base 10: mod_base = OTHER; note = 2'-O-methylguanosine-3'-phosphate
  modified_base 11: mod_base = OTHER; note = 2'-O-methyladenosine-3'-phosphate
  modified_base 12: mod_base = OTHER; note = 2'-O-methyluridine-3'-phosphate
  modified_base 13: mod_base = OTHER; note = 2'-O-methylcytidine-3'-phosphate
  modified_base 14: mod_base = OTHER; note = 2'-deoxy-2'-fluorouridine-3'-phosphate
  modified_base 15: mod_base = OTHER; note = 2'-O-methyluridine-3'-phosphate
  modified_base 16: mod_base = OTHER; note = 2'-deoxy-2'-fluorouridine-3'-phosphate
  modified_base 17: mod_base = OTHER; note = 2'-O-methylcytidine-3'-phosphate
  modified_base 18: mod_base = OTHER; note = 2'-O-methyladenosine-3'-phosphate
  modified_base 19: mod_base = OTHER; note = 2'-O-methylguanosine-3'-phosphate
  modified_base 20: mod_base = OTHER; note = 2'-O-methyladenosine-3'-phosphate
  modified_base 21: mod_base = OTHER; note = 2'-O-methylguanosine-3'-phosphate
  modified_base 22: mod_base = OTHER; note = 2'-O-methyluridine-3'-phosphate
  modified_base 23: mod_base = OTHER; note = 2'-O-methyluridine
tataaatcagatctttcagagtt

SEQ ID NO: 4656 - RNA, 23 nt, synthetic construct
  source 1..23: mol_type = other RNA
  modified_base 1: mod_base = OTHER; note = 2'-O-methyluridine-3'-phosphate 5'-(E)-Vinylphosphonate
  modified_base 2: mod_base = OTHER; note = 2'-deoxy-2'-fluorocytidine-3'-phosphate
  modified_base 3: mod_base = OTHER; note = 2'-O-methyladenosine-3'-phosphate
  modified_base 4: mod_base = OTHER; note = 2'-O-methyluridine-3'-phosphate
  modified_base 5: mod_base = OTHER; note = 2'-O-methyladenosine-3'-phosphate
  modified_base 6: mod_base = OTHER; note = 2'-deoxy-2'-fluoroadenosine-3'-phosphate
  modified_base 7: mod_base = OTHER; note = 2'-O-methyladenosine-3'-phosphate
  modified_base 8: mod_base = OTHER; note = 2'-O-methyluridine-3'-phosphate
  modified_base 9: mod_base = OTHER; note = 2'-O-methylcytidine-3'-phosphate
  modified_base 10: mod_base = OTHER; note = 2'-O-methyladenosine-3'-phosphate
  modified_base 11: mod_base = OTHER; note = 2'-O-methylguanosine-3'-phosphate
  modified_base 12: mod_base = OTHER; note = 2'-O-methyladenosine-3'-phosphate
  modified_base 13: mod_base = OTHER; note = 2'-O-methyluridine-3'-phosphate
  modified_base 14: mod_base = OTHER; note = 2'-deoxy-2'-fluorocytidine-3'-phosphate
  modified_base 15: mod_base = OTHER; note = 2'-O-methyluridine-3'-phosphate
  modified_base 16: mod_base = OTHER; note = 2'-deoxy-2'-fluorouridine-3'-phosphate
  modified_base 17: mod_base = OTHER; note = 2'-O-methyluridine-3'-phosphate
  modified_base 18: mod_base = OTHER; note = 2'-O-methylcytidine-3'-phosphate
  modified_base 19: mod_base = OTHER; note = 2'-O-methyladenosine-3'-phosphate
  modified_base 20: mod_base = OTHER; note = 2'-O-methylguanosine-3'-phosphate
  modified_base 21: mod_base = OTHER; note = 2'-O-methyladenosine-3'-phosphate
  modified_base 22: mod_base = OTHER; note = 2'-O-methylguanosine-3'-phosphate
  modified_base 23: mod_base = OTHER; note = 2'-O-methyluridine
tcataaatcagatctttcagagt

SEQ ID NO: 4657 - RNA, 23 nt, synthetic construct
  source 1..23: mol_type = other RNA
  modified_base 1: mod_base = OTHER; note = 2'-O-methyluridine-3'-phosphate 5'-(E)-Vinylphosphonate
  modified_base 2: mod_base = OTHER; note = 2'-deoxy-2'-fluorouridine-3'-phosphate
  modified_base 3: mod_base = OTHER; note = 2'-O-methylcytidine-3'-phosphate
  modified_base 4: mod_base = OTHER; note = 2'-O-methyladenosine-3'-phosphate
  modified_base 5: mod_base = OTHER; note = 2'-O-methyluridine-3'-phosphate
  modified_base 6: mod_base = OTHER; note = 2'-deoxy-2'-fluoroadenosine-3'-phosphate
  modified_base 7: mod_base = OTHER; note = 2'-O-methyladenosine-3'-phosphate
  modified_base 8: mod_base = OTHER; note = 2'-O-methyladenosine-3'-phosphate
  modified_base 9: mod_base = OTHER; note = 2'-O-methyluridine-3'-phosphate
  modified_base 10: mod_base = OTHER; note = 2'-O-methylcytidine-3'-phosphate
  modified_base 11: mod_base = OTHER; note = 2'-O-methyladenosine-3'-phosphate
  modified_base 12: mod_base = OTHER; note = 2'-O-methylguanosine-3'-phosphate
  modified_base 13: mod_base = OTHER; note = 2'-O-methyladenosine-3'-phosphate
  modified_base 14: mod_base = OTHER; note = 2'-deoxy-2'-fluorouridine-3'-phosphate
  modified_base 15: mod_base = OTHER; note = 2'-O-methylcytidine-3'-phosphate
  modified_base 16: mod_base = OTHER; note = 2'-deoxy-2'-fluorouridine-3'-phosphate
  modified_base 17: mod_base = OTHER; note = 2'-O-methyluridine-3'-phosphate
  modified_base 18: mod_base = OTHER; note = 2'-O-methyluridine-3'-phosphate
  modified_base 19: mod_base = OTHER; note = 2'-O-methylcytidine-3'-phosphate
  modified_base 20: mod_base = OTHER; note = 2'-O-methyladenosine-3'-phosphate
  modified_base 21: mod_base = OTHER; note = 2'-O-methylguanosine-3'-phosphate
  modified_base 22: mod_base = OTHER; note = 2'-O-methyladenosine-3'-phosphate
  modified_base 23: mod_base = OTHER; note = 2'-O-methylguanosine
ttcataaatcagatctttcagag

SEQ ID NO: 4658 - RNA, 23 nt, synthetic construct
  source 1..23: mol_type = other RNA
  modified_base 1: mod_base = OTHER; note = 2'-O-methyluridine-3'-phosphate 5'-(E)-Vinylphosphonate
  modified_base 2: mod_base = OTHER; note = 2'-deoxy-2'-fluoroadenosine-3'-phosphate
  modified_base 3: mod_base = OTHER; note = 2'-O-methyluridine-3'-phosphate
  modified_base 4: mod_base = OTHER; note = 2'-O-methylcytidine-3'-phosphate
  modified_base 5: mod_base = OTHER; note = 2'-O-methyladenosine-3'-phosphate
  modified_base 6: mod_base = OTHER; note = 2'-deoxy-2'-fluorouridine-3'-phosphate
  modified_base 7: mod_base = OTHER; note = 2'-O-methyladenosine-3'-phosphate
  modified_base 8: mod_base = OTHER; note = 2'-O-methyladenosine-3'-phosphate
  modified_base 9: mod_base = OTHER; note = 2'-O-methyladenosine-3'-phosphate
  modified_base 10: mod_base = OTHER; note = 2'-O-methyluridine-3'-phosphate
  modified_base 11: mod_base = OTHER; note = 2'-O-methylcytidine-3'-phosphate
  modified_base 12: mod_base = OTHER; note = 2'-O-methyladenosine-3'-phosphate
  modified_base 13: mod_base = OTHER; note = 2'-O-methylguanosine-3'-phosphate
  modified_base 14: mod_base = OTHER; note = 2'-deoxy-2'-fluoroadenosine-3'-phosphate
  modified_base 15: mod_base = OTHER; note = 2'-O-methyluridine-3'-phosphate
  modified_base 16: mod_base = OTHER; note = 2'-deoxy-2'-fluorocytidine-3'-phosphate
  modified_base 17: mod_base = OTHER; note = 2'-O-methyluridine-3'-phosphate
  modified_base 18: mod_base = OTHER; note = 2'-O-methyluridine-3'-phosphate
  modified_base 19: mod_base = OTHER; note = 2'-O-methyluridine-3'-phosphate
  modified_base 20: mod_base = OTHER; note = 2'-O-methylcytidine-3'-phosphate
  modified_base 21: mod_base = OTHER; note = 2'-O-methyladenosine-3'-phosphate
  modified_base 22: mod_base = OTHER; note = 2'-O-methylguanosine-3'-phosphate
  modified_base 23: mod_base = OTHER; note = 2'-O-methyladenosine
tatcataaatcagatctttcaga

SEQ ID NO: 4659 - RNA, 23 nt, synthetic construct
  source 1..23: mol_type = other RNA
  modified_base 1: mod_base = OTHER; note = 2'-O-methyluridine-3'-phosphate 5'-(E)-Vinylphosphonate
  modified_base 2: mod_base = OTHER; note = 2'-deoxy-2'-fluorocytidine-3'-phosphate
  modified_base 3: mod_base = OTHER; note = 2'-O-methyladenosine-3'-phosphate
  modified_base 4: mod_base = OTHER; note = 2'-O-methyluridine-3'-phosphate
  modified_base 5: mod_base = OTHER; note = 2'-O-methylcytidine-3'-phosphate
  modified_base 6: mod_base = OTHER; note = 2'-deoxy-2'-fluoroadenosine-3'-phosphate
  modified_base 7: mod_base = OTHER; note = 2'-O-methyluridine-3'-phosphate
  modified_base 8: mod_base = OTHER; note = 2'-O-methyladenosine-3'-phosphate
  modified_base 9: mod_base = OTHER; note = 2'-O-methyladenosine-3'-phosphate
  modified_base 10: mod_base = OTHER; note = 2'-O-methyladenosine-3'-phosphate
  modified_base 11: mod_base = OTHER; note = 2'-O-methyluridine-3'-phosphate
  modified_base 12: mod_base = OTHER; note = 2'-O-methylcytidine-3'-phosphate
  modified_base 13: mod_base = OTHER; note = 2'-O-methyladenosine-3'-phosphate
  modified_base 14: mod_base = OTHER; note = 2'-deoxy-2'-fluoroguanosine-3'-phosphate
  modified_base 15: mod_base = OTHER; note = 2'-O-methyladenosine-3'-phosphate
  modified_base 16: mod_base = OTHER; note = 2'-deoxy-2'-fluorouridine-3'-phosphate
  modified_base 17: mod_base = OTHER; note = 2'-O-methylcytidine-3'-phosphate
  modified_base 18: mod_base = OTHER; note = 2'-O-methyluridine-3'-phosphate
  modified_base 19: mod_base = OTHER; note = 2'-O-methyluridine-3'-phosphate
  modified_base 20: mod_base = OTHER; note = 2'-O-methyluridine-3'-phosphate
  modified_base 21: mod_base = OTHER; note = 2'-O-methylcytidine-3'-phosphate
  modified_base 22: mod_base = OTHER; note = 2'-O-methyladenosine-3'-phosphate
  modified_base 23: mod_base = OTHER; note = 2'-O-methylguanosine
tcatcataaatcagatctttcag

SEQ ID NO: 4660 - RNA, 23 nt, synthetic construct
  source 1..23: mol_type = other RNA
  modified_base 1: mod_base = OTHER; note = 2'-O-methyluridine-3'-phosphate 5'-(E)-Vinylphosphonate
  modified_base 2: mod_base = OTHER; note = 2'-deoxy-2'-fluoroadenosine-3'-phosphate
  modified_base 3: mod_base = OTHER; note = 2'-O-methylcytidine-3'-phosphate
  modified_base 4: mod_base = OTHER; note = 2'-O-methyladenosine-3'-phosphate
  modified_base 5: mod_base = OTHER; note = 2'-O-methyluridine-3'-phosphate
  modified_base 6: mod_base = OTHER; note = 2'-deoxy-2'-fluorocytidine-3'-phosphate
  modified_base 7: mod_base = OTHER; note = 2'-O-methyladenosine-3'-phosphate
  modified_base 8: mod_base = OTHER; note = 2'-O-methyluridine-3'-phosphate
  modified_base 9: mod_base = OTHER; note = 2'-O-methyladenosine-3'-phosphate
  modified_base 10: mod_base = OTHER; note = 2'-O-methyladenosine-3'-phosphate
  modified_base 11: mod_base = OTHER; note = 2'-O-methyladenosine-3'-phosphate
  modified_base 12: mod_base = OTHER; note = 2'-O-methyluridine-3'-phosphate
  modified_base 13: mod_base = OTHER; note = 2'-O-methylcytidine-3'-phosphate
  modified_base 14: mod_base = OTHER; note = 2'-deoxy-2'-fluoroadenosine-3'-phosphate
  modified_base 15: mod_base = OTHER; note = 2'-O-methylguanosine-3'-phosphate
  modified_base 16: mod_base = OTHER; note = 2'-deoxy-2'-fluoroadenosine-3'-phosphate
  modified_base 17: mod_base = OTHER; note = 2'-O-methyluridine-3'-phosphate
  modified_base 18: mod_base = OTHER; note = 2'-O-methylcytidine-3'-phosphate
  modified_base 19: mod_base = OTHER; note = 2'-O-methyluridine-3'-phosphate
  modified_base 20: mod_base = OTHER; note = 2'-O-methyluridine-3'-phosphate
  modified_base 21: mod_base = OTHER; note = 2'-O-methyluridine-3'-phosphate
  modified_base 22: mod_base = OTHER; note = 2'-O-methylcytidine-3'-phosphate
  modified_base 23: mod_base = OTHER; note = 2'-O-methyladenosine
tacatcataaatcagatctttca

SEQ ID NO: 4661 - RNA, 23 nt, synthetic construct
  source 1..23: mol_type = other RNA
  modified_base 1: mod_base = OTHER; note = 2'-O-methyluridine-3'-phosphate 5'-(E)-Vinylphosphonate
  modified_base 2: mod_base = OTHER; note = 2'-deoxy-2'-fluorocytidine-3'-phosphate
  modified_base 3: mod_base = OTHER; note = 2'-O-methyladenosine-3'-phosphate
  modified_base 4: mod_base = OTHER; note = 2'-O-methylcytidine-3'-phosphate
  modified_base 5: mod_base = OTHER; note = 2'-O-methyladenosine-3'-phosphate
  modified_base 6: mod_base = OTHER; note = 2'-deoxy-2'-fluorouridine-3'-phosphate
  modified_base 7: mod_base = OTHER; note = 2'-O-methylcytidine-3'-phosphate
  modified_base 8: mod_base = OTHER; note = 2'-O-methyladenosine-3'-phosphate
  modified_base 9: mod_base = OTHER; note = 2'-O-methyluridine-3'-phosphate
  modified_base 10: mod_base = OTHER; note = 2'-O-methyladenosine-3'-phosphate
  modified_base 11: mod_base = OTHER; note = 2'-O-methyladenosine-3'-phosphate
  modified_base 12: mod_base = OTHER; note = 2'-O-methyladenosine-3'-phosphate
  modified_base 13: mod_base = OTHER; note = 2'-O-methyluridine-3'-phosphate
  modified_base 14: mod_base = OTHER; note = 2'-deoxy-2'-fluorocytidine-3'-phosphate
  modified_base 15: mod_base = OTHER; note = 2'-O-methyladenosine-3'-phosphate
  modified_base 16: mod_base = OTHER; note = 2'-deoxy-2'-fluoroguanosine-3'-phosphate
  modified_base 17: mod_base = OTHER; note = 2'-O-methyladenosine-3'-phosphate
  modified_base 18: mod_base = OTHER; note = 2'-O-methyluridine-3'-phosphate
  modified_base 19: mod_base = OTHER; note = 2'-O-methylcytidine-3'-phosphate
  modified_base 20: mod_base = OTHER; note = 2'-O-methyluridine-3'-phosphate
  modified_base 21: mod_base = OTHER; note = 2'-O-methyluridine-3'-phosphate
  modified_base 22: mod_base = OTHER; note = 2'-O-methyluridine-3'-phosphate
  modified_base 23: mod_base = OTHER; note = 2'-O-methylcytidine
tcacatcataaatcagatctttc

SEQ ID NO: 4662 - RNA, 23 nt, synthetic construct
  source 1..23: mol_type = other RNA
  modified_base 1: mod_base = OTHER; note = 2'-O-methyluridine-3'-phosphate 5'-(E)-Vinylphosphonate
  modified_base 2: mod_base = OTHER; note = 2'-deoxy-2'-fluorouridine-3'-phosphate
  modified_base 3: mod_base = OTHER; note = 2'-O-methylcytidine-3'-phosphate
  modified_base 4: mod_base = OTHER; note = 2'-O-methyladenosine-3'-phosphate
  modified_base 5: mod_base = OTHER; note = 2'-O-methylcytidine-3'-phosphate
  modified_base 6: mod_base = OTHER; note = 2'-deoxy-2'-fluoroadenosine-3'-phosphate
  modified_base 7: mod_base = OTHER; note = 2'-O-methyluridine-3'-phosphate
  modified_base 8: mod_base = OTHER; note = 2'-O-methylcytidine-3'-phosphate
  modified_base 9: mod_base = OTHER; note = 2'-O-methyladenosine-3'-phosphate
  modified_base 10: mod_base = OTHER; note = 2'-O-methyluridine-3'-phosphate
  modified_base 11: mod_base = OTHER; note = 2'-O-methyladenosine-3'-phosphate
  modified_base 12: mod_base = OTHER; note = 2'-O-methyladenosine-3'-phosphate
  modified_base 13: mod_base = OTHER; note = 2'-O-methyladenosine-3'-phosphate
  modified_base 14: mod_base = OTHER; note = 2'-deoxy-2'-fluorouridine-3'-phosphate
  modified_base 15: mod_base = OTHER; note = 2'-O-methylcytidine-3'-phosphate
  modified_base 16: mod_base = OTHER; note = 2'-deoxy-2'-fluoroadenosine-3'-phosphate
  modified_base 17: mod_base = OTHER; note = 2'-O-methylguanosine-3'-phosphate
  modified_base 18: mod_base = OTHER; note = 2'-O-methyladenosine-3'-phosphate
  modified_base 19: mod_base = OTHER; note = 2'-O-methyluridine-3'-phosphate
  modified_base 20: mod_base = OTHER; note = 2'-O-methylcytidine-3'-phosphate
  modified_base 21: mod_base = OTHER; note = 2'-O-methyluridine-3'-phosphate
  modified_base 22: mod_base = OTHER; note = 2'-O-methyluridine-3'-phosphate
  modified_base 23: mod_base = OTHER; note = 2'-O-methyluridine
ttcacatcataaatcagatcttt

SEQ ID NO: 4663 - RNA, 23 nt, synthetic construct
  source 1..23: mol_type = other RNA
  modified_base 1: mod_base = OTHER; note = 2'-O-methyluridine-3'-phosphate 5'-(E)-Vinylphosphonate
  modified_base 2: mod_base = OTHER; note = 2'-deoxy-2'-fluoroguanosine-3'-phosphate
  modified_base 3: mod_base = OTHER; note = 2'-O-methyluridine-3'-phosphate
  modified_base 4: mod_base = OTHER; note = 2'-O-methylcytidine-3'-phosphate
  modified_base 5: mod_base = OTHER; note = 2'-O-methyladenosine-3'-phosphate
  modified_base 6: mod_base = OTHER; note = 2'-deoxy-2'-fluorocytidine-3'-phosphate
  modified_base 7: mod_base = OTHER; note = 2'-O-methyladenosine-3'-phosphate
  modified_base 8: mod_base = OTHER; note = 2'-O-methyluridine-3'-phosphate
  modified_base 9: mod_base = OTHER; note = 2'-O-methylcytidine-3'-phosphate
  modified_base 10: mod_base = OTHER; note = 2'-O-methyladenosine-3'-phosphate
  modified_base 11: mod_base = OTHER; note = 2'-O-methyluridine-3'-phosphate
  modified_base 12: mod_base = OTHER; note = 2'-O-methyladenosine-3'-phosphate
  modified_base 13: mod_base = OTHER; note = 2'-O-methyladenosine-3'-phosphate
  modified_base 14: mod_base = OTHER; note = 2'-deoxy-2'-fluoroadenosine-3'-phosphate
  modified_base 15: mod_base = OTHER; note = 2'-O-methyluridine-3'-phosphate
  modified_base 16: mod_base = OTHER; note = 2'-deoxy-2'-fluorocytidine-3'-phosphate
  modified_base 17: mod_base = OTHER; note = 2'-O-methyladenosine-3'-phosphate
  modified_base 18: mod_base = OTHER; note = 2'-O-methylguanosine-3'-phosphate
  modified_base 19: mod_base = OTHER; note = 2'-O-methyladenosine-3'-phosphate
  modified_base 20: mod_base = OTHER; note = 2'-O-methyluridine-3'-phosphate
  modified_base 21: mod_base = OTHER; note = 2'-O-methylcytidine-3'-phosphate
  modified_base 22: mod_base = OTHER; note = 2'-O-methyluridine-3'-phosphate
  modified_base 23: mod_base = OTHER; note = 2'-O-methyluridine
tgtcacatcataaatcagatctt

SEQ ID NO: 4664 - RNA, 23 nt, synthetic construct
  source 1..23: mol_type = other RNA
  modified_base 1: mod_base = OTHER; note = 2'-O-methyluridine-3'-phosphate 5'-(E)-Vinylphosphonate
  modified_base 2: mod_base = OTHER; note = 2'-deoxy-2'-fluorouridine-3'-phosphate
  modified_base 3: mod_base = OTHER; note = 2'-O-methyluridine-3'-phosphate
  modified_base 4: mod_base = OTHER; note = 2'-O-methylguanosine-3'-phosphate
  modified_base 5: mod_base = OTHER; note = 2'-O-methyladenosine-3'-phosphate
  modified_base 6: mod_base = OTHER; note = 2'-deoxy-2'-fluoroadenosine-3'-phosphate
  modified_base 7: mod_base = OTHER; note = 2'-O-methylcytidine-3'-phosphate
  modified_base 8: mod_base = OTHER; note = 2'-O-methylcytidine-3'-phosphate
  modified_base 9: mod_base = OTHER; note = 2'-O-methyladenosine-3'-phosphate
  modified_base 10: mod_base = OTHER; note = 2'-O-methyladenosine-3'-phosphate
  modified_base 11: mod_base = OTHER; note = 2'-O-methylcytidine-3'-phosphate
  modified_base 12: mod_base = OTHER; note = 2'-O-methyladenosine-3'-phosphate
  modified_base 13: mod_base = OTHER; note = 2'-O-methylguanosine-3'-phosphate
  modified_base 14: mod_base = OTHER; note = 2'-deoxy-2'-fluoroadenosine-3'-phosphate
  modified_base 15: mod_base = OTHER; note = 2'-O-methylguanosine-3'-phosphate
  modified_base 16: mod_base = OTHER; note = 2'-deoxy-2'-fluoroguanosine-3'-phosphate
  modified_base 17: mod_base = OTHER; note = 2'-O-methyluridine-3'-phosphate
  modified_base 18: mod_base = OTHER; note = 2'-O-methyladenosine-3'-phosphate
  modified_base 19: mod_base = OTHER; note = 2'-O-methylguanosine-3'-phosphate
  modified_base 20: mod_base = OTHER; note = 2'-O-methyladenosine-3'-phosphate
  modified_base 21: mod_base = OTHER; note = 2'-O-methylcytidine-3'-phosphate
  modified_base 22: mod_base = OTHER; note = 2'-O-methylcytidine-3'-phosphate
  modified_base 23: mod_base = OTHER; note = 2'-O-methyladenosine
tttgaaccaacagaggtagacca

SEQ ID NO: 4665 - RNA, 23 nt, synthetic construct
  source 1..23: mol_type = other RNA
  modified_base 1: mod_base = OTHER; note = 2'-O-methyluridine-3'-phosphate 5'-(E)-Vinylphosphonate
  modified_base 2: mod_base = OTHER; note = 2'-deoxy-2'-fluorouridine-3'-phosphate
  modified_base 3: mod_base = OTHER; note = 2'-O-methyluridine-3'-phosphate
  modified_base 4: mod_base = OTHER; note = 2'-O-methyluridine-3'-phosphate
  modified_base 5: mod_base = OTHER; note = 2'-O-methylguanosine-3'-phosphate
  modified_base 6: mod_base = OTHER; note = 2'-deoxy-2'-fluoroadenosine-3'-phosphate
  modified_base 7: mod_base = OTHER; note = 2'-O-methyladenosine-3'-phosphate
  modified_base 8: mod_base = OTHER; note = 2'-O-methylcytidine-3'-phosphate
  modified_base 9: mod_base = OTHER; note = 2'-O-methylcytidine-3'-phosphate
  modified_base 10: mod_base = OTHER; note = 2'-O-methyladenosine-3'-phosphate
  modified_base 11: mod_base = OTHER; note = 2'-O-methyladenosine-3'-phosphate
  modified_base 12: mod_base = OTHER; note = 2'-O-methylcytidine-3'-phosphate
  modified_base 13: mod_base = OTHER; note = 2'-O-methyladenosine-3'-phosphate
  modified_base 14: mod_base = OTHER; note = 2'-deoxy-2'-fluoroguanosine-3'-phosphate
  modified_base 15: mod_base = OTHER; note = 2'-O-methyladenosine-3'-phosphate
  modified_base 16: mod_base = OTHER; note = 2'-deoxy-2'-fluoroguanosine-3'-phosphate
  modified_base 17: mod_base = OTHER; note = 2'-O-methylguanosine-3'-phosphate
  modified_base 18: mod_base = OTHER; note = 2'-O-methyluridine-3'-phosphate
  modified_base 19: mod_base = OTHER; note = 2'-O-methyladenosine-3'-phosphate
  modified_base 20: mod_base = OTHER; note = 2'-O-methylguanosine-3'-phosphate
  modified_base 21: mod_base = OTHER; note = 2'-O-methyladenosine-3'-phosphate
  modified_base 22: mod_base = OTHER; note = 2'-O-methylcytidine-3'-phosphate
  modified_base 23: mod_base = OTHER; note = 2'-O-methylcytidine
ttttgaaccaacagaggtagacc

SEQ ID NO: 4666 - RNA, 23 nt, synthetic construct
  source 1..23: mol_type = other RNA
  modified_base 1: mod_base = OTHER; note = 2'-O-methyluridine-3'-phosphate 5'-(E)-Vinylphosphonate
  modified_base 2: mod_base = OTHER; note = 2'-deoxy-2'-fluorouridine-3'-phosphate
  modified_base 3: mod_base = OTHER; note = 2'-O-methylcytidine-3'-phosphate
  modified_base 4: mod_base = OTHER; note = 2'-O-methylcytidine-3'-phosphate
  modified_base 5: mod_base = OTHER; note = 2'-O-methyluridine-3'-phosphate
  modified_base 6: mod_base = OTHER; note = 2'-deoxy-2'-fluorouridine-3'-phosphate
  modified_base 7: mod_base = OTHER; note = 2'-O-methyluridine-3'-phosphate
  modified_base 8: mod_base = OTHER; note = 2'-O-methylguanosine-3'-phosphate
  modified_base 9: mod_base = OTHER; note = 2'-O-methyladenosine-3'-phosphate
  modified_base 10: mod_base = OTHER; note = 2'-O-methyladenosine-3'-phosphate
  modified_base 11: mod_base = OTHER; note = 2'-O-methylcytidine-3'-phosphate
  modified_base 12: mod_base = OTHER; note = 2'-O-methylcytidine-3'-phosphate
  modified_base 13: mod_base = OTHER; note = 2'-O-methyladenosine-3'-phosphate
  modified_base 14: mod_base = OTHER; note = 2'-deoxy-2'-fluoroadenosine-3'-phosphate
  modified_base 15: mod_base = OTHER; note = 2'-O-methylcytidine-3'-phosphate
  modified_base 16: mod_base = OTHER; note = 2'-deoxy-2'-fluoroadenosine-3'-phosphate
  modified_base 17: mod_base = OTHER; note = 2'-O-methylguanosine-3'-phosphate
  modified_base 18: mod_base = OTHER; note = 2'-O-methyladenosine-3'-phosphate
  modified_base 19: mod_base = OTHER; note = 2'-O-methylguanosine-3'-phosphate
  modified_base 20: mod_base = OTHER; note = 2'-O-methylguanosine-3'-phosphate
  modified_base 21: mod_base = OTHER; note = 2'-O-methyluridine-3'-phosphate
  modified_base 22: mod_base = OTHER; note = 2'-O-methyladenosine-3'-phosphate
  modified_base 23: mod_base = OTHER; note = 2'-O-methylguanosine
ttcctttgaaccaacagaggtag

SEQ ID NO: 4667 - RNA, 23 nt, synthetic construct
  source 1..23: mol_type = other RNA
  modified_base 1: mod_base = OTHER; note = 2'-O-methyluridine-3'-phosphate 5'-(E)-Vinylphosphonate
  modified_base 2: mod_base = OTHER; note = 2'-deoxy-2'-fluoroguanosine-3'-phosphate
  modified_base 3: mod_base = OTHER; note = 2'-O-methyluridine-3'-phosphate
  modified_base 4: mod_base = OTHER; note = 2'-O-methylcytidine-3'-phosphate
  modified_base 5: mod_base = OTHER; note = 2'-O-methylcytidine-3'-phosphate
  modified_base 6: mod_base = OTHER; note = 2'-deoxy-2'-fluorouridine-3'-phosphate
  modified_base 7: mod_base = OTHER; note = 2'-O-methyluridine-3'-phosphate
  modified_base 8: mod_base = OTHER; note = 2'-O-methyluridine-3'-phosphate
  modified_base 9: mod_base = OTHER; note = 2'-O-methylguanosine-3'-phosphate
  modified_base 10: mod_base = OTHER; note = 2'-O-methyladenosine-3'-phosphate
  modified_base 11: mod_base = OTHER; note = 2'-O-methyladenosine-3'-phosphate
  modified_base 12: mod_base = OTHER; note = 2'-O-methylcytidine-3'-phosphate
  modified_base 13: mod_base = OTHER; note = 2'-O-methylcytidine-3'-phosphate
  modified_base 14: mod_base = OTHER; note = 2'-deoxy-2'-fluoroadenosine-3'-phosphate
  modified_base 15: mod_base = OTHER; note = 2'-O-methyladenosine-3'-phosphate
  modified_base 16: mod_base = OTHER; note = 2'-deoxy-2'-fluorocytidine-3'-phosphate
  modified_base 17: mod_base = OTHER; note = 2'-O-methyladenosine-3'-phosphate
  modified_base 18: mod_base = OTHER; note = 2'-O-methylguanosine-3'-phosphate
  modified_base 19: mod_base = OTHER; note = 2'-O-methyladenosine-3'-phosphate
  modified_base 20: mod_base = OTHER; note = 2'-O-methylguanosine-3'-phosphate
  modified_base 21: mod_base = OTHER; note = 2'-O-methylguanosine-3'-phosphate
  modified_base 22: mod_base = OTHER; note = 2'-O-methyluridine-3'-phosphate
  modified_base 23: mod_base = OTHER; note = 2'-O-methyladenosine
tgtcctttgaaccaacagaggta

SEQ ID NO: 4668 - RNA, 23 nt, synthetic construct
  source 1..23: mol_type = other RNA
  modified_base 1: mod_base = OTHER; note = 2'-O-methyluridine-3'-phosphate 5'-(E)-Vinylphosphonate
  modified_base 2: mod_base = OTHER; note = 2'-deoxy-2'-fluoroadenosine-3'-phosphate
  modified_base 3: mod_base = OTHER; note = 2'-O-methyluridine-3'-phosphate
  modified_base 4: mod_base = OTHER; note = 2'-O-methyluridine-3'-phosphate
  modified_base 5: mod_base = OTHER; note = 2'-O-methylguanosine-3'-phosphate
  modified_base 6: mod_base = OTHER; note = 2'-deoxy-2'-fluorouridine-3'-phosphate
  modified_base 7: mod_base = OTHER; note = 2'-O-methylcytidine-3'-phosphate
  modified_base 8: mod_base = OTHER; note = 2'-O-methylcytidine-3'-phosphate
  modified_base 9: mod_base = OTHER; note = 2'-O-methyluridine-3'-phosphate
  modified_base 10: mod_base = OTHER; note = 2'-O-methyluridine-3'-phosphate
  modified_base 11: mod_base = OTHER; note = 2'-O-methyluridine-3'-phosphate
  modified_base 12: mod_base = OTHER; note = 2'-O-methylguanosine-3'-phosphate
  modified_base 13: mod_base = OTHER; note = 2'-O-methyladenosine-3'-phosphate
  modified_base 14: mod_base = OTHER; note = 2'-deoxy-2'-fluoroadenosine-3'-phosphate
  modified_base 15: mod_base = OTHER; note = 2'-O-methylcytidine-3'-phosphate
  modified_base 16: mod_base = OTHER; note = 2'-deoxy-2'-fluorocytidine-3'-phosphate
  modified_base 17: mod_base = OTHER; note = 2'-O-methyladenosine-3'-phosphate
  modified_base 18: mod_base = OTHER; note = 2'-O-methyladenosine-3'-phosphate
  modified_base 19: mod_base = OTHER; note = 2'-O-methylcytidine-3'-phosphate
  modified_base 20: mod_base = OTHER; note = 2'-O-methyladenosine-3'-phosphate
  modified_base 21: mod_base = OTHER; note = 2'-O-methylguanosine-3'-phosphate
  modified_base 22: mod_base = OTHER; note = 2'-O-methyladenosine-3'-phosphate
  modified_base 23: mod_base = OTHER; note = 2'-O-methylguanosine
tattgtcctttgaaccaacagag

SEQ ID NO: 4669 - RNA, 23 nt, synthetic construct
  source 1..23: mol_type = other RNA
  modified_base 1: mod_base = OTHER; note = 2'-O-methyluridine-3'-phosphate 5'-(E)-Vinylphosphonate
  modified_base 2: mod_base = OTHER; note = 2'-deoxy-2'-fluoroadenosine-3'-phosphate
  modified_base 3: mod_base = OTHER; note = 2'-O-methyladenosine-3'-phosphate
  modified_base 4: mod_base = OTHER; note = 2'-O-methyluridine-3'-phosphate
  modified_base 5: mod_base = OTHER; note = 2'-O-methyluridine-3'-phosphate
  modified_base 6: mod_base = OTHER; note = 2'-deoxy-2'-fluoroguanosine-3'-phosphate
  modified_base 7: mod_base = OTHER; note = 2'-O-methyluridine-3'-phosphate
  modified_base 8: mod_base = OTHER; note = 2'-O-methylcytidine-3'-phosphate
  modified_base 9: mod_base = OTHER; note = 2'-O-methylcytidine-3'-phosphate
  modified_base 10: mod_base = OTHER; note = 2'-O-methyluridine-3'-phosphate
  modified_base 11: mod_base = OTHER; note = 2'-O-methyluridine-3'-phosphate
  modified_base 12: mod_base = OTHER; note = 2'-O-methyluridine-3'-phosphate
  modified_base 13: mod_base = OTHER; note = 2'-O-methylguanosine-3'-phosphate
  modified_base 14: mod_base = OTHER; note = 2'-deoxy-2'-fluoroadenosine-3'-phosphate
  modified_base 15: mod_base = OTHER; note = 2'-O-methyladenosine-3'-phosphate
  modified_base 16: mod_base = OTHER; note = 2'-deoxy-2'-fluorocytidine-3'-phosphate
  modified_base 17: mod_base = OTHER; note = 2'-O-methylcytidine-3'-phosphate
  modified_base 18: mod_base = OTHER; note = 2'-O-methyladenosine-3'-phosphate
  modified_base 19: mod_base = OTHER; note = 2'-O-methyladenosine-3'-phosphate
  modified_base 20: mod_base = OTHER; note = 2'-O-methylcytidine-3'-phosphate
  modified_base 21: mod_base = OTHER; note = 2'-O-methyladenosine-3'-phosphate
  modified_base 22: mod_base = OTHER; note = 2'-O-methylguanosine-3'-phosphate
  modified_base 23: mod_base = OTHER; note = 2'-O-methyladenosine
taattgtcctttgaaccaacaga

SEQ ID NO: 4670 - RNA, 23 nt, synthetic construct
  source 1..23: mol_type = other RNA
  modified_base 1: mod_base = OTHER; note = 2'-O-methyluridine-3'-phosphate 5'-(E)-Vinylphosphonate
  modified_base 2: mod_base = OTHER; note = 2'-deoxy-2'-fluorouridine-3'-phosphate
  modified_base 3: mod_base = OTHER; note = 2'-O-methyluridine-3'-phosphate
  modified_base 4: mod_base = OTHER; note = 2'-O-methylguanosine-3'-phosphate
  modified_base 5: mod_base = OTHER; note = 2'-O-methylcytidine-3'-phosphate
  modified_base 6: mod_base = OTHER; note = 2'-deoxy-2'-fluoroadenosine-3'-phosphate
  modified_base 7: mod_base = OTHER; note = 2'-O-methyladenosine-3'-phosphate
  modified_base 8: mod_base = OTHER; note = 2'-O-methyluridine-3'-phosphate
  modified_base 9: mod_base = OTHER; note = 2'-O-methyluridine-3'-phosphate
  modified_base 10: mod_base = OTHER; note = 2'-O-methylguanosine-3'-phosphate
  modified_base 11: mod_base = OTHER; note = 2'-O-methyluridine-3'-phosphate
  modified_base 12: mod_base = OTHER; note = 2'-O-methylcytidine-3'-phosphate
  modified_base 13: mod_base = OTHER; note = 2'-O-methylcytidine-3'-phosphate
  modified_base 14: mod_base = OTHER; note = 2'-deoxy-2'-fluorouridine-3'-phosphate
  modified_base 15: mod_base = OTHER; note = 2'-O-methyluridine-3'-phosphate
  modified_base 16: mod_base = OTHER; note = 2'-deoxy-2'-fluorouridine-3'-phosphate
  modified_base 17: mod_base = OTHER; note = 2'-O-methylguanosine-3'-phosphate
  modified_base 18: mod_base = OTHER; note = 2'-O-methyladenosine-3'-phosphate
  modified_base 19: mod_base = OTHER; note = 2'-O-methyladenosine-3'-phosphate
  modified_base 20: mod_base = OTHER; note = 2'-O-methylcytidine-3'-phosphate
  modified_base 21: mod_base = OTHER; note = 2'-O-methylcytidine-3'-phosphate
  modified_base 22: mod_base = OTHER; note = 2'-O-methyladenosine-3'-phosphate
  modified_base 23: mod_base = OTHER; note = 2'-O-methyladenosine
tttgcaattgtcctttgaaccaa

SEQ ID NO: 4671 - RNA, 23 nt, synthetic construct
  source 1..23: mol_type = other RNA
  modified_base 1: mod_base = OTHER; note = 2'-O-methyluridine-3'-phosphate 5'-(E)-Vinylphosphonate
  modified_base 2: mod_base = OTHER; note = 2'-deoxy-2'-fluorouridine-3'-phosphate
  modified_base 3: mod_base = OTHER; note = 2'-O-methylcytidine-3'-phosphate
  modified_base 4: mod_base = OTHER; note = 2'-O-methylcytidine-3'-phosphate
  modified_base 5: mod_base = OTHER; note = 2'-O-methyluridine-3'-phosphate
  modified_base 6: mod_base = OTHER; note = 2'-deoxy-2'-fluorouridine-3'-phosphate
  modified_base 7: mod_base = OTHER; note = 2'-O-methylguanosine-3'-phosphate
  modified_base 8: mod_base = OTHER; note = 2'-O-methylcytidine-3'-phosphate
  modified_base 9: mod_base = OTHER; note = 2'-O-methyladenosine-3'-phosphate
  modified_base 10: mod_base = OTHER; note = 2'-O-methyladenosine-3'-phosphate
  modified_base 11: mod_base = OTHER; note = 2'-O-methyluridine-3'-phosphate
  modified_base 12: mod_base = OTHER; note = 2'-O-methyluridine-3'-phosphate
  modified_base 13: mod_base = OTHER; note = 2'-O-methylguanosine-3'-phosphate
  modified_base 14: mod_base = OTHER; note = 2'-deoxy-2'-fluorouridine-3'-phosphate
  modified_base 15: mod_base = OTHER; note = 2'-O-methylcytidine-3'-phosphate
  modified_base 16: mod_base = OTHER; note = 2'-deoxy-2'-fluorocytidine-3'-phosphate
  modified_base 17: mod_base = OTHER; note = 2'-O-methyluridine-3'-phosphate
  modified_base 18: mod_base = OTHER; note = 2'-O-methyluridine-3'-phosphate
  modified_base 19: mod_base = OTHER; note = 2'-O-methyluridine-3'-phosphate
  modified_base 20: mod_base = OTHER; note = 2'-O-methylguanosine-3'-phosphate
  modified_base 21: mod_base = OTHER; note = 2'-O-methyladenosine-3'-phosphate
  modified_base 22: mod_base = OTHER; note = 2'-O-methyladenosine-3'-phosphate
  modified_base 23: mod_base = OTHER; note = 2'-O-methylcytidine
ttccttgcaattgtcctttgaac

SEQ ID NO: 4672 - RNA, 23 nt, synthetic construct
  source 1..23: mol_type = other RNA
  modified_base 1: mod_base = OTHER; note = 2'-O-methyluridine-3'-phosphate 5'-(E)-Vinylphosphonate
  modified_base 2: mod_base = OTHER; note = 2'-deoxy-2'-fluoroadenosine-3'-phosphate
  modified_base 3: mod_base = OTHER; note = 2'-O-methyladenosine-3'-phosphate
  modified_base 4: mod_base = OTHER; note = 2'-O-methyladenosine-3'-phosphate
  modified_base 5: mod_base = OTHER; note = 2'-O-methyluridine-3'-phosphate
  modified_base 6: mod_base = OTHER; note = 2'-deoxy-2'-fluorocytidine-3'-phosphate
  modified_base 7: mod_base = OTHER; note = 2'-O-methyluridine-3'-phosphate
  modified_base 8: mod_base = OTHER; note = 2'-O-methyladenosine-3'-phosphate
  modified_base 9: mod_base = OTHER; note = 2'-O-methylcytidine-3'-phosphate
  modified_base 10: mod_base = OTHER; note = 2'-O-methylcytidine-3'-phosphate
  modified_base 11: mod_base = OTHER; note = 2'-O-methyluridine-3'-phosphate
  modified_base 12: mod_base = OTHER; note = 2'-O-methyluridine-3'-phosphate
  modified_base 13: mod_base = OTHER; note = 2'-O-methyluridine-3'-phosphate
  modified_base 14: mod_base = OTHER; note = 2'-deoxy-2'-fluorouridine-3'-phosphate
  modified_base 15: mod_base = OTHER; note = 2'-O-methylcytidine-3'-phosphate
  modified_base 16: mod_base = OTHER; note = 2'-deoxy-2'-fluorocytidine-3'-phosphate
  modified_base 17: mod_base = OTHER; note = 2'-O-methyluridine-3'-phosphate
  modified_base 18: mod_base = OTHER; note = 2'-O-methyladenosine-3'-phosphate
  modified_base 19: mod_base = OTHER; note = 2'-O-methylcytidine-3'-phosphate
  modified_base 20: mod_base = OTHER; note = 2'-O-methyluridine-3'-phosphate
  modified_base 21: mod_base = OTHER; note = 2'-O-methyladenosine-3'-phosphate
  modified_base 22: mod_base = OTHER; note = 2'-O-methyluridine-3'-phosphate
  modified_base 23: mod_base = OTHER; note = 2'-O-methyluridine
taaatctaccttttcctactatt

SEQ ID NO: 4673 - RNA, 23 nt, synthetic construct
  source 1..23: mol_type = other RNA
  modified_base 1: mod_base = OTHER; note = 2'-O-methyluridine-3'-phosphate 5'-(E)-Vinylphosphonate
  modified_base 2: mod_base = OTHER; note = 2'-deoxy-2'-fluoroadenosine-3'-phosphate
  modified_base 3: mod_base = OTHER; note = 2'-O-methylcytidine-3'-phosphate
  modified_base 4: mod_base = OTHER; note = 2'-O-methylcytidine-3'-phosphate
  modified_base 5: mod_base = OTHER; note = 2'-O-methyladenosine-3'-phosphate
  modified_base 6: mod_base = OTHER; note = 2'-deoxy-2'-fluoroadenosine-3'-phosphate
  modified_base 7: mod_base = OTHER; note = 2'-O-methyladenosine-3'-phosphate
  modified_base 8: mod_base = OTHER; note = 2'-O-methyluridine-3'-phosphate
  modified_base 9: mod_base = OTHER; note = 2'-O-methylcytidine-3'-phosphate
  modified_base 10: mod_base = OTHER; note = 2'-O-methyluridine-3'-phosphate
  modified_base 11: mod_base = OTHER; note = 2'-O-methyladenosine-3'-phosphate
  modified_base 12: mod_base = OTHER; note = 2'-O-methylcytidine-3'-phosphate
  modified_base 13: mod_base = OTHER; note = 2'-O-methylcytidine-3'-phosphate
  modified_base 14: mod_base = OTHER; note = 2'-deoxy-2'-fluorouridine-3'-phosphate
  modified_base 15: mod_base = OTHER; note = 2'-O-methyluridine-3'-phosphate
  modified_base 16: mod_base = OTHER; note = 2'-deoxy-2'-fluorouridine-3'-phosphate
  modified_base 17: mod_base = OTHER; note = 2'-O-methyluridine-3'-phosphate
  modified_base 18: mod_base = OTHER; note = 2'-O-methylcytidine-3'-phosphate
  modified_base 19: mod_base = OTHER; note = 2'-O-methylcytidine-3'-phosphate
  modified_base 20: mod_base = OTHER; note = 2'-O-methyluridine-3'-phosphate
  modified_base 21: mod_base = OTHER; note = 2'-O-methyladenosine-3'-phosphate
  modified_base 22: mod_base = OTHER; note = 2'-O-methylcytidine-3'-phosphate
  modified_base 23: mod_base = OTHER; note = 2'-O-methyluridine
taccaaatctaccttttcctact

SEQ ID NO: 4674 - RNA, 23 nt, synthetic construct
  source 1..23: mol_type = other RNA
  modified_base 1: mod_base = OTHER; note = 2'-O-methyluridine-3'-phosphate 5'-(E)-Vinylphosphonate
  modified_base 2: mod_base = OTHER; note = 2'-deoxy-2'-fluoroadenosine-3'-phosphate
  modified_base 3: mod_base = OTHER; note = 2'-O-methyluridine-3'-phosphate
  modified_base 4: mod_base = OTHER; note = 2'-O-methyluridine-3'-phosphate
  modified_base 5: mod_base = OTHER; note = 2'-O-methyluridine-3'-phosphate
  modified_base 6: mod_base = OTHER; note = 2'-deoxy-2'-fluorouridine-3'-phosphate
  modified_base 7: mod_base = OTHER; note = 2'-O-methylcytidine-3'-phosphate
  modified_base 8: mod_base = OTHER; note = 2'-O-methyladenosine-3'-phosphate
  modified_base 9: mod_base = OTHER; note = 2'-O-methylcytidine-3'-phosphate
  modified_base 10: mod_base = OTHER; note = 2'-O-methyladenosine-3'-phosphate
  modified_base 11: mod_base = OTHER; note = 2'-O-methylguanosine-3'-phosphate
  modified_base 12: mod_base = OTHER; note = 2'-O-methylcytidine-3'-phosphate
  modified_base 13: mod_base = OTHER; note = 2'-O-methylcytidine-3'-phosphate
  modified_base 14: mod_base = OTHER; note = 2'-deoxy-2'-fluoroadenosine-3'-phosphate
  modified_base 15: mod_base = OTHER; note = 2'-O-methylcytidine-3'-phosphate
  modified_base 16: mod_base = OTHER; note = 2'-deoxy-2'-fluoroadenosine-3'-phosphate
  modified_base 17: mod_base = OTHER; note = 2'-O-methyluridine-3'-phosphate
  modified_base 18: mod_base = OTHER; note = 2'-O-methylcytidine-3'-phosphate
  modified_base 19: mod_base = OTHER; note = 2'-O-methyluridine-3'-phosphate
  modified_base 20: mod_base = OTHER; note = 2'-O-methyluridine-3'-phosphate
  modified_base 21: mod_base = OTHER; note = 2'-O-methylcytidine-3'-phosphate
  modified_base 22: mod_base = OTHER; note = 2'-O-methylcytidine-3'-phosphate
  modified_base 23: mod_base = OTHER; note = 2'-O-methylcytidine
tattttcacagccacatcttccc

SEQ ID NO: 4675 - RNA, 23 nt, synthetic construct
  source 1..23: mol_type = other RNA
  modified_base 1: mod_base = OTHER; note = 2'-O-methyluridine-3'-phosphate 5'-(E)-Vinylphosphonate
  modified_base 2: mod_base = OTHER; note = 2'-deoxy-2'-fluorouridine-3'-phosphate
  modified_base 3: mod_base = OTHER; note = 2'-O-methyladenosine-3'-phosphate
  modified_base 4: mod_base = OTHER; note = 2'-O-methyluridine-3'-phosphate
  modified_base 5: mod_base = OTHER; note = 2'-O-methyluridine-3'-phosphate
  modified_base 6: mod_base = OTHER; note = 2'-deoxy-2'-fluorouridine-3'-phosphate
  modified_base 7: mod_base = OTHER; note = 2'-O-methyluridine-3'-phosphate
  modified_base 8: mod_base = OTHER; note = 2'-O-methylcytidine-3'-phosphate
  modified_base 9: mod_base = OTHER; note = 2'-O-methyladenosine-3'-phosphate
  modified_base 10: mod_base = OTHER; note = 2'-O-methylcytidine-3'-phosphate
  modified_base 11: mod_base = OTHER; note = 2'-O-methyladenosine-3'-phosphate
  modified_base 12: mod_base = OTHER; note = 2'-O-methylguanosine-3'-phosphate
  modified_base 13: mod_base = OTHER; note = 2'-O-methylcytidine-3'-phosphate
  modified_base 14: mod_base = OTHER; note = 2'-deoxy-2'-fluorocytidine-3'-phosphate
  modified_base 15: mod_base = OTHER; note = 2'-O-methyladenosine-3'-phosphate
  modified_base 16: mod_base = OTHER; note = 2'-deoxy-2'-fluorocytidine-3'-phosphate
  modified_base 17: mod_base = OTHER; note = 2'-O-methyladenosine-3'-phosphate
  modified_base 18: mod_base = OTHER; note = 2'-O-methyluridine-3'-phosphate
  modified_base 19: mod_base = OTHER; note = 2'-O-methylcytidine-3'-phosphate
  modified_base 20: mod_base = OTHER; note = 2'-O-methyluridine-3'-phosphate
  modified_base 21: mod_base = OTHER; note = 2'-O-methyluridine-3'-phosphate
  modified_base 22: mod_base = OTHER; note = 2'-O-methylcytidine-3'-phosphate
  modified_base 23: mod_base = OTHER; note = 2'-O-methylcytidine
ttattttcacagccacatcttcc

SEQ ID NO: 4676 - RNA, 23 nt, synthetic construct
  source 1..23: mol_type = other RNA
  modified_base 1: mod_base = OTHER; note = 2'-O-methyluridine-3'-phosphate 5'-(E)-Vinylphosphonate
  modified_base 2: mod_base = OTHER; note = 2'-deoxy-2'-fluoroadenosine-3'-phosphate
  modified_base 3: mod_base = OTHER; note = 2'-O-methyluridine-3'-phosphate
  modified_base 4: mod_base = OTHER; note = 2'-O-methyladenosine-3'-phosphate
  modified_base 5: mod_base = OTHER; note = 2'-O-methyluridine-3'-phosphate
  modified_base 6: mod_base = OTHER; note = 2'-deoxy-2'-fluorouridine-3'-phosphate
  modified_base 7: mod_base = OTHER; note = 2'-O-methyluridine-3'-phosphate
  modified_base 8: mod_base = OTHER; note = 2'-O-methyluridine-3'-phosphate
  modified_base 9: mod_base = OTHER; note = 2'-O-methylcytidine-3'-phosphate
  modified_base 10: mod_base = OTHER; note = 2'-O-methyladenosine-3'-phosphate
  modified_base 11: mod_base = OTHER; note = 2'-O-methylcytidine-3'-phosphate
  modified_base 12: mod_base = OTHER; note = 2'-O-methyladenosine-3'-phosphate
  modified_base 13: mod_base = OTHER; note = 2'-O-methylguanosine-3'-phosphate
  modified_base 14: mod_base = OTHER; note = 2'-deoxy-2'-fluorocytidine-3'-phosphate
  modified_base 15: mod_base = OTHER; note = 2'-O-methylcytidine-3'-phosphate
  modified_base 16: mod_base = OTHER; note = 2'-deoxy-2'-fluoroadenosine-3'-phosphate
  modified_base 17: mod_base = OTHER; note = 2'-O-methylcytidine-3'-phosphate
  modified_base 18: mod_base = OTHER; note = 2'-O-methyladenosine-3'-phosphate
  modified_base 19: mod_base = OTHER; note = 2'-O-methyluridine-3'-phosphate
  modified_base 20: mod_base = OTHER; note = 2'-O-methylcytidine-3'-phosphate
  modified_base 21: mod_base = OTHER; note = 2'-O-methyluridine-3'-phosphate
  modified_base 22: mod_base = OTHER; note = 2'-O-methyluridine-3'-phosphate
  modified_base 23: mod_base = OTHER; note = 2'-O-methylcytidine
tatattttcacagccacatcttc

SEQ ID NO: 4677 - RNA, 23 nt, synthetic construct
  source 1..23: mol_type = other RNA
  modified_base 1: mod_base = OTHER; note = 2'-O-methyluridine-3'-phosphate 5'-(E)-Vinylphosphonate
  modified_base 2: mod_base = OTHER; note = 2'-deoxy-2'-fluoroadenosine-3'-phosphate
  modified_base 3: mod_base = OTHER; note = 2'-O-methyluridine-3'-phosphate
  modified_base 4: mod_base = OTHER; note = 2'-O-methylcytidine-3'-phosphate
  modified_base 5: mod_base = OTHER; note = 2'-O-methyluridine-3'-phosphate
  modified_base 6: mod_base = OTHER; note = 2'-deoxy-2'-fluorouridine-3'-phosphate
  modified_base 7: mod_base = OTHER; note = 2'-O-methyluridine-3'-phosphate
  modified_base 8: mod_base = OTHER; note = 2'-O-methylcytidine-3'-phosphate
  modified_base 9: mod_base = OTHER; note = 2'-O-methyladenosine-3'-phosphate
  modified_base 10: mod_base = OTHER; note = 2'-O-methyluridine-3'-phosphate
  modified_base 11: mod_base = OTHER; note = 2'-O-methylcytidine-3'-phosphate
  modified_base 12: mod_base = OTHER; note = 2'-O-methyluridine-3'-phosphate
  modified_base 13: mod_base = OTHER; note = 2'-O-methylcytidine-3'-phosphate
  modified_base 14: mod_base = OTHER; note = 2'-deoxy-2'-fluorouridine-3'-phosphate
  modified_base 15: mod_base = OTHER; note = 2'-O-methylguanosine-3'-phosphate
  modified_base 16: mod_base = OTHER; note = 2'-deoxy-2'-fluoroguanosine-3'-phosphate
  modified_base 17: mod_base = OTHER; note = 2'-O-methyladenosine-3'-phosphate
  modified_base 18: mod_base = OTHER; note = 2'-O-methylguanosine-3'-phosphate
  modified_base 19: mod_base = OTHER; note = 2'-O-methylguanosine-3'-phosphate
  modified_base 20: mod_base = OTHER; note = 2'-O-methyladenosine-3'-phosphate
  modified_base 21: mod_base = OTHER; note = 2'-O-methylguanosine-3'-phosphate
  modified_base 22: mod_base = OTHER; note = 2'-O-methyladenosine-3'-phosphate
  modified_base 23: mod_base = OTHER; note = 2'-O-methyladenosine
tatctttcatctctggaggagaa

SEQ ID NO: 4678 - RNA, 23 nt, synthetic construct
  source 1..23: mol_type = other RNA
  modified_base 1: mod_base = OTHER; note = 2'-O-methyluridine-3'-phosphate 5'-(E)-Vinylphosphonate
  modified_base 2: mod_base = OTHER; note = 2'-deoxy-2'-fluoroguanosine-3'-phosphate
  modified_base 3: mod_base = OTHER; note = 2'-O-methyladenosine-3'-phosphate
  modified_base 4: mod_base = OTHER; note = 2'-O-methyluridine-3'-phosphate
  modified_base 5: mod_base = OTHER; note = 2'-O-methylcytidine-3'-phosphate
  modified_base 6: mod_base = OTHER; note = 2'-deoxy-2'-fluorouridine-3'-phosphate
  modified_base 7: mod_base = OTHER; note = 2'-O-methyluridine-3'-phosphate
  modified_base 8: mod_base = OTHER; note = 2'-O-methyluridine-3'-phosphate
  modified_base 9: mod_base = OTHER; note = 2'-O-methylcytidine-3'-phosphate
  modified_base 10: mod_base = OTHER; note = 2'-O-methyladenosine-3'-phosphate
  modified_base 11: mod_base = OTHER; note = 2'-O-methyluridine-3'-phosphate
  modified_base 12: mod_base = OTHER; note = 2'-O-methylcytidine-3'-phosphate
  modified_base 13: mod_base = OTHER; note = 2'-O-methyluridine-3'-phosphate
  modified_base 14: mod_base = OTHER; note = 2'-deoxy-2'-fluorocytidine-3'-phosphate
  modified_base 15: mod_base = OTHER; note = 2'-O-methyluridine-3'-phosphate
  modified_base 16: mod_base = OTHER; note = 2'-deoxy-2'-fluoroguanosine-3'-phosphate
  modified_base 17: mod_base = OTHER; note = 2'-O-methylguanosine-3'-phosphate
  modified_base 18: mod_base = OTHER; note = 2'-O-methyladenosine-3'-phosphate
  modified_base 19: mod_base = OTHER; note = 2'-O-methylguanosine-3'-phosphate
  modified_base 20: mod_base = OTHER; note = 2'-O-methylguanosine-3'-phosphate
  modified_base 21: mod_base = OTHER; note = 2'-O-methyladenosine-3'-phosphate
  modified_base 22: mod_base = OTHER; note = 2'-O-methylguanosine-3'-phosphate
  modified_base 23: mod_base = OTHER; note = 2'-O-methyladenosine
tgatctttcatctctggaggaga

SEQ ID NO: 4679 - RNA, 23 nt, synthetic construct
  source 1..23: mol_type = other RNA
  modified_base 1: mod_base = OTHER; note = 2'-O-methyluridine-3'-phosphate 5'-(E)-Vinylphosphonate
  modified_base 2: mod_base = OTHER; note = 2'-deoxy-2'-fluoroadenosine-3'-phosphate
  modified_base 3: mod_base = OTHER; note = 2'-O-methylguanosine-3'-phosphate
  modified_base 4: mod_base = OTHER; note = 2'-O-methyladenosine-3'-phosphate
  modified_base 5: mod_base = OTHER; note = 2'-O-methyluridine-3'-phosphate
  modified_base 6: mod_base = OTHER; note = 2'-deoxy-2'-fluorocytidine-3'-phosphate
  modified_base 7: mod_base = OTHER; note = 2'-O-methyluridine-3'-phosphate
  modified_base 8: mod_base = OTHER; note = 2'-O-methyluridine-3'-phosphate
  modified_base 9: mod_base = OTHER; note = 2'-O-methyluridine-3'-phosphate
  modified_base 10: mod_base = OTHER; note = 2'-O-methylcytidine-3'-phosphate
  modified_base 11: mod_base = OTHER; note = 2'-O-methyladenosine-3'-phosphate
  modified_base 12: mod_base = OTHER; note = 2'-O-methyluridine-3'-phosphate
  modified_base 13: mod_base = OTHER; note = 2'-O-methylcytidine-3'-phosphate
  modified_base 14: mod_base = OTHER; note = 2'-deoxy-2'-fluorouridine-3'-phosphate
  modified_base 15: mod_base = OTHER; note = 2'-O-methylcytidine-3'-phosphate
  modified_base 16: mod_base = OTHER; note = 2'-deoxy-2'-fluorouridine-3'-phosphate
  modified_base 17: mod_base = OTHER; note = 2'-O-methylguanosine-3'-phosphate
  modified_base 18: mod_base = OTHER; note = 2'-O-methylguanosine-3'-phosphate
  modified_base 19: mod_base = OTHER; note = 2'-O-methyladenosine-3'-phosphate
  modified_base 20: mod_base = OTHER; note = 2'-O-methylguanosine-3'-phosphate
  modified_base 21: mod_base = OTHER; note = 2'-O-methylguanosine-3'-phosphate
  modified_base 22: mod_base = OTHER; note = 2'-O-methyladenosine-3'-phosphate
  modified_base 23: mod_base = OTHER; note = 2'-O-methylguanosine
tagatctttcatctctggaggag

SEQ ID NO: 4680 - RNA, 23 nt, synthetic construct
  source 1..23: mol_type = other RNA
  modified_base 1: mod_base = OTHER; note = 2'-O-methyluridine-3'-phosphate 5'-(E)-Vinylphosphonate
  modified_base 2: mod_base = OTHER; note = 2'-deoxy-2'-fluoroadenosine-3'-phosphate
  modified_base 3: mod_base = OTHER; note = 2'-O-methyladenosine-3'-phosphate
  modified_base 4: mod_base = OTHER; note = 2'-O-methylguanosine-3'-phosphate
  modified_base 5: mod_base = OTHER; note = 2'-O-methyladenosine-3'-phosphate
  modified_base 6: mod_base = OTHER; note = 2'-deoxy-2'-fluorouridine-3'-phosphate
  modified_base 7: mod_base = OTHER; note = 2'-O-methylcytidine-3'-phosphate
  modified_base 8: mod_base = OTHER; note = 2'-O-methyluridine-3'-phosphate
  modified_base 9: mod_base = OTHER; note = 2'-O-methyluridine-3'-phosphate
  modified_base 10: mod_base = OTHER; note = 2'-O-methyluridine-3'-phosphate
  modified_base 11: mod_base = OTHER; note = 2'-O-methylcytidine-3'-phosphate
  modified_base 12: mod_base = OTHER; note = 2'-O-methyladenosine-3'-phosphate
  modified_base 13: mod_base = OTHER; note = 2'-O-methyluridine-3'-phosphate
  modified_base 14: mod_base = OTHER; note = 2'-deoxy-2'-fluorocytidine-3'-phosphate
  modified_base 15: mod_base = OTHER; note = 2'-O-methyluridine-3'-phosphate
  modified_base 16: mod_base = OTHER; note = 2'-deoxy-2'-fluorocytidine-3'-phosphate
  modified_base 17: mod_base = OTHER; note = 2'-O-methyluridine-3'-phosphate
  modified_base 18: mod_base = OTHER; note = 2'-O-methylguanosine-3'-phosphate
  modified_base 19: mod_base = OTHER; note = 2'-O-methylguanosine-3'-phosphate
  modified_base 20: mod_base = OTHER; note = 2'-O-methyladenosine-3'-phosphate
  modified_base 21: mod_base = OTHER; note = 2'-O-methylguanosine-3'-phosphate
  modified_base 22: mod_base = OTHER; note = 2'-O-methylguanosine-3'-phosphate
  modified_base 23: mod_base = OTHER; note = 2'-O-methyladenosine
taagatctttcatctctggagga

SEQ ID NO: 4681 - RNA, 23 nt, synthetic construct
  source 1..23: mol_type = other RNA
  modified_base 1: mod_base = OTHER; note = 2'-O-methyluridine-3'-phosphate 5'-(E)-Vinylphosphonate
  modified_base 2: mod_base = OTHER; note = 2'-deoxy-2'-fluorocytidine-3'-phosphate
  modified_base 3: mod_base = OTHER; note = 2'-O-methyladenosine-3'-phosphate
  modified_base 4: mod_base = OTHER; note = 2'-O-methyladenosine-3'-phosphate
  modified_base 5: mod_base = OTHER; note = 2'-O-methylguanosine-3'-phosphate
  modified_base 6: mod_base = OTHER; note = 2'-deoxy-2'-fluoroadenosine-3'-phosphate
  modified_base 7: mod_base = OTHER; note = 2'-O-methyluridine-3'-phosphate
  modified_base 8: mod_base = OTHER; note = 2'-O-methylcytidine-3'-phosphate
  modified_base 9: mod_base = OTHER; note = 2'-O-methyluridine-3'-phosphate
  modified_base 10: mod_base = OTHER; note = 2'-O-methyluridine-3'-phosphate
  modified_base 11: mod_base = OTHER; note = 2'-O-methyluridine-3'-phosphate
  modified_base 12: mod_base = OTHER; note = 2'-O-methylcytidine-3'-phosphate
  modified_base 13: mod_base = OTHER; note = 2'-O-methyladenosine-3'-phosphate
  modified_base 14: mod_base = OTHER; note = 2'-deoxy-2'-fluorouridine-3'-phosphate
  modified_base 15: mod_base = OTHER; note = 2'-O-methylcytidine-3'-phosphate
  modified_base 16: mod_base = OTHER; note = 2'-deoxy-2'-fluorouridine-3'-phosphate
  modified_base 17: mod_base = OTHER; note = 2'-O-methylcytidine-3'-phosphate
  modified_base 18: mod_base = OTHER; note = 2'-O-methyluridine-3'-phosphate
  modified_base 19: mod_base = OTHER; note = 2'-O-methylguanosine-3'-phosphate
  modified_base 20: mod_base = OTHER; note = 2'-O-methylguanosine-3'-phosphate
  modified_base 21: mod_base = OTHER; note = 2'-O-methyladenosine-3'-phosphate
  modified_base 22: mod_base = OTHER; note = 2'-O-methylguanosine-3'-phosphate
  modified_base 23: mod_base = OTHER; note = 2'-O-methylguanosine
tcaagatctttcatctctggagg

SEQ ID NO: 4682 - RNA, 23 nt, synthetic construct
  source 1..23: mol_type = other RNA
  modified_base 1: mod_base = OTHER; note = 2'-O-methyluridine-3'-phosphate 5'-(E)-Vinylphosphonate
  modified_base 2: mod_base = OTHER; note = 2'-deoxy-2'-fluorocytidine-3'-phosphate
  modified_base 3: mod_base = OTHER; note = 2'-O-methylcytidine-3'-phosphate
  modified_base 4: mod_base = OTHER; note = 2'-O-methyladenosine-3'-phosphate
  modified_base 5: mod_base = OTHER; note = 2'-O-methyladenosine-3'-phosphate
  modified_base 6: mod_base = OTHER; note = 2'-deoxy-2'-fluoroguanosine-3'-phosphate
  modified_base 7: mod_base = OTHER; note = 2'-O-methyladenosine-3'-phosphate
  modified_base 8: mod_base = OTHER; note = 2'-O-methyluridine-3'-phosphate
  modified_base 9: mod_base = OTHER; note = 2'-O-methylcytidine-3'-phosphate
  modified_base 10: mod_base = OTHER; note = 2'-O-methyluridine-3'-phosphate
  modified_base 11: mod_base = OTHER; note = 2'-O-methyluridine-3'-phosphate
  modified_base 12: mod_base = OTHER; note = 2'-O-methyluridine-3'-phosphate
  modified_base 13: mod_base = OTHER; note = 2'-O-methylcytidine-3'-phosphate
  modified_base 14: mod_base = OTHER; note = 2'-deoxy-2'-fluoroadenosine-3'-phosphate
  modified_base 15: mod_base = OTHER; note = 2'-O-methyluridine-3'-phosphate
  modified_base 16: mod_base = OTHER; note = 2'-deoxy-2'-fluorocytidine-3'-phosphate
  modified_base 17: mod_base = OTHER; note = 2'-O-methyluridine-3'-phosphate
  modified_base 18: mod_base = OTHER; note = 2'-O-methylcytidine-3'-phosphate
  modified_base 19: mod_base = OTHER; note = 2'-O-methyluridine-3'-phosphate
  modified_base 20: mod_base = OTHER; note = 2'-O-methylguanosine-3'-phosphate
  modified_base 21: mod_base = OTHER; note = 2'-O-methylguanosine-3'-phosphate
  modified_base 22: mod_base = OTHER; note = 2'-O-methyladenosine-3'-phosphate
  modified_base 23: mod_base = OTHER; note = 2'-O-methylguanosine
tccaagatctttcatctctggag

SEQ ID NO: 4683 - RNA, 23 nt, synthetic construct
  source 1..23: mol_type = other RNA
  modified_base 1: mod_base = OTHER; note = 2'-O-methyluridine-3'-phosphate 5'-(E)-Vinylphosphonate
  modified_base 2: mod_base = OTHER; note = 2'-deoxy-2'-fluoroadenosine-3'-phosphate
  modified_base 3: mod_base = OTHER; note = 2'-O-methyladenosine-3'-phosphate
  modified_base 4: mod_base = OTHER; note = 2'-O-methylcytidine-3'-phosphate
  modified_base 5: mod_base = OTHER; note = 2'-O-methylcytidine-3'-phosphate
  modified_base 6: mod_base = OTHER; note = 2'-deoxy-2'-fluoroadenosine-3'-phosphate
  modified_base 7: mod_base = OTHER; note = 2'-O-methyladenosine-3'-phosphate
  modified_base 8: mod_base = OTHER; note = 2'-O-methylguanosine-3'-phosphate
  modified_base 9: mod_base = OTHER; note = 2'-O-methyladenosine-3'-phosphate
  modified_base 10: mod_base = OTHER; note = 2'-O-methyluridine-3'-phosphate
  modified_base 11: mod_base = OTHER; note = 2'-O-methylcytidine-3'-phosphate
  modified_base 12: mod_base = OTHER; note = 2'-O-methyluridine-3'-phosphate
  modified_base 13: mod_base = OTHER; note = 2'-O-methyluridine-3'-phosphate
  modified_base 14: mod_base = OTHER; note = 2'-deoxy-2'-fluorouridine-3'-phosphate
  modified_base 15: mod_base = OTHER; note = 2'-O-methylcytidine-3'-phosphate
  modified_base 16: mod_base = OTHER; note = 2'-deoxy-2'-fluoroadenosine-3'-phosphate
  modified_base 17: mod_base = OTHER; note = 2'-O-methyluridine-3'-phosphate
  modified_base 18: mod_base = OTHER; note = 2'-O-methylcytidine-3'-phosphate
  modified_base 19: mod_base = OTHER; note = 2'-O-methyluridine-3'-phosphate
  modified_base 20: mod_base = OTHER; note = 2'-O-methylcytidine-3'-phosphate
  modified_base 21: mod_base = OTHER; note = 2'-O-methyluridine-3'-phosphate
  modified_base 22: mod_base = OTHER; note = 2'-O-methylguanosine-3'-phosphate
  modified_base 23: mod_base = OTHER; note = 2'-O-methylguanosine
taaccaagatctttcatctctgg

SEQ ID NO: 4684 - RNA, 23 nt, synthetic construct
  source 1..23: mol_type = other RNA
  modified_base 1: mod_base = OTHER; note = 2'-O-methyluridine-3'-phosphate 5'-(E)-Vinylphosphonate
  modified_base 2: mod_base = OTHER; note = 2'-deoxy-2'-fluoroadenosine-3'-phosphate
  modified_base 3: mod_base = OTHER; note = 2'-O-methyladenosine-3'-phosphate
  modified_base 4: mod_base = OTHER; note = 2'-O-methyladenosine-3'-phosphate
  modified_base 5: mod_base = OTHER; note = 2'-O-methylcytidine-3'-phosphate
  modified_base 6: mod_base = OTHER; note = 2'-deoxy-2'-fluorocytidine-3'-phosphate
  modified_base 7: mod_base = OTHER; note = 2'-O-methyladenosine-3'-phosphate
  modified_base 8: mod_base = OTHER; note = 2'-O-methyladenosine-3'-phosphate
  modified_base 9: mod_base = OTHER; note = 2'-O-methylguanosine-3'-phosphate
  modified_base 10: mod_base = OTHER; note = 2'-O-methyladenosine-3'-phosphate
  modified_base 11: mod_base = OTHER; note = 2'-O-methyluridine-3'-phosphate
  modified_base 12: mod_base = OTHER; note = 2'-O-methylcytidine-3'-phosphate
  modified_base 13: mod_base = OTHER; note = 2'-O-methyluridine-3'-phosphate
  modified_base 14: mod_base = OTHER; note = 2'-deoxy-2'-fluorouridine-3'-phosphate
  modified_base 15: mod_base = OTHER; note = 2'-O-methyluridine-3'-phosphate
  modified_base 16: mod_base = OTHER; note = 2'-deoxy-2'-fluorocytidine-3'-phosphate
  modified_base 17: mod_base = OTHER; note = 2'-O-methyladenosine-3'-phosphate
  modified_base 18: mod_base = OTHER; note = 2'-O-methyluridine-3'-phosphate
  modified_base 19: mod_base = OTHER; note = 2'-O-methylcytidine-3'-phosphate
  modified_base 20: mod_base = OTHER; note = 2'-O-methyluridine-3'-phosphate
  modified_base 21: mod_base = OTHER; note = 2'-O-methylcytidine-3'-phosphate
  modified_base 22: mod_base = OTHER; note = 2'-O-methyluridine-3'-phosphate
  modified_base 23: mod_base = OTHER; note = 2'-O-methylguanosine
taaaccaagatctttcatctctg

SEQ ID NO: 4685 - RNA, 23 nt, synthetic construct
  source 1..23: mol_type = other RNA
  modified_base 1: mod_base = OTHER; note = 2'-O-methyluridine-3'-phosphate 5'-(E)-Vinylphosphonate
  modified_base 2: mod_base = OTHER; note = 2'-deoxy-2'-fluoroadenosine-3'-phosphate
  modified_base 3: mod_base = OTHER; note = 2'-O-methylcytidine-3'-phosphate
  modified_base 4: mod_base = OTHER; note = 2'-O-methylguanosine-3'-phosphate
  modified_base 5: mod_base = OTHER; note = 2'-O-methyladenosine-3'-phosphate
  modified_base 6: mod_base = OTHER; note = 2'-deoxy-2'-fluoroadenosine-3'-phosphate
  modified_base 7: mod_base = OTHER; note = 2'-O-methyladenosine-3'-phosphate
  modified_base 8: mod_base = OTHER; note = 2'-O-methylcytidine-3'-phosphate
  modified_base 9: mod_base = OTHER; note = 2'-O-methylcytidine-3'-phosphate
  modified_base 10: mod_base = OTHER; note = 2'-O-methyladenosine-3'-phosphate
  modified_base 11: mod_base = OTHER; note = 2'-O-methyladenosine-3'-phosphate
  modified_base 12: mod_base = OTHER; note = 2'-O-methylguanosine-3'-phosphate
  modified_base 13: mod_base = OTHER; note = 2'-O-methyladenosine-3'-phosphate
  modified_base 14: mod_base = OTHER; note = 2'-deoxy-2'-fluorouridine-3'-phosphate
  modified_base 15: mod_base = OTHER; note = 2'-O-methylcytidine-3'-phosphate
  modified_base 16: mod_base = OTHER; note = 2'-deoxy-2'-fluorouridine-3'-phosphate
  modified_base 17: mod_base = OTHER; note = 2'-O-methyluridine-3'-phosphate
  modified_base 18: mod_base = OTHER; note = 2'-O-methyluridine-3'-phosphate
  modified_base 19: mod_base = OTHER; note = 2'-O-methylcytidine-3'-phosphate
  modified_base 20: mod_base = OTHER; note = 2'-O-methyladenosine-3'-phosphate
  modified_base 21: mod_base = OTHER; note = 2'-O-methyluridine-3'-phosphate
  modified_base 22: mod_base = OTHER; note = 2'-O-methylcytidine-3'-phosphate
  modified_base 23: mod_base = OTHER; note = 2'-O-methyluridine
tacgaaaccaagatctttcatct

(The sequence listing continues in the following parts.)